United States Patent Application Publication US 2026/0103690 A1 - sequence listing, part 47

SEQ ID NO: 224229 - protein, 368 aa, unidentified
MKMNAIKAAPAASAIALKNEKSAKAKRILIGTDVHLRGYQAARKVDNGVIGVVENFRSEEALLLHVEKQCERAEQVVVVYEAGPLGYTLYRKLTARGVLCYVCAPDSSEQKRKRRKNNKIDARNLTSKLFNYLNGDEGALQLARVPTEAQEQLRLASREHDQMVEERKRLGAKGNALLLSQGFGSWSNWWRPKAWAQLSSLVPEWLLERLKIWVDVLKMLDEKICLAKVALARACSGPRPKGVGALSQIQLQSEVLDWSLYTNRRKIACLAGMVPSEWSTGDKERRGSITKVGVPAIRRIIVEMVWRIVLFQPQYKPVQKWQKVLQGTNPALKKKAVVAIGRQLIVDLWRLQTGRVTVQELNLVMVGA

SEQ ID NO: 224230 - protein, 345 aa, unidentified
MERYIGLDVHAASCTIAVISQAGKRLKDFPVETNGQALVEAIRMIPGHKHLVMEEGLQSAWLYETLSPHVDEIVVTGVTESRGHKSDNRDAYGVAEKLRVGDLDKPIFKAPRQFTRLRELSRIHMTLVGDVVRGQSRIKSLYRSRGILVSGVNVYGVRYREQWQKQLCPSAQMRATRLYDHLDFLLEQKKQAEADLLREAKKHAIIRVLETAPGFGPIRAARLVPIVVTPHRFRTKRQFWSYCGLGIVTRSSSDWVQAADGGWIKARVPQTRGLSRQHNHFLKSIFKGAATTVITQCGKDPIHARYERLLDGGTKPTLAKLSLARMIAATVLRMWKDEEEYDPGR

SEQ ID NO: 224231 - protein, 453 aa, unidentified
MARKHKKDSKANNAMLPVMRPDAGGIDIGATEIFVAVPADRAAENVRSFPTFTQDLYALADWLKQCGVKTVAMESTGVYWIPLFQILEDRGLEVCLVNARHVKNVPGRRTDVCDCQWLQFLHSVGLLRASYRPEQEVCAIRSLLRHRESLVQMAATHVHHMQKALDQMNLQLHHVISDVTGQTGLAIVEAILAGERNPYVLAKLRHDRIKASEAVIAKSLVGDYRPEHLFTLRQSLVAYHHYGKLIDDCEREIRRFLEEFKPPHLPDAFQGESQKAQPPTASTDGVLRSELRRVFGIDLTKIPGIRIGIAQTLFGEIGPDFTKFRSASAFASWMGLCPDNEISGGKVLGVGTRKVKCRAATALRMAAQSLHHSKSALGDFYRRMRAKLGAPKAITAAAHKLARIIFHLVTTGQEFDDSRFAADQLRHQKRQEAKLRAKAKALGFQLIPIEQTG

SEQ ID NO: 224232 - protein, 383 aa, unidentified
MAKRAPANKKDKTTTATAVGHMVGIDPHKLSLSAAVVDERGGMVAVEHFKMSGAGHRAMEAWALSFGPVARWGVEGASGLGRHTATYLVGRGHDVRDCCATRTAERARRRRQGKTDALDAERIARETLADPEMPVAFKRAPGDAGPDETTELMSLWHNARRSLLKSRQHLLNEAEALLLALPEAVRADLPTTKAVRPRLEELARRDRGAAWDALTTVRLQLLDDHTAAVAELDAKEKEVTAKLHALVAEAGSTLDELCGLSTRSAAELLVEVGDPRRFTEGGFARFNGTAPLPASSGEGPGEPVRHRLNRGGNRRVNAVLHRMAVTQRRCDPRAQKLFDDARRGHTKKEAMRILKRHLSNVVWKRMMRDFNTVAAAGSLGVAA

SEQ ID NO: 224233 - protein, 341 aa, unidentified
MTEIYAGLDVSDTTTHICAVDRDGKVAWRGVCASDPESLASALKAHCPELVRVALETGTLSSFLYHGLVERGVPAVCVCARHAKGVLSVQVNKSDVHDAEGLAQMARTGWYKAVHMKDSQTHLDRARLKMREQMVQAHNAMVNQMRGLLKLFGLRLGGSTTPGMRNRRLEALFRQKPELRDIFAPLVASLTTLETQIKAISLTIKKRAQFDSVCERLMTVPGVGPITAMTYICSIEDPKRFARSCDAGAYAVLAPRRFQSGERDTKGRISKAGDRNLRHALYEAANNLLSRVKRPFALQTWGKVLAVSKGGKRARVAVARKLAALLHKLWLSDERFDWEAA

SEQ ID NO: 224234 - protein, 360 aa, unidentified
MTKVAENAARGKDIFCGIDLHQHKMLAAVAVDRGKPVFAEYDTDMESGVLALSERLHGLAREYGGRVWVTYEASGCGFLLADVMMAEGFETSVLAPTRLPMTSKSRSRKTDKQDALRLLEVLRGHVLAGNDLPSVWIPPGRVRDDRELVRRRLDLKEKETQVKNQIHGLLRRYGIKKPSGLKTCWTKRYRQWLSHTLNFLAPGAERTLASLIRELDYWESERAAVDRELAALAGRSDYRPQVAALTALKGVGVLTALVYLTELGDLSRFPNRRALASYLGLTPRSYESGEQDDRKGHISKQGPARVRKVLNQAAWAYVRWNLKERSWFRRRTPGGKNKKKMITAEMRRLAIVMWHAALAA

SEQ ID NO: 224235 - protein, 447 aa, unidentified
MLRRTVGIDLAISGAQVAQIFDDGQPVGRPMRFRLNSTDLQGFVQTVTSGVPAGTPIEAVMEPTGMAWFPIAAWLQRGGVKVIRVKGQRVKALRQYLSEHAKTDVADAQVLGSIPGFGGRALDPVHVPSPDHHALQRLTKQRHRYQDAICSSRRRVLDLIRWACPALEAVLPDTMTKLSLAILNELFDPRQVLAMRRDALRRFIATNANGNHPHSGPFVEEMIDGLKGAARETIALQGAQVDFEALQFEVQQEVTLMRLLDRNVHELERRTETIYERVHPSNVLRSVPGIGPALAPLLIGVIAASSRFRNERHLRGFCGLFPTKNASAGVDRPGQRITKSGSDRIKRALYLAADVARKIDPDLAAVYFRLMVRKGHHHKQALCAVATRLVNRIHRVLKTGEPYVLRGPDGKPISMPAAKELVRTRFSVPEEIRSSRRRHVEGVLAPS

SEQ ID NO: 224236 - protein, 313 aa, unidentified
MEQTTVKTSVGIDVCAASLDVWVHPAGVTQRFMNDTAGVAALIAWLGSWPGCVVALEATGGLECLAVRGLQGARIAVSVVNPERIWAWRKVIGQPAKNDRLDARAIAQFAACVQTRVSVPEVHPELKQLLRRREQFSRMLADEKKRVRRAGDYPAVRKSYATHIAMLTRDIAALTRALRAAIRKDTGLHTRFKLLKTVPGVGEITAMTLLIELPELGTLEPKPIVALAGLAPHVNESGTWKGKASLRGGRAQVRAKLFMAASSATRCNPVLKAYCQQLLDRHKHWKSAITATMRKLLIILNAILATNTSWKTT

SEQ ID NO: 224237 - protein, 351 aa, unidentified
MTRKTDAVVASTIGIDTGKNTLHLIGLDDKGAIVLREKLARGRIAARLANVPKCLIGIEAGMATHCVARELIALGHKVKQVPPVYARPFRQGHKNDFRDAHAVAEAVQRPSTRCVPVKTDDQLDLQALHGVRSRLISERTAVINQIRGFLLEHGIPVRQGLRFLRQQLPDILAKRIDILSSRIIRIIEDLSGDWRRLDERIENVTEEIEELAHGTEGCRQLMTVPGIGPIIASAMVAAIGSGTAFARGRDFAAWLGLVPKQMSTGDRTILGRISKRGNRYLRTLFMQGARVILLRPANWAKHSFGPWLAAAAKRLHHNVLATAVANKLARIAWTVLVQARSYETRVTSEMA

SEQ ID NO: 224238 - protein, 428 aa, unidentified
MRQVALDVHQGFCEVAIREDGKTRSAGRVATDREALGLFAASLGPRDEVVMEATGPAMEVARIIAPHVARVVVANAQDVRAISHARVKSDRFDARSLADLLAAGMLESVWVPDAETSALRRRVARRAALVRQRTRAKNEVHATLARCLLGRSPVSDLFGKDGRAWLAEQRFGEEEAETVAGCLRQIDFLDHEVAQIDRKLAGWAVCSEDAKRLMSIPGVGVGVAVTLMAAIGDISRFGSSRQLVAYLGLDPKVRQSGDHPPRHGRISKRGNNQARSALVEAAWVAIRQPGPLRAFGERVRERKGPQIAAVAVARKLACLAWQLLTKQEDYAFAAPSKVRGKIRRAERDAGAPALPTRHRGQRISANTAEKRSERELVERAELAYRRLITDWKAAGPAKEGAGATHGRAPSRPSKRQAARQTTAQEPAL

SEQ ID NO: 224239 - protein, 438 aa, unidentified
MSSERRNDEPTFAAYLALDWADRKHVWALRAAGSEQVECGELEHTPEAVAIWAAGLAERFHGPIAVALEQARGALLFLLTKYAQLVLFPVHPGTLANYRAAFYPSGAKDDPSDARLLLDLLLHHRDRLRPWQPDTVETRTLQFLVEKRRRLVDEKRRQTQRLGDELKLYFPQVRDWFEKLDSPLVGQLLQRWPTIEHLRKVRPATLRSFFHRQNCRSAELIEKRIEQIARAVPATVDQAVIQSSTPVVQVLVRVIATLRDGIADVDRQIDRLFTTHPEFSLFKSFPGAGPALAPRLLAALGTQRERYGSASEIHCHSGIAPVLQRSGKTEFIHFRRACPKFLRQTFHEWAGHTIDQSAWAREFYDRQRAQGKSHQAVLRALAFKWIRILYRCWKDRTPYDEARYLHALQRRRLPKPDPTAAFHWQQSGGFFKFVGVSS

SEQ ID NO: 224240 - protein, 345 aa, unidentified
MHYVGVDYHKKSSYVTVMDERGKVVKEGQVANTQEALAAFLDGRAEGASAVLEAGRNWPVMYDWLEELVDEVTLAHPAKVRVIAEAKVKTDRVDSRMLAHLLRADLIPAAYVPGAVTREQRRRLRQRMFLVRLSTMVKNRVHTLVDRHPELSRQAGGWSDLFGKAGRAWLEQLELPASELHLLRTDLDLLEAIQGHIKSSNRWVSELARKDLRAQLLATLPGIGDFFAVLLAVEIDDVGRFLRPEKLAAYAGLVPSTYASGGYTHHGRITKRGNKWIRWACIEAVHPATRQDPALAALYQRLKATKGANVAKVAVAKRLLTIAYRVLSEGRPYRPAEEQAALKRR

SEQ ID NO: 224241 - protein, 348 aa, unidentified
MIIIGVDFHPEFQQIASVDTETGEFQEKRLAHREDAETFYRALAGQKVRVGMEASGHARWFERLLAELQFELWIGDAAEIQSKRVRKQKTDRQDAQLILRLMLKDDFPQIWVPSWENRDLRQLLWHRHRMVQVRTRIMNQLQALALNEGLRCKKRLWREHGRRQLESFRLAPWASRRRRDLLELLDRLNPTIAELSQAIEQEAEKCPEAQRLMTHPGVGPLTALAFVLIIGKAERFQCGKQIASYLGLVPLEKSSGNRRRLGHITKQGSSMVRFLLVEAAQVTVRTDPDWRRRFLHLAMRRERRIAKVAMARKLAVRLYWMWRKEWDYEQMRKFGSHVGEPVHRQGAS

SEQ ID NO: 224242 - protein, 328 aa, unidentified
MYYTGIDQHKRTSYLTTVDSKGIIIQQANLKNTCHDILNYFNSIKGKHQATVETTVGWYWMSDLLESQNIPLLLAHAKYVKAIAYAKVKTDKVDSQILAQLLRMNFIPEAHKIPNHMRPLRDTLRARLRLSQKRTSSINFMHRMLEKFNVNDSSELDEYYLLQYQQFDQQEKFLKKQMLILEKSLYPKLIPDEDIQRILWIPGIGKMNAFTLHLEIGNINRFPSVNNFFSYCRLVPAASNSGGKSKQRSSKDGNKYLKIVFSDAAVHAVQYYPVIKKYYNSLLRKKNKQIAKSIIAKEIARIVYYVLKTKENYNNKSIQWQRVLSPDV

SEQ ID NO: 224243 - protein, 318 aa, unidentified
MNTNTLQNINVGVDTGKSQLDIYIRPLDIYFNVSNDEKGIKQAIKTIKKYHPERIVIEATGRLEIPFILACDNAKLPYVIANPLHIKKFSGALGHRAKNDRLDAALIAHYAEAIKPKLTQLKSENIRLMSDLVTRRNQLLTMQTMEKNRSQIMPKSVASSIKSLLTMLKKQIENIETRIEKLIETCPDYQAKNELLQSVPGIGKIAAASIISNVPELGYITNKQAASLIGVAPITRESGSYKGKRMIKGGRMQVRTVLYMAMMSAMQCNPVFKQHYQKLLVAGKPKKVAIIACVRKMVVILNSMLRDGCMWDANSATN

SEQ ID NO: 224244 - protein, 362 aa, unidentified
MEVPSLFLHYSEQFIRHEKPVSRLLEIVDPFFPNIYVMDKYTNYYGIDISKDFFDVMDQHGYYRQFKNNKDGFKTFLKYLKQDSCCVMEATGVYHIQLANVLYEKGVFVSVVNPLIIKRFIQMNLRRIKTDKADAELICKYAQQNALKRFKPELEYVKESKIILENINLLLKSRTMFKNRLHAMDHKSSKHRNVLIKPLTRTIRDLTNQIQIMETELQRLIEENEPALLTRLQTIPGIGKSTAMFMIVMSDGFKKFESAKQFICFIGLSPVEKRSGSSVRGTGSISKQGDGKLRNLLFMCSFNACKSNKSCKDLYERIVAKGKSKKLALIAVANKLIKQSFAIAESGLVYDQDHRSVNPGLK

SEQ ID NO: 224245 - protein, 429 aa, unidentified
MNYNTQNAKIPSITEKTLIIGIDVGSETHYARAFSWRNYEYSKKPFAFSNDEAGFAAFKEWMDDIVEKHGMEVIIPGMESTGHYWLNLGAYLQEQGMKPVHVNPHHVKKSKELDDNNPSKNDRKDPKTIAGLVNEGRFSYPYIPTGIYAEIRNLSNLRIQTQEEITRIKNRMARWFSIYFPEIKDVYRNPDAVSGLMVIKQAPLPCDIRELGVEGVNKIWRYARLKGAGIKRATTLVTAAEHSIGNTEAPRSARKEIRNLLEDYEGYKKRMDELMEEIEKTLSEIPYIDKLMEINGIGIKTVSCFIAEVGDIGRFDNPKQVQKLAGYAIVADSSGKHNGESRISHRGRKRLRYALYEAAISVIGKNKEFKEIHSYYRTREKNPLKKMQSVIAVACKLIRIFYTILTKGVDYDGQKMLNDIVRPEIQPAA

SEQ ID NO: 224246 - protein, 351 aa, unidentified
MPRATSSTNLIATIGIDIGKNTFHAIGLDDKGAIILRHKLSRGQVYARLANIPPCLIGMEACVGAHHLGRQLSALGHDTRLMPARYVRPYSKGQKNDFRDAEAIAEAVQRPTMKFVAIKTVEQLDLQGLHRIRERLVCQRTSVINQIRAFLLERGIAIRQGLRTLRTEMPIVLAKTDKLSQRMIHMIEDLCTDWRHLDRRIATVSKEIETLSEQDDGAKRLMTVPGIGPIISTATVAAIGTGEVFSKGRDFGAWLGLVPKQMSTGGRTILGPISKRGNRYLRMLFVQAARAVLLRPQSWEKHGLKLWIEAAARRLNRFKLAIALANKIARIAWGVLHGGRNFEVRPMNQAA

SEQ ID NO: 224247 - protein, 356 aa, unidentified
MLNDTKYIGLDVHQATISVVVLDGTGHLVMESVIETKAATILQLLHGLSGSLHVTFEEGTCAAWLHDLLKPHVAKVVVCDPRKNALLKAGNKNDRIDARKLADLLRSGLLSAVYHGENGVRTLKELARSYLTLTRDTTRVMNRLKALYRSWAIPCAGQKVYAPRYRNQWLAKITEGGVRRRAEFSYQQLDALQTLRQQVRRDLLAESRKHGAMKLLRQIPSIGPIRAALLIALMQTPHRFRTKRQLWAYCGLALKTSTSGEYRFVEGQLKRSKKFLAIRGLNTNHNHDLKNIFKGAATRAAAVPGPFQEFHAALVAKGMKPTMARLTLARKIAAITLIVWKKGVGFDAEHLKQQAA

SEQ ID NO: 224248 - protein, 318 aa, unidentified
MSQPNQQCIGIDVAKLSLDIAGTTEFSPLSASNDEDGFMSILNVLKEWEISLVLMEATGGLEASVACCLQAAGYEVVVINPRQARDFARSMGYLAKTDKLDAAMLAQLAQIIDRHPDRSRYIRALPDEVRAVLTAMVIRRRQLNNMLVAERNRRYPSHPQSRKSIDNIINALESELDHISQEMKQHVKVFLMKQAELIGSVKGVGEVTVASLIAELPELGKLNRREISALTGVAPLNRDSGKMRGRRTTFGGRAGVRATLYMAALVATQFNPAIKMFYQRLLTVGKPKKLALVACMRKLITILNTMVRKGEKWDASFR

SEQ ID NO: 224249 - protein, 430 aa, unidentified
MKSNTQNAKIEAITEKTLVLGIDVGSETHYARAFDYRGIEYSKKPFKFSNTEAGFATFKEWVLDLKERHEKDKVVPGMEPTGHYWFNLGKFLQDNEMKPVLVNPHHVKKSKELDDNNPTKNDRKDPKVIAGLVREGRYMIPYLPDGVYADLRTASNIRFQLQAELTRIQNRISRWFNIYFPEYKTVYGKPDAKSGMLILKAAPLPEDILTLGIDGVNQIWRDAKLRAVGRARAKTLIEAAEHSVGSKEGAMSARMEIRMLLEDYESRNTRLQEVMVLIEELVRKIPMAEKLLEIKGVGIRTVSGFLAEVGDISRFNNPKELQKLAGLALVENSSGKHKGETTISRRGRKRLRYLLFEVAMSLVSKNQEFRELHNYYTTRRLNPLKKMQSLMAIAAKLIRVFYAMLTKGVDYDPKKMVSDIKRPAVYLQAA

SEQ ID NO: 224250 - protein, 479 aa, unidentified
MPQLHKKSKLYSAPARLFGKSKGGKKKQIRKDPTVGLAVANPDAAAIDVGCTEHWVAVRPDRAPEQVRRFGCFTADLEALAQWLKECKVDTVVMEATGNYWVVLYDILEEHQLRPVVVNPRYAKNMSGKKRDISDCIWMQKLHTYGLFANSFRPEESFRILRAYLRQRQNLVQAASQSIQHMQSALTEMNVQLANVISDITGETGLRMIDAILSGERDPRQLARLKDARIKAPLSELAAALQGHWKAEQLFILEQARLSYAHYINQMEECERRTHDHMRTLKSRLPQMTDQGAVACAEVTERASELPSDMKIFGFNLSAELRRITGVDLTTIDGIGPITAQIVLSEIGTDMSPWPTEKHFASWLGLCPDHRISGGRVLGRATRPVVSRARNALRIAAYGLQHSKSALGAKYRRLRARLGAPKAIVAMAHQLARLIYLMIKHGQEYVDKGVAAYEQRFREQQVRWLEKKAQELKMKLVAA

SEQ ID NO: 224251 - protein, 409 aa, unidentified
MRYYLGVDWADQTHAVWVVDEGGTKVAMRTVPHTAEGLTEWGRALDEWRAQGIELWAAIERPEGRVVDFLLDHGVVVYAVNPKTLDRARDRFRQSAAKSDPFDARVLADFLRTDHAHLRAVQPSSEAAQELKLLTDDYHRQIRQQTRLVNQLTTTLKAYYPRGLEVAELTTGLAREFLQAYPTPATITALTERQWQRWAHAHRLSETRTQQLWVVLQRPQLPVPPHVVRAKARLMQSLVAQLMVVMEGVGAYREAIEDFFARIPAAQWIRTLPIGDHGITAPTLWARLGDAPGRWESFRHLQAQAGTVPVTIRSGKQQVVRFRFACDKSLRYIIDHVAFLSLRWSEWAHAYYAGQRARGHSYRQALRALSAKWLKIIFVMWERQIPYDEQYHLAMMTRQQLRQRQEKVA

SEQ ID NO: 224252 - protein, 386 aa, unidentified
MDFSVDGVLGLAYARGWQDGWLRFRLMVRTRSARSGLKHQRRNAAMEHYAGLDVSVKETSVCVVDGAGQVVREVKVASEPGAILGVLADEAFTLKRICLEAGPLSQWLYGVLAEADLPVICVETRHMKAALSAQINKSDRNDARGITQMMRVGLYRPVHIKTLASQKQRMLLTSRQLLQAKAHDIESDLRGTLRNFGLKVGPVSRGKFEVRIRELVVDCPDLAAITGPLLIAWRALREQFAVLHRRLLAVVRDDAVCHRLMTMPGVGPVVALTFRATVDVPSRFANSKAVGAVFGLTPRQHQSGEVNRMGYISKCGDAMMRAMLFEAAQVMLTRTTKWSWLKAWGMKVARHRGMKRAIVALARRMAVVMHRMWAQSSHAERRERPA

SEQ ID NO: 224253 - protein, 374 aa, unidentified
MSDNHLFVGLDVHKTTIAIAVAEQGRTGEVRYIGSFPNKPVSIISQLKRLAERYGGIECVYEAGPCAYTLYRKLMAAGIQCIVVAPSKLPMPRGRVKNDHRDAVALARLLRAGDLVPIWVPDPVHEAMRDLVRARQAASFDVRKARQRIQSYLLLRDRHFAGKPWSSRHMRWISDQQLEHPAMQITLQGYVNALEQAESRRAELDLQIRDLLPNWSLAPIVTALQALRGVASVIAIALVAEIGDFRRFPSARDLMAYFGLVPGEHSSGSTVRSRGITKQGNSAMRALLYEAAWCYRQSAKIGQWMKARMPVDVPQFARDIAWKAQTRLCGRYRKLIARGKKSQIAVTAVARELLGFVWAIARAQESQQPPVVVA

SEQ ID NO: 224254 - protein, 350 aa, unidentified
MLIIGCDYHPSFQQIAFVDSDTGELQEVRLEHREEAEKFYRDLAAQGTKVRVGMEASGHARWFERLLSELQFELWIGDAAEIRRKRARKQKTDRQDAQHLLQLMLKDDFPQIWVPGWENRDLRQLLWHRHRMVQARTRMMNQLQAVALNEGLCCKKKLWRDAGREQLEAIRLAPWASRRRRDLLELLDRLSPTIAGLTQAIEKEVEKYPAAQRLRTHPGVGSLTALAFVLIIGKADRFQCGKQIASYLGLVPLEDSSGKRRRLGHITKQGNSLLRFLLVEAAQVTVRSLPEWRGKYVHLTLRRGRKIAKVAMARKLAVRLYWMMRKEWNYEQLRKFGSYAGKPGHRDGVQ

SEQ ID NO: 224255 - protein, 429 aa, unidentified
MPNSAALVPQIVAWVGLDWADQAHAVCLQEAGASPLEHSELQHTPEALQLWVAELRSRFPQGQVALALEQSRGSLFYALMTYDFLLLYPIPPKALADYRQALYPSGSKGDPTDAQLLLEFLRKHPERFRPWVADDVRTREIALLVQHRRKLVDDRTALTNRLQALLKGYFPQALAWAGDLTAPLAWDFVSQFQSLEEAQQASRWKVLKVYRAHTRRTPEQLEQLLDQIRTARPLTTDRAVIESSALMVRAQVDQLRALAAGLERLEEKLQELFAAHPDHDLFASFPGAGKALAPRLLAAWGSDRQRFETAQDMECLSGAAPVTAQSGKKCWVHWRLACPKFLRQTFHEFASHSILWSPWARVYYQQMRKRGADHHPAVRSLAFKWIRIFYRCWKDHTLYDEARYQQALERHGSPLAAALRQLPNQEARA

SEQ ID NO: 224256 - protein, 431 aa, unidentified
MNRSVEFLSVGIDVGADFSLLAFALPSQELLGKPYKIIHSSQRSLNGAVEKIKTLSQKYQLPARVFMESTGIYHYPLYHKMKDAGFDVFVLNPLVTHAGRDLNVRNIHNDKYDSQKIALLGLRSGLKTSLIPSDQVISMKVILREYYAVKKEISMYICRLKNQLRQAFPQFLPLFSKVNGVTAMAILCEYPNPESLLNAGEHAVADFMKSVSHNGPLKVQKKAAALIQAAQDARSFGHWNHGISILIRHYIEMIRLLDVRAKTLLAQAKALLAEQDSKTLAHQTELLQTIPGIGFLSALTLICELGDFSAFKRPKQLFSYFGLDPIVRQSGNYNGTNLKLSKRGSPFARRCIFVIALQSISLNIHKEPKNPVLRTFYEEKCMCKAKMTAIGAVMHKICNLIFAVLRNDAPFVLQTPEQHNAAYLSKTHSVA

SEQ ID NO: 224257 - protein, 395 aa, unidentified
MSAKGEAIRSNDYRKDTTVKAPSTRPAAVLGLDVGKSSHWACLIDRDGEVLASAPVRNREAELDALFASAPAGTLVVVDQFRNIGSLAVRRARAAGLGVAYLPGLAASRAAGLFAGEAKTDERDAAVIARTALGVPDSLSGVPGRGEALEAARALSSQRDHVVACATRDKNRLRAVLLESCPALEAAVDLSDRRWLELLAGFGGAWGIARSGAEGPRAEAAGEAAAASTAPPPALVEAENRQVRFLAARISEALDEAGALEAETAALLEGDETYACLLTVPGIGPRTAAQLAVSVDIGRFPDHDHLASYCGIAPRVRSSGTSVRSVRASRRGDARLKSLLIFSCNSLVRSSGRYGEYYRACRARGMGHGRALKAVARKRLRAIYAVMRDRVPYRE

SEQ ID NO: 224258 - protein, 433 aa, unidentified
MSYRIAGIDVHKKMLAVVVSDVEVDSEYQFERRKFSGNPEQLRLLAAWLFEQEAEEVVMESTAQYWRPVWEALERYWKPICEKRAGARRKSGSLHLAQALSNRGRRGRKRDFPDAERLVKRLVAQELTLSFVPDAEQRLWRTVTRKKYQLRCDRIRLQNQLESLLEEAHIKVSSLVSDLLGLSAQRMLKAIADGETSPATLAALADKRLRATPEQLCDALGACTQLNPVYRRLVKMALEELRLIDEQIGRLDQEMAGLLLQHQDAVQRLAEIPGLGVDSAQQIIAEVGPTAATFPSQKCLSSWVGACPGDDESAGVNHSHRSPKGNRYMRRLLNQAANAAARTKGSLFEIVYRRSVPRLGHNQAIGVIAHRQCRLIWLILHQGVRYEERGPAVTKRSKQLRTWKMIRQLRNLGYRIEPPNPQPSQAQAQAQAQ

SEQ ID NO: 224259 - protein, 348 aa, unidentified
MIIIGCDYHPSFQQIAWVDSETGECGDQRLAHSDGEAEKYYRGLNGHGVRVGIEATGHARWFERLLAELKYELWVGDPAQIWAMRVRKQKTDRQDAQHLLKLLVEDRFPRVWVPSAENRDLRQLLWHRHRLVQMRTRVMNQLQAIAMNEGVRRKKGLWSKQGRRQLESFSLAPWATRRRQDLLELLDQLNPSIQELSTAIEQEAMQRPEVKRLMTHPGVGPLTALAFVLIIGSPERFRCGKQIGSYLGLVPCEDSSADHQRLGHISKQGNALLRFLLVEAAQATVRSDPEWRRQFLHLAMRRERAIAKVAMARKLAVHLYWMWHQGWDYQQMQFGSHVGQPVVSHGVK

SEQ ID NO: 224260 - protein, 330 aa, unidentified
MTNVSELTTEALFVGIDVSKDTLEVALGENAKTQTFGNDSAGVAVLLGQLKPVAHRIAVVLLEATGGLEQVAAAALCAHGFAVIVVNPRQAHAFAKALGHLSKTDSIDAKALAQFARTLHNSDKRERLLYRLPTPAQELLLAMVTRRAQLIGMRVAESNRLASAHVSQRKSIERHIKILDKQIGQIDDDAQRHLRSHFQDKLALLKGLKGVGVGTQTMLMAALPELGSLKQREISKLVGVAPLNCDSGKFKGKRITWGGRSNVRAALYMAALTASRHDPVIKAFYERLTLAGKPKKVALVACMHKLLTIMNAVIKSAQPWQASYPQPNNV

SEQ ID NO: 224261 - protein, 360 aa, unidentified
MVKKSIAKLDRFAACIGAEPVWVGVDVHKRDYHVALRSDSGLSETFVCPGKPAVFLGSLLKLGLKLALVAYEAGPTGHTLARALEESGLPVMEVAPSKILRPVSPGAKTDRLDCLKLAKYAAKGMLKPIAIPSVEEEADRSLIRRRYKVVESLRRVKQRIKSMLLNHGFEEPDGLEGWSKKAVSELERIGLPGQAKRTMESNLRELRFFQKELARIDKELKRLAGLKRHRAKASALRTIPGVGPVAAMSFCLEVFNPGRFRRAEEIASYLGLAPTVRQSGQGKTKGRIIPTGQKRLRSTLIEAAWTWKRYDPQAREMYNRLLARSGVTQKAICAVARKLAIIMWRLCLEQRPYRQVEGNA

SEQ ID NO: 224262 - protein, 346 aa, unidentified
MLHAGLDLSRRKVDVCLLSQAGEIVDEWASPPDADGLRGLAARAAMWAPAVRGVIESMNGARFVHDRLEEHGWDVLIADATKVKGLAPLACKTDKIDARVLATLSARDLVPEIWLPDPSIRRERELARFRLHLVRHRTTPKNRIHAALIALGHPCPVSDLFGHAGRELLDGLEIPDPWRRNIEVSLGLIDDLELQIAQLTVQLKRRGADHRYIPLLVTAPGLGWINAYTVASEIGDIARFASPAKLCGYTGLCPRVIQSGASDRRGPISKHGPKYLRWALFEAALNACKHPYYAERYQHTKRRLGRQRGPKVAQIDLARRLTEAIWHMLTNNQPFAPAGAPFRLAA

SEQ ID NO: 224263 - protein, 350 aa, unidentified
MIIIGCDYHPGFQQIAYVDTETGELQERALQHREEAEKFYRELAAQGLKVRVGMEASGHARWFERLLAELNIELWIGDAAEIRRKRERKQKTDRQDAQHILRLMLKDDFPRIWVPSWENRDLRQLLWHRHRMVQARTRMMNQLQAVALNEGVRCKKRLWREAGRKQLEAFRLAPWASRRRQDLLELLDRLNPTIAELTQAIEREVEKCPEARRLQTHPGVGPLTALAFVLIIGQADRFRCGKQIASYLGLVPLEDSSGSRRRLGHITKQGNSLLRFLLVEAAQVTVRSDPGWRSKYHHLMLRRGRKIAKVAMARRLAVRMYWMMRQGWNYEQLKKFGSHAGQLVYRDGVK

SEQ ID NO: 224264 - protein, 431 aa, unidentified
MTATDSTARAHVLVAIDIAKAKHDVLVELPTGKRKKMIVRNQLSDFRQLAAYLKRLDGALEIALEPTADYHRNLAYFLKTQGFDVKLVSSIAVARTREALHNSWDKNDPKDAQVILHLLRNGNTQYFYDPVVEQTNDLQELSKTHFQVSLRKTRVQHSLLNHYLPLYFPEAERFLSNSRSSWFARLLIEFPTPQAITQLAENEFIERASQLLSSKHSKAAILRALYAKAQESVGLPVPLESQAIATFRLLLAQHLELCRIRAELEETAHELLQSQLDYQILRSVPGIGPIIALTVLAEAGDLRRFHHERQFLKFCGLDLATSQSGAYRGRSQLSKRGNSRLRSALWMAARCATHMNENTFRRKFSRYMQSDPGNGDLRRKAYTACTAKMARTIYGLIKHQQFYRAYNEDAIPEPGGKTRSHGPLRQAAAVA

SEQ ID NO: 224265 - protein, 424 aa, unidentified
MKYSQNEKILQITEETLIVGVDIASETHFARAIDFRGFELGKVTKFSNDAEGFMQFVSWAGELKLKHKKLSVIVGMEPTGHYWFNFAQHLKDHSIKLVLVNPFHVKRSKELDDNNPTKNDRKDPKTIAMLVKDGRFMVPYIPEGIYSELRTAMETRWQLVKQLNTIRNRVKRWISIYFPEFNKVFGDWEGKAAFIVLNEFATPAKVLEKGLEGIVGRWKKDKIRAVGRKRAVDLIEAAKKSVGVREGLVAAENDLLTLLEDYEMRMRQYERTMVIIEQLIFQIPGVDEILKVKGVGLIMTAGFIAEIGDINRFEHANQIQKLAGLNLKENSSGKHKGKTTITKRGRRRLRAILFQGILPLVATNTEFQELHRYYTTRANNPLKKKQSLILLCCKLIRIFYTLLKKRTAYDPQKMMNDIKRPIAA

SEQ ID NO: 224266 - protein, 444 aa, unidentified
MLPVMRCDAAGIDIGATEIFVAVPADRANENVRSFPTFTQDLYTLADWLKQCGIKTVAMESTGVYWIPLFQILEERGFEVCLVNARHVKNVPGRRTDVSDCQWLQFLHSVGLLRASYRPEQEVCAVRSLLRHRESLVQMAATHINHMQKSLDQMNLQLHHVISDIAGQTGLAIVDAILAGERNPQVLAKLRHQRIQASEEIIAKSLVGDYRPEHLFTLRQSLAAYRSYWKMIADCDGEIRQRLEEFKSPDKPASKENEKPDTQKLDTPSKKTSPDGILRLELKRIFGIDLTQIPGIQTGIAQTLFGEIGPDFTKFTSASAFSSWLGLCPDNDISAGKVLWVGTRKVKTRAATALRMAAQSLHHSKSALGDFFRRMRSKLGAPQAITAAAHKLARIIFHLISSRQEFDDDRFAADQLKHQQRQERKLRAKAKALGFELIPLEQVA

SEQ ID NO: 224267 - protein, 375 aa, unidentified
MEHHSEAFVALDTAKLRNAVAIADAGRNGEIRYLGEIDNTEAETRKLVAKLASKHARLTFCYEAGPTGYGLYRLIKSIGHDCIVVAPSLIPSKPGDRVKTNRRDAVNLVKLLRAGELTAVWVPDERHEAMRDLVRARDAAVKDYRIKRQNVSSLLLRLGRPYPGKKTWGRTHINWLTGLKLEHREQRIAFEEMLLAVRQVRERIERLEQAMREAVTDWTLAPVIEAVQAMRGIDMVGAIAFLAELGDLSRFENPRQLMAYLGLTPSERSTGENVKRGGITKAGNTRARRLLIEAAWSYRFPPRVSKDMQTRIGAAPRTAREIAWKAQMRLCGRFRTLTRKGKRPTIVVTAIARELSAFIWAINREVVGSHATANR

SEQ ID NO: 224268 - protein, 433 aa, unidentified
MLKINYMSTLFVGIDVSSKTNAVYAMDFEENKYISSSFDNNQLGADKLVNMIAECMQKHKNLDTLLIVLESTSVYSVHISNFLSASEVLMPYRPYVFCVNPKATSNYRKSYIGMEKTDPTDAYLIADFGRVGRTKKLEPWRGGQFIALKRLTRHRMHLSEFITREKTYMVSNLYLKFSELQLLEGDDRPFGSLYGATSSAVLTEFLSPQEIIDMPEEDLLAFLAEKSRNRISDISKTSELLRKAARDSYWLDKCMYEPLNISLASSFNCIHAYQKEIRLIEQAIGKCINGMNPNALTILRSIPGISPVWASGILSEIGDIAAFHSSDALAKYAGLYWPKGDSGDFTSEDNQMSKAGNPYLRYYLGEAANSVRKHIPEYADFYARKYAEVTKHQHKRALALTSRKFVRLVFGLLAKNQLYTGEKLDTEYNIETN

SEQ ID NO: 224269 - protein, 333 aa, unidentified
MYYSGIDLHSDNCYITTLDESGLVVKQQRIENISEYILDYFHSLPGSHQAVVESTTGWYWLNDLLQDNGIELILAHAKYLKAISYAKVKTDKVDSQTLAILLRQDLIPRAHKISRELRGLRDTMRIRLRLVQQRTACLLRLYSIHAKFNSNVPDPYRFQIAVLEHTRDTFSDQILALEKSLHPVLIPSDDIQLLLNIPGVGKLSAFTIYLEIDGIERFDSDKHFVSYCRLVPAADNSNRSVHHRSSKDGNKYLKIAFSDAAVHAIQYYPEYKRFYQKLARRSSEATARTVVAKELAKIVYYILKNKTQYKGFKGQPMSRTKSPQWPRLTSPDV

SEQ ID NO: 224270 - protein, 417 aa, unidentified
MDHVLWYVGIDWGCESHAVCVLDAMGRRREERRVVHTADAVQACLDWIMTYTDVTPAQIAVAIETPRGALVDACLARSMLVFAVNPKQLDRFRDRHTVAGAKDDRRDAAVLADSLRTDPGAFQAIHQEDPVVVQLRELSHAEDDLDTEFRRLANQLRSLVHRVAPEILALCPGADEPWFWALLETAPTPAAQRRLTRARVDHLLRAHRIRRWRGADVIARVQAPSFPHAPGVVEAAEAQIRLILPRLVVVHTQRLTCGRQLEQLLQQLRDRPREADERGEHRDIAILESLPGVGRKVAVTMLAEAALPLAQRDYARLRAHLGTAPVTNASGKRRVVSMRRACSRRLRWAAYHWGRTSLQRDPASAAYYRTLRARGHRHGRALRSVVDRWLRILMAMLRQNTLYDASKFTVATAENGA

SEQ ID NO: 224271 - protein, 362 aa, unidentified
MEQRQGTALDFTGQHIYVGVDTGMKSWKVCIMTEKIEHKTFTQPPRVDVLSKYLRRYFPGAQYHCVYESGYSGFWIHDELRASGIDCIVVNPADVPTKDKERTHKSNGVDARKLCRNLRSGELDAIYVPTRGSLEDRSLIRARYGFVRKQTRCKNQIKALLAFYGISMPEDIAASHWSRRYISWLEQEMIFKRSSGDQALKSLLEELVSLRQIIARLTKQIRALASEEPYCTSVDHLMTISGISTLSAMTFLTELIDIHRFGTLDHLANYCGLVPGEHSTGEEQTMTGISPRRNAMLRGLLMECAWIAVRKDPTLLIAFNRLSTRMPKNKAIVRIARKLLNRIRFVLKNQQPYQPRIAQSAS

SEQ ID NO: 224272 - protein, 316 aa, unidentified
MSKRKTNIGIDVSKQLLEVAVHESKFHYRCPNQAQAFGGLLAELIDLRPARIVVEATGGLEKPVVAALHAASLPVVVINPRQVRAFAKAIGQLAKTDRLDAGVLAHFAAAIKPPLRPLKSTDEQELEALMGRRGQLIEMLVAEKNRRNSATSEVVRETIKEHIDWLEDRIAELDEQLQARLVSSATWQNKDAILQSVPGIGRVVSFSLLAELPELGTLNRQRISKLVGVAPLNCDSGQQRGVRHIFGGRARVRSMLYMATFTAMRFNPVIKEFYQRLLAKGKPYKVAITACMRKLLSIINLMVRNQTLWRSASVSA

SEQ ID NO: 224273 - protein, 343 aa, unidentified
MEHYVGLDVSLKQTAICVVDRAGKISCEATVASDPSAIAKFVRSKAPSAVRIGLETGPTATWLWTELKLLGLPVVCIDARHAKAVLRMQINKSDRNDAAGIARIMQTGWFKEVCVKNFDSHAIKALLASRALLVSMKRDLENQIRGLLKNLGLVIGRAKFNVFAVRAQELIEDRPELAAAVEPLLKARMAIEQQIGDLDRKVMKLARHDEQVRRFMTTPGVGPITALCFRATIDDPTRFKRSRSVGAYVGLTTRRHASGEVDWTGRISKCGDAMLRMYLYEAANVLLTRVPKWSALKAWGLRIAKRSGLRKAKVAVARKLAVVLHRMWVDGTEFIWSSKVSAA

SEQ ID NO: 224274 - protein, 404 aa, unidentified
MLNVGIDPAKNSAVARLVDHTATSLDATIKFSSDRPGIDKLIRRVEKLDASGQCHFFVEASGRYWYSIAGLLQEAGQQVSLIAPSYTKAQRKASSPHAKSDAKDADALARAPFNMGDKARHPADVPDGDRLQLQLLTRERRGLEEDATRIKQAVVDLLHLTSPGLTDIIGKELQPAIREFIVKYPMVDRLPKLGEKRLAAFLEKRLGKRFDPAMVGKLLHLAKTAFCPPGLDPKDIGDQFKRDFDRLELLETQIKHLDREIGALEKKCDPEGLARSIPGFGKVVAPILLADAGTDLSRFPDSKRFCGWTGLVAKASGTNGKQVDGMSITKAGRAQVKWALYMAARVAVQHDPDCKEMYERLLDDGKHYNLAINAVAHKLARIYYAVMTEERPYQPRTEKALDDS

SEQ ID NO: 224275 - protein, 456 aa, unidentified
MKSLPVINPKAAGVDVGSEKLHASIAGDEPVVFGTFTNEVYRLREHFLKQGVQTVAMEATGVYWLYLFEVLEAAGMEVVMVNGRAVRNLPGRKTDMADCQWIATLHAHGLLRSGFVPTAEIRRLQDYMRLRADHVMGAASQVQKMQKALERMNIKFHDVISDLTGVSGQKVIEAILLGERDPERLLGLCDEQIKKKKKESVIESLRGTWREEHLFALGQAVAAWKFYQELVVECDHQVERVLKDLADQTPPSAPAQGKDALSPKRLGKNAPQINDLHQLLERVCGGRDVTAVAGIADGLLVQLIAETGTDMTPWKTEKDFTSWLGLSPGTAQSGKRKGTVKRQCNRAGRLFRLGARSLARTVDKALGGFFRRLKKAKGGLVATKAVARKIALLYYRTLKHGLAYVEKGLRQYEMQYEESQRRLLAKLAVKHGFKLTSIETEKLQAVFQTASPQASS

SEQ ID NO: 224276 - protein, 355 aa, unidentified
MNNKTKRKATVKKVVAGMDLHGNNVMIGIMDLDGKRLASRKVDCELKEVVKFLAPFKNRLEKVAVESTFNWYWLVDGLQALKYPVVLANPAGIEQYNGIKHADDTNDAFFLAELLRLNILPTGHIYDVHLRPVRDLLRRRLTLVHHRTALMLSFKSLYTRTTGVAMTLGELKDLEIKEAQGLYDHPANQLIAGMQIKHIEQLTESIEKIEKAVLDSARELPSYVKLTTLPGIGRILGMTITLEVGDIKRFAQPGHFASYCRTVEAKRLSNQKKKGQNNGKCGNKYLAWALVEAANFARRYDEHCRKWYDRKAAKTSKLIATKALACKLAKAAWHVMAEGTDYDAKRMFGQPGTEK

SEQ ID NO: 224277 - protein, 445 aa, unidentified
MGQRTVGIDLAIRGDHVARIVDDGRPQGRPIRFRLTPDSLDRLLAGVRDGLSPGGTVTAVMEPTGMAWFPVARWLEQAGIKVIRVKGQRVRALRRYLSEHTKTDAADAYVLGAIPFFGGVPADPVYVPDAERHALQRLTRQRERLEDEVTAIKRRLLDLVRWACPALEAVLPDFRTNLALAVLHDLLDPASVAKARRAVLLRFVAKHASGNHPHRGPFAEALVDGLKAAAAETRRLHGTAVDFARLQLEVALEIDRLRLTEGQLTRLGREIEALYRKLHPSDALRTIPGIGDALAPLVLGVLHEARRFAGLHQLRGFCGLFPRTSSSGGADKPGQAITQSGNNRIKRALYLAADAARRIDPGLAAVYWRLMVRKGHHHKQALCAVATRLANRIGKVLRTGKAYELRDIDGTPISVAEGKAIVAERFGVPAEIRIARRRCRPAVAA

SEQ ID NO: 224278 - protein, 492 aa, unidentified
MTHELIIGIDLGLKHPHRAAIMDADNRCNIGKSFTFDRSIDGFNKLLDRCDKVKDNHQLVFVMEPTSMAWLPLSCFLMGKGHRVYVVKTQKVSKLREFFGLNKSDRLDAQTLSRVYHAQPDTLKQLFIPPASIKTIDRFCRQRARLVQRTSAIRKRIWHLFTFANPKAIDAFGRLNFTGQCRAFLRNYIDPHKIVDAGLKNVTDFLAKYTNGALDPEVPHRLMQASESTVEIYKEYQHQNGLPFDPEALQMEVNIELDILEAYEEKIKTLDKEILKCYLAADPKRHLQSLRGIADILAPIIYAVVGDIRRFQNLRSFKGFLSMVPKKKQTTDNDRKGLRIQKASFWLLKHSFYMAAEVARHWDPEIAEFYHRLMKRGKHHDQAVCACANKLAGRVYAVLKRMADPNCPDEKVPYVLRDLNGNPVDKKTAKAIIDAGFSESRTHVQPESVLAFNLNALMNASKTRDNSPHKVKSMEQILKEMLETALAEINNK

SEQ ID NO: 224279 - protein, 346 aa, unidentified
MNYIGMDSHISNLDFAVVNEAGRLTKAKSIATSVKGFMEFVKQIPAPRTIYMEEGSLAAWALETCVQYGEKLVITDPKENHWIGFSGQKDDPLDAFKLAQLARGGYIKEIHHPVGQRRRFRELMEAYHDNVRMTTRIKNKIKAKFRQNGIQCTGVTVYSETYREEWRRKLPQDATPLLILEGLWRQLEQSERTEEELLTAAKAQAKHYPEIKLFKDIPGIGFISAATISAILETPHRFANKKKVWMYAGLGLMKRSSGGKTYSEKLSTDYNRLLKYTIKQATGAAIQAADNPFRRKYLDMTLLHGIAPNLAKLTIARNMLATMWVMWKKGEKYNPEIREQESHKQG

SEQ ID NO: 224280 - protein, 410 aa, unidentified
MGFSSGATTEVQVSQDVWAGIDAGKIAHHCVVIDAEGTKLLSRKVSNDEADLLGLIDDVGQVADGGRIRWAADLNSGGAALLIALLCEREQELLYIPGRTVHHASAAYRGDGKTDAKDAAVIADQARMRRDLHPFRQRDEITVDLRMLCARRTDLAMDRTRAITRLRTQLLEYFPALERAFNYAHRRAALTLLTRFQTPAAIRQAGPTKISAWLRKQGAYGPDVIARTAVTAAESQYTVVPGEHTAARIVAQLARQVITLDAELDTLEAEIAERFREHAYAPAIESMPGFGPLLGAEFVAAINGDLANYETVDRLAGIAGLSPVPHDSGRITGNLKRPRRYDRRLLRACYMAAHNSLRTSPASRAFYDRKRAQGKRHSQAVLALARRRLNVLWAIIRGETTYEPVHLKAA

SEQ ID NO: 224281 - protein, 375 aa, unidentified
MKEKVRFLGLDVHAETITVAVAEPGDEVRSLGTIANRADSIRKLVKQLGPVEQLKACYEAGPTGYVLYWQLAELGVKCDVIAPTLIPVKAGDRVKTDRRDAEKLARCHRAGDLTAVWVPDAGSEALRDLVRAREAAKQDQLRARHRLSKFLLRSGQRPAAGLKAWTQHYMAWVRQLRFEQVAQESTRLDYLHEVEHMAERVVRLEQAIAEAVKLASPEIQEVVKDLQALRGIAQISAVTIAAELGNIRRFESARQLMGYSGAVPREDSSGKRTQRGSITKAGNAHLRRIAVEAAWSYRLRPGVGPGLRKRQEGVPEEIKEIAWKAQNRLHKRYSRLAAAGKDQRKVITAVGRELLGFIWSIGIKAETAAQQRMAA

SEQ ID NO: 224282 - protein, 349 aa, unidentified
MNRTTYGLDIAKSVMQLHWVDGETGEIGRKKLARGKLVEFFARLQPVRVVMEACGSAHHWARVLGALGHPVELLPARQVRPFVRSNKDDAADARAIWVAAQQSDIRRVPHKTVDQQAVMALHRTRSHWVSVRTATVNALRGTLYEFGVILPGGKSAGLKALGAHRAEVDAAVPGTVQRLVDGQLATLKDIERRIDELEAEIAAQQKQLDKAIKLRRVPGIGVLGATALAATLGDGRAWKSGREFSASLGIVPAHSGTGGKARVGHLSKRGDPYLRTLLIHGARSVITHAKQKPKWLEQLLARRPLNVVVVALANKMARTAWALVAHGRDYQREWKSTPPKGCAAQAAAA

SEQ ID NO: 224283 - protein, 343 aa, unidentified
MQAITAIGLDIAKSVFQVHGVDAEGNIVIRRQLKRRHLLAFFEKLPPCLVGIEACASSHHWSRELQALGHNVRLMPPAYVKPYVKRQKNDMADAEAICEAVTRTNMRFVPTKTPEQQSGLVLHRTRHLFIRQQTSVINAIRAHLAEFGVIAPVGRKGIEELLHVISDPSDKRVPDVVRACLAALGSQLLNLKKQILDFDRMILAWHRSNPTSKRLNCIPGVGPLLATALVANVADPKVFRSGRNFSAWIGLVPKQHSSGGRAKLGSISKQGDRYLRSLFVAGALAVIRYAKLHGTKYRPWVAALLARRPTKVAAIALANKLARMAWAMMARGERYNYPAGLRV

SEQ ID NO: 224284 - protein, 345 aa, unidentified
MQIASIGIDLGKTTFHLVALGERNKILVRKKFSRAQLLAYTANLPASLIGLEACAGAHFLGAALQAQGHRVRLIPAQFVKPYRKSNKNDFIDAEAIAEAVTKQNMRFVQIKTQEQLDWQAMHRVRDRLMQRRTALINEIRGFLLERGLTFAARPIYLRKNLPTVIEDAEQNLSPRLRWLLDRLWQEWKQTEIDIKAITDEIERISNDDARCRRLRQIPGFGPLVSTATVAAIGNGAAFRRGRDFAAWVGVVPRQCSTGGKQRLFGISKRGNIYLRRMLIHGARAVLLRIKYDTGGFGQWVHRLAQRAPRNKVVVAIANKLARIAWAVLSSGQDYRHQPLQQLAAA

SEQ ID NO: 224285 - protein, 412 aa, unidentified
MKDLLEISCGLDIHKEKIVACILTGPLGKPTHSEIREFTTLIPDMLALRDWIISENCHHIAMESTGIYWIPIYEILEDAFSGDITLLVVNARHMKNVPGKKTDMRDSEWIYTLLRAGLLNASFIPEKRIREFRDLNRYRKSIIRDITSQKNRVEKFLQSSGFRLSSFISDIFGASGRNIILHLMEHGQIDKISLDSYLKTKTRKRIDEILMSVNGTLSEHQKSFLKILMCHYDSMKEHLIEIETHLQEDMLPFALQIEQLNTIYGISTTASCAIIAEIGTDMKPFKTAEHICSWAGLCPGNNESAGKRKSTSITKGNPYIKSMLCEIAWVIAGKRNTYLSAWYWRIKQKKGARKAIVALARKLLVIIYTMLKQGTNFDENCFEVRRKNCEQKQLSRYIRELEKHGYTVEAQV

SEQ ID NO: 224286 - protein, 414 aa, unidentified
METVYRCVAGIDVHKSMLAVVVRQERNGEAEYERRQFGATRREIEHLAAWLQQRQAQEVVMESTAQYWRPVWYGLEPHFRLHLCHPLRVQAPHGRKWDFRDAQRLADRWDSGDLEESFIPGAEQRSWRWLTRRRVQLHRMISLVRNHVEGLLEQGGIKLTAVVTDLFGVSGWAMLQRLARGETDVAALAAEARGVLKKKTPALQEALAGRLDPIYQRLLLQNLRQVELLRRHIEEIQVELSRAMRAHTATLVRLTKIPGVDVTAAQELLAEIGPRAAAFPSAERFASWVGVCPGSKQSAGVCYSSRSAKGNCYLRRLLCQTAWAATHAKNTFFGGLFTRLLPRLGSRQAAWAVAHRIAKVVWLLLHENVEYREAGRASLRPAVLARKFRRLLHDLACAGLDAETLLRQCTPATP

SEQ ID NO: 224287 - protein, 328 aa, unidentified
MNNSNEVCDVLGIDISKAKFDVALIQGNAKIKSKVFANNPEGFAELQAWLNTQGVTNLHSCMEATSTYGNALARFLVEAAYKVSIVNPSRPKAFGKSELSRTKTDRADAKVIARFCAALKPAPWTPPALEIEQLQALVHRLDSLTAMQQQEQNRLATADPILLEAIIAHIDFLKEQIEMTKKLIRQHFDQHPHLKSQRDLLTSIPGIADLTATVLLAEIRDISAFDTADQLAAFAGLTPREFSSGSSIHGKPRLSKIGNARLRKALFMPAIVARRYNSPIAIFCDRLTAKGKSKMSVIGAVMHKLLRQVFGVLKSQRSFDPNFVQIPS

SEQ ID NO: 224288 - protein, 362 aa, unidentified
MVGTPRIDVRGLGARAGLVPTPQLWEVPTMSESMALVGLDVHQAQSVAAVLDAVTGELRVERLRGAADVVVPGFLEALGRPVRAVYEAGPTGFALARVAIERGLDVRVIAPGSIPKAPGDRVKTDRRDATRLARLFAAGELSFVFVPSEEQERFRDLVRCIDDARKDLMRARHRLSKFLLRRGERFPGRAWSAAHEQWLRTRSFEDALSRATLIDYCCAVDGLVARRKTLIGVLEQAVPESSHAPVIARLRCFRGIDTLSAAGLCAEVSSFERFTKPTLLSGYLGIVPSEYTSDSKRAQGSITKAGPTHARRLLVEAAHHYRHRPVVGIALAARQVGQDPRVVQVAWRAQRRLHARWAHHAT

SEQ ID NO: 224289 - protein, 399 aa, unidentified
MVSIGIDISKGKSTVCFLKPYGEVLHKPFEILHTESGLNHLSELIISLNEDVKVVMEATGSYHVPVLMYLKERGIFVAVVNPLVMSKYANQSIRKGKTDKLDSIKIANYGLDYWFRLVDYAPTTSIYEELKVLNRQYLSYLSMRVHAKQALTNLLDRTMPGIKTQLMNRSDVPDRDKLCDFVKEYWHFDNVTNMTEEQFIVSYNNWAKTNRYQASSVKARKIYIIAQDSVPTLSSCILSTKLLVLEAVHVLHVIDTTLVLLLSQMRTLVKSLKEYETVMAMPGVGEILGPRIIAEIGDVRRFHSASALVAYAGLDAPPFQSGTYMAGKRSISKRGSSTLRKTGFEIMMYLKSVKPCQDNAVYLFMLKKESEGKPLRVAKIAALNKFLHIYYARVKEIYN

SEQ ID NO: 224290 - protein, 364 aa, unidentified
MAQGRGAETQSNPVLQGVNMPVAEVDTFAGIDVSAHELSVALRRGQGHDKPAMAKFPNHPSGHKALVAYLLRGGGRVRVCLEASGNYSLDLALTLQAHRQVEISVINPRRARRFAESLGERSKTDPVDARVLCEYAARMPWVRWQPPSPVALHLRALTRAIADLGVIHTQQNNRAYAAAASQALPVLVVKEMQRHKKYLEQRMTRLRREAVRLIACDPELDRRFRLMLTTIGIAENSALQILGELAVLPDMLDARQWVAFSGLDPRLFKSGKSVEKRPRISRSGSRHLRRALYMPALVALRRDPYLRVFYQNLLARGKARLQAVVAVMRKLLHALFAMFRSNQPYDGSKLCAVDLAVHAIADCA

SEQ ID NO: 224291 - protein, 349 aa, unidentified
MGMLAEQVDHVIGVDTHRDSLTAAVVDTTGSTLAARTLPADALGYRSMLAFAREHAPHRRAWAIEGTGSFGAGLCSSLLEQGEWVLEVDRPVRAARRNGAKSDELDARRAAMEALSREHLAQPRRRGDREALRVLLATRQSAVAARTRTIGHLKALLVSAPDKLRSHFRHMGTEEQLMRCARLRTSVSQTAEQRFTIVALRSTARRALLLEAEANDRESEIERLVMQLAPRLLAEPGIGPISAGQILCSWSHPGRIRSEAAFAALAGAAPIPASSGRTVRYRLNRGGDRQLNRALHTIVLSRLSHHEETKAYAARRTAEGRSPREIKRCLKRHLSRRLFKLLEASVLGA

SEQ ID NO: 224292 - protein, 355 aa, unidentified
MNVNVNHYIGFDVHKKSISYCVKLADGRIVEEGKLAARRVTLCQWASKRAEPWHGAMEATLFSGWIYDTLKPFAAKLEMGHPGRMKAIGASKKKNDKLDARTICDLIRANLLPACWVAPSEMRELRRILRYRNLVLEQAVRMKNKISGLLMESGVEYNKKRLHGEKYFHELLENLAAEVPESVKDLLKLSRGWLESFQATQQQLLVKLQKHPILMERLKRLKSIRGVGEVTALTWALEIGDPHRFSSIGDAVSYCGLTSALVESADKQKRGPISKQRNAHLQTVLIEAAKLAPRWNPRLAELHQAEIDNGRHRNRATLEVARKLVAYLLAVDKSGKDFAVRTPSGKSEGEVKPAA

SEQ ID NO: 224293 - protein, 363 aa, unidentified
MTDGICFVSLDVHARATAAAAVQLGSGEVFKARLSGSPAAAIEWLKTLPGPVRAVYEAGPTGFGLARAGRAAGLEVMVCSPGAIPRQPGDRIKTDTRDALKLARLLAAGQLRPVVVPAPELEALRDLVRAREDLRGDLMGARHRISKLLLRRGLVFDGPGETWSTRHLAWLSKACFQQPLVEVVFGEYLAHHEVLLARRDRLDRLLLEQSTQGPWAPLVARLRCLRGVDTLTAVGLVAEIGDITAFKHPKQLASYLGLVPSEQSSGTKRRQGSITKAGSSHARRLLVEAAWHYRRPPRISLTLKRRQAGQPPAAIDAAWRAQIRLHRRWAHLDGMRAKKRTTVAVAVARELACFVWEIAQQPD

SEQ ID NO: 224294 - protein, 347 aa, unidentified
MNGINVIGVDLAKDIIQVSVVTAHKQERLNKALSRRKFSEFLAKHKPSLVAFEACATAHYWTRVAQQHGHEVRIIPAKAVAPFRQGHKTDQNDALAVAEAAVRPNVKQAPMKTVEQQGLQAIQRSRELLIQNRTALSNHIRGLLLEFGIVIPRGFAALHRRMPEILEDGDTELPDFYRPTLHLLYERLIGLKSDIEVLDDQIAVLVKQNAACARLTQIEGVGPISSLLLYATLGTGIAFANSRQFSAYLGLTPKQYSSGGKTMLIGISRYVANKRLRSILIQGARAYIHRLKEPKTPKQRWLWELIQRAGYGRAAVALANKNARTAWALLTQGDVYNQYEGMPSFAA

SEQ ID NO: 224295 - protein, 423 aa, unidentified
MMKLKYSICCGLDVHKNVIVATIVTTNKDGISEYLQKSFSTINSDIQRFHNWLIENNCYHVCMESTGKYWIPIFNYLENDIDVCLTHPKYVKAIKGKKTDKKDSKWIADLYKFDLVRCSFIPPKDFRQLRELSRYRFKLVCMKSSEKNRIQNCMTISNVGIASVLSDPFGKTATEIISYLLEHTADSMDEKAVRKLIKKGAKSKSDEIIEAIKGYTIETDQAKKLELARGHLEYLDDMITQTEVELYVRIKPYYEFVEFVSTMPGMTELSSTIVLAETGVDMDIFDDAKHLCSWCGLSPANNESAGKKKSVRIAKAGDYLKPMMVQCALAAIKSKKQPYFAIKYGRIKKRRGHKKAIISIARMMMVCIYHMVSEKKPFTPTDYEELMDPQNHVESVVLNENNVFAYLESLGYDSSKLVKRNDN

SEQ ID NO: 224296 - protein, 415 aa, unidentified
MALKIVYKICCGIDVHKTFVVACIASTNDKGVTSYESHRFSTYTSGLKTLLQWLLDRDCKDVCMESTGKYWIPVYNILESDCSIVLAHPKYVKAIRGKKTDKKDAKWIADLFKHDLVAGSFMPPADIRQLRDLMRYRFKLTCFKSSEKNRLQNCLTVSNIQLGNVVSDTFGKSAQAILDKLLENPADTSFDLEPLVYKSLKKKLPELRDAIDGYITPEQAGKLKVIKAHYENLESRKAELEELILALAAPYQQELAILQTAPGISSDFTAIGIISEIGTNMEAFPSAKHLCSWAGLTPTNNESAGKKKSVRVSKAGCYIKPLLVQCANAVVASKKHPEIRNRYLRLKKRRGHKKAIIAIARMLLTALYHMLKNGENYNAELYQKSDLLPVDREITVEQALMIARNQGYKIKSATA

SEQ ID NO: 224297 - protein, 322 aa, unidentified
MAMLSFAGIDVSKDRLDVMVLPEEQRSSVSNDPTSWAELVEQLRALSIAAIGIEASGGYERGIMRALLSAGMPVRHVNPFKLRQYAKASGVLAKNDPLDARMIASFVAIMPTRPAQSRPPAVERLLEVLAVRRQLSAEKVAAENASRLLENAMLQRLSRRRIARLAADIEMLDERLVEIVAADAALAHRYRMLTSMPGVGPVLACTLIALLPELGRMSRKQVAALVGVAPYAFESGKLKGKRCVWGGRAPVRHVLYMAAMSASNWNPVLKRFHDRLKAAGKLPKVIIVAVMRKMITMLNAMVRDGVVWADRYSGRHSVPTTR

SEQ ID NO: 224298 - protein, 388 aa, unidentified
MPYRIAGIDVHKRMLAVVVADIEVEGEYQFEQRLFGSNPEQLRLLAEWLIEQPVEEVVMESTAQYWKPVWGVLERYWKPIRQKREDASPMSGTLHLAQALSKRGRRGRKNDFRDAERLLKRLVAQELTLSFVPYAEQRLWRTVMRGKYQLTRDHARLRNRVESMLEEAHIKLSSLVSDLLGVSACTELNPVYRRLLKMALEELQFLEQQIGKLEQEMASLLSQHQDAVQRLAEVPGLGVDSAQQIIAEVGAEAATFASAKNLSSWAGACSGEEESAGVNPNHRSPKGNRHMRRILHQSANAAVKHKGSIFEVVYRRLVPRLGHNQAIGAIAHRLCRLIWLLLHRGVRYEERGPAVNQRSKQQRTARMIRELRRFGYRVEPLTVQLNPA

SEQ ID NO: 224299 - protein, 408 aa, unidentified
MRVIGLDIHRVFAEAAALERGSLVRLGRIEMRRDRLAAFARSLTHDDHVVIEATGNAAAVAEAMRPHVGRVVIANPQQVRLIAHAKIKTDRIDASVLARLYASGFLPEVWIPNERTQALRRQVTRRNQLVRQRTRLKNIVQSILHSHLIPPCPTADLFGPKGRAWLAQQTVPADERFAIERHVREYDRLGDDLSVVERDLAGNVLADEHAKRLITIPGIHMVVAVGIMAAIGSIDRFANPQQLVSYFGLNPSVHQSGTGPVHRGRITKRGRGHARGMLVEAAWVAARVPGPLRAFFLRIRARRGQHVAAVATARKLAVLIWHMLHRSEDYAWVRPALHARKIRAVELSAGHPARRGQRGAAYAYNLSTVRQRERRRIEQAEKAYERLVKGWTQHGPKVRIGAAKEERR

SEQ ID NO: 224300 - protein, 345 aa, unidentified
MGPMYYIGLDVHKQKISYCVKDSGGKLCAEGWIPATRFDLDRWMKTLPQPWSAAMEATMFTGWIYDHLKPHAAVLKVAHPLMLRAIAAAKKKNDRIDASKICDCLRCDFLPESYMAPTAIRERRRTLRYRNLLVRQMVQMKNKVGMLLMESGVSYNKQKLHKAGYFRELLASNPDINPGLRSLLCQCREMVVRLGKMETALIRCLQQDRLLAERVERLMSIPAVGPITALTWALEVGEIQRFSSIKKAISYCGLCGAEKSSGNTVQRTPLSKQRNKHLQTTLIEAAKMAPRYSPTLALLYDREKQRGNANRATLTVARKLVAYLMAVDRGQTHFLVLDRDTCAAA

SEQ ID NO: 224301 - protein, 341 aa, unidentified
MELNVIAIDIAKKVFQLHWVEPDTGSIERLKLKRSQVLPWFANREPALVLMEACGGAHEWGRQLFKLGHDVRLLAPRTVRPFVRRNKTDAADAQAIWTAGQQPGAKFVAIKNDAQQVVLSLHRLRAQLMKMRIMQTNELRGLLYEFGFVLSESHRAMLKELPAALMEAQSRLPAMLIDSLDEQVRRIQLLDVDIATIERRLSQQLRETPACKTLAEIPGVGLLTATAIVASMGSPTAFKDAREFAAWIGLVPKQTGTGGRVRQLGISKRGDAYLRTLLMHGARAVVRSDRASSWPWLSELLKRRPYSVAVAAVANKLARTIWAVLAKGQAWRPQAWRAATN

SEQ ID NO: 224302 - protein, 354 aa, unidentified
MTSMTAVATVVVGGIDTHKDLHVAAVVDRDDGRLLATKEFSTTRAGHRAVLRWLRDHGDIEAVGIEGTGSYGAGVMRFLTEAGLTVFEVDRPDRSDRRRRTKSDTVDAEMAARAVLSGRRLSAPKSKSGQVEALRVLRLTRAGAIRSRVKALQLLRSHAISAPDEVRDLVRELTRMQMLRTVAAWRPDYDDYQHPATATRIAMRSLARRILELNNEIADLDELIEPLVVELGARLLARPCVGIETAGQLLVTAGDNPDRLRSEAAWAMLCGVAPLPASSGKTDRHRLNRGGDRQANRALHMIAIGRLRTDADTKAYAARKTAEGKSKLETIRCIKRYLARETYPLLKVSINPED

SEQ ID NO: 224303 - protein, 365 aa, unidentified
MLIVGVDGPTASCAKVELFESNERAARMNFKRIAIDTSKHVFTLHGVDEQERPSLRRELKRGQVEAFFSKLPGTEVVLEACGGSHHWARVLQAMGHRVRLIPPQYVKPFLKRAKNDRNDAEAISEAAARPGMRSVAIKSVDQQAEAIILKHREMLVGQRTQAINALRGHAVEFGVVAAKGTTKVAPLLAVLAAETAIPAAARAMFAQMGAHIEALESRIVGLDAELAALHKAHPVSRLLAEIPGVGPMIAVTMALTVEPENFASGRHFAAWLGLTPREHSTGGKQRLGKISKAGNERLRSLLVVGAMSVIRFAKPGSKSASPWLLQLLERKPRKLAAVALANKMARIIWAMMARGEAYRRQPIAA

SEQ ID NO: 224304 - protein, 482 aa, unidentified
MKPKQKDKSKTATGRPTQPSWQEMNRKQRREMVRKIQSEELRLDVIHPDAAGIDIGNESHYVAVPPSRDSQPVRRFGCTTAELKVMAGWLHQCGIRTIAMQSTGVYWIAVYDILEEAGFEVYLVNARETKNLPGRKTDVQESQWLMKLHTYGLLRNSFRPPQEIRTMRTYWRQRNDSVQAGARHIQRIQKALTQMNIQLANVLSDVSGMTGQAIIKAILAGERDPHKLAELRDPRVKASEEQVERSLEGHWQEDLLFVLKQEQDGYEFCQNQMAECDRRLDQYLQQQKDRSQGASLPEEKRKERLKKKKGNKPRFDLRTGLFRMAGVDLTQIDCIDVMTATTILSEAGSDMSKWETEHHFVSWLRLCPDNRISGNKIIGKGRLPTSNRITSALKMAASTLRTSNTYLGAQFRRLRTKLGAPIAIKAMAAKLARLIYRMLRYGMKYVDQGAEFYEVQHRKLQIKHLKSKAAKLGFQIVQAPAA

SEQ ID NO: 224305 - protein, 367 aa, unidentified
MKKHTAMAVGLTLNRKCERLTIGLDLGDRSSCYCVLDAVGDVLLEQKVSTTPKAMREVFGSMPGCRIALETGTHSPWVSRLLSELGHEAIVAHARNVRLIAESKRKDDRLDAFTLARLVRIDPQLLCPVKHRSAEAQADLIVIRARAALVRNRTTLVNAARGLTKSYGEKLGRGNARSMKPKAAQDLSPELKNALGPLMKEIQSVSERIRDYDELLESMAQSKYPEAERLKQIKGVGTLIALTYMLTLEDPGRFRKSRDAACYVGLQPGRRNSGQSEPQMRISKEGDPYLRALLVQAAHHILGPWGVDSDLRRWGVKLAEHGGKRGKKRATIAVARKLAVLLHRLWVSGDVYVPLRQVGQAVVSAVA

SEQ ID NO: 224306 - protein, 442 aa, unidentified
MPLQEVAAQMKVMYERVAGIDVHKEMIKVAIRSPGEKPWTRKTEILEYRTFYGVLQQMAADLRKRGVTHVVMEASGVYTEPVYYALCEQDFTQVAVINPAHAKALKGHKTDAKDCARLAELFECGLLRGSYIPAPELKEVRDLTRYRTKTVQARTSEIQRLSKSLESAGIKLGSVASDITGVSATAMIEALIDGERRGGVLADLAKGRMRTAGKLADLSMALAGRFTGHHALLCRLHRDRIAGFDSAVAGLDERIAGGAARWQRETGLLTSVPGFGDVVAQAWLGEIGPAPHQWFSSHEKLASWVSLCPGNNISAKKRKHGRTGDAGTYIKPMLIQAAWAAIRVRGRLQARYNRLVRRFGGDNNPGAKKKAITAIAHTLLKIAYQVLKTGTPYQEPGADFYTRRESPAARQAFLQRQLQKLHPGCTITITISPPEAALTPGA

SEQ ID NO: 224307 - protein, 455 aa, unidentified
MAGKEREPFGLIHPQAAGIDVGAEEHWVSVPERYEKPVRRFGCFTSDLQAVGDWLEACEITTVAMESTGVYWIPLFQVLESRGIEVYLVNARHVKTVPGRKSGVLDCQWLQQLHSCGLLSASFRPADEICVLRSYVRHRDSLIRSSCDHIRRMQKALDEMNLQLHRVLSDITGKTGMSIIRSIVAGERDPDKLAKFRDPRVKRSEEEIAAALNGNYRSELLFVLQQELALYDAYCVQIRVCDEQIEQYLNQFEGQVDIHEAPPPAPKKRRRKPQGNTPRIDLHLHLYRLTQVDFTLIDGLDTLTVLTILSEVGLDPSRFPTEKHFASWLGLSPGSRISGGKVKSARTRKVVNRAANAFRIAAQTLSRSNSALGAFYRRLRARLGPQKAITATAHKLARIFYRLWLDGGIYIDPGVDAYEQQYRQRVINNLQRKAKNLGFELVPQASSNNMLESVS

SEQ ID NO: 224308 - protein, 395 aa, unidentified
MHSIGIDVGAAQHSVAICRAGNTEAERQVLRISSSRSGFAELDRWIAHQGVIDRIVVESSGHYWQTLASHLRTAGHPVAVINPLTAKYFAKRRLQRAKSDPADARTLAALGMVDRPEPREPLAEAQLREAARFTMRLVEEQSRVCNRILRLVDLGFPELAEAFEDPTCKTAIALLRVAPTARAAARRTVATLARANHGPGQRALGPTKAAAIHAAARQSIAVRELEEQIAFEMPLLIEQHELLERQIAAAEARVAGLLDGEVARRLQTIPGVGPASAAALIAEIGDITRFSSLDKLVAFAGVHAAEKSSGTKGRDPETSWHMAKTGSPYLRAALYRIAVVGLQHNPIIKAHYARKRAQGKAKMNALGHCMKKALAIVWGVWRGGRDFDPAAHSVA

SEQ ID NO: 224309 - protein, 413 aa, unidentified
MSLFVGIDVSSNDFKVRILDERGNEPVKRLRVLNDQPGCEQVARYLSEACNKENEDRLVIGLEATSVYSWPLQMFLAEDHCLAPLQPQIYSFNPKVVANFKKAYVDLPKNDWIDAWVIAERLRFGRLPEGSQVDFRYLPLQRLTRFRCHLIEMISREKNYFLTNLFLKFSTLAQGTVFSNTFSATSESLTLEFFSPEEVAARPLDELIDFLMEKGRSHFEDPESKARELKEAARKAHRLRGSLLQPINLILATSIETIHALEKQVKKIDKAIEAEIRHFPNTLITIPGIGPVLSAGIIAEIGDIRRFPNEGALAKFIGLTWRSHQSGDFTADDTPLTRTGNTYLRSYIIQAANLVRQKEPEYKAFYQRKFSESKTHHHRRALVLTARKLVRMVDALLRSNQIYMPHGNRGIAN

SEQ ID NO: 224310 - protein, 339 aa, unidentified
MKLYAAFDLHSSNSYLGIVEESGKRKFKRRLRNQPELIREKLEPFKDDIVGIVVESTYNWYWLVDFLMGEGYRVHLANPSQIEQYSGLKHSDDEDDAFWLAEMLRLKILPEGYIYPKEQRPIRDLLRKRGHLVRLRTSLIVSLQNILARNVGKKMKTSALKALKVDQVTPLLSGNDDISLAGRVSKEAIDSLTRQIKAIEVVVEKKIDLRKPYDLLLSMPGVGRVLALTIMLETGPIERFKKAGNYVSYCRKVPSGRFSNEKKKGSGNRKNGNKYLSWAYAEAAELARRLDTEARAYHDRKRRRTNKPIAYGALAHKLARAAFYIMRDGIPFMHEKAFA

SEQ ID NO: 224311 - protein, 410 aa, unidentified
MEVLHPRCCGLDVHKDTVVACVRLVIDGKTVKEVRTFSTTTADLMALSQWLAENKCTHIAMESTGVYWKPVWHILADGQFELVLANAAHIKGVPGRKSDVKDADWVSDLLAHGLIRASFVPDSPTQEMRTLIRTRKQLSREQARHILRVQKTLEDANIKLDSVISDLMGVSGRKMIEALIAGQRDPVKLARLADPRVKASQETLRQALRGRVTKQHRFLLRLHLDQIDGIDAAIAKIDREVEAAIAPFRTAVGQISSVPGVKNLAALQIISEIGTDMKRFPSDANLVSWACICPRSDESAGKRRSTRIRKGSPWLKTALVQSAHSAVRMKGTYFHALFHRIRSRRGVKKAIVAVAASILTAIYHMLKDGTMFHDLGPDHFNRRTKEQQKDRLVKRLAELGYAVELAPLPN

SEQ ID NO: 224312 - protein, 383 aa, unidentified
MARKPSPHQVIAALSMLGNETLYVGVDVGKKAHVAGFISSTLLIRHQRFEHCPALAFENSREGFRSLIDRIRMFVPLTQVQALLEVTGHYHRALLQYLQELAIPVFVIHVQKRQEGLLKSDKRDALGLANMLYNQLEKGIQVGDPLQAVRRLIPATEAAASLRGMVRHHYELVAESTERKNKLTAICDELFPEFTRLLRNPNLPTALALRERFPTPADLAAAPFWELRAARGRTCSVSDAKLQELQRLAAQTIGTKDPARVRGLVVEQKQLIRELNVIAVHLAQLETEMVQVVANCREGVILTSIPGIGPQAAATLIAMIGNIANFEHASQLKSYVGWVPKVAQSGSSLDWTRLSPRGVRQMKQTMYLIVWRAIQWDAEWARP

SEQ ID NO: 224313 - protein, 343 aa, unidentified
MQNTIIAVDIAKNIFEVAVSRRIGVVAERHRLSRRRFLPFFAELKPTTVLLEACGTAHHWARQLQNLGHKPILLPAHATRPYVLRNKTDQADAKALLEASRNKDIKPVPVKSIEQQALMTLHRLRSGWMSVRTARLNAIRGHLRELGFTIPLGARLVVPRLWELLEDAETNIPQFLRPALAEAGREVRELEQRILDIEKQLREVSRQSPLIMRLRTVPGIGLLTATALVAFVGNVQRFSSGRRFACYLGITPREYSSGQRRRLGHISKRGDVYLRTLLIHGARAVLNAAKRVETPDRLRTWVLSLEARAGHNRAAVALANKMARIAWAVWRNESAFQSTPAEA

SEQ ID NO: 224314 - protein, 421 aa, unidentified
MKNKLPVQQCEPARFIGIDWADRKHDVHSVDRHGIGQSRTIEQSPEAIEAWISEELAQAGGPIAIILEQSRGALVHALMFRENVILYPVNPQQFASYRKSYSNAGCKDDVTDAILLARMLRERISFLKPWEPDDENTRMLARLCEVRRKLVDERTRLTQQLTDQLKCCFPLALNLPGIRSFSPLMLEILRRWADPRQLRKADRRVLVKVCAEYRLRNEKQQEELIHAIRTAKLLCTDNAVIKPATIFIKVLAGQIGKLNEAVQCAEKHIDQEMQKHPDAHLFQALPGAGKALAPRLLTAFGSRRDRFEKADDVTTFSGIAPVTKQSGKSKTVHRRYACPKYLRQTFHEFADHARKWCPWSKAYYLLQRSRGMKHHAAIRKLASRWIRILFVVWKTRTPYDPQKYLITIQARNPKIVPFLNT

SEQ ID NO: 224315 - protein, 427 aa, unidentified
MEGSATTQNGTFVAIDVAKLVHEVLIEPPTGRRQRWRVGNCQSDFVTLRDRLRAFQTPVLIGFEATGNYHRPLAYYLGQCGFELRLISSLAMARTRDALYNSWDKNDPKDTQVLLHLLKTGVSQRYHDPLVHRTNDLQELAQTHYQISLRKVQVQHSIMTHYLPLYFPEAERYYTNSRAQWFTQLLHRFPCPEAITRYSQAAFEQEAWTIVGRKVNKRGFLADLYTTARQSIGLTVAEDSEAIQMFRVILAEHQHLCATRAAIEQQADRALQTHPDYQRLRTLPGVGPILALTILAEAGDLRRFPHHRQFLKFCGFDLSTQQSGQFRGMSRLSKHGNARLRYAFWMAANGAVRMRQNTFREKYARYIKHDPQNPDRKRKALCAVAAKVARVAHGLIKTGTDYRPYFEALPPSGALRSRGPSRQALTS

SEQ ID NO: 224316 - protein, 342 aa, unidentified
MEKVSIIGLDLAKRSFQAHGARAEGGVAFRKKLSREKVLTFLAEQPRCVVAMEACGSAHHWGRTIRDLGHEVRLIPPAYVKPFVKRQKNDAADAEAIVEAASRPTMRFVAVKTEEQQARAMLFRTRDLLVRQRTQLINALRGHLSEHGVVAAQGPANVKVLEEAVEDQGTSLPLLVVELARVFLDQIEGLSKRISGLEKVTAHEAACGETTRRLQTMPGVGPITALAIETFAPPMDVFKRGRDFAAWLGLVPRQHSTGGKQVLGKISKMGQRDIRRLLITGAMSVVRAAMRRGAPDGSWLQRMLARKPKMLVAIALANKMARSVWAMLAKGEDFRVPAAAAA

SEQ ID NO: 224317 - protein, 369 aa, unidentified
MEKRITFVGLDVHKNSIDVAIADSERDGEVRNYGKIGGDLDSLHKVVRKLQSTGATLRFVYEAGPCGYEIYRSLTKQGFDCIVVAPSLIPKKSGDRIKNDRRDALNLARLHRAGELKAIYVPTEGDEAMRDLTRAREDAVKAQRVARQTLLSFLLRHGYRYEGKSNWCLAHFNWLADIKFPHRAQQIAFQEYIHAVKELTERVQRLTCQVQELVITWELAPMVKALQALRGVSLIVAATTVAELGDLTRFDSARQLMAYLGLVPSEHSSGNTVRRGGITKTGNGHVRRVLIEAADAYKHPARETRTLLNRLEGLPEEVRKIAWKAQVRLCGRYRKLMARGKTRNSVVTATARELSAFMWAIACALLPSE

SEQ ID NO: 224318 - protein, 342 aa, unidentified
MSHRIYVAMDVHLKMILAVWQSGRGKRRKLVIEATAEGLEKLVQAVGPGEIWAVYEASSCGLEVHDRLTARGWKVWLLAPTHLPHSVESRKDKSDERDGHRMLDVLVAHGELGTKLPWVWIPPRKTREDREVVRRRLKLGEKLGQIKNELTALLRTQAVVRPADQKKAWTLKHVAWLRGLVTTIARPVAAVLSGLLEELEFYQAQIGKLDEQIRTLSEEPEYREPVGRMTELEGVGVLTAMVFLTELGDPNRFSNRGSLGKYTGLTPNRYASSDVDHKGHISRMGPHRLRKVLNQAAWAHVQHEGPWARWYAQVAERRGKKIAIVGLMRKLAIDLWHRARAA

SEQ ID NO: 224319 - protein, 346 aa, unidentified
MVTIGADLHKRSHTLVCTDAVGRQLARFTVAATAAGHAEALGWGRQWAERTWALEDCRQVSRRLESDLLRAGERVVRVPPKLTVASRRGARTRGKSDPIDALAVARAALREPDLPVAQLDGPSRDLRLLVDHRDDYVAERTRLQNRLRWLLHELEPGEEPAPRSLDRQCVLDALEARLAEAMTRVGRIAQELVARCRELTVRIKQLEREIAGLAKAAAPLLLELPGCGPLSAAKIIGETAGIGRFKSRAAFAMHTGTAPIPAWSGNTTHHRLNRGGNRQLNAALHRIAVTQLRVGGPGREYFERRSAAGDTKTAAIRALRRRLSDEVFRRLRIDESGSTMDPPMAA

SEQ ID NO: 224320 - protein, 342 aa, unidentified
MLIIGCDYHPSVQQIAWVDTETGECGERRLTHRGGEAEQFYRELKKKGISVRVGMEATGHSRWFERLLAELNDELWVGDPAQIRAKRVRKQKNDRRDAEHLLKLMLENNFPRIWVPTPENRDVRQLVLHRHRLVGMRTRVLNQLQAIAMNEGVRRKRGQWTEKGRAQLESLPLPPWTTRRRQELLELLDRFDSSIDQLSQAIVQEAARVPEVQRLQTHPGVGPITALAFVLVLGTPCRFGCGKQVASYLGLIPCEDSSADSWRLGHISKQGNALLRFLLGQAAQSVARSEEQWRHQYVHLALRRNHAIAKVAMARKLAVRLFWRWRRGWDYQQLKKFGSHVG

SEQ ID NO: 224321 - protein, 346 aa, unidentified
MTIVETTRPITGGVDTHADVHVAAAVDANGGVLGVESFATTPAGYVQLSGWLSGFGVVDRVGVEGTGAYGAGLARHLRSRGLMVIEVDRPNRQERRRNGKSDRLDAIEAARTALSGRASGVAKSADGDVEAIRALLVVRRSGRNVRIKYLNQIRHLGFTAPDELRERLRGVHRDRLARSAAAFRPTAGSETVMYATKLAIATLGRRALALEADGRRLDRELETLVRHCAPSLLEVHGVGTRTAAILLVAVGDNPHRLKSEAAFAHLCGVAPLLASSGKIDRHRLNPGGNRQANHALWRIVFTRMSSDERTRKYVARRVAEGKTIREVMRVLKRYVARELYPQLVRD

SEQ ID NO: 224322 - protein, 348 aa, unidentified
MILVGCDLHSRTQQVAVLDTRTGELVEQELAHDGDAVERFYRALPPPVTIGIETTGYTQWFHALMHQLGHTVVVGEAAKIRAMVVRKTKTDRRDARHLLDLLQHDRFPTVWIPDPDTRDRRALIAHRVRLVRMRTMVKNGLQAIALNQRLALHSALWTQRGLTQLKALALPPHTTRRRDDSLALLAWLTTRIDQLDEHIAAVASADPRVQLLLTHPGVGPLTALTTVLVLGPLARFPDSKHVVSYVGLAPAVHASADKQRLGKITKQGNALLRWVLGQAAPLAARQDDDLRRRYFSVMHRRGRPKAKVALARKLLVRLYIMLRDQIDYEEFRRRGRVPRPQQLPVAVM

SEQ ID NO: 224323 - protein, 326 aa, unidentified
MAKPITICAGIDTGKRKLDVAIDGSPERLQVENTSEGHRALVEWLRRHRVKRVGIEASGGYEQAVVAELRRKRFVVVVFQPAQVRAYARFRLQRAKNDKIDAALIAACTAAVKEIHPAPDPRLLPLAEHLTMIDQIGEDIARLKNRLETCRDERIRQAWMQEIARLETNERIELKALVAAIRKHSDLAKRLDLIHSVGGAGLPTAVAVLVRMPEIGQISREQAAALAGLAPYDDDSGDQLGARHIWGGRERLRRALYAAALPASFRWNPQLIALYKRLIAAGKEHKRALIACARKLLIFINTVVARGTPWQDQPEAAAIATGPSTA

SEQ ID NO: 224324 - protein, 448 aa, unidentified
MFTMHYKRLLTLIDSVSSYLSVGLDVGADFTWMSIALPNGSFIGKPFKIVHSDPRSRDLAVAKIKEAQETYSLKSRCFLESTGIYHIPLLCFLRDKGFDCSVINPIITKNSTNINIRKLHNDKFDSKKAALVGLNVSLKTSIIPDDSVVDLRNLVRDYYYFKDLQSAVALKLTAELKVSFPAYAKVFSKVTTQSSLKLLSSYPLAEDMLAASKDDIVKIIRSTARFGEAYALRKYDTIIAAAQDAAVFGRALPSNAVRIRLYIDTYQEYQKHLDALLKALHETVDRLQDTLIYDQICLLQSLRGIGFLSAVVLIAEMGDFKLFSSPKKLYAYFGLDPAVKQSGKLNGDKVHMSKRGSSLARRVLHMAALNNVKVDKRSGTPVNPVVYDYYTRKCSGKKKTVAMGAVMHKICNIIFAMLRDNKPFEVITPEEHCRRFAAEHPDKIRKAA

SEQ ID NO: 224325 - protein, 340 aa, unidentified
MHYIGLDIHKKTISYCVKDEGGRVWGEGTIAALRPTLDRWMETLPQPWTAAMEATMFTSWVYDHLLPRAAAVKVAHPLMLRAIAAAKKKNDRVDAGKLADCLRCDFLPEAYMAPIAVRERRRILRYRNLLVRQEVQCKNKIAQMLMEAGVSYTKEKLHYRGYFHQLLATNQEIDDSLRPLLRLTRENLVRLRRTESALLRSLRRDPLLVERVKRLMSIPAVGPITALTWVLELGDVKRFPSIKPVISYCGLCSSEDSSAGIAKRTPISKQRNRHLQTVLVEAAHLAPRLHPDLALLYEKEAQKGNRNRATLAVARKLVAYLLAVDRGERIFVMDHSQAAA

SEQ ID NO: 224326 - protein, 375 aa, unidentified
MSNHSEAFVAFDSSKLRNAVAIADSGRTGEIRFLGEIENSTTATAKLVRKLASKYERLTFCYEAGPTGYELYRQIRILGQECIVVAPSLIPKKPGDRVKTNRRDAVSLAKLLRAGELTAVWVPDRHHEAMRDLTRARDTAVNDLRSKRQQISAFLLRKGLHYCAGKKTWSQAHLNWLMSQRFEYPEHRLVFEEMMMAMRQAQERLERLEQAIRAAVPGWSLADLVTALMAMRGIDLISAATFLAEIGDLSRFQSPCELMAYLGLVPSEDSTGDRIKRGPITKAGNRRARRTLVECSWSYQHPPRVGKDKQAKVAAAPQAVREIAWKAQSRLNRRYRALVRRGKLKTVAITAVAREFAGFIWAVAREATAARAAAK

SEQ ID NO: 224327 - protein, 349 aa, unidentified
MEQNEVILGVDTHLDMHVGAVINDIGRLLGTRSVSTDMAGYLDLLTWASSFGPLRRAGVEGTGTYGAGLARVLRDHEIEVLEVNRPDRAMRRSKGKSDPTDAENAARAVLSGRATAIPKEQSGAAEAMRAVSVARRSAVKAKTQAINQLRALLVSAPQEIRDRLLKVKTAECIKGCIRLRSLGKTPMLQTLTTTLRLLAKRWLTLAEELKSLDTMLDDLTSQHAKRLRERFGVGPQTAAVLVAVAGDNPERLKSEAALAALCGTSPLQASSGKTVRHRLNRGGDRSANNALWTIAMVRMRSDPRTRAYVDRRTKEGMSNKEIHRCLKRYIVRELYPLILADLADSTRVI

SEQ ID NO: 224328 - protein, 530 aa, unidentified
MVTRLKKRKSAGAKKRFIGKPTGQIQERVQAVGPEHFGIVPVDCAKRRSKWMLCNFYGKVLIEPTTVEHTAGGLRWMTQLVAETCRSQELTDTIVAIEMTGIYHKPVQRAFRKAGFDTRIVHPFASNHYRRPLHPDEKTDDHDLEAIFHAAVNGYGLATLPVGEVHQSLQAVSRHRHNLVKQRSRLMVQIRRLLHQTMPGFADLFDDDHLFHKSIALPIALKFSSAAAIRSAGVAGIESHLTVAKVRYQTRTIERIVAWAGAAAEPSELAEMYTRQWRQLDEARRLFEQQIAAAEQEMAGFLAKTPYVLLLSVTGINVVSAARLAGEAGPIEHYASARAINGRAGLYPSRYQSDQVDHPDGSLVRQCNRQLRGAAMLVAENLIKCHPHYRGLSALWAQKKVDPRDRRCRIANRAMRMVYQLVGGRQVWHGREVDREYLLAKLQEFHRLHHTPIEQTIRDLNEAFAWLPKSAYEAEAKPLAKLVHRKRRGPQRIGDLLVPLLIRLGVARAELGGAAAETIESTTSEARSSG

SEQ ID NO: 224329 - protein, 394 aa, unidentified
MFLVGIDIGKHKHSFCIINKETGESIVKPKFFDNNKVGFEELLSSFKGLPKKDILIGMEDTGHYHFTLLKFLLDKKYQVALINPVTTDLTRKLSGSHTKTDKLDTLTICDVLTSNQRTKPYRISKVDRFDLYEQKQLTREHHNLKEQSNVLKNRLQKSIDIVFPEFNSLFKSMYGVVYMNILKEFGSADALAHSDIRTIRKCFDFKGRGKRIELTAKELKKAAINSIGFPSIAEVVQIKHLVNQIELVEEQIEELDKKIEEFSIANNSPILSIPGISHFSGTSILAELGDIHNYSKPSQIIKFAGVAPLTYESSQFMAKHTAITKKGSTYLRKTLYQIILPVINNNKVFKDYYNLKLSQGKGYRCAQGHCVRKLLRVIFQLLSTNTQFDPALLV

SEQ ID NO: 224330 - protein, 367 aa, unidentified
MTEGTTRYLGLDVHKATISVAAAAETGPPEAVATIANEPSAVRQLIERLGRGRRLVAAYEAGPTGYELYRQLLGLGVEVSVVAPSLTPTRPGDRVKTDNRDAVSLARLLRNGDLVPVWVPGPDHEALRDLVRAREDAKVDLLRARHRLTKFLLRHGISTPGGFSAWGQRHRHWLNQLSFSRPAEQLAFEDYLGAVQFGVDRLRRLEAALHECAESSQLLALIVALQALRGIAFLSAVTIVAEAGDLSRFPSPRQFMGYTGLVPSEHSSGQSRRRGHITRAGNAHLRHVLIQAAHNARYRPSTEETNSRLTDLPPDLVQLAHTAQRRLHHRYWHLQRRIGTSKTVTAVARELAGFVWAVGQRMAVSTR

SEQ ID NO: 224331 - protein, 369 aa, unidentified
MKHSIIFVGLDVHKDSMDIALADDGRNGEVRFYGTIGGDTTSLDKAIRKFRHSDTELRFVYEAGPCGYEIYRHLTAQDFHCDVIAPSMTPKKSGDRIKTDRRDAMSLARLCRAGELTPVYVTREDDEAMRDLVRGRGDAVNATRKARQRLSAFILRHGFRYSGKNAWSVAHLRWLADIKMPHPAQQITLQEYINSIEESSERVDRLTEQILKLISAWRMAPVVAALQSLRGVAPIVATTMVVEIGDLRRFENPRQLMAYLGLVPSENSSGQTTKRGGITKTGNTHARRALIEAAQTYSFPAKVSRVLRKRQEGLPREIKEISWKAQVRLCGRFRKLMAKGKSRNKTVTAIARELSGFMWAIAKEVPMPA

SEQ ID NO: 224332 - protein, 336 aa, unidentified
MNTNEKNQSYLYYVGVDLSKEKFDVVFLDSSIEHQHKVFDNNKAGIKRFISWLKDHDGFSFHRALICMEHTGLYSRELVKAMVSLNAFVWLESSLQIKKSLGFLRGKNDKIDAYRIAYYAKKYADKARFVQANNEVLQKLQDMLAARDRLMKAKGQLQRPLKELKRIDPAMYQYLLKINRPVIRQLNKSLVQIKKEILDIIHSDEKIKRQYLLVTSVQGVGMVLGVQLMVYTHGFSRMKNGRQLACYAGVAPFEHTSGTSIRGRTHTSNFANMALKSTLHLAAISSIQHNPDIKKYYERKVSEGKSKMCVINAVRAKLLYRVLAVVRRGTPYQNVA

SEQ ID NO: 224333 - protein, 425 aa, unidentified
MSPKKSEVDDLMVLHACCAGLDVHKKTVVACIIKTGESGKVSREVRTFAATTAGLLALSDWLSEHDVSQVAMESTGVYWRPVFNILEATFEVILVNAQHMKAIPGRKTDILDSQWIATLLRHGLLKASFIPPRPIRDVRDLVRYRKTLVYERNQEVNRLHKLLETANIKLGSVASDILGKSGRDMLASLHEGVTDHTILAELARGKLRGKLPELREALEGRVDAHHRLLLGHLLAHIEFLEDQVQALEGELEPYLKPYQAEITLLVSIPGIGETTAATILGEIGADMSVFPSAKHLASWAGVAPGNRQSGGKRLKARTTKGNARLRAALAEVVWVISHTKNNYLSAQYHRLVRRIGKAKAIVAVSHSLLVIIYHLLRDHKEYSDLGSTYFETLDQERVRTRAVRQLQALGYTVTLQTSAPQEESA

SEQ ID NO: 224334 - protein, 452 aa, unidentified
MAKRKQLRTRKRRNRPAPTINPNAAGIDVGATEVYVAVPTDRDPEPVRTFDTFTRDFHELAEWLAACGVKTVAMESTSVYWIPLYTVLEERGIDVCLVNARHLKRVPGRKSDVLDCEWLQYLHSVGLLQGSFHPPEAVAAVRTVLRHRTSLVQIASSHVQRMQKALTQMNVQLHHVISDITGLTGLAILDAILAGERRPEVLAQLRHRNIRAKEETIIKALEGTWRREHLFTLRQSLAAYRNYQTQIEQCDTELQDMLGSFESWRDPDATPVTGGPKDRLDTHGFDLRAEFHRIFGVDLTQIPGVGVQTVHTLFAECGRDLSAFPTAGNFASWLGLCPDNRITGGKVLSTRTRKVNNPASTALRIAAQSLHRSESCLGDSYRRKRYQLGPPKAITAIAHKLARIIYHLVSTQQPYDDSVLAQDEHQTRIRKTRRLKSLAQALGYQLAPIPST

SEQ ID NO: 224335 - protein, 349 aa, unidentified
MSQPVKPVVVRMGIDIGKSAFHVVGLDFAGKPVFRSRFTRERLIEFLARASPTVVGMEACPGSNWLARKAALAGHDVRIVPAQFVKPFVKSNKTDMIDAEAIAEAISRPTMRFAQPKTEAQLDLQALHRVRQRLVSNKTSVINQARAFLLEYGLTISVGAAYFVRDMPSILSDDQNGLTPSMRRLLEELWQEYRSIEARLLQLRQQIESIASADDAATRLTSVPGIGQLTATAITAFAGTGTQFKSGRHLAAWLGLVPKEFSTGGKQCLLGISKRGNPYLRKLLVHGARSCVLHLDRTKDHLGAWIGRMEARGIHRNKVIVALANKLARIAWAVLTREGALYLRQPKQQ

SEQ ID NO: 224336 - protein, 406 aa, unidentified
MDCHSISKGNIVPKKGEIFVIYVGIDIAKLNHFASAISSDGEILIQPFKFTNDYDGFHLLVSKLNSLEQDSLIIGLESTAHYGNNLVEFLVLHNYKVCVLNPIQTSTMRKNNIRKTKTDKVDTFIIARTLMMNPHRFFTTYDLDLLHLKNFGRFRQKLIKQRTRIKIQLKSYVDQAFPELQYFFKSGLLINTCYCLLKEAPTPNAIASMHLTHLTHLLEKASHGHFGKDAANSLRILAQKSVGSNDSSISIQITQSIEQIELLNSQVNRIESEMKAIMLSLDSVIMTIPGIGYINGGMILGEIGDVTRFSTPKKLLAFSGLDPAVYQSGNFNASHTKMSKRGSGPLRYALVNAAHNTVKNNQTFHLYYDKKMSEGRSHFNALGHCAGKLVRIIHKMLTDNVPFNLE

SEQ ID NO: 224337 - protein, 429 aa, unidentified
MNYNTQNAKIASITEKTLIVGIDVGSETHYARAFNWRNYEYSKKPFAFSNDEAGFASFKAWMNDMAEKHGMETIIPGMEPTGHYWLNLGAYLQEQGMKPVHVNPHHVKKSKELDDNNPSKNDRKDPKTIAGLVNEGRFSYPYIPTGIYAEIRNLSNLRIQTQEEITRIKNRIARWFSIYFPEIKDVYRNPDAVSGLMVIKQAPLPCDIKELGVNGVNKIWRDARLKGAGIKRATPLVTAAEHSIGNTEAPRSARKEIRNLLNDYEIYKNRMDELMQEIKETLSEIPYIDKLMEINGIGIKTVSCFIAEVGDIGRFDNPKQVQKLAGYAIVADSSGKHNGESRISHRGRKRLRYALYEGAISVIGKNKEFKEIHSYYRTREKNPLKKMQSVIAVACKLIRIFYTILTKGVDYDSQKMLNDIVRPEIQLAA

SEQ ID NO: 224338 - protein, 447 aa, unidentified
MKALPVLDARAAGIDVGSEALHVSVAGDSPQIFGTMTGDLLALKDWLKRQEVTSVAVEATGVYWLCLYEVLEAAGIKVLVVNGRHVRNLPGRKTDISDCQWLATLHAHGLLRSGFVPEADIRRLQDYVRLRDDHIRMAASHVQHMQKALERMNLKIHDVISSLTGKSGMQLIKAIVAGERNPDRLLALCDKQIRKRKEKRLREALRGTWKAEHMFALRQAVEGYEFYQRQIKECDQAMAEVLREMQQNGPQDGPPAGSVKPTKAMNSVNAPDIADLHWLLYTLCGCKDPTTLPGLGDYTLLQLIAEVGLDLTLWPTPKHFTSWLGLAPGNNQSGKRRGNSKKQRNRAGRIFCLIARALARSVDMAFGGFYRQLRNRKGGLIANQALARKLAEQFWRIMVYGTEFVEHGLQQYQERVAQTQLAALKRLASKHGFALAPLQAAPTVVHG

SEQ ID NO: 224339 - protein, 408 aa, unidentified
MRTEASVAQLGLDIHRKFSKVTARDGQGKIVWRQRLEHADRPRMRARLADWPSGAAVVLEGTFAWGWMSDELTAAGLDPHLASSSKLAAWRKARGMAKSNRKDADLLSELWSEQGRWWEVWLAPPEVREQREWLRYRMTLVRTQTALKNRIHAVLHRHGILREQSDLFGRDGRRFLELLIAPDDATLPDSARATLKGFLQLLDHVRRQIAAVTRQFRKQIKASPAAMRLKTIPGIAWVLSYTILAEIGRIERFADAKRLASYSLLAPVANDSGDEDDDPPLGRHVGHFGRRTLKWAFIEAAHGAVRSGGRFRAMYDRRTNGGTRDRNRGYIAVAHALCRVAYVCWKKQVDYTAEPPPRAGRRRGGRRRSHQAVVAQAAPAKATSRPELGQPETPMAAAAVVGRLQASI

SEQ ID NO: 224340 - protein, 344 aa, unidentified
MKITTIGIDLAKNVFQVHGVDERGRAVLKKQLKRDQMAAFFAKLPACLIGMEACGSSHHWARRLQGFGHTVRLMAPQFIKPYVKTNKNDVADAEAVCEAVARPNMRFVPVKSVEQQAVLSLHRVRQSFVKARTAQANQIRSLLGEFGLVMPKGITNVRKRVPEVLENATDKLPAAFRHLVERLLEHLKELDRQVGQLEAQIKAWHRSSELSQKLEKIPGIGPLSASALVASIADARSFDNGRQVSAWLGLVPRQHSSGGKPTLLGISKRGDVYLRTLLIHGARSAIVAAQRNARVNPWLAGLLRRRNPNIAAVALANKNARTVWALLAHDREFRPDYVPMLAAV

SEQ ID NO: 224341 - protein, 423 aa, unidentified
MSEYAALVAIDWADQQHAVCLSDPSTGEREQTIVKHTPTALQEWALGLRQRFAGAPIAVCLEQSRGPLIYALLQYDFFVLYPINPATLAKYRQAFSTGRGKDDPTDADYLLDLLEHHRDRLRPWHPDDEKTRTLRLLVEQRRRLINDRTRISNRLTALLKGYFPQVLDWFDDIRTRLVCDFLDRWPQLSLLQQARPVTVDKFLRSHHSTSKATNQRRLSEIKTALPLTTDAAVITASVLNVSLLVAQMKTVIAAIAEYDRHLEALCQTHDDYHLFAALPGAGPVHAARLTAALGSDRSRWTTADELVRFSGIAPIIERSGKQFRIRWRYFCPKFFRQTFHEFAAQSIQDSFWARAYYSSQRAKGKDHHAAVRALAFKWIRVIWKCWQSRTPYNEVVYLESLRKKGSSLLKFAADYQQSDFVTR

SEQ ID NO: 224342 - protein, 416 aa, unidentified
MNENANPIERVIGLDAHPDSFTAALLRGPTPAAAVVEKTFNKVPLAQLPSWAQKHTTPQDTIVLEASGNSFHVVRVLAGIGRQALVLESCQMGKLKEAHANNDQISAVRIGKAYLAGTAKTVWVPDAKTQERRDWFHAHRKAVKRTTQVRNRLLSYLSDHGVRLKQGTPLTEPKQAEAQLRRATDWSPRQWQVIEGLLMELRHADEQRAHWRSLIAQEVLGDPTLLSLVRLCGVREMVAFALGAFIGDIERFAEPGKLVKYLGLNPAFDDSGNEQWRGGIGGHGRKDVRCLLIEGAQAILRCGKTDLARWGKKLLARKGAINLVVAAMARKLAVAVWYLLKGRWTPLEEIDARLTIKVGKMIGSVGAKGLKQLGKVRRAYREEIYQTLKSGRVYVLDPHKQFVAARPGAQPTVAPA

SEQ ID NO: 224343 - protein, 422 aa, unidentified
MVLKGVPMALKIVYKICCGIDVHKNFVVACIAKTDKQGVTTYERHHFSTYTKGLKQLLKWLLDRNCKDVCMESTGKYWIPVYNVLEHDCSIVLAHPKYVKAIRGKKTDKKDAKWIADLFKHDLVAGSFMPPADIRQLRDLMRYRFKLTCFKSSEKNRYQNCLTVSNIQLGNVVSDTFGKSSQKIIAKILENPDDTSFDIGSLIHGSMKDKLPELELAIDGYITPEQAAKLKIIKEHFDNLEARKAELEELILALANPYQQEISIILTAPGFKNTFTAIGIISEIGTNMEAFPSAKHLCSWAGLTPTNNESAGKKKSVRVSKAGCYIKPLLVQCANAAIKSKKHPEIRDRYLRIKKRRGHKKAIIAIARMLLTALYHMLKNGENYNSDLYQKSDILPTTREITVEQAILMAQFQGFRIKSATE

SEQ ID NO: 224344 - protein, 315 aa, unidentified
MDQSLSPFVGIDVSKDRLDVAVLPSEESWSTANQDEDIQSLVKRIRSIKPELIVLEATAQLEMPLVGALAARGLPVAVVNPRHVRNFARASGILAKTDRIDAQVLARFGEKMRPEVRPLKDKETRELTALMTRRRQLVAMLVAEKSRLAAAPQAVRKDIKTHIAWLERKLSKMNDHLADKIKNSPVWHEKDALLQSVPGVGPVLSTSLLAGLPELGTLNRRQIAALVGVAPFNRDSGAFRGKRCVWGGRGHLRSVLYMATLAATRSNPVVRAFYHRLCEAGKPRKVALTACMRKLLTILNAIIKTQTPWRAQCAA

SEQ ID NO: 224345 - protein, 416 aa, unidentified
MDTMYERCCGLDIHKKTIEACFRSGKKKTHMSFGTTSAELRKLTMWLVENDCQSVAMESTGSYWKPIFNILELSGTDMKIIVVNARHMKNVPGRKTDVNDAEWIAELLQYGLLRPSFIPDREQRELRELSRYRKSLVGERAREINRLQKMLEGGNIKLTSVVSEVTGYSSRRLLDRLLRNDEPMTEDVISGLVHTSLVGKSKELETALDGLLSELQKELLIKVLDHIDDMSRRIADLDDFCRKQMKKYEDALDKLDEIPGIARRTAETILIETGLDMSRFPTAKHFARWAGLAPGNNESAGKRSSGRTTKGNPTLKSTLIQSAKVAARKKNSFFKARYQKIAAKRGANRASVAVAHSMLIAIYHILKSGEKFKDLGEDYYNQFNREKKKNYYLKKLTKLGVNLKEATLSISIQTAT

SEQ ID NO: 224346 - protein, 352 aa, unidentified
MRTSQKAAGIIATIGIDIGKNTFHLVGLDKRGAIVLQQKVSRGQLERRLANIPRCLIGMEACSGAHHIGRQLAAVGHDVRLIPAQYVKPFLKGHKNDYRDAEAIAEAVQRPTMHFVAIKTPEQLDLLALHRVRSRLVGQRTGVINQIRGFLIERGITVRQGPMPLRKALAEILSSDTGVLSPRMVGLVTDLVQDWRRLDERIAAVSAEVEALAEQDDGCQRLMTVPGVGPIISSAVVAAIGNGTGFKQGRDFGAWLGLVPKQESTGDRTILGKISKRGNKYLRTLFVQAAHVVLARRPSAAMRGLWPWIEQASKRLHRNMLAIALANKLARIAWAVLARGRAYQPRISADAA

SEQ ID NO: 224347 - protein, 347 aa, unidentified
MRFYTKQHKFYCGIDLHTNKMYLCILDETGEIRLHRNIETNRKIFMKTIQPFKEDIVVAVECMFTWYWVADLCVKKNIPFVLGHALYMKAIHGGKAKNDKIDSRKIAVLLRGGMIPQAYVYPQKMRSTRDLLRRRNHLKNKRAELLAHIQNTGSQYNLPEPFGCIAKPKYRVGVAESFDDPSTRMMIETDLAVINAYDPIIAKMERYIIHSAKHHDPVSHALLNTVPGIGKILSLVILYEIENIKRFPRVQDFVSYSRLVKCTKESNGKKYGSSGKKIGNAHLKWAFSEAAVLFLKGNEPGKKYLDRLANKHGKGKALSILAHKLGRAVYFILKNKKPFNQDKFLGL

SEQ ID NO: 224348 - protein, 338 aa, unidentified
MQTAQTVRTHALFVGVDIAAKTATVATQRPGTKTGRSLTIEQTPEGYTSLLQQLQATGSVPSQVLVVMEATGSYWISLATRLVHAGFAVSVINPAQAHHFAKALLKRAKTDAIDAQTLAQLAMVLQPEPWTPPPQIYYALQQRLAQRDDLLNLRQQVRNQLHALVQHPEVIPEVRARMERLLTTFEAQLVEVEREIAVALTQDSAWAAAATRLQSIKGVGWVTAAWTLVTTLNFTSCDTVDSLTAYAGLAPMPRQSGSSVWYRPAIGHTGNSRLRTAFYMATLSAAQHNPIIKAFYARLREAGKPEKVARCASARKLLHIAWAVVKKDQRFDPHYAQG

SEQ ID NO: 224349 - protein, 365 aa, unidentified
MVNATHLGLDVHKETIAVAVLRAGEVEPDQCTIPNTPEAIRKLVGRLGGPSQLLASYESGPTGYDTYRILEDLGVRCDVIAPALIPRRAGQRVKTDRLDARNLARLHRAGELTAIRIPSIEEEALRDFIRAREDLKADLRRSRQRVRALLGRQGRRYSARTARWGKQFTAWVRTHRFDDPILQRTFNHLLGELDTRTVHLAQMDREIEAAAQLPPLAERVARLRAFKGVDTLTATTLIAEVCDFRRFPTAASFMGYTGLVPSEHSSGQSQHRGSITKVGNPHLRRVLVEASWSYRHRPALTKNFKRRSEGQPPDVVAYAWAAQLRLSSRYRKLAVAKGHNKAVVAVARELAGFVWGLMNERTNVN

SEQ ID NO: 224350 - protein, 303 aa, unidentified
MQLYAGLDLHSRNTYIGIMDKEFKRVFNKRVANKLPLILATLKPFQNQLKGIVVESTFNWYWLIDGLMDAGYHCMHLANPAAMKQYEGIKHTDDQHDAFFLAQMLILGILPQGYIYPKEDRPVRDLARKRLFLVRHKTSHILSLQSLIARCSGQRVSANEIRKFTVEDLQQLLEQEYIVLSAQANLDTIVFLKQQILQLEKAIKNKVKLSKAFQQLLTVPGIGLILAMTIMLEVGDIGRFHQVGNFASYSRCVSSQRLSDGKSKGHGNRKNGNRYLSWAFTEAAHLSRRYNEHFRSYYNRKVA

SEQ ID NO: 224351 - protein, 318 aa, unidentified
MTQMTHTTALYVGIDVSQKTLTIALYPTDEVWTIDNTSQHHTALVQHLAQLPIQRVLLESSGGYEKAVVSALQQAGLPVVVVPAQRVRYFAKSMRGDLKTDRADARMLAYFACCYPVQPVAPCSPVQAELKELWARREQLVQQVEREKKRLHTVQSEAVRASLERMLAVLKDEIAQIEARVAELIASDADLSQKAALLQTAVGVGRVVAYGLVAELPELGQVSHRAIAALAGLAPVRCESGDWVGRARVRGGRPRVRRLLYQAAVVAVSHDGRWRAEYAGLLGRGKVKKVAFCAVARQLLVVLNAMVRDGRAYERVSE

SEQ ID NO: 224352 - protein, 328 aa, unidentified
MTEVHPTASLWVGVDVSKKKFDVYFERADGRGKGKVFANDAEGVAALLAWGRAQGVDWTQAGVCLEATGPYGNALAHALHEAGVVVAIENPARIQAFARMLGARVKTDRADARLIARYARQHPPRRWTPPSAHEARLHALVSRLDDLIVMRTMEQARAQQVQGEALRSVGNVLKALEGEITRLREAISDHIDQDPDQRRKADLLNSIPGLGQETISRVLAYLGPLERFENVRQVVAYVGLNPRVRQSGQRIGASPISKQGSSAIRKALYMPALVAKRHNPVLRAFCERLAAKGKRPKQVVVAAMRKLVHLMWGVLKSGRPFDPAIGLA

SEQ ID NO: 224353 - protein, 413 aa, unidentified
MEVLYERCCGLDVHKSKVVACLITPGEGKKPRKEIRTFGTTTRDLLMLGDWLGAAGCTHVAMESTGPYWRPVYNVLEANFEVLVVNARDIKQVPGRKTDVSDAEWIADLLRHGLLRGSFVPPKPVRELRELTRYRKSLVREKARAINRIQKVLEGANIKLAAVATDIMGASGRAILQALARGTTDPLALADLAQGRLRAKLPELERALEGIVGDLHRFLLQEELAHIEFLEQAMARVEAEIEERMRPFAQEVERLTTIPGVKKQVAWTIIAEIGTDMSVFPSHRHLASWAGLCPGNHESAGKRKSGRTRKGNPWLRETLVEAAWAASRARRTYLAAQYHRLAARRGRKKALIAVAHSILVIAYHFLAKGTTYQELGPNFFDHLNYQRVVKYHLRRLLELGYRIAPETVPGAVA

SEQ ID NO: 224354 - protein, 370 aa, unidentified
MSVRRILAKTIDTDLEYEAIGIDLAKNCVSAALLTTDGEVVCIDRLDYSELEKSAQALSSTTFAMEPCTEMNYLVQKLEAWGHRCLVIGGKNVQNYVENHYSGQKTDLNDAQALAFLAQDKQLRTIKAKDIEQQKYASLTTLREQYIKQYRQTIVSLKGICQAWGLNISKGISGKAQLKDLIENHAAFPEELRESLVDMVTHAQTTQKVLNKITKTLEVLAKNDKVCQLIQTIPGLGTICSCRLRATIGDIKRFKNPKDFPAYYGLVPRSIATGHNEKKGKITHRGDRTMRSLMVQGAGCVIRLATCGKLKSKQLTKWILKKQKEKMPWGKLVCAVAAKLLRIVRAVLISNKPYNSKIAGVAKCSLSKGS

SEQ ID NO: 224355 - protein, 385 aa, unidentified
MAPIRMPEAVIGLDVGKSSHWACVATRDGEVLLSTPVANREDDLDSLFGRFPDALVVVDQSRNIGALALARARAAGMSAAYLPGLAAHGAARLFAGDAKTDERGAMVIAKTALGIPDALLPVGDPGPTIAAARALAAQRNFLTCENTRNKNRLRSILLESCPAFEALVDLSDGSQLRLMASLGGAWSVADAGPRRAAALTRGAARGKIEALVRSTTSSTRPDASVVAAEDRAVKLLARRISENSAEIEAITAEISALLEGDDTYRCLLTVPGIGPKTASELAISIDIEDFPSHDRLASYCGLAPRNRQSGTSISSVTASRQGNKRLKNLLIFSCNCLTRTEGRWGDYYTRCRERGMSHGKALKALARKRLKVIYAVMRDRVPYAA

SEQ ID NO: 224356 - protein, 361 aa, unidentified
MAPSKLADWRTNMKHYVGLDVSLKETSVCVVDEGRKVVKEGKVASEAEAIAAFLTQMGLPIELVGMETGSLAPGLYHGLVALEVRVVCVDARHMKGVTSVMPVKTDRVDARNIAWAMQAGWYKRVHVKSLATHKLRMVLRSRKILVDLRLDIDNHIRGVLKAFNLKVGKASPGSFEKRVQELVADNADIAAVIETLLQARAELVRRVEVLHRMVLSLTKRDPVCRLLMTVPGVGPVTALAFCTAIEDPRRFSKSALVGAYFGLTPRKYASGEIDRTGHVSKCGDTMVRSLLFEAANALLTRVQSWNWLKRWGLEVVKRRGKRRAQVAVARRLAVIMHRMWLDRTDFRWSRDGETPTAAAAA

SEQ ID NO: 224357 - protein, 332 aa, unidentified
MNFKTFIGVDISKNTIDIALKQYESQVVGHRQFLNDKKGFSIMLNWIRKQTNNKIEDWVFCMEHTGVYVLPLACFLTENKLCFCLENPYHIKHSMGLQRGKSDKADSQMIARYASMHREELKLSNFPGQLLLRLQALLAHRDRLVQAQKGFKIASGELSDLIGKQTTAMIRKDTESLIKRIVARIKKAEEQINNLMQEDALMHKNYELAKSVIGIGPIIAAYMIVYTKNFTSITESRKFASYSGIAPFEYRSGTSIKRGNSVSHLANKKMKSLLNNGAWNAAKFDRELHAYFDRKVAEGKSKLSVINAVRNKIVGRVFAVVKRGTPFVQILN

SEQ ID NO: 224358 - protein, 407 aa, unidentified
MIFVGIDWAEEHHDVHVMNPDGQPLGRARVPEGIDGIARLHALVADHADDPAEVVVGIETDRGLLVTSLVAAGYQVYAVNPRAVDRYRDRHAMSGAKSDGGDAKVLADLVRTDRHNHRQVAGDSDLAEAVKVTARAHQNLIWTRQRQLNQLRSALREYYPGALAIFGNDLAHRDAVAVLAKAPTPELGRRLSTAQIASALRRAGRLRNVEVRAAAIREGLRAPQLTAPDIVADAYGTSAKALISVIATLTAQIADLESALADRFEQHPDADILRSLPGLAIILGARVLGEFGDDPDRYADAKARKNYAGSSPITKQSGSRKLALARYVRNRRLADAITLWAFCSLQSSPGARTFYDRHRAAGDTHHKALRALSNRWVGILHGCLRHRATYDEATAWGHLIKDLEAAA

SEQ ID NO: 224359 - protein, 343 aa, unidentified
MKLIRVGVDLAKNVFQVHGVGRDEKVVWRRRLARDRWLETLLEKLEPGCEIGMEACTGAHHWARRLREKGFTVKLMAPQFVKPYVKSNKNDATDAEAICEAMARPSMRFVAVKTLEQQDIQAVHRVRSGLIEQRTAKANQIRGLVAEYGLVAPRELGQLRIALPRWLENPENGLSSRFRRLLGALWEDLKALDDLVAALDREICAIARNDPGAKRLQQLRGVGPIIASALVAAVGDAKQFANGRQMAASLGLTRKQHSSGGKERLLGISKRGDRYLRTVLIHGARAVLRTAKHKDDRLSRWVSNLAARRHPNVAAVALANKTARIAWAMLRNGTDYQPDLVRG

SEQ ID NO: 224360 - protein, 355 aa, unidentified
MLKYCVGLDVSSKDFYACLSAIDSLQKVTVKCSAKFPNNLNGFDSIDAWLNKHHKQKDIPLVVVMEATGVYYENLALFLHLKGYKVSVVLPNKAKKYLQATGLKSKNDTIDAQGLSRMGAEQSLDLWQPKDEYFYQLRSLTRQHQSLQELKTNVNNQLHADEHGMYQNEVVISQLRVLIKTINAQIEEMEKAIVAHLNKEGEVAKLVEGITLIKGVGALTVAIILAETNGFALFKNIPQLISFAGYDVVENQSGSHVGKTRISKQGNGHIRRCLHLPALSVVRCKQSPFIELFDRTLQRHGIKMKSYVAVQKKLLVLIYVMWKKKEAYQPRNTNHSGEQEQMSSSLLSFEEAGLV

SEQ ID NO: 224361 - protein, 260 aa, unidentified
MQRWGSVVALSDEQDKVVYQRRVVNDLELILSELQPYLEPIQGLVVESTYNWYWLVDGLMEAGYWMHLANTAAIKQYEGLKYTDDNTDARWLAKLLRLGLLPEGYIYPKVQRPVRDLLRKRSQLVHQHTDNLLSVQNLMARNRGCSMSANRVKRLSFEQVHCLLEDQCLALAVNSTLAVMRSQEEMIKTLEKAAQKRVKLRPQFKPLLTVNGIGKVLGLTIMLETGEIQRFKRVGNYASYCRCVGSKQLSNGKKKGKGNT

SEQ ID NO: 224362 - protein, 409 aa, unidentified
MELPGGLLVPVVAEHVGWVGIDAGKVKHHAAAIDAEGELLWSVRVSNDQQAIADLVARATSGGAGVRWAVDLTGAVAALLLGVLQLAGQRVVYVPGRTVNRMAGAFRGEGKTDAKDARIIAETARMRHRDLAEVDAPDELVVELGRLTSLRVDLSADWVRGVNRLRELLTSVFPALERTFDFTTRAALMLVATCCTPSELRRTGERELAAQLAALGARNASSMAAAATNAACKQDIALPGEAATAVLIKRLARQLLDLDRTVREVSKLITERFRTHPQAEIIESLPGMGPILGAEFVVAARGDARRVFGSSGRLAAQAGLVPVPKDSGRVSGNLHRPKRYNRSLRRVFYMAALSSIKANGPSRAYYQRKRGENRLHTQALPALARRLVDVLWALLRDNRTFTAAAPVIA

SEQ ID NO: 224363 - protein, 484 aa, unidentified
MPQGIVQREGEEMARATRRQGGGQQRQRRSSRGRPAQLEQLNLNAAGIDVGATEHWVAVPADRDAQPVQRFGAFTADLYALAEWLRQCQIDTVVMESTGVYWIALFAVLEERGFDVKLVDAHYARQVPGRKTDVKDCQWLQELHTYGLLRGAFRPEDEVCVLRRYLRQRSMLVAMASRTVQHMQKALEQMNLKLTEVVSDITGKTGMTIIRAMLAGERAPQLLATYRDKRCKHDQATIAKALTGHWRAEHLFALQQAVEQYDFIAQQLRACDGHIEGCLQAFVPDVEIDAPQAPSARPWRSSRSNPLSFEVQAYLEAMTGVDLTQIDGIESLTALKVLSEIGRDMTRWPTSKHFAAWLGLCPGNKLSGGKRYRMRSKPSANRAATALRLAAQGVANSHSALGAYYRRRRARLGAPKAITATAHKLARLVYSMLRYGTAYVDAGQQAYEQKYRDRVLTNLQRKAKAFGYKLVHVEDIAGGVASTL

SEQ ID NO: 224364 - protein, 324 aa, unidentified
MNLPCLGIDIAKVKFNVCLLQLTGKLKHKVFSNTATGFEQLQQWLKKHEVQLVHACLEATGTYGEALSLYLHHHGHTVSVMNPAAIKAFAASRLSRTKTDRVDAELIARFCLAHQPPAWTPPAAEVRELQALVRRLESLLEMRVAEENRLAAGVTVVAVRSSVEELLTHLKDQITRTEKLIRKHIDKHPGLKQQSELLNSIPGIADTTAALLLAEVPNIKQYRSARQVAAFAGLVPRERQSGSSVKGRVRLSKIGNARLRKALYFPALTALRCSPFFQHWAEGLRQRGKSKMSVIGAVMRKLIHIAYGVLKSGRPFDPELAKSA

SEQ ID NO: 224365 - protein, 319 aa, unidentified
MAQNDLVVAGIDVAKDKVDVCIRSLSLKRTFASTEEGRRELTSWLRRRKVGKAVMEASGGYERDWAKVLRNAEIEVRIVDPKRVRSFAQSAGRLAKNDTIDAEMIAWFAETFDEARGQAYDETREQLHQMVNARQALKGMQAKLESQGEHGLPAAVQRMHARILKTITVELVKFEAAIAAMIQATPRFTELAEIIESVPGIGRTTSAALIAAMPELGQANNKIVAALLGVAPYDDDSGRRRGERHIKGGRRRTRNVFYMACLGAATQHNPVLKAFYDRLVAKGKEKKVALIACMRKLISILNIMIERRQKWDASRYAVS

SEQ ID NO: 224366 - protein, 347 aa, unidentified
MRYVGIDVGKQRCRAAVMDREGSVIDEFTFTNNCQGIEDLASKLTMDDRVVMESTGSVWTNLYNCLDDRQISVVLANPLKTKAIASARIKSDKVDARILAHLLRSDLIAQSYVPPKELREIRALIRHRASIVKIRSMVKNKVHALIDKHGFRCEYSDLFGKGGTQWLKKLELPSLDRLMLDNHLQHIESLNQQIERVDEEIRSKASQDEDVKILLSMTGIDIYTALLIRSEIGSIGRFPSYKKLVSWAGLAPSLHQSGSIEYRGGITKQGSRMLRWIMVEAARVAVNHDERMRRFYEWVKHRRGDQKAVIAVANKMLKIIWFMLTRREPYESANQERYERKLNSLVH

SEQ ID NO: 224367 - protein, 375 aa, unidentified
MKKNSSGCKSPKARMKATKATNVTVGMDLGDKTSRYCMLDENGEVSLEASVATTKKVMRQVFATMKRCRVAIEVGTHSPWVSRLLKSFGHEVIVANARQVQLISKSSRKNDRMDAQTLARLARVDPRLLRPIQHRSEQAQGHLRVIRVRAALVEARTMLVNAARGLTKATGERLPSCDADQMSVERMEPLPAGLQNPLRPLLEEVESLTEKIRALDQQVEQIARTDYPETDLLRQVSGVGPLIALTFVLTVEDRERFQKSRDVGCYLGLRPRQSDSGESEPQLRITKEGDTYLRKVLVQGAHCIMGRRGTDTDLKRWGLKLSARGGKNAKKRAVVAVARKLSILLHRLWVTGEVYEPLRNSQSGPPVKKTSKAAA

SEQ ID NO: 224368 - protein, 347 aa, unidentified
MIIIGCDLHSRFQQIAWVDTDTGEVENRKLDHESGEAKRFYEGLKEPALVGIETTGHTRWFAEMLAELGHQLVVGDAAKIRACEPRKQKHDRRDAEHLLNLLIRGDFPKVWLPSAEERDVRVLVEHRHQMVELRTRAKNGLQAMALGYGLRRRGRLWSAAGRKELQKIPLREGMARRRQDLTRLLDQLSAWVKELDQRIEEEVARREDAQRLMTHPGVGAQTALATVLVLGPAERFPDAQHVTSYLGLIPQEESSGGRQRFGHLTKQGNRLMRFLLVEAAGIASRYDPGLRRTYRRLAFRKGAAVAKVAVARKLAIRLYIMLRDGIDYAEFCRRGSHAGMLGDVALA

SEQ ID NO: 224369 - protein, 345 aa, unidentified
MQIKSIGIDLGKTTFHLIALGSRSQVVIRKRFSRSQLLVYTANLPSSLIGMEAGVGSHFLGRALREQGHEVRLIPAQFVRPFVKSNKNDYRDAEAIAEAVERENMRFVPIKTEDQLDLQALHRVRDRLVARRTSVINQIRAFLLERGISFRKGPASLRRQLPEILENADQKLSSRMRRLLDFLWQEWKGLQAQVESLNADLEQIASSDAACVRLQQIPGVGPLVSTAVVSAIGNGAAFKKGREFAAWLGLVPRQWSTGGKPKLLGISKRGNPYLRKMFIHGARAAVLRVKREGSSLGKWMSGLETRAARNVVIVATANKLARISWAVLASGNDYHPTHKTLVFSN

SEQ ID NO: 224370 - protein, 316 aa, unidentified
MKSSEVFVGIDVSKAALDVCVIPEIQEWHVSNDDTGIRGVVKRLKAIRPILIIMEATGGYQVPLSAALVKADLPAVVMNPRQVREFAKSRGYLAKTDKLDARVLAEYGQGNRPEVRPLKDEQTRELDALVNRRRQLKDMLTSEKNRLETSSKRVRRDVKAHITWLEKRVKDVDKDLASFIKSTPVWRDKDAIIRSVPGAGPVLSVNLLAKVPQLGIMNRRKISALIGVAPFNCDSGTFKGQRRIWGGIADVRRVLYMATLAAIRSNPVIRAFYARLVNAGKKRKVAITACMRRLLVIINAMVRNRTMWDPCRFAIP

SEQ ID NO: 224371 - protein, 401 aa, unidentified
MKRVCGLDVHKDTVFCATFNGKKHGPVVEYTTLTSSIRAMGESLRKEGVDEIAMESTGMYWIPVWNILEDMGFPLILVNPFLIKQMPGRKSDVKDAQWIATLLHKGLLRSSLIPCPQIRELRTYSRKYVKLQQRQTSVLQDMERTLEMCSIRITRFVSNISGKSVLRVIEKIVQGETSPDVLVEVIHGRIIHSHTTKKIKESLTGFIKEHHRFMLELSLNEYEMLVIQSNLCLSKMEELCNEHYKKELKLLLSIPGINTIAAMIVLAETGADMKAFEHSGKFSGWTGLRPRNDESAGKYKSTATTKGNRYLRAILVQIAWGAIRTKGSFFKEKFNRLAMRKSRKKALIAIARKIGVLIWNVLYYEKGYDPKRLIVYDPGTLQAKILYHQKEYDRLQKLIQH

SEQ ID NO: 224372 - protein, 379 aa, unidentified
MMEDRPLWWYAGFSAKTHHAKETAMGVKYVGVDVHGQTCVFHVLDDKGTDVLGGAVVPTRKEPLLEFVKHLGGTVHLALEEGTQAQWFRALVRPFVEKVVVCNARKNTRGRTLRNKTDRKDARSLARLLYQGELSPVYHGDEDLEEFRNLVKTYQVLLADTTRAKNRIKAVYRARGIPTDGNGAYGRSTRQQYLEKATSSAVRSRLEAFHVQMDIGTALVQQARSNMLLEARKYCAYRTLMTVPGIGRIGAAVLVATIGTPRRFPTKQAFWAYCGLAVIHRESGEHVIGPDGIRRRSGPTRTYGLNRNRNGSLKGVFKVAAIAARKDPEVEEYYQGLLARGLRPEVARVQLARKLATVALTIWKKGCRYEKGRLKQQNA

SEQ ID NO: 224373 - protein, 347 aa, unidentified
MSHGMKIANVQRVGIDIAKTVFQLHGIDRRGVVCFRKRCGRENLLAFTQQLPSCEIAMEACSGSHFWGREFEKQGHRVKLLPAQHVKPFVRSGNKDDRIDAEAICEASQRPGIKPVPIKSHDRLDLQALHRHRRQLIKRSTMLSNQMRGFLGEYGIVVAKGIKHVFERIPEILNDNDNGLSPAMRDLLRDILNDFYLTRTRIGKIEKQLEQFCRSNDDCRRAVAVPGVGSLTATATYAAIGNGRQFKNGRAAAAWVGLTPTHTGTGGKTRVGHLSKKKGNKYLKVLLIRGGHAVLRFAATSSDKNNHRFQALSERSAKNVAAVASAHRTIRVLWAVLSSGQEYRKAA

SEQ ID NO: 224374 - protein, 351 aa, unidentified
MLIIGCDFHPGFQQVAIFDNRTGAIQERRLPHREEAEQFYRSLSGPVRVGMEACGHYPWFERLLEELGFELWWGDAAEVRASVVRKQKTDRRDAEHLLHLLLENRFPKIWVPSLEVRDGRQLRVHRHKQVQARTRTKNQLQAMALSQGVQKKWKLWTKLGRAELEQLPLLPYAAERRQRLLEALDGLEAELVELNRRVDEEVRKRPEAMRLRTHPGVGPVTALAMVLTLGPAERFASGKDVGSYFGLIPREDSSGGKQRLGKISKQGSSFLRFLLVEAGQTAARYDPQLKRFYRRLAMRKNRGVAKVAVARKLATRLYLMLREQWTYPQLCQAVMQVSPSHSVVEPEKPTA

SEQ ID NO: 224375 - protein, 438 aa, unidentified
MKKIRTHAAGIDIGAKKVYVSIEDLPVKSFDTFTQDLEALGVYLVAHGIETVAMEATGVYWVILYDILVSQGLDVWLVDGAGTKQVPGRKTDVKDCQWIQQLHSYGLLNKCFVPDIRVQELRAYQRLREDHIRSGAMHISHMQKALILMNIRLKEVISQIHGTSGMRIVRAILSGERNAEKLALLCDQRILKTKKEWVIRSLKGHYSEAALFELGQAVACYDFYGEQIAMCDIKLEEVLKKMDLDGTPKPRSKGARKAIRHNRPDIENMGGHLLGIFEGKDATALPGITDYNWMQLLSEVGTDLGKWKSEKHFTSWLGLAPKQHNSGKMKRNYKPKGAPRAGLIFKQAAVGLLNSKHIALGAFGRKIRAKKGGLVAIKAVARKLAELYWKLFVKGLEYVENGIQKYQEKMLLNKQRAVTRMAQELGLGITPLKIQSAD

SEQ ID NO: 224376 - protein, 367 aa, unidentified
MKKCHLNTELSSLEGTRCQFNGGRCAIKLGIDVHQDFYVVVEQEGGANPKPPQRFSKQAFLHWAAKLARSGAEVHAVYEACGFGFGLQRNLTALGIHCYVVCPQKLDEQNRRVKTDGLDAKALCLKLDRFVQGNRDALALVRVPTEQEEQQRAIHRQREQLVKARKQLEAQGRSLMVNHGVEPVQQWWKRRAFSHLQVSEWMRAMLSNSRPILLGLEEKIRALTVQLQSAAGTKQPRGLGLMTSVIIDREIGDWHRFNNRRQVSSYTGLCPGEYSSGNTRLQSCVTKHGNPRLRAALVELAWRLVRFQPNYKPVLKWRQILAPQPRGALATGAARKKAIVAVARQLAVDLWRIKTGRLTAGQLGLKI

SEQ ID NO: 224377 - protein, 347 aa, unidentified
MEHVGIDVHKKESQLCILTDAGDVIERRIRTERERFAAVLGTRPGGRVLLEASTESEWVACALEALGHTVVVADPNYAPMYGTRSRRVKTDRRDARALAEACRLGAYRPAHRTSPARRQVRAELAVRETLVRTRARCISLIGALLRREGLRVAAGSAPAFLRRLEAVALPPPLAAAVAPLRALLAPLTEQIAAADARLAAGVDADGVLRRLVTVPGVGPVTAATFVATLDTVARFAGPHHVAAYLGLVPSEHSSGERQQRGAITKTGHRRTRRVLVQAAWGLLRTRGAEATALREWAQQLAARRGKRVAVVALARRIAGILYALWRDGTSYEAARVRGPRPPTHAAA

SEQ ID NO: 224378 - protein, 388 aa, unidentified
MGHHTEAYVGIDTSKSCNAIAIADGGRGGEVRYLGELPATEATIRKLVAKLAAKYRDLTFCYEAGPTGYGLYRLLKSLGHECLVVAPSLVPKKAGDRVKTNRRDAVSLAKLLRAGELTAVWVPDERHEAMRDLSRARQAVKKDLQGKRQQISSLMLRLGRIYPGKTTWGPAHMKWLMAQKLEHREQRIAFEELLEGVRQESERVERLENAIREAVPEWSLAEVVAALQAVRGIDLIAAVGVLAEIGDLSRFQNPRELMGYLGLVPSESSTGDKVKRGGITKAGNGRARRILVEAAWSYRYPPRVSREKQPKVEAAPRRVREIAWKAQTRLCGRFRSLERKGKRRTVIATAVARELSAFIWAINARPAHSPLRCNQIQGDSRRHQIVQK

SEQ ID NO: 224379 - protein, 393 aa, unidentified
MRYIGIDVASETHVVAVVNEEEVVLHKSTSFKEDAAGYQRLREIIGSAEEAHVGMEATGHYWQNLFAFLIAEGFQVSVVNPLRTRRFAEEDLKRAKTDAIDAIGIARFLRQKRPAPTVLPSEQLLELRELVRLRDRLVQDMVDRVNQLHRVVDLGFPEFTGHVKDLSSLLATTLLELHGTARSFAKAREGELANVIYDGRRSVGRELARELISAARLSVGKHHGPAYDLQAKYACQDIRLLRERIRMLEKDIHSAVSKDELATLLTTIDGIGPNTSARIIAEVGDPANFASDGALAAYIGAVPQTKKSGKKTSDRASMTRIGHAKLRAKLWMPTLVAATKLNPWLRSFYDRLISKGKPAKVALVACMRKLIAAIYSVAKNRRPFVPRLNQPTT

SEQ ID NO: 224380 - protein, 371 aa, unidentified
MGKASTFVGLDVHKASIAIALLRLGQREPLEWAIRNEPGAVHRLIRKLERELPDGLQCFYEAGPTGYVLKRQFDRAGIPCQVIAPSLIPVKPGSAIKTDRRDARKLAELLRAGMLTEVAPPTEDEEAVRDLTRSRDDAQRDLTRARNRLSKFLLRRGCVYAVDRKPTWSQKYRAWLRAQRFERVADQVIFEDYLLAVEQVEERLQALTDRIEHFAGQAPWRERVQALRCFHGINTVTALALVAEIHDPRRFPHPRQLMSYLGLVPREMSSGQRERRGGITGAGNRHVRRLLVEAAWHYRHKPVVGRALRLRRREQDPKAIALADRALRRLTLRQRRMLYQGKHANLVNIAIARELAGFVWNVLQPGTTSQS

SEQ ID NO: 224381 - protein, 392 aa, unidentified
MIKENFIYVGIDLHKETHTAVMIDCYNQKLGEITFPNRPADFPKLVTKVKKCNTDGKEVVYGLENAYGYGRALAVWLIDKGYLVKDVNTAISHRQAKHRGAMYRKSDSDDAKAIALATLNMLDKLPDACPNDAYWSLGQLVHRRDNIMKQRTRLVNQLHEQLCIAYPSYKQFFNDISRPTALYFWEHYPSRKYLKGKSVEDLRAELVPVSHNKCSTKTCEKILDAVASDKVKNNAYQDARDMVTLSIVSDLQHYDSQLAEVDKMLEQMYKMLGCTLTTIPGVNVITAVKILAEIGDIKRFSNANKLAQFAGIAPLHLSSSGKGKDVATKQGNRRLQATIYFLAIQMVQVSSKGTPRNSVVRAYYEKRKAEGKTSQQALICISRRLISIIYGM

SEQ ID NO: 224382 - protein, 404 aa, unidentified
MFYAGIDWADQKHDGLVLDEAGRKLGSIRVPHTPEGLDKLDAWLSSALNGQDKQQMACIIETNHGLLIAFLLEQGWPVYPVNPRTVDRKRSASGSKTDAIDAYLLAKTGRADFADLRRLTPDSEKIAELKGLTRDQDSLIQMQTRLVNQLTACLKAYYPVALDLFAKLQQRSALMFLQTYPTLEAAQTASVEQIRQVLKSAGHTTASKVAPKLFAQLHQPSLRADAVITRTKSRLAVALIVQLLPLREQIAAYDKEIEQLFLSHEDNEVFSSLPRAGKRLAPRLLAEIGDDPSRYETAASLQALGGTSPVLFQSGNYSKPHRRVGCIKPLRNALHQFAWQSTLQEGWAKAYYERKRAEGKSHSVAVRALSNIWARILFAMLKSHEPYVTATFEAAQGAHAPTAA

SEQ ID NO: 224383 - protein, 366 aa, unidentified
MSVFYVGLDVHSKMTEYAVEDDAGTLISQGRVPTTPEGLRLLVTEHRVAPGTRVGLETGTMARYVAGQLVDLGLEPRVIDAHEVRLKAYRPRQKSDRRDAFEICEGVRRDIYRSIVHIPPEPVQHLRTTLAQRRHLVRVQSAEMSAAKHVLRSSGLRALSRQLQCESAWQRLIATIGDPLLASRLEVHHAVWRAAGEQVALLHSSLVGQSQHFEADFLRLQTVPGVGPIVALTAIAAFSDAKRFPSAKHAASYAGLVPSTDQSGDRDWHGHITKQGPAELRSMLCEAAHHAGRKNHPLNPYFKSLCARRGYKMAITAIAHRLCRMLYAMLRDQTDFDIQQLGIEIGPFEKKIVMPYRLRRHATPRS

SEQ ID NO: 224384 - protein, 341 aa, unidentified
MNITTIGIDLAKNVMQVHGADDHGRAVLKKQLKRAQMLPFFVNLVPCKIGMEACGSAHYWARKLQALGHTVQLIPPQYVKPFVKRNKNDAADAEAICEAVTRPNMPSVPVKNASQQAILSVHRARQGFVKARTAQANQIRGLLAEYGIAIPQGIGHIAKRIPEILEDGENDLPGSFRALLQRLADHLKALDRQVGELEVEIQFWHRENDASKKLAKIPGIGPITASALVATIGDARNFKNGRQLAAWLGIVPKQHSTGGKSTLLGISTRGDTYLRTLLIHGARAVVRIAENRPNADPWLKRLLARRNKNVAAVALANKNTRTLWALLAHDREYLPDYRVAP

SEQ ID NO: 224385 - protein, 338 aa, unidentified
MMYGAIDLHLRYSEIRVVEADGRVVRERRVVTSRATLTAAFAGLGVLRVLLETGTESEWVAQTLEAAGHAVVVADPNYAPMYGEVRRRVKTDRRDVAALAEANRHGWYRATHRRSRAQRTLQQILRSRRQLVAMRTGSISVVRAVLRQEGYRLPSGSAAQVPARLARVPLPEGLAATLAPLRQVIDTVTRAVAEIDTRLRTYAAADPVVTRLQTVPGVGPVVALTFRATLDEVTRFQAAGQVSAFLGLVPREDSSAERRHRGHITKAGSGELRSLLIQAAWACWKSRGSGTLRAWAERLAGRRGRRIAVVALARRLSRILYAVWRDGTTFDGARVAAA

SEQ ID NO: 224386 - protein, 402 aa, unidentified
MEYYTTIGIDVSDRTSKICLMAKSGAKRHILEETTVPTTRAGFTEYLKDKDPGSVLVTFETGTHSRWMNSLIGDGLGFKVHVANPAKLPTVTKSAAKNDRNGARELARLALADPELLHPVRLRREVCQAMLRVEYVRQDLIACRTKLTNTLRGFAKAMGGRIESCSPEKIVSLNRADWPEELRKLISLVEETLESINADVKKSDDEIKRRTCLSPFKEHMPRAQEVYGVGLHTAATFLAVIDCDVSRFKKARDVGPVVGFTPRQDQSGEMEKQLHATKAGNPLLRKLLVEAANVTMRTLSPDTDLKLKGERICAHGGKIAKGKARVAVARGIAVTMLALLKHPEREYVPLTENGAEELARLREQVARQGLARANHARKAEAAERPEPRPDRQGAKRKDFSNH

SEQ ID NO: 224387 - protein, 352 aa, unidentified
MKSKSPEDIAVIGVDIGKDTFHLVGFDHAGERILRKKIKRLALKPTFEKFARCVVGMEACMSAHFVSRMLRRLGFEPRIIPAIYVKPFNKGQKNDYNDAEAIAEAAMRPNLRTVTEKSQDQLDLQALHRVRSRLVARRTATINQIRAFLIEQGITVRSGRHALQSSFEAILENRRDEISSRMRAILMGLYGDWLWVDERIKAISSEIEEISRSEENSVNIMTIPGIGPLISTAIVAAIGKGEVFDRGRDFAAWVGLVPRQFSTGGRTILGRISKRGNSYLRMLLVQAANVILMRPHRWDSLGLGPWLRGVVARMPHNKAAVALANKLARTAWSVLRYGSKYEVERDEALAAI

SEQ ID NO: 224388 - protein, 369 aa, unidentified
MIIIGVDYHPSGQQIAFLDQETGECGERPLNHSDGEAEKFYRDLQQRGVSVRVGMEATGHSRWFERLLAELGIETWIGDAAEIKRQRVRKQKTDREDARLVLKLLLENRFPRIWVPSPENRDLRQLLWHRHRLVQMRTRIMNQLQAVAMNEGYRWKKKLFSAQGRALLAKLSLAPWARRRRKELLELLDQLDPKIAELTAAVEQEAQQRPEVLRLMTHPGVGPITGLAYVQVIGTPDRFPCGKQIGSYTGLIPCEDSSAGKQRLGHLSKQGNTLLRYLLGEAAQAAARCNPDWRRQYVHLAMRRHKNIAKAAMARKLAVRLYWMWRNGWDYSQLVEFGSHAGKLATGHGVKQSVVHLIGHPAPCKGSLK

SEQ ID NO: 224389 - protein, 391 aa, unidentified
MLEVKVERCAGIDVGKKFLEVCILIGPVHRKPAEEVRRFATNVRDLEALRAWLLEKACTEVVMESTGSYWRPVFNILEGNLQVILANPEQVKALRGKKTDRKDCRWLAGLLRHGLVQASFIPPRDIRELRDLTRRRRKLLENGTEERNRVAKVLEDANVKIGNVLADVFGMSGQAMLEALLENKLSAEQMANLAHRRLRPKIPQIVEALEGHRMSDHHRLLIGQALKHMQFIEDMVEELNQEIQKKLQPYQRQIELACTVPGIARDAAASILAEIGFDMSDRGPFATCHHLASWAGVCPGNNSSGGKRKSGNIRKGNRWLKATLSQTAWAGAAKKNSTFQFRYQRLKTRRGGKRAAIAVAHAQIIALYWVLRNGVPYQQQIRELHQQQRES

SEQ ID NO: 224390 - protein, 344 aa, unidentified
MDYFAGLDVSVKKTSVCIVDDTGKIVRELKVASEPEALLAVLTNPAYRFKRIGLEAGPLSQWLYSALAEADLPVVCVETRHMQAILKAQINKTDRNDARGIAQMMRVGVYRPVHVKTLRSQKLRMLLTHRKLLQSKAIAIENDLRGTLRNFGLKVGIVGTAKFEVRIKELVENLPDLAILVEPLLIVRRVLREQIVVLHRRLLTIVRDDGVCRRLMTTPGVGPVVALTYRATVDVPARFRKSKSVGAVFGLTCSKYQSGEIDRSGRISRCGDEMMRVMLYEAAQSMLRSKKWSWLKAWAMQIARRRGMKKAIVALARRLAVIMHRIWVDGTEFRWTREQAAAAA

SEQ ID NO: 224391 - protein, 356 aa, unidentified
MSQKLDTSPAVIGIDIGKNSFHIVGQNQRGAVVLRQKWSRGQVEARLANLPPCLIGMEACVGAHHLSRKLQALGHQARLMPAKYVRPYSRGQKNDYRDAEAIAEAVQRPTMKFVATKTVDQLDLQALHRVRERLVSQRTGIINQIRAFLLERGIAVRQGLRFLRLELPGILATRADVLSPRMMRVLEDLSGDWRRLDTRIEGLTSEIEALARQDQHCERLMTVPGVGPIISSAMVAAIGTGDVFSKGRDFGAWLGLVPKQLSTGDRTILGSISKRGNRYLRVLFVQAAWVVLVKLGPEKWERYGLKSWIEAAKKRLHHNVLAIALANKLARIAWAVLNKGRAFACIKTDAMASCPA

SEQ ID NO: 224392 - protein, 402 aa, unidentified
MSGVIIGVDPHKVPATIEVLGEGEQVLKTGRFGTDRAGYQAMLSAGRAWPERTWAVEGCQGIGRHVAQRLVADGETVVDVPAKLPARARVFSTGQGRKTDATDAHSIAVVAARTTALRPVAREDELMALRLLADRREELANARTQAVSRLHRLPGLIPGGAPRFLSAAQARALLATVRPREIAGRTRRQIAAELLAGIVVLDRKLKDSDKALRQAVAATGTAPMNLHGLGPVGAARVLSDVADVTRFPTRAHFASWNGTAPIDAPSGEQIRHRLSRAGNRRINRVLHIMAIVQPRNDTEGRACFRRKVAAGKTKMEALRCLKRRLSDVLYRQLAAEAKTADPAQQVPAGPMETGPGGHVGAATKSSAAGLNPMTGSSDKSLPGPVNSNATPSRQISRTPCLT

SEQ ID NO: 224393 - protein, 389 aa, unidentified
MFYIGIDVAKYKHNCAVISEGGEKIFTHFEFANTTEGFQLLLKKLDAYDATPTRSKVCMESTGHYGYALWTHLAGCGFKVCLANPFQTHNYVKAQTVRKVKNDALDALALAQWLLIENPPASKLSPEETAELKSIARFRTFQSRIIGDCKRKVITLLDVSFPEYAPFFTDTFGKTSLAVLMRYPSAEALSHAHIDALTNLIIKSSRGRFSDEHAIALRDLARTSFGVRYASKASAFQIRELICQIEFTKRQMMSAEAKMTELLAAADTPLTSVPGIGVICAATILGEIGDINRFNKPSQLVAYAGYDPSVFQSGQFSGTNSHISKRGSRYLRWAIWLAADRARMFDPLLREYYEKKRGEGKCHKVAICAVARKLCNIIFAVLSTNQPYF

SEQ ID NO: 224394 - protein, 359 aa, unidentified
MDGSSKQPHMTAGLDLGDKYSYLCLLDTESGEVVEEGRLRTTPEDFRRRFCSEQPLRIAIEAGTHSPWASRVLKECGHEVLVANPRKVQLIYTNKRKTDEIDAENLARLARLDPKLLYPLKHRGEESQAHLAIIRSREALVGTRTQLVNHVRGAVKSFGGRLPKCPARSFHNKAPEHIPEALWPALGPILETIGSLTQRIRDYERQLETIAKECYPETELLRQVEGVGAFTALTFVLTLEDPYRFERSRSVGAYLGLVPASDQSGDRDPQRRISKEGDEMLRKLLVGSAHYILGPFGSDSDLRRHGEKIASRGGKNAKKRAAVAVARKLAVLLHRLWITAEVYEPLRNTHHSGGQEEAA

SEQ ID NO: 224395 - protein, 351 aa, unidentified
MVVVGADVHKRTHTFVAVDEVGRKLGEKTVRATTEGHLEALMWARDRFGTDLLWGIEDCRNMSARLERDLLGGGQSVVRVPTKLMAAVRKSTRSRGKSDPIDAEAVARAVLREPDLPVASHDEVSRELKLLTDRRDVLVAQRTSAINQLRWHVHELDPERGPGPRALRAAKHQQALRSWLQTVSGVLAEVARAELDDVIRLTAEINALATRIQECVREAAPRLLELPGCAELSAAKLLGETAGITRFKSESAFACHAGVAPIPVWSGNTAGQMRLSRSGNRQINAALHRVALTQIRMPETASHTYYHRLIATGKTAKAALRCVKRRIARQVYRALLADHPSHDQLPQSAAA

SEQ ID NO: 224396 - protein, 437 aa, unidentified
MLPTINPHAAGIDAGSTKFFVATPDGEVTAFESFTLELYRLRDHLLARGVTTVAIEATGIYWLALYAVLEEAGIEVCVVNGAHVKNLPGRKSDVQDCQWLQQLHACGLLRKSFVPCERIRALRSYTRLRDDHIRQSAMHVHLMQKALDQLNVKLHTVISQIQGASGLAVVRAILAGERKPAKLAALCDERILKTKRAAVERSLQGIWKREHLFALAQALAGWEFCERQIAECDAQIAAQLETLTRDLPPPPAPAEPPKSGRHHVPQVPGLHAHLLSLSGGHDAARLPGLTPGNWLKLMSEIGSDLSRWPNEKAFTAWLGLAPGKHQSGKTARRVRRRRPSAAAQIFRLAAHSIAKSRYLALGGFYRRLKARTSAAVAIVATARKLAVLYYHAMRYGLDYVERGLEQYEQLYRERQRRFLEKRAAELGLALMPTSPAT

SEQ ID NO: 224397 - protein, 370 aa, unidentified
MSVRRILAKTIDTDLEYEAIGIDLAKNCVSAALLTTDGEVVCIDRLDYSELEKSAQALSPTTFAMEPCTEMNYLVQKLEAWGHRCLVIGGKNVQNYVENHYSGQKTDLNDAQALAFLAQDKQLRTIKAKDIEQQKYASLTTLREQYIKQYRQTIVSLKGICQAWGLNISKGISGKARLKDLIENHAAFPEELKESLVDMVTHAQTTQKVLNKITKTLEVLAKNDKVCQLIQTIPGLGTICSCRLRATIGDIKRFKNPKDFPAYYGLVPRSIATGHNEKKGKITHRGDRTMRSLMVQGAGCVIRLATCGKLKSKHLTKWILKKQKEKMPWGKLVCAVAAKLLRIVRAILISSKPYNPKIAGVAKCSLSKGS

SEQ ID NO: 224398 - protein, 373 aa, unidentified
MAALTIVAQIRPFVIGVDCHARTHTYAIIEARTKRRVACEEFPTTSAGISRALAWVGRRTDGDMACLWAVEGVGSYGARLARVVAEAGYDVAEAPRMNARGRRGIGKSDPLDAAAIGTAVIGLEESQLRAPRRDEGTRAGLRILSAARDQLTRERTVNVNALIALLRTHDLGIDARKPLVPAQIATITRWRERQEQIELSIAREEAVRLARRVLEVTTQLTANQRRMTELIQQSPAAPLLEMVGAGAVTVATVLTAWSHPGRVRSEAAFASLAGVNPLPASSGNTVRHRLNRGGDRRLNRALHTITMTRMVHDPGTRDYVAKRTREGRSYREIRRSLKRYIARILYRQLNSLYATAELDRSHVAGADGLGGVL

SEQ ID NO: 224399 - protein, 348 aa, unidentified
MIKRNEFKHFTIANDLVGFNELLEQLQCYKHPVVIFEATGVYSLPLQSFLDHHNYDYTRINPLSAKKLMDNNLRHLKTDRTDAHNLAKIQFDVPQPLTPKQDYRYHEMQNASRFYEELTRDLVKYKNRLHRALQSTFLQIEQISSSRSGEVYWHIVDLFPHAKFVLDSSYDQIASQLVKIKGIGASKANQVACSLQSLAQRTWYYDDCDSITVELIKYCIEHLLQIEQRRKHILAYIKQIAPNPKDIQIYLSVPGIGKKTALRIYAELGDLRRFNNANQVDAFIGIDPGESQSGNTDKHLPITKHGNAIARKIMYRIITQMESAKKTKPCHITDYYEHKKTAFSDERS

SEQ ID NO: 224400 - protein, 408 aa, unidentified
MNAVGIDVSKGKSMVAALRPMGEVALLPQEFLHTEIGLEQMAYAIIALGEDTRVVMEATGRYHEPVAAALHEYGIYVCVLNPLFIKQSGGGSIRKVKTDKADAMKIAKYGLDNWVDLREYTPMDTVRQQLKLCSRQYNLYMKTVVSLQNNLISLADKTFPGVNELFSSPERADGHQKWVDFVMTFWHCDCVCRVSEKAFTERYQKWCKRKGYHFSAEKALDVYAGSCGHFTTLPKNDNTKLLITTAAQQLLAGKMTLAALRAEMTRLAKQLPEYDTVRAMYGVGETTAAQLMAEIGDVRRFPRRSSIVGFAGVDPAVDQSGKHEAKSTPTTKRGSPHLRKTLYQIVCTYLRKAPEDEPVYQFLDKKRTEGKPYFVYMTAAQNKFLRIYYARVKECLEDFDAQQNSAQS

SEQ ID NO: 224401 - protein, 336 aa, unidentified
MNTVNAVVGIDVSKKKLDIVLLIDGKTRAKVVENSAAGHQMLLAWLEKSKVPRSGLHVCMESTGVYSEPVALALHKAGITVSVVNPGCIKGFGHSENIRNKNDIIDAGLIARYCAAMRPEPWVPPPLEQRQLRAWSQRVQTLKDIRQQEENRLEALKISGVEDVADHVQQLIDWLSKEIAQLEKDIDNHIDHHPNLKHDADLLASIPGLGMTTVAKILGHLGDIRRFDSAKTFAAFLGVTPKQRSSGTSVRGRTMISRTGSTSLRAALYMPSLVARRHNPILRAFAERLLANGMAKKAVVVAVMHKLTHLIYGVLKTGKPFDANYLMKGLAIQDGI

SEQ ID NO: 224402 - protein, 343 aa, unidentified
MSEVAVLGIDLGKTSCRLAGLSAEGQVVFRRRVRRDGIAVLLAKLPPSVVAMEACCGAHHVGRGAQALGHQVRLMPAEYVRPYVKAQKNDERDAEAIAEAATRPTMRFVPLKAEARLDVQALQRGRERLAAERTALINQLRALLLERGIVLAQRRRAVAAWVDAPGDENAPDCLSPRIRLLVSDMRAEWAELDRRIAVFDEEFAAIARQDEAARRLATVPGIGPINATALVAAVRDASAFGRARDLAAWLGLVPKQATTGGKPKLLGINKRGSRYLRKNLIHGARAVLPRLAVTQTRLGCWLRGLLERAHKNTVVVALANKLARIAWAVLAGGRNCEAAAAAA

SEQ ID NO: 224403 - protein, 427 aa, unidentified
MTSDQDSGGTSFVAIDIGKAFHAVLVEFPDRTHQRFRMANSAEDYGRLVAFLRTLPGTVQVALEPTGNFHRTLAFRLITEGISLVSVSSVAGARYREAMFNSRDKNDPKDATVILQLLKHGLVQHYHDPLFAGHHDLQELAKTYHQVTMARKRLADSLLNHYLPLYFPEMARYWESTRVEWFVAFLTRFPTPRAVQALSLPEFIEAAGPLIGRKVNKRAKLEELYGLAQSSIALPVAVDSPAIDTFRLQLTHFARLAELRRELEAQAHRLLKDRPDYQCLCSLPGVASVLAMVILAEGGDLRRFGHYRQFLKYCGLDLAKCQSGQFRGRETLSKRGNARLRMAFWMAAQRAVRMTENSFRDKYERYMKQDPGNADVRRKALTAVAAKMARVAYALVKRLEPYRGYHEHALPSGSIPLNRAVGALATP

SEQ ID NO: 224404 - protein, 341 aa, unidentified
MRKWIGVDLHKTQFTVCYLHKSGEYKIQVFKVEAKDIEAFKKTLSKNDEVAVESTGNTGYFAREIKSEVKVVRIINPTQFKIISASVKKTDEHDAVTIARYLSKGLIPEVRMRTKEESQISSLIGTRDKFVKLRSCLKNKIHNILNANGIVTKREVFGSEKGLDKVLALDVEASYQFELKIIVEQIRSLNKSIDEIGKELAEKGKKLDGHKSITSLTGIGDISATILLNTIGDVNDFADDKKIAAYFGIVPRIAVSNETSHYGKITKMGNKIARTALVQSTLIAIKYNPYLRKFYFRLKAKKGSGKAIIATARKFLTIIYRTLKNKWVFEDFNKFKLAVSI

SEQ ID NO: 224405 - protein, 457 aa, unidentified
MGDDVLISVDPHKASNTLAVMDPVTKTVIARQRFMNTAVGYRRLREFAGGWTHRRWAVEGCHGAGRSLAQRLAGDGEIVLDVPAKLAARVRVYSQGHGRKSDADDAISIGLAALNSTRVAVVRRDDTLVSLRLLCDRRDELGGLRTQAVCRLHRLLCELTPGGTHRGLRASRAEQLLAKLRPVDSVDVVRCQLAHQPLDDIRALDAKMTAVRAQIAALVDGTGTRLTELYGIGPIIAGRILAEVETIDRFPSKDHFASYNGTAPIDASSGEQVRHRLSRAGNRRLNHALHMMAVTQIRQPETIGRRYYERKRLEGKTPKEAMRCLKRRLSDVVYWQLVADRRATITQCGSATTPTRTRPTSTSATTPVPCTAPPRRPPHPTVSTGSSHSTGKTAASSASKSSTPAVGSPKTSSTKQKTRAEATRKPRTSSAAVPDRRPTSAAAAGVKAGAATRRARP

SEQ ID NO: 224406 - protein, 326 aa, unidentified
MSSFYNYIGIDVAKKDFYACFDEQSESRKFNNTAIGINSFIYHLSKNNFKKQNTIIGLESTGSYHLRLCLQCSALGFQIKVINPLIVKKQNQTNLRRVKNDQQDASLIRYCLTTGAGYVFLETPDTLLLKSLVRQRNSLTANLFKNKRQQADINYKEDCLKTKFNPVYKEIGAILSQKIKELEKQLKTFRKPEQKLLQTIPGVGPITAVSFIAEINDIKRFKQSKQLTAYIGLDSRVHQSGTSIRGKGYISKRGNKILRTRLYNAASVAVLRPNLFQLFFQKKRAEGKPYKVALIAAMHKMVHVIHSVWINSKPFVNYIAANRKEA

SEQ ID NO: 224407 - protein, 367 aa, unidentified
MKKVSTAAANTTKNLYEHKLTIGLDLGDRSSWYCVLEERGEVVLEQKLSTTPKAMREVFGAMPRCRIALETGMHSPWVSRLLSGLGHEVIVAHARNVRLIGESRKKDDRRDARTLARLARIDPQLLSPVRHRSAQAQADLTVIRGRAGLVRARTALVNTARGLAKSYGERLRGCNVRNMNPEKAEALSPELQRAMEPLLNAIESLSERIVEYNERIEKLAQDSYPQVALLKQIKGVGTLIALTYMLTLEDPHRFRKSRDVGCYLGLQPGRRNSGQSEPQMHISKEGDPYLRTLLVQGAHHILGPFGVDSDLRRWGLKLAERGGKNGKKRAVIATARKLAVLLHRLWVSGEVYEPLHNSNHTAMPIAA

SEQ ID NO: 224408 - protein, 442 aa, unidentified
MARKPSKQRFTVVHPDCAAIDVGGREHFVAVDPRHDNAVQSFTSFTDDLYKLADWLESLAIKVVAMESTGVYWIPIYEILSERGFEVYLVNARATRQITGRKSDVLDCQWIWQLMTHGLLRGAFRPDDLTCCVRSLVRQRASKVKDQAQTLNRMQKAMSQMNIQLANVISDISGVTGMRILRAVCAGERDPVQLAELTDRRIKAGKEAVARSLHGNWRREHLHALTQELAAYDFLEQQIADCDDAIKTALEQLPVLQNEPEPAKKALRSPHRSGAQQTELHQTLWKVLGVDLTAIPTIGVDTALVLAGEIGTDLSRFPSSQHFCSWLGLAPPTRISGGHRLAGGGPKIVNRAAQALKQAASNARNDKGFIGASHRARLTRMDTSCAIKATAHQLARLVYNLLTKKQAYVEQGLEEFESRSQDRQVRALLRKARKLGYQLVAA

SEQ ID NO: 224409 - protein, 407 aa, unidentified
MTDAPNRYIGLDIHKEYFVAVGVNEKLETVFGPQRVSNYQLDDWILQNLTPGDAVVLEMSTNTYQFYDALLPHVHSVMAVHSPNVAMLTNVRVKTDKKAALALAQLLAAGLLTGVWIPPCPVRDLRSLVARRDKMVRLSTMAKNRLHSMLHRHHLIAPEKPFEPKQRTWWESLPLSANEQLLVRSDLEMLDLAQKQAAQIEECLKQSSAEDVRIPLLIQLPGVAMLTAITILAAIGDITRFPSAKKLVGYAGLGTRVHNSGLTCSSGRITKAGRKDLRYAMVNAANHAVEHHVHWKKELERLVPHLGRSKAIVAIARKLLVAVWHVLSEEAADRFADPRDVASSFIRYAYRIGVRNLPNQQPATVFARDQLDRLGIGKELKEIPWGSKRFKLPPSKLLLEKSERRPK

SEQ ID NO: 224410 - protein, 428 aa, unidentified
MSQEDRTRLEEFRQFRREVRGSKEYLLVGIDVAKDKHYAFFGTATGKTLLRRLVFENNLEGFQKLLVQAEAMKVREGLTKVVFGMEPTGNYHKPLGEHLIRCGHGVVLVSGVAAHENRKTLDGRWDTNDTRDAANVADLVSQGKCLFYEFPVGALQDLRNLLSLKRRLKRMEHGHRVRIRNHLVAKYFPELDRYYEQSESTALAIVRWCLDPSEIAGLEYKEFARMVGPIRGRSSQEKRLQTIWEMAVDSVGCEAGPAVEFEAQVMVEGLKQIRESIRQIDEKIHEVCSPFPEYECLLSIPGFGPDVSSKVLGAIGDPFRFQNGRQVLKMAGFDLSAERSGKSSERAVPVISKRGKADLRYALYQAALIASVRNPDFIVYYTDKLRGREREPGIKIKMRVKLAAKLLIIAWTLMKKKEPFHPGYLNIE

SEQ ID NO: 224411 - protein, 435 aa, unidentified
MKVIHVHAAGIDVGSRSHYVAVGQDPEDVSEFGVYSRDHQQMIDWLNERSVTTIAMESTGNYWQTLFSALQGAGFEVLLVNGNQIKNVKGKTDVRDCQWIQRLHSLGLLRGSFLPSADIEKLRHYQRHRNWLVEQCSKMSNKMQKSLRLMNMRLDVALNDIMGKSGRRIIESIIGGERDGEQLASMIDGRVKKSKQEVAAALSGEWKEELLFELRDCFELYELYQQKMEQTDEQIALLLQAMVTPGQECPDQIRRVQKRHGKNQPRFDLSSLSCAYLGVDLFAIDGVSHTTVSGFISEVGLDIYKFGSAKRFVNWLRLAPNNKISGGKVLSSRTPKGKHPLGIMLRNAANSVGLRKSGTLKSFFNRIAYKKGRAAAITATARKLAVIIWNMVVKKQAFAPLDETTYTQKIRIATIAGIKKKMRKLNLSPSDLAMI

SEQ ID NO: 224412 - protein, 404 aa, unidentified
MKGPIVSIDVSKGKSDYQAFKDLNVKYTGSRSIKHNKEGFDEIVNLVREMEKKLETEVCVVYEATGVYHRVLKKVLEDNNIKQFIINPLLSAKTRKNDSLRSPKTDKLDPKSITKTYYSHSLHNSHKQETIYHELRELSRYYEDILVHIRKDKVAFRAQLDIVFPGYDTLYDDLYGPVALAIIEKYPHPEMLQKKKINTVSKVIQNKTCHRQAVSDTMADKAIEYSKTIYSGCDKDDIEVLILQRFIKKLNEDMAEAERTIGEMIKLAQELPDFNIIKSIPGIGDNLAARIIAELGDMTRFKKKNELVAFAGLDPRISESGQNDGDHMHITKKGNKRLRCLLYLAVTCSIRLKRDDNSIKDFYIKKKQQSNPMCSKAAKTACASKLVRIIYSMCKTGELYQYNK

SEQ ID NO: 224413 - protein, 420 aa, unidentified
MQVTQSSEIAAFVGLDWADQKHVISLQQASTDQVQRLALDHTPEALQNWIQTLRDQFKGQPVAIAVEQKRGALIYALMHVDFLHLYPVNPQTLSQFRKAFYPSGAKDDPVDADLLREILMTHRQRLRVWVPDDELTRSIQLLTEDRRGLVDARTVLTNQLTAALKSYFPQALDWIGDLHTVRACAFLQRWPSLQQFQLSTSSSVRKFYKAQGYRGEDRLEQWVSNIKQALPLTQDRAVVLAGSMKIQALVPQILMLTQSIQRYDQQIAELFDQHDDSTLFGSFPGAGPSLAPRLLAAFGSDRGRFDCAAEMQQLSGIAPVTEKSGTAIWIHWRLACSKFLRQTFHEFAGQSIIKSEWARAYYEQQKQRGKSHHAALRSLAFKWIRIIFRCWKDGKPYDEAHYSASLQRRKAHPSDSPATS

SEQ ID NO: 224414 - protein, 449 aa, unidentified
MSIIGVGIDLGVTAQHEACILGPNKTKTFRFYTTVEEVGRLVALAEAMKTERNDKIVFILEPTGRGWITVSRLLMEKGYGVYKANPKKVKDYRNYLNGRRKTDRLDAKVLAAMGRDHHEFDPVVLPSEDIAALQTLTRERVRLQEMAANEKKRVKSLCHYLIPGLTGALGSNLYKPQWRVFLRKFINPFEIAKAGRVGLHASLAAASCKPSDHEKIAAIYPLAQHACMSLRLGADDLEALELTLNSYFDMMEVFEKKVVELERLIAIQYAKAHKSRFLETIPGVGKTLAPIILACIGNLERFPNLKKLKAYSGLIPAVNQSGEHSVKGLKITKQGPNQLKRALYLAADNARHWDVEMAQIYFRAMMTKGQCHTQAVCAVATRLLGRIYAILKAGRPYINRDLSSKHVTRAQANRYIDQHLRVPEHVRSRKRTSKQAKMERLHPSTKEAV

SEQ ID NO: 224415 - protein, 422 aa, unidentified
MLAHTHDTEEIIERVAALDVGKATLVCCARVADDKKPGRRLQEVQTYATMTRSLLSMSDRLHCLGITRVVMEATSDYWKPVFYLLEAQGFEVWLVNARDVKHLPGRPKTDKLDAVWLAKVAERQMLRPSFVPPPAIRLLRDLTRYRVDLVEARTAEKQRVEKLLEDAQIKLSVVASDIFGVSGRAMMAALIRGERSPKTLAQLARSSLRGKIPALEEAFTGRFSDHHAFLLATMLARVDAINTDIAALDQKITQQIAPFTAAAERLDEVPGIGLTAAHAIIAEIGLDMSRFPTAAHLTSWARFAPTVKESAGKRKGKNTTGHGNRYLARTLGEAAVVVGRTDTFLGERYRRIVRRKGKKRAIVAVGRSILVIIWHLLSDPEVHFIDLGADFYTRRTNPDRKKRNHIRELEALGYRVTLEPAA

SEQ ID NO: 224416 - protein, 346 aa, unidentified
MLHAGLDLSRSRLDFHLLDEGGGTVEVGAAPPDADGLRSLAERVGGHGQPVRAAIESMNGARFVHDRLELAGWQVEIADAQKVKGLAPLACKTDRIDAWVLAELSRRDLVPAIWLPDPSVRAERERARWRLHLVRHRSSLKQRVHAVLLAHGRPCPVSDLFGIRGRQLLARLQLPEPWQGTIDASLRLIDELDREIAACESELRRLGADHRYVPLLLTVPGIGWVLAYTIAAELGDIGRFPTPRKLAGYSGLCPRVYQSGESDRRGPLSKQGPRYLRWALVEASTHACTHPLYRDRYQRTKTRLGKQRGAKVAQVDLARRLAEAIWHMLTRDQPFAPAGATDPLAA

SEQ ID NO: 224417 - protein, 316 aa, unidentified
MNDMIVEKFVGIDVSKSTLDVRVEPAVETMHVAYDEAGIRQIVCRLKELSPTLIVVEATGGLEVRIATELAGNKLPVAVINPRQARDFAKATGQLAKTDQVDAAVLAAFAKAIRPQARSLKDDDTRALDDMVGRRRQLIDMRVQETLRHGTAASKPLQKSLVKHIAWLDKQITEIDKDLSKRLRESDVWRTKDDLLRGIPGVGAVTTVTMLAKCPELGTLNRREIAALTGVAPLANDSGKHRGKRFIWGGRADVRAVLYMATVSAIRCNDTIKVFAERLKKAGKPPKVVIVACMRKLLTIMNSMLKNNTPWKLKNA

SEQ ID NO: 224418 - protein, 410 aa, unidentified
MEVLHAHCAGLDVHKDSVVACVRHMVDGKVTTGVKTFKTTTQELMALSDWLSAEGATHIAMEATGVYWKPVWHILADGEFELVLANAAHVKNVPGRKTDVNDAMWLTDLMAHGLIRASFVPGEPTQQMRDLLRTRKQMVRERSSHVQRIQKTLEDANIKLDSVVTDILGLSGRRIIEALIAGQTMPQALASLAHRRIHASADELEAALRGRVTRHHRFLLKLHLDQIDALDAALARIDEEVSANVEPFRTAVEMLSTIPGISTLSAEVIVAEIGIDMSHFETAGHLISWAGLCPKNDESAGKRRSNRMKKGAPWLKTTLIQCAWAASRKKNSYLQAQYLRIRSRRGAKKAIGAVAASMLTAAYHMLKDGTLYQDLGADHFDNRAKGKHVLRLVNRLQNLGFDVQITPLAA

SEQ ID NO: 224419 - protein, 366 aa, unidentified
MGGLDVHDESILVMVAVGRGKAQTRSFRNHRAGRRALLAWLGRLAATAGGARVVVAYEASGQGFGLHDEVTAMGFECHVLAPTRIAASAQQRRRKTDEQDAGRILDLVRAHVLAGNALPTVWVPDRQTRDDREIVRARLDVSEKLTALKAQVQTLRKRNGLGRPARLGRGWTGSYRAWLRAQMGPYSSLAPGARVALGTLLRQMEVLEAEREALDAEVAALAQTRRYAHPVAELQQFQGVGLLTAMVFLTEMGDLSRFANRRQVGAFLGLAPSSHESGAGDEHKGHITHQGPWRVRRVLCQAAWSRVRTDPEAVRAYQRIAARNPKHKKIAVVASMRRLAVRLWHRGRQAQEQAGVFGPDAVSAVA

SEQ ID NO: 224420 - protein, 341 aa, unidentified
MQVTTIGLDIAKNVFQVHGIDATEKVVVRKQLRRGQLIKFFEALAPCLIGMEACATAHYWARELTKLGHQVRLMPAKDVKAYVKRNKNDSADAEAICEAVRRPTMRFVAVKSAEQQGRLMQHRVRDLLMRQRTQLINALRAHLAELGIAAAQGREGIKELLAIVAQDGGSRLPVDAHASLIVLAAQLQAVQTMIGSIEKRVVGQHRSNEESKRLESIPGIGVIGATAIAAVVPDPKVFRSGRDFAAWIGLVPRQDSTGGKQKLGPISKQGDRYLRRILVVGACSVLRRARQQPEKYPWLIQLLARRPFKVVAVALANKMARVAWALLAKGGTYRAPRLTAA

SEQ ID NO: 224421 - protein, 356 aa, unidentified
MLYTGVDLHRRLIVVCTVDENGSIVARSRMKTDPALVSEYFRQWPDQHRAVVECTTGWYWFSDLLRSLSVDVVLAHAKYLKAISYAKVKTDAVDALTLAQLLRMGYIPEAHQLPPEYRAMRDLLRQRMVMEHKRTNIIQRVTSILAQFNITDLPLSPYQSGFADFLNQCSIPDEYRMTLMMYHFQCVQATEHRKQLEKYFKAQLRPTPAVQLLMSLPGIGDITGSIIAMETGDIHRFADAKHYCSYCRLVPGAKDSGGKHSHRSGSKDGNQYLKFAFTESAIKAMRFYPQIKHFASRLERRATKAIARTVVAKELAKISYYVLSRQEEFKTFKGIEINKLRNWPRARKPVRLTGGL

SEQ ID NO: 224422 - protein, 356 aa, unidentified
MTEVSVIGIDLAKRVFQLCALSASGEIVWQKRLSRDAVQTFLGTAPRCLIGMEACGGAHYWARWLVQRGFTVKLMAPRMVKAYRPGVHKNDGRDARAAAEAATRAQVAAVPVKSEAAQATQALTRVRQRMIRQLTQTANQLRGLMHEFGIVLPRGSQRMVARLNELELNGRLAKLPASMRQLVQTMSEEIVEQADKVKTATAVLEAAVKQDANCQLFRSIPNIGPINAAGLSIALETPQAFAKGRSFAAALRLVPQQAASADKNKLLGVGKMRNCELRRYLVLAAQSLLTRIGRMKQRPDEPLLGWAWDLLHRKTRNVAVVAVAAKFARIAWAVAISGKPYTPGGPRARGTVPAGG

SEQ ID NO: 224423 - protein, 369 aa, unidentified
MYGTTVALNPTYFIGMDLHSNNVVVCVLQNAANQAGQLIKKVIQRKKIVLSTELEELQHFLQPYCSAQHQATVESTYNWYNIADLFERNGWHLKLADPTTVKNNKTKFSDDISDAEFLADQMRLGALKAADIIPKQDRAFRDLVRLRVDLVQDRARYRTVLKNFFNNQRYMRITTEHLNHMAEQYCDGDVTELYSIFDNDNTCLKAGHYLTAMHHLNLQIQQLEEQIKAQEIKNDLTCHRYLPRLYSMKGCGFILGSIIATEIVDINRFRTDKDFVSYCRLSPAIRLSNEKKKGDGNRKNGNAYLSWAMTELANLMVFHNPVIKKKYDRQLKKSHLRAKAIRSIAAKLARCIWHMLKKDKDFQIDLAFK

SEQ ID NO: 224424 - protein, 392 aa, unidentified
MICVGIDVAKDKHDCFILSSEGEVLADVFTIPNNAEGFGTLLQTIRSCTRPADKIMVGLEATGHYSYNILGFLLDCGLPTYVINPLHTNLYRKSLTLRKTKTDRIDARTIATMLMSDLDLKSYTDTSYHNEELKSLTRYRFDKVRERAKLKQSISRLVTILFPELEKIVPSLHMASVYALLSEFPGAHQVASAHLTHLKTVLYEVSKGHYGRDMAVEIRDAARNSIGSRMPAKSLELKHTIQLIQVLDAEIEEIEKEINLIMDEVRSPITTIPGIGTRMGAMILAEVGDFSSFDSADKILAYAGMSPSTYQSGQLTSSYAHMEKRGSRYLRYAIFNATKYVCMWDPTFAAYLAKKRAEGKHYSVAISHAAKKLVRLIYAMEKSGQPYRPAAT

SEQ ID NO: 224425 - protein, 356 aa, unidentified
MISSTKYIGMDVHTQSISSAVMNSVGKVVIESVIETKASTILEFIDGLRGDLRVTFEEGTWAAWLYDLLKPHVTEVVVCNPRKAALLKDGSKGDRIDARKLAELLYMNSIKSVYHGENGLRTMKELARSYLTITKDLTRIMNRLKALYRSWGVPCAGKDVYAPRHRAEWLGKISEAGVRRRAEHYYQQLDVLRLLRQEVRRDLLAEAKKHKQWKLLRQIPGIGPIRAAVLIAVIQTPHRFRTKRQLWKYSGLGLETHDSGQYHTEEGQLQRSKKPATVRGLNKDHNHDLKDIFKGAATTVSSSRGPLRDFYENLLAKGRKPTMARLTLARKIAAITLIVWKKEVRFDANYLKQQAA

SEQ ID NO: 224426 - protein, 338 aa, unidentified
MKLKRIGVDLAKQVFQVHGVDSHEQVKCRKQLKRHQMLDFFRQLEPCVVAMEACGSAHYWARELGKLGHEVRLIAPQFVKPYVKGGKNDANDAQAICEAASRPTMRYVEVKTVEQQASQSVHRTRGRLIKARTALVNEVRGLLAEFGLIESRKGVAATRELLCRAIDDSDSSMPGSMRELLRGLSEELQGYDERLKKLEQLIQREAREDERVRRLMKIEGLGPISATAIVSAVGDARQFASGRQFAAWLGLVPSQYSTGGKERLGGISKRGDKYLRTLLIHGSRSVLKHCQSKTDKRSDWLSQLMCRRNKNIATVALANKNARIIWAILSKGEQYQPC

SEQ ID NO: 224427 - protein, 347 aa, unidentified
MKFFNQQHKYYCGIDLHARKMYVCILDKKGKTHVHQNIKTDPELLFELVFPYIDDIVIGVECVFCWYWVADLCAEHQIPFVLGHALYMKAIHGGKTKNDKIDSYKIALLLKGGNFPIAYPYPAKWRATRDLLRRRMYLSRRCSELVAHILNTNTQYNLPGFNKKLSRKYNHEGVAERFEDPQVRKSVEVDLEMINSLNQVLKKLEWHIEKTARQHDYHTLYLLRSIPGVGQVLALVILYEIHDIKRFPKVQDFSSYARLIRPKKESNGKWAGHSNKKIGNHHLKWAIKEAAILMLRDSADAKYYVSKLERKYNKGKALGIFTHKLGRAIYFMMKNKEAFDMKRFFAK

SEQ ID NO: 224428 - protein, 362 aa, unidentified
MAQVRSWAGLDVHAAKVVAATMDGQSGELVVRRLPGATAEVVEFCAGLPGPVRVAYEAGPTGFGLARALETAGVGCVVAAPGKIERPATDRVKTDRRDAERLVRLLMIGGLHPVRVPTLGEEALRDIVRAREDVRGDLMRARHRLSKLLLRHDVRFHGGGRAWTQRHRDWLAAVDLGQRGAQVTLLDYIGAIDALLVRRDTLEHAIGELIPDSPWADTVARLRCLRGIDTLSAVGLCTEVGDFARFARAGHVMSFLGLVPSEHSSGQTRRQGQITKSGSGHGRRLLVEAAWHYRRPPRKGDVLRRRQAGQPAHVVAISWQAQQRLHHTWQRLDTERGKRRTIVSVAVARELAGFCWAVANAD

SEQ ID NO: 224429 - protein, 376 aa, unidentified
MNSITYIGMDVHTTNYTLCAFTLQGQTPFAELQIKPEIKELEKYLTMLNSQLGGNCRFQCGYEAGCLGYSLYHEINSHKWKGFVVECVILAPTTMAVSQKNKVKKNDLEDARRIARCLCFGQYSRVYVPTDEDNAVKEYIRMRDDAQTALKQTKQQIIALCTRHGYHFDGKSHWTQKHIHWLEALCLPNPLLQETLEEYLVTFRYLADKVERFDKRIQELSMGERYEERTRQLCCFRGIAAHTALSILVEIGDFGRFPTAQHFASFLGLTPSEHSSGDSQHNGAITKAGNSHLRRLLIESASHYNRGAAGKKSLALKKRQDGNKPEVIAYADRACERLRRKYIHITLRAKPVNIAKTAVARELACFIWGMMTGHIA

SEQ ID NO: 224430 - protein, 364 aa, unidentified
MSEITRVGADLAKSVIQIHAVDAAGKVVSNRPLARNKFMAWCVQLPPGCLIAMEASSSAHHWARKLVALGLDARIIAAHLVAPYRLQGKGGKNDANDAAAICEAASRPQMHFVPIKTIDQQSMLCIHRLREGFKQERTACTNRIRGMLAEFGLVFAQKIVNLRQALPDVIEDGANELGGLARLALQRAQAQWDELDAHMLWCDERIAAHATASDQVRQAKQLAGIGPVTASAVVATVGDFKQFSNAAQFGAWLGLTPRQNSSGGKNNLGKITKRGDMYLRMLLIQGAKSAVMTAHRRDDPISKWAHQLREKSGWQKAVVALANKNARILWAMFVRGKPFDARHVSVKPGTAQIVVPATMTGAPA

SEQ ID NO: 224431 - protein, 508 aa, unidentified
MILRPNQSTPPSSKARKRLSAAKREQAQKRQAAPQKKPQKSPRKSKASRSLPVAAPLMPAELKQVNLNAAGIDVGATMHFVCVPQGRDSQPVRSFGAFTADLEAIADWLAQCGVTTVAMEATGVYWIPLFELLERRGFEVKLVEPSRLKHVPGRKSDVLDCQWIQQLHTFGLLCGSFRPDDSICVLRSFVRQRQTLVRSLSRCVQHMQKALTQMNIKLQHVLSDITGVTGMAILNAILAGERDPQQLAELRDARCSNDEATIALALQGNWREDHLFALQQAMDTYHFYQGKLTEVDEKIQAQLETFADKSQGKPLERVTKKKRATDLAFDVRKYLYTMTGVDLTAVDGLEANTVLTVISEIGLDMSRWPTEKHFTSWLTLCPGVNKTGGRSESKSGRTRPSSNRAAAALRMAACTLMRANCALGAYARRMRARLGAPKAITATARKLAIIIYNMLKYGKAYVDRGAEYYEEQYRATMVKNLKRRAKQLGFEVIEAMVQPVAPETTSPA

SEQ ID NO: 224432 - protein, 460 aa, unidentified
MDEVPVIGIDLAVTAASELAVASRASIETSRKLASTPKGLTEGIRQAAKGRCVAIVVESTAMVWFVAAVAALRSGVEHTLYRVSGRKSAALRDFYRSHTKTDHIDARVLARMPAVDDSLLTFTLSTPAEMALKRLVVARHKLTTECTKIQNRVRSLLDWAAPGMVKAGGGTVSAGLVAVLSRWSDLTALARARSATIALQSEWSTERAEAVRVAAAEAVAFYEGFVDFSSVELELEVSLAQLRFLGNQVERLEERIASLHAELYPKDRLLSIPGIGPVVSGVVRAVVGDLSRFANLASFRAYTGLVPREDSSGEVRRRGRISKAGPSVLRWALYLAADAARQCDPALADLYRRLMVERGRTHTQAVCAVASHLAGRIYAVARAGRDYVWRDLEGNEITKEQARVIAQSLRVDPGTRARLRARREGGPRTPHARQPTVPQDVTQPSADKLIEAALELASQR

SEQ ID NO: 224433 - protein, 406 aa, unidentified
MANEAIKVIAGIDTHADTHHVAVINEHGKPLADKEFLAVGSGYRKIIDFITSYGTVTAVGVEGTGSYGAELSRTLRGEGLTVLEVNRPNRAARRLRGKSDPLDAYEAAKSVLDGRTTSVPKAKDGPVECLRILRAGRASALKARTAAINQIKGLLVSAPDKLRAKYRAMATSALITALQRTRPSGHTADPEYVTLLTLKTLATRCQSLAAEIAAADAALQEIIDAYAPMLCDLPGVGTDVASQLLVTVGDNPERLGNEAQFASLVGVAPVPASSGKTTRHRLSRGGDRNANHALYQVVLVRMASCQRTKEYVAKRTAEGKSKREIMRCLKRYAAREIYRQITNPQPAPDNSDLRRTRITRGCTIAGVARELGQWPSKISLLERGLIRNDTLAASYRQWLMDNTSRF

SEQ ID NO: 224434 - protein, 328 aa, unidentified
MTMIPTQQAFNHIVAFEVSKEMLVVHTLPADEQCTIPNKPQTVRRLLKAEVKRNRKERLGAVLIVCEATGGYERHVLDVAIDLGVPVHRAHGTRVRFFARYRGLLAKTDPIDARLLAHYGLKTDEVRLYVPPAPETVALRALHARRSEIQEMMIAETCRLDHARHKSVVTSLKAHIAELKAAFAAIEAEIAQLLRECETLKKKIELMRTVIGIGPVSAMVLLAYLPDIGRLTKGQVARLAGLAPINDDSGKKRGTRHVEAGRTAIRRALYMAAVVAMKRNPILKAFADRLRSRGYPFKYVATAVMRKLVVILNAVLRDGQPWKGAKTT

SEQ ID NO: 224435 - protein, 435 aa, unidentified
MIECLPIFFHSSAPASKILHIPSTLIIGIDVAKDKHVARAQDDRGIEFGKRLIFENRFHGFQTLLDWMERQRKQNHKDHVIFGVEPTGHFWLSLAYFLTAKGYDFVLVNPMHVKKSKELDDNSPTKNDTKDAKVIAQLIKDGRYSVPNLLDGIYAELREGAKLRDQLVKQLMITDGRIQNVIQRYFPEFFDVFKDWEGKAALCTLKSFPFPSQIKEMTPEEVLEKWKTQVKRGVGIKKATKLVEAVRKSIGIQAGMKFAKREIDCLLEQYELYNQQIKQLDQELESLVEDLPGARQMMAIPGLGKTTVALFFAEVGEITKYNHPQQLVNLAGLSLKEHSSGKFKGQTTITKRGRKRLRRALYLAIRPLVVHNPTFKALHQYYTKRPEHPLKKQQSLIALCCKLLRVLFAIGNKQCDFDGAKLLQGLPQIETLQVA

SEQ ID NO: 224436 - protein, 367 aa, unidentified
MKKISTVVARQSKNFREQKLTIGLDLGDRSSWYCVLDEGGEVLLEQRLGTTPKAMKEVFGEMPRSRMALETGMHSPWVSRLLSELGHEVIVAHARNVRLIGESRRKDDRFDARTLARLARIDPQLLAPVQHRSAQAQAHLMVIRARAGLVRTRTSLINTARGLTKSYGERLRGCSPRNMNAEKAQNLSPELQAALEPLLAAIESLSERIYEYNQQIGKIARESYPQVARLQQVKGVGTLIALTYMLTLEDPQRFRKSRDVGCYVGLQPGRRNSGQSEPQLHISKEGDAYLRTLLVQGAHHILGPFGADSDLRRWGLKLAERGGKNGKKRAVIATARKLAVLLHRLWVSGEAYEPLRHSRAMPLPAAA

SEQ ID NO: 224437 - protein, 279 aa, unidentified
MGLQKLRTWADAFEKRQWAVEGVGNTYIHPFVTALLMQEEQVYAISPNLTSQYRTRGNEMKSDEVDAANAARALLANPALTPYRPSTCQKKAQELTRHLQRLRVQLKANEMALKQAGENLRAAMRSAIAGLKEALAMLEKQLKALAQEYAAPLLAERGIGPVVTSLLLAEVGSPRRFSSRNAFALYAGCAPLSRCSGKTARVQVNYKGNRRLNYAIHIVALSRMRTDERTKAFLERKKKEGHTQREAIRCLKTYIARELYRKLKQLGLPSLVASYPDGA

SEQ ID NO: 224438 - protein, 337 aa, unidentified
MNKTDTTFLPCGIEVSSKTLVVDLAGKAPREFPNTPIGHRALLTWLRRAPLPLRVCMEATGLYGLDLALALVAAGIPLLVANPRSVRNFARALMQRSKTDPLDAILLREYAARMPFAPWQPPSPQALQLIAAARRIQALTHMMAAEKNRLHAASLSHTVPPLVRFDIRRSIQNMERAVERLTQGVLLFILDDPQLARRKQLLVSIPGIGLTSAIQLLAELLHLGPDADVRQWVAYAGLDPHEHTSGTAVARKPRVSKAGNAHLRRALYMPALVATRHEPHLRGFYHHLLERGKAKLQALVAVMRKLLHAIFGMFKHDTPYDGSKLYALKPQAELQCA

SEQ ID NO: 224439 - protein, 360 aa, unidentified
MQTKSKSTTISFKGQNIYVGIDVHLKSWKVTIIVNDMEHKTFSQDSNAKILSNYLRKNFPEAKYFSAHEAGFCGFSAHRELERYGIHNIVVNPADIPTTDKEKRQKEDKRDSRKIAKSLKNGELTAIYVPTKEMEELRALVRYRKALVKDITRNKTRIKSFLFVNGIEIPPELDGASSYWSGKFTNWLKEIRFLTMHNQLVLDGTLETVTFLRQKLLEITRYFITLTKEREYAFKLKLLKSIPGIGLVSALTILTETEDVLRFKNLDRLCSYVGLVPTTNSSGENEKVGRITGRSNRFLREILIEASWAAVRKDPSLMYSYGLLCQRMKPNEAIVRIAKKLLNRIRYVMKNETEYVLSVI

SEQ ID NO: 224440 - protein, 427 aa, unidentified
MDYTQNAKIAQVTEKTLVIGVDVGSEAHYARAFNWRGQELSKKAFSFGNDLGGYLAFAKWLDGYRQSMDAEKIMVGCEPTGHYWFNFARYVKQGSMTLVLVNPYHVKQTKELDDNSPTKNDRKDPKTIAKLVSEGRYTHPYMPEGIYADLRQAVSSRDRIVKELNATTNRIQRWLQIYFPEFLKVYGKFSAESALLVLETAPYPADILALGAEGVNQIWREHKLRAVGMKRATTLVEAARKSVGMDGGVCARLDLRLLLEDFRRKQEQLKRITEVLEAETRDVPHAEKLLAIKGVGLITVAGFLAEVGDVGRFDSPKQIQKLAGLELKENSSGKHKGQSSISKRGRKNLRKILFQAVLPLIRSNDEFREVYHYYTTRQKNPLKGKQAVVAVGCKLIRVFYAILTHGVDYDAHRLRTDIIRPQEQQAA

SEQ ID NO: 224441 - protein, 367 aa, unidentified
MKQQTSATSETLIKDRMIIDFTGKTIYVGIDVHQKDYQVAKVYDGIYLGNHRMAANDDLLINHLHSRYPGAEFKCVYESCAWGFNLQRKLTAAGMQCMVVHAADVSTSDKERKRKTDKVDALKLARNLAAGELKAIHVPDETIQKERNLIRYRAKLVGDINRSKNRLKSLLKYQGIGIPAQYAKNNWSRNFLVWVEEQATKDKLLGDTLLLMLEQMKLLRQLLLKTEKKLRELRNGKYESKVKLATSVPGIGPTTAMLFLLEVGNVRRFKGFDALNDFVGLCPDTNSSGETARDCGITARRHKQLRSAFIEAAWQAIRIDPVLMNSYQELTKRMRGTHAIIRIARKLLRRLRAVLLTGVEYQIGVVA

SEQ ID NO: 224442 - protein, 390 aa, unidentified
MYYCGIDVAKRKHAIALLDEKGQLVQRPFTIENTRAGFDQLLQALKALGGPVLIGLEATGHYWWALYDELTGHDYPVVVLNALQVHAFRKSGVRKVKSDRTDAVWIAEFLRFSQPEPAKPTTAVFLQLKDLSRFRYHLSDQMGDAKRKLLSVLDRIFPEYETLFSSVFLTTSRQLLAQAASAQELADFDLHELTDLLHTASRGRFDRAKAEALQTLAKQSVGVRFLADAAQLQVRCLLAQMDLLEEQRQLVDDALAQLMDQVPQHLTSLPGVGPTTGAALLAEIGDIQRFDAPEKLVAYAGIDATVYQTGQFEARQMHMSKRGSPYLRHALWQAASMAILHDEELRAYYDRKRKEGKAHGTALGAVCRKLITRVYIVLKENRPYEVRTKH

SEQ ID NO: 224443 - protein, 341 aa, unidentified
MKVSTLGIDLAKNVFQLHGVDHEGHTILRKKLTRAKFVQFVIQLEPCLIGMEACSSSHYFARLFTRYGHEVKLIPPQYVKPYVKTNKTDAADAEAICEAVTRPNMRFVQIKTEEPQAVLALHTERGILIRERIACANSLRATLAEFGITIAAGQSHLTRELPAILEDGENGLSPFVRTSIYRQSKHIRELEEQVKQVEEALASWYRTQEACQRMAKIPGVGMLTATYVVAAVGNARQFSTAKQFASWLGLTPKEHSSGGKQQLGGISKRGDGYFRYLLVHGARALTARVNRNGAVEKNSWLQGLLERKHYNVAVVAMAAKTARIMWSMLSHNTEYQPRQLA

SEQ ID NO: 224444 - protein, 346 aa, unidentified
MLHAGLDLSRKKIDVCLLSPAGEIVDEWASPPDVDGLRGLAARAGMWASPVRGVIESMNGARFVHDRLEEHGWDVLIADATKVKGLAPLACKTDKIDARVLAVLSARDLVPEIWLPDPSIRRERELARFRLHLVRHRTTLKNRIHAGLVAFGHPCPVSDLFGHAGRELLDRLAIPDPWRSNIDVSLALIDDLDLQIAALTVQLKRQGADHRYIPLLVTAPGIGWINAYTIASEIGDISRFPSPAKLCGYTGLCPRVRQSGGVDARGPLSKHGPKYLRWALFEAALNACKHPYYAERYQHTKRRLGRQRGPKVAQIDLARRLTESIWHMLTRNQPFAPAGAPFRLAA

SEQ ID NO: 224445 - protein, 405 aa, unidentified
MNAVGIDVSKGKSIVTIRKPGDLVVLAPRNYRHTQSSINDLITTIKGLDGETKVCMEHTGRYYEPMASWLSSAGIFVSAVNPWLIKDFGDESLRAPKTDKADAMKIARFALDRWAKLPQYSRMDELRNQLKTMNRQFGFYMDQKTAMKNNLIALLDQTFPGANDFFDSPARSDGSQKWVDFVYTYWHVDCVRSKSLEAFTEHYRNWCKRKGYNFSAGKAKEIYTAASDIIAVFPKDDNTKFLIRQAVAMLNAASETVEMLRIKMDQTASQLPEYSVVMAMDGVGPTLGPQLIAEIGDVTRFTHRGSLTAYAGVDPRPNESGNYARKSNPTTKKGSPHLRKTLFQIMDGLIKRSPMDDPVYAFMDKKRAQGKPYHVYMTAGANKFLRIYYGRVKAYLSPSEEDGES

SEQ ID NO: 224446 - protein, 412 aa, unidentified
MGDALLYVGDDWAEDHHDVEVMDGAGRRLAKARLPEGVAGIARLHAMIGAHLGDEVEDAVSLVKVGIETDRGPWVQALMAAGYTVYAVNPLQAARYRERLAVSGAKSDAADAHMLADMVRTDSHQLRPVAGDSVEAEAVKVVTRMHKTLIWERTRAGQRLRHALREYFPAALEAFEDLDAADTLELLAKAPDPASAARLSIAQISGALKRARRHDIAAKAAAIQSVLRAEHLGQPAVITTAYAVSVRALVAVLGTLNEQVKILQGQVEAHFGRHPDAEIILSQPGLGPILGARVLAEFGDDHDRYVSAKARKNYAATSPITRASGKKKTVTARFVHNDRLIDALMAQAFSSLRSSAGARAYYDRQRDRGASYSAALRQLANRLVGILHGCLKAGTCYDETTAWSHHLTEAAA

SEQ ID NO: 224447 - protein, 406 aa, unidentified
MDVIYPRCAGLDVHKQTVVACARLSSEGMPKQDVRTFPTTTSGLLALADWLQALGVQHVAMEATGVYWKPVWHVLEGHFTLVLANAAHVKNVPGRKTDVNDAMWLADLLAHGLIRASFVPPAAVQELRTLTRTRKQFVRERGSHAQRIEKILEDANLKLSSVISDVLGKSGRAVLQALIDGQDDPERLASCVGRVKASRSELVEALRGRVTAHHRFMLKLHLDHIDTLDNAIVHIEKEVGLGLEPFRQAAKLLSTMPGLSSVSAHVVVAEIGIDMSRFATPGHLLSWACLCPRNDESAGKRRSTRLRRGGKWLKTTLVQAAWAAVKVKGSYLQAQFHRLRARRGAKKAIIGVAASMLTAAWHMLRNGTEWHDLGATHFDRADATKTANRLIRRLQQIGYKVEATPA

SEQ ID NO: 224448 - protein, 383 aa, unidentified
MTTFVGVDWAEAHHDVCVKNESGETLAKGRIPDGIEGVRRFHELVGPFIEEPGDAWVGIETDRGLFVGALVAAGYRVYAVNPFSASRYRDRHSSSGAKSDAGDAEVLADLVRTDAHHHRQVAGDTDLAEAVKILARAHQSMIWTKGRQTNTLRSTLREYYPAALVAFGDDLDAPEVLEVLTIAPTPTLGRQLSRSKIAAALRRAGHQRRIDERTAEVQGALRAEELEAPALIAGAFASSVAATANVLIELNRQIAELEHEMAGHFEQHPDSKIVLSLPGLGTVLGARVLGEFGDDPERYANAKSRKNYAGTSPITRASGTKRVVLARYARNRRIADATYLWAFAALTKSPGPRALYDRHRRILITRHSVPWPTGLSASCTAVL

SEQ ID NO: 224449 - protein, 424 aa, unidentified
MTIQTAGIDLGKDKMHLVGLDANGEVVARREFGSRTALIRYLAKCCPCRVAMEACAGAHYVGRKAAAMEHEAKLLPGQYVRAYRKSQKNDYADGEAIAEAATRPTMREVQIKEASQQELQLLHRQRTGWVSQRTATVNRIRAMLLEFGITMPKSIDKVRSQLPLILEDADNGVPDLTRSLLYELWRDVVALDERVDWATKQLERMARADPRARALLQIPGVGVIIATATIAAIGDGRAFRRGRDFGAWLGLVPKQYSTGGKTRLLGISHTGNRYLRTILIQGARSAFQQFDRRDDPLARWAKRLRQRKPDNVSVVALANKLARVILGNPAAAGDVQPRHGCRCIVTRSRSQAQPSPSSTARRLSPPSERKHRQRMAVTGDRHAAEAVAASGSAKSSAYFAPACAILHRGLGLKRARPQRPNRFA

SEQ ID NO: 224450 - protein, 314 aa, unidentified
MNQPLQIYVGIDVSGDFLDLAIHDSSDAWRVPNDATSVDQLVQRLAELSPTLIVMEATGKLELAVLKAMCHARLPAVAVNPRQVRDFARATGRLAKTDRIDARVIAHFAAVIQPAVRPLDDEQTEQLQALLLRRIQLIEMLVAEKNRLTRAHQAARASLREHIKWLEQQLHIADNDIDAFLRASPAWRQKEDLLRSVPGIGPGAAATLIAFMPELGSLSRRQIASLAGVAPFNVDSGSHIGRRRVQGGRAIVRRALYMACVPALRFNPAIRAFYDRLRRAGKPFKVAITACMRKLLTTLNAMIRNSTRWNSTNA

SEQ ID NO: 224451 - protein, 407 aa, unidentified
MIFVGDDWSEDHHDICVLDEQGHRLARRQLPEGVAGVSALHELLAGLAESPAEVAVAIETDRGLWVAALVAAGYTVYAPNPKAVARYRERYGGGSGAKSDAADAKVLAELARTDRHNHRPVAGDSPGAQGVKVIARAHQRLVWARRRQVNALRATLREFYPAALVAFGEDLAHPDALAVLAKAPAPELGRRLSAAQAAAALRRAGRQRGVEARAKEIAQALRTEQLNPPEELSGAYGVVVSSAAMVLAEMNRQLERLEGELASHLAAHPDAEIVRSQPGLGTILGARVLGEFGDDPDRYADARARKNYAGTSPITVASGKRKVVKARYVGNDHLKDACYLWAFAALSASPGARRYYDTLRGDRHFAHDAALRALGNRLVGILDGCLRHRALYDEQIAWGHRQAEKAA

SEQ ID NO: 224452 - protein, 360 aa, unidentified
MSSIVYVGLDVHKRVISVCLLRQETGEMINEEVLNDRERLGRAVRRWSKWGELRLCYEASGAGFVLKRWMDDLGVCCEVIAPSLIPRAPGDRIKTNKRDACKLATMYAAGLLHTVRVPNQEEETVRALVRLRTDLTGDMTRAKNRILKYLATLGYNYSGRTWTQAHRAWLAGLSLEVLPRLIIQTHLEELDALVERRQRLSQQIEVVAQSEPYHTLVQRLMSLRGIALYSAMLLVTEIGDVHRFGNAPALMSYLGLVPQEDSSGDHRRRGGITKAGNSRARWVLTEAAWNQRSLPGRCARLKKHWRTQPPAVVAMAKKAEKRLHDKYWKVALRKDPRTAVVAVAREMAGFVWALLRVEVP

SEQ ID NO: 224453 - protein, 316 aa, unidentified
MHYLGIDVSKQTLDCCHMTGGFFYARKYRNDERGYKELADYLSEYPKDEVRICCEATGKYYEAMAEYLHGLGYHIAVENPRKIKGFGVAVLQRSKTDKQDAELIARYCKAVDPRAWQPLAVEQKELRELVRYIGRLKRQRAAEKVKLAESSEAVRSSILNILAVIDSEIRNMRQALREFYKEREELKEESRRLQTIKGVGEYAAAAIQTVLHDGHGFETAAQFVAYLGLDPKQHQSGTSVRGRSRISKVGSSEMRAALYMPAVVAYSRGEFPRLVRNMAANGKRPMQIIAAIMRKLAVVAFAIVKDKTIFDPSKHA

SEQ ID NO: 224454 - protein, 391 aa, unidentified
MVYVGIDVAKDKHDCFIVSSDGEVLFDVFTIQNNMDGFEDLLFKIKSAEKDSGNVKVGLEATGHYSCNILGFLKNKGLTTIVINPLYTSLSRKSISLRKTKTDKVDARTIAGMIMSDVSLKPYSDKLYHNEDLKSLTRYRFDKVMQRAKLKQSVSRLVNILFPELETLVSTLHGKAVYELLLEFPSAQHIASANLKHITHLLNTSSKGRFKRVTADEIREAARKSISSYLPAKSLELKHTIKLIRELTSEIAEIEAEIKKIMDAIDSPILSIPGIGQNLGAMIIAEIGDFSRFDNPDKILAFAGCSPTTYQSGQLYSSHAKMEKRGSRYLRWALLNAAAYVCNWEPTFAAYLQKKRAEGKHYYVALSHAAKKLVRLLYHLEITGEVYQATA

SEQ ID NO: 224455 - protein, 330 aa, unidentified
MAYGAIDLHKKESQVRILTDAGEVLDRRISTRRESFTQLFGDQPRMRVLLEASTESEWVACHLERLGHEAIVADPNYAPMYGGRSRRVKTDQRDVAALTTACVHGTYRPIHRRSPARRAIQAQLNVRDELVHTRGRVISMVRAMTRAEGLRIRSGSPETFLRRLVAVEVSPSLAATVEPLCHLMACVNDQLRMADLRVRDLVTQDPAIARLTTFPTIGPVTASAYVAALDDVHRFRRAGQVANYLGLVPREYSSGERQRRGHILHSAHPRVQALLVQAAWRIWLSRRDETAALRTWARLLARRRSTPIAIVALARRTGRSYFRDRASAVG

SEQ ID NO: 224456 - protein, 350 aa, unidentified
MIIVGCDYHPGFQQIAYVDTETGELQEQRLPHREEAERFYRDLAARKATVRVGMEASGHGRWFERLLAELNFELWMGDAAAIRAKRVRKQRTDRQDAQHMLNLLLEDRFPRIWVASWENRDLRQLLWHRHRMVQARTRVMNQLQAVALNEGLRCKKRLWREGGRQQLESLTLAPWASRRRRELLELLDRLNPTIAELSQAIEQQVEKYPEAQRLMTHPGVGALTALAYVLIIGDANRFSRGKQIASYLGLVPTEESSGDRRRLGHISKQGNSLLRFLMVEAAQVTARTDPQWRSKYFHLAMRRGRKIAKVAMARRLAVALFWMWRRKWNYEQLQKFGSRVGQPGNPYGVQ

SEQ ID NO: 224457 - protein, 424 aa, unidentified
MKTNSDYAAYVGLDWADRVHQVCLRTAGSTRDEQTELPNTPEALHGWASGLRARFPDGPIAVAVEQTRGPVIYALSQHAHLVLFPLNPAMAAKYREAAKAASGTKNDPLDASLQCELVRLHRDWLRPLVPMPAATRELQLLVEARRGWVDQRTALCNQLKAALKGYYPQALTLVGEDVGTPLAWAFLRRWPTLATVQRTRSQTLCDFYHAQHVRSAELIAQRVALVPTATALTDDAAVLAALPVLVAALVGQLEALQPVLVDYDQRIAACFLRQSDATLFASFPGAGPQLAPRLLVAFGPDRDRYQRAQQLQQYSGIAPVKTQSGHTCTTHWRWHCPKFLRQSFHEFARCSIRQSVWARAFYQLQLEHGKKQHQALRALAFKWQRVMFRCWQTGQPYDEAVYLAALRQHGSPLIARIEALATAA

SEQ ID NO: 224458 - protein, 312 aa, unidentified
MKNDTIGVDVSKDHLDAHRLADGATRRFANDKRGQGALIQWLAETPANRVVFEPTGPYHRAIERALDASGVPFVKVNPRQARRFAEATGKLAKTDRLDAAILARMGALLELQARPAPSEILLELKELYVAREALVKDRTAAKNRGKVLTLPLLKRQNAQRHEQINRQIATVEAAILQIVEADPGLSDRFAILTSIPGVSNITAFALLIEMPELGALEPGQAASLVGLAPIARQSGRWTGRAFIRGGRAGLRQALYMPALVAARFNPDLKAKYLKLVDAGKPAKVALTAIMRKLVVLANALLKANRRSQPKHP

SEQ ID NO: 224459 - protein, 345 aa, unidentified
MTEAYDGRQVVGMDLHRRRSVLVRMTMDGRKLETVRITNSPAALRAVLARCGQNPLVVLEATYGWYWAADVLEEAGAEVRLAHPLGVKAFSYRRVKNDERDAADLADLLRMGRLPEAWIAPPPVRALREVIRYRHKLVGQRTSCKDQVHAVLAKLGVPVTHSDIFGTGGGLWLGQLVLPQPYAAKVASLRALIAVLDGQITRLADQAAQMLAADPGYAAVRELDGIGPVLGAVICAEIGDVTRFGRAGQLCSRAGLTPRHRESDTKVVRGHVSKQGSRILRWALIEAVQHQPEGTRPRQARDAILARRGPEARNIARTAAARVLLTQVFYAMRDGHLRRASDPAA

SEQ ID NO: 224460 - protein, 410 aa, unidentified
MDLVSAGLPAKTLVVAIDPGKVSNRVLLADGERGLIGEPVSLPVQRGGIDRLCKLIESTAASETVIAIEASGSLHVPWARELERRLPGSLRVFAPSETHAARTQLGSRRFKDDDRDCAALVSLARQGRGRPAREGISEALLDAVRHRRRLVSQRRVVRQHLHHQLNALCPGLSAPAGHGRALALETPTGRAVLACAIAFAGRPPAARSLIARAPGRLFFSNASFWAERWRGCLPAPLDAELRAERLGRDVKRWRALEGDIEAVEAQIAALLARTPGQVLTTLPGVADTRAAAFAVHALPIERFPSAEHLYSSTGLAPARYESATIRKARAISRAAPGERRDALMAIAWGLSQHCLSFRERDRELRGRGMRPIEARVALARHACRLCHRMLQSQQPFDERRYAHARHRRGR

SEQ ID NO: 224461 - protein, 354 aa, unidentified
MPSTASAQIAVIGIDIGKNSFHVVGHDSHGAIVLRQKWSRGQIEARLANLPPCLIGMEACVGAHHLARKLTAFGHDARLMPAKYVRPYAKGQKNDFNDAEAIAEAVQRPTMKFVAVKTTDQLDLQALHRVRERLVSQRTGIINQIRAFMLERGIAVRQGIRFLRTELPIILASRTDMLSPRMLHVIEDLAGDWRRLDERIETLSREIETIARQDAVCDRLMSVPGIGPIISSAVVAAIGSGDVFSKGRDFAAWLGLVPKQISTGDRTILGKISKRGNRYLRVLFVQAAWVVLVKPVSWERHGLKSWIEAAKKRLHHNVLAIALANKLARIAWAVLAKGRDFEATRTLDGSTKPA

SEQ ID NO: 224462 - protein, 349 aa, unidentified
MTTQRLSYVGQSVYVGVDVHKDTYAVTCVCNKQIVKTATVKTDPAGLTASLSQWFPGARLSTAYEAGFSAFVLHRALTKAGIMNIGVNPASIAVAANDKVKTDRRDSKKLAIDLSDGRLQGIYVPTEDEALARLLPRTRAQIVEHRATMARQIKAKLHQFGLIAPASRRLISNRYLREIDAWPLPPDLRVRLTFLAEQWRFATRQLIEMRRLLREQAKAHPAIEQVYRSVPGIGEVVARTLATELGDMTRFANERALCSYTGLTPSAYASGPSVRRGHISRQGSSRVRHLLIETAWRALPRDAVLKEIFDRIAATRGKKRAIVAIARRLTGRIRACFRQGTTYAVGTYA

SEQ ID NO: 224463 - protein, 387 aa, unidentified
MIYIGVDIAKVNHFAAVVNHSTGEVLVKPFAFKNNSEGFKQLLNIIPNVPKDQLLVGMEATGHYMNALIRFLLNHQIPMTLINPIQTDAIRNSGIRKTKTDKGDTFLIIQALSLLNPRLFTERDWELLELKLLCRHRFHLVQSQSSLKRQLIGCLDQVFPEYATFFSSGPHILTSYELLKRYSTPVEILKASKSTLNHLLMKASKSHFKADKVNQLRALARSSVGVSLTVLSVQIKQVIAQIEFIDKQIMDLNHQIKQMMDTLHSPICTIPGISYTLGSIILSEIGDISRFSDPSKLLAFAGLDPSVSQSGKFEAKSGRVSKRGSKFLRWAILRASFLISFNNDTFNQYYTKKIQAGKTHSCALGHVSHKLIRILFKILSDNIAFDL

SEQ ID NO: 224464 - protein, 343 aa, unidentified
MQAITTIGLDIAKSVFQIHGVDAKGNVALRRQIKRRYVLAFFEKLPPCLVGIEACASSHHWSRELQALGHTVRLMPPAYVKPYVKRHKNDATDAEAICEAVTRANMRFVATKTPEQQSCLTLHRTRHLLIRQQTSVINAIRAHLAEFGIVAPIGRNGVEQLLGVVADANDKRLPEVARACVAALGVQLRMLKAQILEFDRMISAWHRSNETSRRLDKAPGIGPVLATALVATVADPRTFRSGRNFSAWIGLVPKQHSSGGKDRFGHISKQGDRYLRGLFVAGALAVIRYAKIHGTKHRPWLTALLTRRPTKIAAIALANKIARMAWAMMVKGERYKEPVALAA

SEQ ID NO: 224465 - protein, 331 aa, unidentified
MTTHAPQHNSKTTSGTVWVGIDVSKKELQLHSSAASLRLPAKLANDNAGIRSLVHRLASRNEVHIVFEATGGYDKPLLDALHRHRITCSRLNPRRVRDFARSKGLLAKTDAIDAAVLADFGAAYQPEPTSPVDPKLEEIHALVAYRRHLQDEMEREEMQNEHPKPGFITTLVKKRIRTLKSQIQSVEKQMATIVRSSPFLKRAVAALVEVKGVAQLTALSLLASMPELGTLNRKQAASLAGLAPFNRDSGAMRGKRSIQGGRRTIRQALYMAALTAAHRNEILSAAYRRMVERGKPKKVALTAIMRRLLIHLNSIMSNVLQDEKASGCLTM

SEQ ID NO: 224466 - protein, 314 aa, unidentified
MEIIKRYVGIDVSKDKLDVCILPEGECRIFPSDIDSVRDMVAWLKKYSPELVALEATGTYHSHVVAELTAADLPVAVVNPRRIRNFALALDELAKTDKIAAAVIARFAQDIRPQVRELPDKVQAALKALVARRRQLIQMRSAEQNRLHQSTAKRVSKSIEKTIHFLQREIEKIEQELDDTIKSNPIWTEKEELLRSATGVGPVTSCTLLVELPELGKLNRRQISSLAGLAPMNKDSGKMKGKRCICGGRAPVRNVLYMAALSARIHNPIIRAFSQRLQSQGKEPKLIITACMRKLLIILNAMLKTGQPFATISP

SEQ ID NO: 224467 - protein, 321 aa, unidentified
MNPTKVYVGIDVAKDWLDVAQRPGGEAWRVSSDETGIATLIKRLKGLRPALVVLEATGGLQIPAVAALAAAGLHAVVVNPRQVRQFAGATGRLAKTDAIDAEVLAQFGEAVRPEVRPLPDAATRELSAVVARRRQLIEMLTAEKNRLRMATKKVRLNIEAHIRWLEGELLDLDDGLGEVIRSSPVWRERDNLLRSVPGVGPVLSSVLLADLPELGKLSRKEVAALVGVAPLNRDSGQFRGRRQVWGGRSHVRTALYMAALVATRYNPVIKSFYQRLLSAGKPKKVALTACMRKLVTILNAMARSQTSWQITDLTLARQDSC

SEQ ID NO: 224468 - protein, 340 aa, unidentified
MTQHKIIGIDLAKNIFFLFEINHKGKNLSRKKLQRSKLLSYIANKEPCTIAMEACSGAHYWAREFSQFGHEVILYAPQHVKTQRRKQKNDYNDAEAIAEVALYKRPHPVPHKSVEQQDIQSLIRMRRLLVTERTRIINQVRGLISEYGIIIPKGATAFRKAIPEILENDENQLSCILRELLSHQYERYLYIDEQVKWFDDKLNQTAKQFENAKRLMSIPGFGPLTSQAVAVWLGSGQQFETGRDASAAMGLVPKQDTSGDKVVLLGITKRGNTYIRSLLVHGARAALRRAKFKSDNLSKWMLELQERRGPNRAAVALANKLMRIAWAVITKNEEYQPTQS

SEQ ID NO: 224469 - protein, 409 aa, unidentified
MGLLFVGDDWAEEHHDVELQDQTGRVLGRARLPEGVAGIARLHALVGEYLGEDDEVTVVVGIETERGPWVQALIAAGYQIYAINPLQVARYRERHGVSGAKSDTGDAHVLADMVRTDRHQLRPVAGDSVQAEAIKVLTRAHKTLIWERTRHLLRLRHALREFFPAALVAFDDLTAADALELLGVAPDPASAAALPTDRITDALKRARRRGRAGKAEAIAAALRAEHLGQPALVTAAYAATVRAQVAILTVLNAEIKTMEEQVEAHFGQHPDAEIYLSQPGLGVVLGARVLAEFGDDKTRYADARARKNYAGTSPITRQSGKRKIVLARYVHNDRLVDALGLQAFTALRASPGARAYYDRLRARGAGHRAALRQLGNRLVGILHGCLKTGTTYDENTAWPHTEEDLQTAA

SEQ ID NO: 224470 - protein, 335 aa, unidentified
MKHYAGIDLSMETSHVCAVNAEGRRVGAECVDSTPEAIAAVLERHGPVERAVIETGRMSPSVALGLRELGVAIVCIDARQAHQSLKAMKANKTDPHDAAGLAQLARTGFYKEVHVKSPAAHGVRSVITARGHLVEARVRLDNTIRGLCATFGIRLGAGQGERFLARMRAAATVPGLGEAVASLLRARERLVEEIGQMDRQLKAISLASPACQALMSIPGVGVQTSAAFAAAVDDASRFKRSRTAGAYFGLVPRRHQSGELDWTGRITKQGDGTVRKLLYEAANSILTRTRQSFALKTWALKIAKRRGLRKARVALARRLAVIMHAMLRDGTLFEA

SEQ ID NO: 224471 - protein, 400 aa, unidentified
MISVGIDVSKGKSTVCLLKPYGEIICKPFEVQHTEKDLEELANLLQKLDGEIKMVMEATGIYHLPILTFLLEEGFFISVINPFMMKRFARDNSLRGAKNDRLDSVMIASYGIEKWHKLKKYEVNDGIYPELRFLGRQYHRFMQTHVKHVQELTYLLDHTAPGLKAMFNSWNEHSNRDKLSDFVERFWHFDLITSLSREEFVEQYLLWAKEKKYHQSRSKAEKIYDLASNGIPTLSSRTPSTQMIIQEAINVLRIVNNSLYRILSRMKELAKSLPEYATVRSMGGVGDALAPQLIAEIGDVRRLHNGHALVALAGIDPPPYESGQFVGTHRKISKRGSPILRKIGFEVMRMLKSHKEPEDNAVYNYILKKEAEGKNKKLAKIAGLNKFLRIYYARVMEVYR

SEQ ID NO: 224472 - protein, 423 aa, unidentified
MDVMHERVAGLDVHKAMIVACVRLMADGKVGRECRTFDTTTSGLLALLAWLGESGCTQVAMEATGVYWKPVWNILSDGDFELMVANAAHIKNVPGRKTDVNDAMWIADLVACGLIKASFVPEEEIQELRSFLRARKQLTREQSSHILRIQKTLEEANIKLDSVITDIMGLSGRKMVEAIIAGETDPVRLAELAHRRIKAPRDVLVESLRGRVTDYHRFMLQLYLEQFDALAAAVAKIDRAVDAAIARMDQEVAAGQATFRSLILLLSTIPGIAALAATTILAEISRDMSRFPTAGHLLAWAGLCPGQNESAGKRKSSRLRKGAPWLKTMLVQCAWAASRKKDSYYKAQFNRLRTRRGPKKAICAVAASMLTAIYHMLKDGTQHQDLGADHFDRRSTEAKAKRLIAQLTNLGFQVDLQPLANAA

SEQ ID NO: 224473 - protein, 432 aa, unidentified
MISISSPVAPENSIFAAFVGIDWADQKHDLVLYDQRGGKPEHRELVQTPEAIDEWACGLRQRFDGKPIAVCFEQSRGGIAYALLKYDFLVLFPLPPARLASYRESFSNSGAKDDPTDAALLVDYLLRHRDQLRVWQPDTPATRELQLLAEARRDAVDLRTRLSNQLTAVLKRYFPQALVLVGHDVDCPLACDFLSKWPTLAAVQAAAPATLRKFYYAHHSRNEERIVERLELVKSAIPLTEDQALMQAGVLQVQCLIGQLRALAKAIERYEARLGELMDQHPDAMLFRALPGAGPALAPRLLVAFGSDRERFQSAAELQTYSGVAPVTKRSGKQCNIHRRWACPKFLLQTFHEFAHCSCKRSLWAKAFYLQQRAGGKGHHAALRTLAFKWIRILFRCWKTNTPYSETRYLESLRRRNAPLLAFLPATESISA

SEQ ID NO: 224474 - protein, 364 aa, unidentified
MEVTTIGIDLANNVFAVCGAESSGRLVMRRQLRRAQVLSFMRGLPRCVVGMEASGGAQYWARQFTARGHEVRLMSPALVMPYRKGNKTDRNDADAILEAVTRPSMRFVMVKSVAQQDLLALHRVRAQLVKSRTALCNQLRGLLRERGVVVRTGAAALKRSLPAALADESSELSGEMRELLSEMSQWLRTLEQRIASCEARITRKFKHDQRCERLAEVPGVGPLTATALVAAVGNAQRFKNGRELSAYLGLVPRQHSSGGKTLLLGITKRGDRYLRTLLIHGARSALRQCKDDARSDWARRIRAERGPNLAAVALANKNARVLWALLTRGDRYRSTRVATPAALHSSAPPAVKRARATRLRVPKD

SEQ ID NO: 224475 - protein, 586 aa, unidentified
MMILPSTSHQPVIGVGIDTARYGHHVSFLRPDCQPAGKPMTVMESRQGYRQLQQQLDLLHRRYPEARLYVRIDAAGQYAANLERFLRQLPLPLEISVGEPARNKAYRQAHFPKRKADNVESLANARYAVVERPPATAEVPAAFAALRDVASQLESQVRQSTRLSNRLHNQLARVFPELALVASSVSAVWVLQLLAKYPTPQKIARAQLRCLEALPYIPQGKAAEVQEAARNSVASLQGDVAEELIRGLVAQLQQSQAAVKTLEKLLEKTFKALPEGGHRQLPTIPGIGIATAAVLVAKIISMDRFSTVERLVSYFGTFPEENRSGVDKHGNPVPPGTMHMSPKGNDLVRRYLYMAAMTAIRDNPAVRAVYARQRARGKRGDVALGHCMRKLLQQVFAVWVTHRPFDPEAYPHRKAQQQAEARDKAQAQSKAAGRNKGQSPKRKAVTAAPVSVQGNLPPIKETVTTMTTSQEPSSPQTPALIDFPAIRRQVTMEQVLRRLGYLDRLIGSGPQRRGPCPLHADERPRGRSFSVNLEKNVCQCFHPPCGLKGNVLDLWARYHRLPLREAALNLAETFSLDTPRTEKRNP

SEQ ID NO: 224476 - protein, 321 aa, unidentified
MHKYNQIFGVDISKDVFDVMNSQGKHLQFENHSKGYNQLIKHLSKKDLIVMESTGYYHYCLAQYLYDKGYTVSVVNPLSVKRFVQMKLSKIKTDKSDALAICQYACSNEVPIFTSRDSNQAECLQLMSLIEIYLKQSTALKNKLHGEKTLGIPSKTVYHSINRSLKMIQREIQLLETKLLELVKEHQQKQLTLLKSIPGMGTKTSIILIVLTDGFTKFENAKQLCSYAGTTPTIRMSGSSVRGKSRISKMGNQKLRNLLFLCAFSACKYNKACSELYQRIVAKGKSKKLALIAVINKLLKQAFAIAKSGLPYDENFVSNLS

SEQ ID NO: 224477 - protein, 415 aa, unidentified
MALKIVYKICCGIDVHKTFVVACIASTNDKGVTSYESHRFSTYTSGLKTLLQWLLDRNCKDVCMESTGKYWIPVYNILEKDCSIVLAHPKYVKAIRGKKTDKKDAKWIADLFKHDLVAGSFMPPAGIRQLRDLMRYRFKLTCFKSSEKNRLQNCLTVSNIQLGNVVSDTFGKSAQAILDKILENPADTSFDLEPLVFKSLKKKLPELRDAIDGYITPEQAGKLKVIKSHYENLEARKAELEELILALATPYQQELAILQTAPGISSDFTAIGIISEIGTNMEAFPSAKHLCSWAGLTPTNNESAGKKKSVRVSKAGCYIKPLLVQCANAAIKSKKHPEIRDRYLRIKKRRGHKKAIIAIARMLLTALYHMLKNGENYNSDLYQKSDILPTTREITVEQAILMAQFQGFRIKSATE

SEQ ID NO: 224478 - protein, 354 aa, unidentified
MRILAVDLGKVKSVACDYASESGEHVFETCRTVPEALEEMIVRRRPDRVVIEVCPSAGWISDLTARLEIELQVANPSHQGWRWRSVKKKTDRIDALKLAQLSAVNQLPVVNVPSKEVREWRSLIHYRQGLVARRTAIKNTIRSILNRQAIAMPAGRSGWTNAFRKTLDRLAGVGDDRASVWTTLEPTQWWRGQLAEELRQLDEVSGAIGSVEQRLNAYAENKPAVQKLRSAPGVGPRLSEAVAAIIGDPHRFKNGKQVAAYAGLVPRVFQSGSVDRKGRITGAGNRCLRGMLVEVSWLGLRTNPWMKQVFERVCRGCPSRRKIAIVAVARRLLIWCWAMMRDDRDWRPKALAAA

SEQ ID NO: 224479 - protein, 318 aa, unidentified
MNTKTKQNINVGVDTGKYQLDIYIRPLDIYFTVPNDDKGIKEAVKTIKKYKPERIVIEATGRLEMPFISACANANLPFTIANPIHVKRFAGAIGQRAKTDKLDAQLIAHYSEAIKPKLSQLKPDTMQAMSDLVTRRNQLLTMQTMEKNRLQIMPKALAMTIKPVLTLFNNQIKKIEEKIVKLIESCPEYQAKNTILQSMTGIGKIAAASIISNLPELGYINSKQASSLIGVAPMNRESGRYKGHRKIQGGRPQVRTVLYMAMMSAMQSNPVFKVTYQRLLAAGKPKKVAIIACIRKMIVILNSMLRDGVMWEAPKVNN

SEQ ID NO: 224480 - protein, 410 aa, unidentified
MRIIALDVHRTFAQIAVLEDREIRNAGRIDLEHSRLLQFAKTLKPDDEIIIEATGNTNVIVRLLSPFVGRVVIANPILVRAIAWAKVKTDKIDAAVLAKLHASGFLPEVWMPDEETETRRRVVAERAQLVSQITRLKNRIQSVLHANLIPPYKGILFSQRGRTWLTAQPLPEDQRRVILRHAGELDRLGAELAEVDKSLAQRALEEPRVKRLMTITGVNATVAMSVLAAIGDIRRFSSQEKLVSYFGLNPRVRQSGNKPAYHGHITKQGRAHARSMLVEAAWVISGAPGPLRAFFIRIRDKRGKHVAAVATARKLAVVVWHMLTKDEDFAWIRPALLQWKLRKLELKAGHPSRRGGHQKGSAAAYSNKSARDSEREATGNAEEEYRRFVTNWKQQSPKGRSGATNEVRRS

SEQ ID NO: 224481 - protein, 335 aa, unidentified
MQVYGIDLSMEKFDVSYIDVNGKQRDLQVKNRLDDISKFLGKIPEEGVLCAENTGTYGDLLVFLSNRQGIRIALVPGYTIKHSLGLIKGKSDTMDAGRIREYGERFYDKLVFKAYDPEEIVELKSLYTLRSQLVKARKLLLTGQHSRSIGPMQNISAQRHVARAISGLEAEIKALESEMESIIKADPKLNENYGLATSVRGIGPVIATDLIIKTGNFKNIDTARKAASYAGVCPFPNESGKMVGKRKTSPFADRKLKALLYMGAKSAVKHNKEYRLYYQKKQLEGKPHYLIMNNVANKMLRTIYSVVKNKTPYCQDYICLDPRERNIISSTKKVA

SEQ ID NO: 224482 - protein, 355 aa, unidentified
MSIVGGVDIHRKQLTFDWVDEQNGRWERGRIAPADREHLADWLTQFDPETGVAFALEGCTGWRYVAEEMAKAGVVAHLAEPADTSVLRGPKRRAKTDKADAKLLRELLASGRLPQCYIPPSQVLEWRALLELYQDLRGQHTAWAQRIQAVCFHQGTTAPGQAGIVRGDRARLQTIVDGQLSVSGRLLVNTALAVMDTLADHLERLRRRLLSTARGVKGARVLMHEIYGVGPLSSLALCSWLGGADRFSSSRKAVRFVGLDITVHSSDGKRSPGRLSRQGPEVLRWLLFEAAKTSARACAPGYAYYTQVKDRYDANRACLSQARRIVRHAVHLLSELGDDAFTNVAQPAAPTTIAR

SEQ ID NO: 224483 - protein, 318 aa, unidentified
MSDSVFVGIDVCSQTLEVAGSSELKTWQVANDAAGIEALVSRLLELKPALTVLEATGGYEFEAACAVQAAGLAVAVVNPRTARDFARAMGALAKTDALDAKMLAAFARVLHQHPERERFVKPLADAELQRLQALVLRRRQLVQMITSERQRMRISHVAARPSIERVIEFLKTELADSDADVAAHVQRHHAELAAALASVPGIGAASVAVLLAELPELGKLDRRRVAALVGVAPLNRDSGQMRGQRTIWGGRADVRRTLYMATLTAVRHNPVLKTHYDRLLAAGKRKKVALVACMRKLLTMLNAIAKHGSTWDPSLHSA

SEQ ID NO: 224484 - protein, 364 aa, unidentified
MKRSLKYVGLDVHQATTVTSVREESGRVIAQTVLPTDGRMLVEYFRGMRGSIHVAFEEGTQAQWLHDLLQPVVAQVVVCDRRGTTARGNKGDQLDADALSELLRRGALRPVYHGSGERATLKEVARTYRNLVEDTTRVMLRLKALFRARGITTAGRSVYRADERADWLAQLDAAAGPGASRGVHFRAATLYAELAVLQALRPTARRALIVEAKRDPAWAVLRRIPFLGPIRVALLLATLQTPWRFRTKRQLWGYAGLAVVTRTTAEWALVDGRAVRRRRPPMTRGLNRNHNRVVKEVFKSAATAAATRSGPWQDWYQEMLKRGMREELARVTLARKLAAITLHLWQTGARYDPSHLMPSTVPAR

SEQ ID NO: 224485 - protein, 341 aa, unidentified
MKHPDMKKSYFLGIDVAKNSCKFALLKANGSCLWSGQFENNSSSIQRWLALLGTRKLDRRKILFGFEATGVYSHALLFHLQQLELAACQLNPAQVKYFGVSVNRRTKNDPADARLIAYFLLERQPVATRTLNPIEHQLKVLVHEREALSIDLVRERNRAEKHALSPFKAPPMLAEQRAERLLKLKTWIKDLDAALKELIDSDPVLCAKAQLLCSIPGIAFCTAAKILSQVAGKEFQSAHQLALYAGLTPKENQSGLLKGKTTLCKIGNAFLRKALFMPATVATRCCQPIRLWVQQIQSRRPELSKLAIRCAVMHKLIRIIFGVLKNQTPFNPNFGSFSHAA

SEQ ID NO: 224486 - protein, 416 aa, unidentified
MNAVGIDVSSRKSTVAVLRPLGEVVCLPFDVTHDIAGLASLAEKLKALDGETRVVMEHTGRYYEAVAKALHEAGFFVCAVNPLLIKEYGANSLRRVKTDKADAIKIARYALDNWADLRDFTPMDAIRYDLKTLNRQFQLASKQRTASANNLIALLEQSFPGIRKCFDSPVRSDGTQKWVDFAHSFWHVDCVRKQPFPAFCERYRKWCKLHAYFFKLRNAEKVYALAKSAVVLTPKSKVVKVLVQEAANQLISISRSVEVYRAEMDRLAAMLPEYPVVMAMYGVGKSYGPQLMAEIGDVRRFERKQALVAFAGIDPMPNQSGDKNVRSNKSSKRGSPYLRKTLFNVIRTYLQCAPQDEPVFQFLNRKRAEGKPFYVYMLAAANKFLRRYYAKLRDYFASLDTLQPVDPIPTILKATL

SEQ ID NO: 224487 - protein, 417 aa, unidentified
MKKHNNSAKKSEPTSKRAKSRGPVQRDTKEVLAELVGKLREKLDPKVGAASAGEKNQRGELRPNLDRLTVGVDLGDQWSHYCILGLEGETLAEGQLRTTQQDVAEFFRALNAARVAMEVGTHSAWVREVICSYGHEVLVANPRLMEGSKRRKRKNDRIDANKLARLGRVDPESLQPIEHRSAEVRQDLVMLRARDALVAARTELINATRGLVKSMGARLPKCSSPSFAQKVEEAVPAQVREALLPLVHMTAALSDCINGYDEKIEKLASEKYGHTGLLRQVKGVGPITALAYVLTLENPERFVKSRDVGPYLGLVPKQEDSGESQPQLGISKSGDTMLRKLLVGSAHYILGPFGPDTDLRRYGLRLCERGGKNAKKRAAVAVARKLAVLLHCLWVSGEVYEPLRQGMSATIAPAVAA

SEQ ID NO: 224488 - protein, 431 aa, unidentified
MDTQQFEVIRPKCAGLDVHKKSVVAAVCTSDPVTLTASYKTKVFNTTNSDISALRDWLLAQDCRDVCMESTGKYWIPIFNILEPHMHVILTHPKYVKAIKGKKTDKRDAKWIANLFRFDIVKASFIPPADIRALRELSRYRLKLSYMRTAEKNRYQNSMTISRIRIDCVLTDPFGLSATRIMDYLLSGEPFDEEKCRSLIDRRVKASKDEVMDTIHGYHILEEQKFKMTHAKAHMDFINKSIDEIEAELFLRSRQYDVQVKRIATVTGITELSALFILSEIGADMSVFESDRHLCSWAGLTPANNESANKKKSTRCSKAGQYLKPLLIQCALAAVKSKKEPYFAIKYQRLSKRRGKKKAIIAIARMMLASIYHMLSDNEDFHPDDYEATINPPKQKPVVLTLDNTLQFLREQGADPETLKLIQQQCVAQVG

SEQ ID NO: 224489 - protein, 272 aa, unidentified
MQVVTAVGLDIAKSVFQVHGVDARGEVVIRRQLKRRQVLRFFEKLPACLVGIEACATSHHWSRELRSLGHRVRLMPPAYVKPYVKRQKNDATDAEAICEAVTRANMRFVETKTPEQQACLMLHRTRHLLIRQQTSVINAIRAHTAEFGIVARVGRNGVAELLKVVADPTDQRLPDVARACVAALGLQLRMLKAQILEFDRRIMAWHRSNEVSKRLDHIPGIGPALATALVASVPDPRAFRSGRNFSAWIGLVPKQYSRPDVSAARPRISRAS

SEQ ID NO: 224490 - protein, 342 aa, unidentified
MSPSYEGRQIVGIDLHRRRSVIVRMTPDGYPLGTVRISNDAATLAAEISRAGEHPDVVLEATYGWYWAADVLAAAGAQVHLAHPLGVKGFAYRRVKNDVRDAADLADLLRMGRLPEAWVAPPPVRELRETVRHRAALVAIRSACKAQIHAVLAKNGVAVPMTDLFGQAGTDLLGQVELPSPFHARVTSLRRLIDLLDFEIDAAACQLAGRLARDPGYQALLVLPGVGKTLAAVFLAEIGDITRFPTPGHLASWAGLTPRHRESDTTVHRGHITKQGSSLIRWAAIEAVSILPPTTPVLGPTKTRVAARRGTNIGKVAAARKLLTFVFYALRDGEVRALHTAA

SEQ ID NO: 224491 - protein, 350 aa, unidentified
MLAGIDTHKDTLAVAVIDDVGRPVTVTELANTEVGFDALEQLLEEHAVRRVGIEGSGNYGRGAAVRLVLADGIDVVEVPPSLTSRERSGRPGQGKTDPIDAVAIARITAREPGLPPVRLAVGQAADLRALADYRTQLVAERTALASRTHAELHGLRPGYHRQVPRLTAPTFVTAAQDLLAGDDSVRAQLTRRRLCRLAQLTTEIQEVTDLIAVAVADVHTGLTGIYGLGPVGAATILGEVADIRRYRSRHAFAAANGTAPLPANSGRTTSRHRLNRSGNRTLNRVLYTMAITQIRADTEGRAYYQRKRAEGKTGREALRCLKRRLSDVVYKTLHEDLADGRAPTPAAAGR

SEQ ID NO: 224492 - protein, 353 aa, unidentified
MTFYIGVDLHPYQQTLCWCDSETGETGALKLAHDIEKVREFYSGIRQPAVIGVEASSRAGWFERLVLECGHKLLVGNPVLIRKTALSRHKNDRIDAEHMLWLLMREEFPAIWRRPAESTHVLEVIRLRSGLVGQRTQVYQRLSAIARDLGMPRSLMRTVAVQQMLKRAVMCESSALCRDQLFSTLAHLQEQISEVEAWLKKKAATDDKAQLLMTQKGVGYLTALTFVHTVGDVTRFEKGAKGVTRFAGYDPVERSSADKIRFGRISKAGPHLLRFHLGQATQMAARTDTKLKAFYKRLAKKKPRALAKTATARKLLVKLSIMLRDNITAEEFDRRGRTVGNARRIARSEMAAS

SEQ ID NO: 224493 - protein, 409 aa, unidentified
MRLFIGDDWAEDHHDVELMDERGKRLAKARVAEGVAGIAKLHAMVAEQLGERPEDDDTEVVVGIETDRGPWVGALLAAGYTVLAVNPLVAARYRERRAVSGAKSDAADAHMLADMVRTDGHQLRPVAGDSDLAEAVKVVSRAHKTLIWERTRHTQRLRHALRDYFPAALAAFGDLDAPDSLELLAKAPDPASAARLSRSQIAAALKRARRRDVDAKAERIQAALRAPHLGQPQAVTAAYAASVRALTAVLTVVDAQVNALQYEVGAHFGQHPAAKIVISQPGLGPIVGARVLAEFGDDPHRYASAKARKDYAATSPITIASGKKKVVIARHVHNDRLIDALMFQASKAINVSPGARAYYDKQRARGAGYNAALRQVANRLVGILHGCLKTCTLYDETTAWANHPKPATT

SEQ ID NO: 224494 - protein, 341 aa, unidentified
MKNLFIGVDFSKEKVDVAIFFADGLTETAARVFNEFKTTVSGYKQLVKWVEQNSYGIDSSLWLFCGENTGDYSKGLCNFLYGKGYDMWLENAKSIKDASGLRRLKSDRADASMIAEYAMRNYDKAIMYEPLSESLAQLRELFLYRQMVVRHRCSFQVRRGEKRLTMEKSPVKTMISQSGRHIVSELNKEIEKIDKRIAELIKSDEELTEVYTIVTSVPGIGTQNAVCMMVYTDNFRRFNYDSRKIACYYGIAPFGKDSGTSVHSEPRVHYMANRQIKAMLTQAALAAVNFNPVITRYYMQLVERGKKKQVALNNVKNKLIHLITAMVRNRQLFSPEYKISA

SEQ ID NO: 224495 - protein, 354 aa, unidentified
MSNKSIPVVATMGIDIGKNSFHVVGLDRRGAIVLRQKWSRGQVEARLANMPPCLIGMEACVGAHHLSRKLQSQGHDARLMPAKYVRPYSKGQKNDFRDAEAIAEAVQRPTMKFVATKSGEQLDLQALHRVRERLVGQRTGVVNQIRAFLLERGIAVRQGLRFLRTELPIILAQRTDVLSPRMVHVIEDLAGDWRRLDERIAGVSAEITALAGQDVACKRLMTVPGIGPIISSAMVAAIGNGAAFSKGRDFGAWLGLVPRQTSTGDRTILGKISKQGNRYLRVLFVQAAWVVLVKIKDWDRYGLKAWIDAAKKRLHHNVLAIALANKLARIAWAVLNKEHNFECVRTTATSSRPA

SEQ ID NO: 224496 - protein, 381 aa, unidentified
MLTMTRTNECSAQSPCLLLAFELGRRTWKLGFTVGMGQRPRCRQIPAGGVGVLASEIFRAKARLGLPVDASVVSCYEAGRDGFWLHRYLVAQGIMNHVVDSSSIEVNRRARRSKTDRLDLAGLLNLLARYIQGDRRVWHVVRVPTAAEEDARQLSRTLETLSQDRTRLINRLKALLATQGVWLEPDAKFLDELKAARLWDGTPVLAGLHERLALDWAQLQQVDTQLRELKATRRARRRELAPLTGRALTQLQGLRGIGAGGAWVLATELFGWRHIRNRRELGALVGLVPALYQSGESQHDLGITRAGNTHVRRIMVQLAWGWLRFQPESALSLWYQRRFSSGKRLRRIGIVALARKLLVALWRYLETGTVPEGAELKPIRA

SEQ ID NO: 224497 - protein, 482 aa, unidentified
MAAKKMSTFQRLHAQHLNRKQKRALGRQLLADDPALQVIHPNAAGIDVGNESHFVAILSSRDADPIREFGSWTADLHKMAKWLKEHGITTVAMQSTGVYWIPVLEILEQYGIEVYLVNAHGTKNLPGRKTDVQECEWLRKLHTYGLLRNSFRPPEEIRSIRTIWRQRDRLVKESARSIQHMQKALTKMNVQLANAISDISGETGMAIIRAILEGKRDPWELAKLRNNKIAASEEEIANSLQGHWREDVLFELRQTVEAYDFYQKQMLACDKELEKYTASIETRTITHTQELPENAIPLVSSKRTKKRKPRKKTHPNFELSGELERIMGVDLTRIDGIDVLTAQVIFSEIGTDFSAFPTENHFASWLLLTPHREISGGKVIRHLPAKGRNRVANALRMAAQSLTRSDSYLGARYRRLRARLDGQVAIKAMARYLACLVYRMITKGQAYVDKGAAHYEIKREEKERLALQKKAASLGLRLVAAN

SEQ ID NO: 224498 - protein, 339 aa, unidentified
MKLTPVGIDIAKNVFQVHHVDEETGEIVNKPIKRAKFLAYFANRAPCLIGMEASGGSQHWARLLTAMGHQVKLMSGQYVKAFNIRNKKDPADARAIWLAVQQPGKPVAVKTEMQQAMLALHRMREQLVKFRTMQINALRGLLTEYGQVMGKGRLSLDRAIPDVLARVADRLPAALIDTLREQWNGLSALDGQIAAIERRMREWKKEDRDVRAIAEIPGVGLLTSTAAVATIGDPKTFRSGREFAACIGLVPKQVGSGGKLMLLGISKRGDTYLRMLLIHGARSVVSSPKQHDPWIEQMKKRRPLNVVIVALANKMARIIWAILAHGRPYQDGYVSARPV

SEQ ID NO: 224499 - protein, 411 aa, unidentified
MHERQKHFYVGVDLHKQHHVAVIINCWQEKLDEIKFENKPSAFSTFLLDIYKHMEDGLTPIFGLEDVGGYGRALAKYLADHEQIVKEVNPALSYAERKSHMTTQKSDSWDAECVARILVNKLEQLPDAKPHDLYWSIQQLVTRRNALVKAQGALKNQLHIQLSHHYPSYRKFFSEVDGKTALAFWERYPSPPCIEEVTVKQLTIFLLEASSNTCSVKKASEILKLVKEDGNTVREHQETRDFLVKSIVRDISFKKQEMRYVERELKGLMSLLDVQLDTMPGIDLVTASALIAEIGDVRRFPNANKLARFAGIAPVYFGSGGKGREQKSKQGNRALHALFYNLAVQQVQVAKGSKLPRNPVFHAYYQRKLKEGKTKGQALVCIMRRLVNIIYGMMKHKTAYELPIIKEEEVV

SEQ ID NO: 224500 - protein, 450 aa, unidentified
MERSMKQQDKPKKRGPRLEVTNPNAAGVDIGCASHYVSVPAERDDEPVREFKSFTVDIHKMADWLTACGVDTVAMESTGVYWIPVYEILERRGFKVLLVNARHVKNVAGRKSDVLDCQWLQQLHSYGLLRGAFRPADQVCVLRSLSRQRAMLLRLQARHIQHMQKALVQMNIQLANVISDVVGETGQKILRAIVAGERNEHVLAGMRNVRIKASEEEIVQSLRGNWRDEHVFALKQALELFDFYAKQVADCDALMEQQMIELHQHDRLPGKARKTSHRNKPKFDLRTRLYQMCGVDLTRIDGIDVCTAMTVLSEVGVDMSKFPTAKHFAAWLGLCPGTKISGGKVLGSKTQKCANKTAQALRQAASCLKNSQSALGAYYRRMCAKMDKPKAITAAAHKLARLIYSMITKGEEYVDQGQAYYEERYRQRVEYHLRKRAESLGLRLVPMEVA

SEQ ID NO: 224501 - protein, 343 aa, unidentified
MKKLYCGIDLHATSMQVCVAEKNLVKVLDRVVRNDLPTLLSVLRPFGPGLRIAVESTFNWYWLIDGLQDAGYEVHLAHTLGLFLITRAKVKTDRRDAYGLAKLLATGMLPEAYIYPKETRPIRDLVRQRTRLVAARAQGYAALRLRLYQHGIHDHSRNAARGWALEDIEQITDHPIIRMLSGQEFERITLLSDQIAAIEDRILEAARPESGYQRLTALPGFGRALSAIVFYETGDISRFPSARHYSSYCRLVPGTADSGGSSHRGRGAKQGNPHLKAAFTQAAQCAVRHYPTMKAFYERHAANHPSRGSRLIATNILGHKLALAVYHILKEGTEYDERRLLTA

SEQ ID NO: 224502 - protein, 481 aa, unidentified
MKRKSRRAKCQKVSPFSGDLQLIEADAAAVDVGSRSHWVAVNPQRDPNPVREFGTFTTDLISLADWLAQCEAKSVVMEATGVYWVSLYELLERRGFKVYVVDAHTVRHLPGRSKSDVKDCQWLRRLHSYGLLRGSFRPPAQIRQLRNYLRSRTKIVEAAAQQQLRMQKALTLMNIHLHHVISDLSGLTGLAIVRTIVGGERNPNRLARLRDPRIRASKETIQKSLEGHWQEELLFDLKIALESYDHFQGQIAAYDEQIRQELKEVESKVNLANEPLPAARLKACRKRPGMSQQDQLDLREELYRISGVDLTRIDGISLQTAQKVFFEIGTDVSAWSDEKKFSSWLGLSPNHRISGGKVLKRGSRKVVNPLSVALRLAARTLRNSRSALGANFRRLIAKIGMPKAITAMARKLAVLLYRMLKYGTQYVDKGMQHYESKYQETKLQYLRAQAAKFGKPSKSKMLQAPHCQRDATGVHGEHEDD

SEQ ID NO: 224503 - protein, 408 aa, unidentified
MLEVKKHYFRAFNWRGIELTRKPVAFSNSMEGFNSFYNSVVELMQKNELKEALVGIEPTGHYWFDLGQFMGEKNIKFVMVNPHHVHKTKELDDNSPSKNDRKDPRVIAGLVRDGRYFYSYMPTGVYAELRNASNRRFVLVEEQTRAKNRLQKWVAVYFPEYKGIYTHIDAKGGLLVLKQAPTPEEIVRLGVEGIIKIWKDAKLRGNGHKKAMLILNAAMKSIGLKAGLTEARMEIQDLIEDYELQTKRLERVNDLIKELCQQIRYADKLLEIKGIGITTVAGFIAEVGDITRFDSTKELQKLAGLELVADSSGKHDGKTKISKRGRKRLRYLLFEAAISVVGKNEEFKEIHRYYTTREKNPLKKMQSLIAVACKLIRVFHVILTKGISYDASKMLKDIRRPGEQLKAA

SEQ ID NO: 224504 - protein, 313 aa, unidentified
MAIPCVVGLDVAQATIDVAVRPPMQPPWRVPYDEGGVAALVTTLTALQPTLIVLEATGGLEGALASALGLADLPVVIVNPRQVRDFAKATGVLAKTDRLDAQVLAHFGEAVRPVPRALPDDAKADVAALLARRRQLVEMRTAELHRLRRARPMVHASLQAHIAWLDTQLRDTDADLQQRIEASPLWRTQDQLLRSVPGIGPATARTLLGNLPELGQLSARQISKLVGVAPLNSDSGLRVGPRQIWGGRAPVRTALYMATVVATRYNPVIRAYYQRLRAAGKPAKVARIAAMHKLLIILNAMLRHQQPWQPLEA

SEQ ID NO: 224505 - protein, 342 aa, unidentified
MNTVTTIGLDIAKSVFQVHGISATGEVLIRRQVRRGQVLKFFASLPPCLIGIEACASAHHWSRELQSLGHEVKLMPPAYVKPYLKRQKNDMADAEAICEAVTRPTMRFVETKTCEQQSILMLHRVRLMQVRQRTMLTNAIRAHLAEFGLVAKIGREGVDELLLMVRDGDERVPELARACILALAEQLMLVKRQILEMDRRITACHRASEVSRRLAEIPGVGPLLASALVAHVPNPKAFSSGRNLAAWIGLVPKQNSSGGKERLGGVTKQGNRYLRSMLTVGALAVIRFAQRHGTKRPWIVQLLTRRATKVAAVALANKMARMVWAIMATGERYREPVTRQAA

SEQ ID NO: 224506 - protein, 406 aa, unidentified
MQGPVITVDVSKGSCHYQPYVSNGHPMRKPKVLHDTVEGFQSLSDLIDTMKDRYECETIPVIFEATGVYHHCLQKYLDDHQIPYYIISPLMSASYRKTTPNSNKTDDLDYSHIAKAYYGECNLFPYDKPSKSFHNLRELNRYYECELNHLRMRKNTFRKYLDIVYPRLDKCFKGHSSLYDEIPMEVIKQYPHPSLLLKHKEETIVKKIEKKTSHNALFIQNIVHEMYECSMHCYSGADVTDVESMILPELVDDLQSQKERCDEILKQLVSEAQKTPYFTSIVSIVGIGDNLAARIIAELGDMSRFSCRRAITAYAGLNPKIRQSGDMDGIHLAISKKGNKHLRCLMYLAVSCNYRLKKGDVLYEFNQKKRQQSFSPLKPKAATIATAHKLLLIIYALCTKGTVYRS

SEQ ID NO: 224507 - protein, 415 aa, unidentified
MGYKVAGIDVHKKVLMVVVCEVSAPQAEPERRRFGTTTSELQRLSLWLRQQAVEEAVMESTAQYWKPVWYELEPYLRLQLAQAYSNRAPRGRKHDFKDAERLVRRLVCNELVLSFVPRGEQRTWRTLTRMKVQLSREQSRLHSQLECLLEEMRIKLSSVLSDLLGVSGYRILRALSAGETDPGKLAALGDERLRCSQEQLIDALSGHPLPLHRQLLGLYLDRYQMIADQIAQLNRMIAEAMQAEPAAAAAVLRLAEVPGFGADSAQQVIAEVGAQASTFAAPANLTSWVGTCPGKQESAEQNHSSRCAKGNRYMRRILNQAAHAAVKKNGSHFQTVFRRLLPRLGYKAAVWAIAHRLCRLVWKILHEGVQFVEQGSDSDPRRKHQRALKLLRILRRLGYEVDLKPAAANLAAVTG

SEQ ID NO: 224508 - protein, 363 aa, unidentified
MYKTSHTRRHRNPPSGSVVVGIDTHLDIHHAALVDAATGAPVADQQFPATPAGYLELLDWAVGHGRVSRAGVEQTGTYGAGLSAVLHAAGIEVIEINHTERGDRARHGKTDELDAYRAATAAAAGTQKGLAKHYHPAIAALRPLMVLRAHHRSSRQRAWGRVGGMLVTCPDDLADQVRGLNSAQKLARIAAWRPDLTRLHDPVNSYKLALRDLARACLDHDRAIVEIDAQLLRILTPIAPTLLAQHHVGPVTTAQLLITAGHPGRITSGDAFAKLVGVAPLPVQSGKSSRWRLSRSGDRQANSVIHRVVIGRLGTDPRSKTYIQRRVSEGKTRSEAIRALKRHVTRDLWTALQTDLNNLPHTT

SEQ ID NO: 224509 - protein, 346 aa, unidentified
MGKLQIDLSSVATVGLDLAKHVFFIHAVDAQGQVVFAKEVRRRDLLSFFASLPACLVGVEACSSAHHWGRELTALGHDVRLMPPAYVKPYVKRQKNDAADAAAICEAVTRPSMRFVKVRSIDNQAVLMHHKVREMLVRQRTQILNGLRGHLAEIGIIAAQSPVHARALADLLRNGDVSIPEAVATALLPLVTQLEHLDAEIKEADAAIAKLAKADPVANALMSIPGIGPVTASALVASVGDPSGFSGPRQFAAFLGLVPRQNSSGGKPRLGRISKMGNAYLRKLLVVGAHAVLYYRARHADPLRCWAQKLMETKPFKLVAVAIANKLARIVFAVMTTGTFYRAAKA

SEQ ID NO: 224510 - protein, 322 aa, unidentified
MSLPNPVCVGIDVSKATLDVAIGTGAPPFTVSNDLDGFDAITAVLRKHNVSLVLMEATGGLEVAIACSLQSEGGDVAVVNPRQARDFARAMGYLAKTDRIDARMLSQLAEVIDRHPERERFVRALPDAQRQVLSAMVVRRRQLVTMLVAERNRLQQAHPMSRKSIQTIIDVLEKELQRIERNMDKHIQTHFKALSEQLQSVKGVGAATSATLLAEVPELGHLSRREISALVGVAPLNRDSGKMRGRRTIFGGRASVRTALYMATLVAVRYNPVLGDFYQRLEGAGKPKKVALVASMRKLLTILNAMLKTGSAWDNSYHSATC

SEQ ID NO: 224511 - protein, 400 aa, unidentified
MISVGIDVSKGKSTVCVLKPYGEIVCRPFEMQHVEKDLEAFHNLLQKLDGEIRIVMEATGIYHLPILIFFHNKGYFVSVINPFAMKKYAKDNSIRGAKTDKLDSIMIANYGIEKWFKLQSYEGDEEIYAELKLLGRRYRYYMELHVKALQELTHILDYVMPGIKKMFNSWNEANGKDKLSDFVERFWHFDLITSMSLETFTDEYLVWAKEKKYHRSRSKAETVYELASSGIPTLPSSTPSTKMLVQEAISVLRTVDSSLSLIVTRMQVLAKSLPEYSTVREMGGVGDVLAVKLIAEIGDVRRLHSAKALIAWAGIDPPPYESGQFIGSKRKITKRGSSTLRKIGYEVMRVLKSHPAPKDDAVYNYILKKEGEGKSKKHAKIAGLNKFLRIYYARVIAVYQ

SEQ ID NO: 224512 - protein, 341 aa, unidentified
MMISTTKFFIGIDVSKPYFDASLMAVVNHLKQPVETARFDNNATGIKSFDKWLKNHRVTFDEQSLVVIENTGIYHRLIWSFCSRKHLPIHIGNAAHIKWSFGIARGKNDKIDSLRLCNYAYRESDTLKLTAPLSPVLLHLKDFISARTKLLKQITSLGVSIKELGNVNEKAHQKLIERSLRSAIDGIAKSISNIETEIKKIIEENKAFKSNYRLLLSIPGIGHVTAVYLIGCTANFAGSPSGKQLACYAGVAPFEHSSGISIKGKTRVHRMANKELKRLLHLCALSAIQHNLEIKNYYNRKKDEGKHGMSILNEVRNKIVLRVAAVVKNQIPFKNNHKIVA

SEQ ID NO: 224513 - protein, 482 aa, unidentified
MATRKLSTFERLQPGRWNRQQRRELGRRIAAADAGLAVVHPDAAGIDIGNQSHFVAIPPDRDPVPIREFGAWTAALQELAQWLTAHGIRTVALQATGVYWIAVQDVLEQAGLEVYRVNARGTKNLPGRKSDVQECEWLRKLHTYGLLRNSFRPPEVIRAVRTIWRQRDRWVQEAARAVQHMQKALTTMNVQLANTISDLSGVTGQAILRAIVAGTRDPWALAQLRDRRIAASEEEIAHSLQGTWREEVLFELRQALEAYDFYQGQLAACDRELAKYTAAVPSRERPAPPEGPAGAAPRLPAKPARRAKSRRQGHPGFDLAGELHRTLGVDLTRIDGIDVLTAQVVFSEIGPDFSAFPDENHFASWLTLAPQRDISGGKVIRHVPAAGRNRVANALRMAAQSLCRSDSYLGARYRRLRARLDGPVAVKAMARYLACLVYRLVTKGQAYVDRGAAHYEAKRQERERRALERRAATLGLTLVPAA

SEQ ID NO: 224514 - protein, 386 aa, unidentified
MHQATTVPAPERTCSRGDCATLFVSLELSRSTWVATALAPGSSKMSKHTLVGGDGRKLLDLLARLKTTAEQRISAPVKVVTIHEVGLDGFWINRLLEANRIESHVVDPASIAVPRRHRRAKTDAIDGETLLRTLMAWQRGEPRVCAMAVPPSPSEEDRRRVSRERAKLLQERVRHTNRIRGLLFGQGITNYNPLHKNRRKNLEQLRTGDGRSVPAHLKSAILREIDRLELVLRQIGEVETERDEMLQLAEPSSPAALLMRLKGIGAEFATVLYLEGLFRRFENRRQLAAYAGLTPSPWKSGSIDQEQGISKAGNPRLRSTMVELAWMWVRYQPASALSCWFRQRVGSKRGRIRRISIVALARKLLIALARYVSHGEIPAGAVMNAG

SEQ ID NO: 224515 - protein, 400 aa, unidentified
MRTVFGIDVSKASSEVAILVNGERVHSYTMPNDIIGFSHLLKDLKTVSNPEIIFEATGVYSRRLQAFLEENSYDYTRLNPLEAKKQLDSLRVRKTDKIDAEKLASSQFVLNRKPTYVQEEVYQNLHDLSRFYQNLTEDIVRTKNRLHKVLQVAFPEIENLLSTPTGEQYWNLVSIFPTKHWVLELSEVELKETIRNSTSKRISENRVGNLAEKLVGLAKQSYSAISKTSPMIEEVKYNAQELIRLTNRREQVLQQLIALAEPLPEYEILLSIPGIAETTATSIIGELGDIRRFKSANQINAFIGIDLKHYESGDFLGQEHITKRGNPYARKIMYKCIHNIASARHTNPCHIADFYEKRKRQSQTTSTKPHTIASIHRLIRTMYYLIMHNKLYDYTLAKSH

SEQ ID NO: 224516 - protein, 350 aa, unidentified
MLIIGCDYHPSFQQIALVDTETGEMQERRLQHREEADQFYRALATVGAKVRVGMEASGHAGWFERLLAELNFELWTGDAAKIAAKRVRKQKTDRRDAQHILTLMVKDDFPKIWVPSWENRDLRQLLWHRHRMVQTRTRIMNQLQAAALNEGLRYKKKLWREAGRQQLESLPLAPWASRRRRDLLEVLDRINPTIAELTRAIEQQAEKCPEAQRLMSHPGVGALTAIAFVLIIGKADRFSRCKQIASYLGLVPEEDSSGERRRLGHISKQGNSLLRFLLVEAAQVTVRSDTRWRNRFFHLAQRRGRKIAKVAMARRLAVRLYWMWRRGWNYAQLESFGTHVGQPGNPHGVQ

SEQ ID NO: 224517 - protein, 309 aa, unidentified
MAHDAVTVGIDVCKGYLDVHVDPLNRSERFDNSSEGIQKLVAWLADAAPACVVVESTGGYERGVLYGLLNAKIPVAMVNPRPVRDFAKAMGILAKTDRIDAQVLARFARHAPVRLSVKPDQIQRDLRELVTRRRQLVDQCVACKNQREHATLDVVLDSIKRSLDHLQTEIAAIEAAIAGLIDKSDQLRRRCEKLQSVKGVGAATARVLVTELPELGSADRKQIASLAGVAPFNNDSGDRRGQMHIRGGRPTVRRALYMATLVASRHNDVIREHYRHLLAQGKPKKVALVACMRKLLAFLNGLLTEPRHA

SEQ ID NO: 224518 - protein, 392 aa, unidentified
MEKHSTEFIGLDVHKESTAIGRASAGRAAGRFVGTVGPTLAELLKSLKSLGRPEELSIVYEAGPCGYGLVRDLRSRGYACEVIAPSKIPRRSGDRIKTDRRDAVRLAELARAGELVSVVVPDERDEAIRDLSRARVDAVRARLAARHQLKALLLRHGHRYGRSSWTQAHERYLAKITFAHAAQDATFAEYRQAVSEANERVQRLVETLRDQCTTWRMQPVLEALMTLRGIDFVAAATLVAELGDFKRFAHPRELMSFLGLVPSEHTSGDARHLGKITKAGNGHVRRILIEAAWNYRFAARMSVVLQKRQEGQPKVVRDIAWRAQLRLAQRYRRLSARRLHHNKVCVAIARELAGFIWDIGRHVPIHDMPMKAPKTGGDNPKGYRAIVAPATL

SEQ ID NO: 224519 - protein, 390 aa, unidentified
MDVLYQSCAGIDVHQANIVVCILHGPLTSTRPKREMATFDTTTKGLRACHDFLSQFHVEAVGMESTGVYWRPVWHALCDDFKLILAQPAHMKAIPGQKTDKKDAHWIAKLTRIGLLPRSFVPDETIQELRELTRQRKHYVESRNRETNRIHKILQSGGIKLTTYIEDIMGLSGRNLLQLLVDGTPITPRIVHQSVYTSLKKKVPQLLEALDGYFSDHHRFMLKQSLEIYDFYQKQIGLLEERMNVYLSQYENHVEILDSIPGIDVITASVIISEVGVDMSQFPTAGHLASWAGLCPGNNESAGKKRSTKIRHGNSYLKKCLCQAAFAARNQKGSPLAERFYQIQSRRGSQKATIALAHQLLKIAYILLQEQITYPEFLAQKKTTRDELVA

SEQ ID NO: 224520 - protein, 427 aa, unidentified
MNYTQNQKISQITPSTLIVGIDVAKEKHVARFQDDRGLEFGKRLIFENRIHGFQTLLDWVNHIQKENHKDHVIFGMEPTGHYWLNLAYFLKAKGYDVVLVNPMHVKKSKELDDNSPTKNDTKDARVIAQLMKDGRYSVPNLLEGVYAELREGVKLRDQLIKQLMIIEGRIENVIQRFFPEFFDVFGDWKGKAAFHTLRMFPFPSDIQKLTPEEVLQKWKPHVQRGVGLKRATKLVEVANKSVGIEVGIQFAKRELDCLLDQYELYKKQLAQLDEELEGVVESIPGAKQMTNIPGLSYTTIALFFAEVGDLTKYNHPQQLVNLAGLSLREHSSGKYKGQTRITKRGRRRLRKALYLAIRPLVAHNPVFKALHHYYTNRPDRPLKKQQSLIALCCKLLRVLFAIGKKQCEFDGLKLLKGLPQIKALQAA

SEQ ID NO: 224521 - protein, 315 aa, unidentified
MEQPPSTPSFVGMDVSKDRLDVHVRPSGEAFTVARDPIGLEKLVADLRGRDVGLVVLEATGGFETTVAAALAGAGLPLAVVNPRQIRDFARALGRLAKTDALDAEAIALFAERIRPEPRAIAGPDAQALAELVARRRQLVEMIGMEKNRRRQAHAARVQKSLAATLRTLEAQLAALDRDIDGAVRASPLWRAAEDLLTSVPGVGDVTARTLIADLPELGRLDRRRIAALVGVAPLNRDSGQWRGHRAIAGGRTAVRNTLFMATLTAIRWNPAIRAHYTRLVAAGRPKKLAIVACIRHLLTILNAILRTQTPWQNA

SEQ ID NO: 224522 - protein, 349 aa, unidentified
MKNISMIGVDLAKNVFQVHGVDAAGKVLVRRQLRRRQMEKFLAALPVGVVVGMEACGGAHHWGRLVQKLGHQARLMPAGYVKPYVKRNKNDGRDAEGVCEAMGRPTMRFVPVKSVESQAMQVLHRTRRLLVRQRTMAANALRSALSEFGIVAAQGLKGLRSLMEELEGEASGIPDVARMALLVLARQWEALNAEIDKLETQIVGAAKTDVVARRLMTIPGLGPLGATAILAAVSDARVFKSGRDFAAWLGLTPRQFGSGGKQRSGGISKQGDRTLRTLLTLGATAHLKCERGRGPRDPWLRALLARRPFKVAAVAYAAKMARIIWAMLVSGEPYRAFGQRRKAVVQAAA

SEQ ID NO: 224523 - protein, 386 aa, unidentified
MEPVYPISQAQPLVSEDATLFVSLELSRARWLVTSLSPGGIKISRHFVAGGASKDLLQLLADLRMKAERRMAASVKIVTIQEIGFDGFWIHRILASNSIESHVVEAASIAVPRRRRRAKTDAIDGELLLRTLMAFKRGEPRVCAMVVVPSPDEEDQRRLSRERKTMIKERIEHINRIKGLMACQGIAGFEPMRANPRERLEELRTGDGRTIPERMKAEIRRELDRLELLRRQIAEVEAERDALLHAEEAPTGSPGAQLLKLRGIGSEFATVLWHEGLYRSFANRRQLAAYAGLAPSPWRSGDMKREQGISKSGNARLRTTMIEAAWLWLRHQPGSALSQWFQERVRTDRGRLRRVSIVALARKLLVALWRFTTNGEIPEGASLKAA

SEQ ID NO: 224524 - protein, 449 aa, unidentified
MKSKTTKKSKRIENFPLINAHAAGIDVGDKEMVVAVSPSACEENVRTFGTFTCDYESIVAYLRSCEVTHVAMESTGVYWVQLYLYLLREGFEVMLANARHIKNVTGRKDDEGDAMWIQRLHSCGLINGSFQPDLQNRALRDLIRHRRALVQDQSRCTNRMIKALELMNIKVQTVISDIDGKTGRAIIDAILNGERDASVLASLADPRIRASKEVLIKSLQGIWSSTQLFLLKEHYATYQFLSQQIQQTDVEIEPCLELVIASYHAGELPPIEYKQASKRSTRKNTIPFNATAYLKALLHIDITQIPGVGELTALEFISETGVHMDKWPTENHFTSWLNVVPNTKKSGGKIISSKMMKKKHRAGQILRMAASTLRRSKSPLGDFYRRKQAQGGPAKAVLATATKIAISIYKMIQNKEEYQPTKMIESQNKFKQTQIKRLEAKLAKLKAAA

SEQ ID NO: 224525 - protein, 342 aa, unidentified
MDHFAGLDVSVKDTSVCIVDSAGKIVREVKVASEPDDLLQVLRNPAYCFKRIGLEAGPLSQWLFSALGEANLPVICVETRHMRAVLKAQINKTDRNDARGIAQMMRVGLYRPVHVKTLLSQKLRMLLTHRKLLQSKAIAIENDLRGTLRNFGLKVGTAGWTRFETRIDELVEEMPDLAGLVEPLLVVRRVLREQIAVLHRRLLTIVRDDQVCRRLMTIPGVGPVVALTYRATVDVPARFRRSKSVGAVFGLTCSRDQSGERDRPGAISRCGDEMMRTMLYEAAQSMLVRSTRWSWLKAWAMQIAKRRGIKRAIVALARRLAVIMHRIWVDGSEFRWTREVTA

SEQ ID NO: 224526 - protein, 365 aa, unidentified
MSSEYYTTIGMDVSDRTTKVCVMSKEGRAPRVVMETTIPTTKEGLAKFLSTQDAATPVAFETGTHCRWMNEVAQGMGFKVYVANPCRLRMVTDSKAKNDKNDARMIAKLALADPGLLHPVRLRGAEYQRMINLHEMRGLLVKQRSGIIVQLRAVAKSMGFRIAKVSAAGFHNLDRAAWPKELRDIAWPMLKNLEQLAVTIKTYDKLIRELAGTPAFKAQVDRLMEIHCVGILVATAFVAVTGGDMGRFEKPRDVGPWSGLAPKQDQSGDVDRQCHVTKAGSPLLMRLLVESSQLIMRDCSPDTDLKAKGLRICARGGKIARRKAVTAVARSLAVLMAAMLKKPDAPYVPLSERCEKELLAMRAMA

SEQ ID NO: 224527 - protein, 321 aa, unidentified
MTDPANPNPPAAPACIIGCDVGKADIAVFDSATGQGATIANTPDALDAFAAALPPGCLVVCEATGGYEAALLDAVLRAGHAAHRADARRVKAFIRSLGTLAKTDALDARALARYGQERHDRLERWCPRDEHRQRLATLVATRSDIVRARTACTNRLKAPGADPVAAELRALLAAHDQAIASLDGRIADLLRASAPLARAAATLRAIPGIGDTTAAALLALLPELGTLDRRRIASLAGLAPHPRQSGTVDAYRRTRGGRPEVRRVLFMAALSATRFNPVIAQFYKRLRDNGKKPIVALTAAMRKLITIANAKIRDQLSQQLS

SEQ ID NO: 224528 - protein, 355 aa, unidentified
MNSIKYIGMDLHSATISTAVVNEAGKLNMEATIATEAAAVLDFIAGVQGTLHVTFEEGIHAAWLYELLLPHVAEVVVCDPRQLPRHRGENKNDKIDAQQLAQWLRLGVLKPVYHRPTGLRTLRELVRSYRTLVSDATRVMNRLKAIYRARAIAARGARVYSPRYREGWLKQLREPGVHHRAELLYRELDLLLSLRQEAKKAMLAESRKHAAQKILLSIPTLGAVRVAVLMAVIQMPHRFRRNRKLWTYTGLGLVTRSSANYRLVEGQLTRARKPALILRLNLNHNHVLKEIFKDAAATAVSRQGPFREFYARQLATGKDPEIARVIVARKLATIVLTLWKKGERFNAEHLKPQAA

SEQ ID NO: 224529 - protein, 398 aa, unidentified
MRHAPTLLIALGVDANLEVVMPARRVELSYLESWMKKNLIRQDEVVLEMTTNTWQLYDELVEYAGSVTVVHPPHVALITRSQVMNDKIAASTLARLLAKGLLVGIWVPPQEIRELRGLVAQRQKMTRLATQAKNRLHAVIQRHHLKPPAGNPFGKANNGWWHALALGKLEKLNLESDLATLQFAEQQQGHLQAEMMGIAVENEAIGRLLHIPGFGVITAVTVWAAIGDIARFEDAKHLVGYAGLGTRVHDSGMTMRTGKITKAGRRDLRVALVEAAHVAAHSHPHWKAELARLQPRLGYNKAIVAIARKLLITVWHVLAHQVADRLAEPERVSKKMLHIAYEVGKANRAGKSAAQFARERMDALGLGSELTSLPWGSKKPIPLPPSMLEKKESAVPNK

SEQ ID NO: 224530 - protein, 340 aa, unidentified
MEKRYIGIDLHRNQFTCCIRLENDRTYLTEWRLEDLPRFVKKLRPGDEVAVEITSNTRLFHDAVAPQVARVVVVNTNQFRVISQSVKKTDPNDARLLSLYLSKGLLPEVRMKDKQHGQLASLTQTRDTLVKQRSALKNKVNNILSARGLNLAKEALSSEKKLAEVLELPFDEIVRIELRVIVEQIRSLNKSIAELEKTIGEEGSKLEGHKGLSSIKGIGKITGAILLSVIGDVNDFADEGRLASYFGIVPRVSNSNATERSGRIHKRGTKLGRTALVQSALIAANYSPYLKNFYERVKARRGAGKAIIALARKFLGIIYRTLKNKWVFEDFPNFVLAEES

SEQ ID NO: 224531 - protein, 343 aa, unidentified
MVHYIGLDVSLKRTSICVVNQVGSVVREGVVESEPEAIAAFVRSKAPGAVRVGLETGPTATWLWTELKRLGLPVICIDARHAKAVLKMQINKSDRNDAAGIARIMQTGWFKEVRVKDLDSHSVRALLASRALLVKIKRDLENQIRGLLKNVGLVIGRAKFNVFTVRAEELIEDRPELMAVVRPLLKARQAIEQQTDDLDRKVLKLARYDAQVRRFMTVPGVGPITALCFKATIDDPTRFKRSRSVGAYVGLTTRRHASGEIDWTGRISKCGDAMLRSYLFEAAGVLLTRVPKWSALKAWGMRLAKRNGLRKATVAVARKLAVILHRMWIDGTEFNWSKKEVAA

SEQ ID NO: 224532 - protein, 386 aa, unidentified
MRDTTFIPQEYDVFAGLDVSKKSIAATFTSHHGFIRSLQMPYSVEYLLNHVRKHFADQKIAFVYEAGPTGYGLYDGLAAHGYSCMIAAPSMIPRAPGNRVKTNRLDSRGLSESLRGGQLKSIHVPSAVYRELRHLTQLRDTMVRQAAAHKQRIKALLLLEGIDFPLAAAGSQWTLRVKAQLRKLSCSGSVRFKLDQLLDSLEFTEKQVLSSTKEIRRFCREDAELSQSIAYLMSVPGIGWIVASQLLARIGDWREIDNVRQLGSFLGLVPTENSTGDRVDRGSITRLGDGRLRSKLIEAAWSAIRQDTELREFYRSVCRRNPRGRGARIAIVAVARKLSTRIYAVLKNQRPYIIREQVHSAPLTQEETSPQGTTRRCAEPGETDNS

SEQ ID NO: 224533 - protein, 315 aa, unidentified
MAEQVVVGIDVSKAKLDVALLPGGEQFTVSNDRRGIGELLRRVSPLAPSRVVLEATGKLEQPAVSELAAAGLPVVVINPAQVRHYAKARGKWAKTDPIDARLLAEFARDLEPELRPLPDAETQALAALCQRRKQLLEMERMENNRLQRAPRANQKSIKAMLSFLRRQIEQVEKQIEDSIRSSPLWQAKRELLESIPAIGNVNSSTLLARLPELGQFTRQKICALVGVAPYDDDSGQWHGRRHIAGGRGDVRQVLYMATLSAVRCNPALRAYYQRLLGRGVDPKAALIAVLRKMLTILNAMVRDNTPWRPRCPTNA

SEQ ID NO: 224534 - protein, 328 aa, unidentified
MQKNKEYVGVDVSKESLDMVVYSTGETRSFGNDDAGIAKATTWLKQVNSAIIVMEATGGMEVSLYIALQEANLPVAVINPRQIRDFAKSMGILAKTDKVDAKVLARYAATIQPEARPLPDEEARQVNTLVTRRCQLVEMITAESNRATIIRNKTMKQRIYAHIDWLKQELAGIDKDISQMIKENPVWHAKDELLQSVPGVGPVLSATLIAELSELGILNRKKIAALVGVAPFNRDSGKHRGERSIWGGRCRVRQPLYMATLSAVRFNPTIRIFYERLLANGKEKKVALTACMHKLLIILNVMLKHNSYWSCNYAIFNNICIPDAKTVA

SEQ ID NO: 224535 - protein, 390 aa, unidentified
MAAGSLNIAQRYRIAQEVPIIISLDMHDASTYALGVNVLTGDICIDHNILGGAETVLRAIEKLKIRGRCEILYEAGNQGYHPYRLFTKAGYPCRIIAPSSLPENRKKKVEKTDRNDCVRNLEYHLGGLMTYVRVPDEKTEYLREFMRYRYNIVCKTTKHKQTIVSFTKRHGLSFTLTKRNWTVAHKKWLKTVEIDSILRNYLDMKLEELNAEEERLKRVDSTLDKAFEEDRLLNWKKSLYGILPGFGRVNSMTLVLEAGELTRFGHPKAMMKFTGLVPGKHQSSKSDPILGITKAGNKHLRLALVGAAKVYRDARAQYSQAELNKFDEPVKEFISRMQTRMFGRYRSMRENKKHANKIRCAIARELCGFLWELMVKIEPKLQREKFLKAA

SEQ ID NO: 224536 - protein, 354 aa, unidentified
MKRSTKYVALDVHQATTVASVREESGRVIARTVLPTEAAALLEFVGGMRGAIHVAFEEGTQAQWLHELLTPRVDRVVVCDRRGDPRQGNKGDFVDADQLSEGLRRGGLRAVYHGDGHRATLKELTRTYQNLVEDSTRVMLRLKALFRARGIAAAGRGVYHPRNRARWLGALAPRGAHFRAEALYAELDVLRGLRPKAKTAMIAEAQRDPAWALLRTIPFLGPVRVAQLLATMQTPWRFRTKRNLWAYVGLAVVTKTSAEFTLVAGRPVRRRRAPLTRGLNRNHNRVLKDVFKGAATAATGRPGPLQDWYHGLLAGGMREELARVTLTRKLAALTLRLWKKGERYDPTQLTIQAR

SEQ ID NO: 224537 - protein, 339 aa, unidentified
MEYCGIDLHQNETEICVVDDDGTLIEQARIKTTRKALRRRFDGQPSMKVAMEAGGSSPWVSRLIESMGHDVVVCAPRRVRLIAESTMKSDEIDAQVLARLVRVDEGFLGRVTHRSESAQLQRGLMTARTALVNARSRWVHSARGILRSFGFRVPGGSTSRFHERCAKVEMPDDLRAVVQPLLNQTEQVSLEIQALDDLLEDIAATNPIAQHLQAVPGVGTIVALYFVFSIDDPDRFQHSRDVAAFFGLRPILRGSGEVCHSGRITKEGDPEMRRLLIQAAHGMINSRKSCALQQWALKLAARRGKKKALVALARKIAVLLHHLWVTGEVYRPFPNNQVT

SEQ ID NO: 224538 - protein, 346 aa, unidentified
MTHSTTVGVDLAKNVIQVSVISARGKELSNRSFTRRKFAEFLAKQKPSLVAFEACATCHYWARAAQRHGHEVRIIPAKYVAPFRQGHKTDSNDALAVAEAARRPSIKEAPMKTVEQQGLQAIHRSRQLLIQECTALSNHLRGLLMEFGVIIPQGFASLLRAVPEVLEDGENELPDLYRPTLHRMYTRLLELREDIEAMTKEVEVLVKQHPICSRLTALEGIGPIGALLLYATLGSGNAFSGSREFAAYLGLAPRQYSSGGKTTIVGLSKKVGNSRLRSILILGARAYTYRLKEPKSAKDRWLKNAIDRNGHSRAAIALANKNVRTAWAMVTQGTEYQRRGQLKVAA

SEQ ID NO: 224539 - protein, 356 aa, unidentified
MAEGTWVGLDVHARKVVAGVLDAETGELRSWRAPTFPVETVEWLRQFAAPVRVAYEAGPTGYGLARACAAAGIVCTVAAPSKIPRAPADRVKTDRRDAERLARLLRLGELVAVRVPEPHEEAARDLIRAREDARGELMRARHRLSKLLLRHGLVYDAAAWTLAHDAWLRRQRFDSRPLQLALEESYAAAMQAKARRDGLDEAIVELAGEPPFAETVGRLCCLRGVGTLTALALTVELGDWTRFRPQSLGPFLGLTPSEDSSGERRRLGAITKTGNTHARRLLVEAAWHQRRPLRESATLTRRRQGQPAAVCARADRSARRLHQRWHTLERRGKRRTIVAVAVARELAGHCWALATM

SEQ ID NO: 224540 - protein, 349 aa, unidentified
MRRVYVGIDIGSKQCSAAAINSRGKLISAETFRTSEMSLISFVEGQQGEVKVLIEEGELAGWVMRTLLPHAESVEVSDPKRNAWIAKGANKSDRVDAAKLAELLRLGSYSVVYHPEEVEMAAFGIVVKQFDEASRRLAKVKCQIKAGLRRQGIMASGTVVYGKTGRQRMLQKIADPHVARAIERDYDLLDYLTKDKADARRQVSMMSKRFPVIERLMRMPGVGLVLASRFVAIVGNPHRFNKRTLASFSRLGIVKRSSDGSPLGPEHIDKSGNGRMKDLSRKAFERALGTKRPNGIKDFYLGSLSRTGNKTSARLNTQRKILAIMLAVWRDGTEYSDELVTGKRAFARA

SEQ ID NO: 224541 - protein, 352 aa, unidentified
MATYYIGADVHSNSIEMAIFNRKKIAQRYTIPASISAVAQVLESLKGKKYMAIEEGPMSGWLYRNLRRQVDRFVVADPRRNKLISSDGDHDDRIDSAKLAMLLAGGYLREVYHSDDDNRVELKHWVSLYHDRVRDAVRNINKIRARCRMHGVTIPRRILRQPEHRAAWLKKLKNTALSNQLSMLWIGYDATAKQARMAKQHIINLSKRYPIICLWKKLAGIGVIRAATIFAYLDTPWRFKKKSKLWKYCGIGLQRTASGTDKKGKPKPARLQLPWAANRVLKNAILGAALTAINQKQNCFKADYERMVLNGIIPGNARHTVARKMLTVMWGMWKRSCQFDLSEVSLPGLIEQ

SEQ ID NO: 224542 - protein, 493 aa, unidentified
MTHRAVGATTDYENDRGKVRQNARAAANEADLFWRAEARVRMWSGTHERHNAMSPPPLGGEHEKEFLEIAASLVGGTKERPMDVVHRCCAGLDVHKDTVTACVAWAESTGKKRHEKQQFATTTRELLALADWMRGCGVTHVAMESTGVYWQPVWHVLDGQFELLLVNAQHVKAIPGKKTDRRDSVWLAELLQHGLLRSSFVPPTPIRELRDLTRYRVTLCQECNRIANRIQKVLEDANVKLASVASDPLGASGRAMLKALIAGEADPAKLADMARGLLRRKLPALQAALDGRVTPHHRFLLGELLDHLEFVEGKILRLETTIEERLRPFEDTVRRLCTIPGVDRVSAWGIISEIGLNMDQFPDARHLASWAGLCPGNWESAGKRTSGRIRKGSAWLRRHLCQCAWAVSTKRHTYLSALFRRLAARRGVKRASIAVAHAILTIAYRIIRDGSTYRDLGPDYFDTLDPARLKRKLVKRLEGLGFQVTLAAQPLPA

SEQ ID NO: 224543 - protein, 358 aa, unidentified
MQTITNERELKSERASVETGVTIKLGLDVHAGQITVCRQNGGLVPKPAQKKSWPEFLRWVEALAAGPLPVVSCYEAGPCGYGLHRQLTAWGITNHVVVPQRWDEQGRRVKTDARDARELCDRLDRYVRGNPEAFSIVRVPTPEQEQRRALGRQRGTLVKERQRCVVRGHGLMLGQGIHAPTAWWEPKIWARFQPELPAWLRTQVQTWQAQAVALDEQVIRWSLRVEQQAADQLIPKGVGELTAALLAGEILDWHRFQNRRQVASYTGLCPSEHSSGLKRRQGGVSKHGNPRVRHQLVEACWRLLLWQPAYPPLRKLRAATGKRARKRAVVAAARRLAIDLWRLNTGQCPAAKLGLQLR

SEQ ID NO: 224544 - protein, 367 aa, unidentified
MDKGTTYVALDDSKRKVVAGILRPGETQPELRELPKEPPLIRRLFQRLRREGPVEACYEAGVSGYDLYRQITALEVPCQVIAPALTPRRPGQRIKTDRRDAAKLVRLFRAGELTAIHVPDEAEEAGRDLLRCREAVRRDVLRWRHRLLKFLDRHGRIYVTGKNWSQRHWGWIRGQHFDLPTLQRTFEATLFALEQARARLAELDKEIEALAETDLYREPVGWLRCFRGIDTLSAMILVAEIVDFQRFSRPRALMAYLGLVPSEYSSGTTQHRGALTKAGNGHARRALVEAAWHYRHRPGVGPHLTRRSEGQPAAIVTHAWRAQQRLHRRYRHLVGHGKRPPVAVAAIARELVGFIWAAMTIRREAAA

SEQ ID NO: 224545 - protein, 450 aa, unidentified
MRDIASDFFGMILIREVADALVIMGISKPADLKSHCRGGENVNQLYVGIDVSSKNNVAYLMKPDGSKHSSFSVQNNLGGAKIMSERIVSALNTMQLSDVVIGLESTSVYGDSLVYALREDGSLGQFGRKIHVLNPKQVKKFKDAYSDLPKNDFVDAFVIADHLRFGRIASEVYMDDYRYKALQTLTRARFYAVQNLTREKQRFANYLFLKCSGLAQEKILPQNTSATTIALMEHFESVDDLAYIDLDELTEFIAKSGRGRFADPTATAKAVKAAAKGSYRLPKTVNDSVNQAMSVSITGMRAMESQIKTLDKAIEQQFEIVPNTLTSIPGIGKVYSAGIIAEIGDIRRFQSHASVAKFAGLVWSQHQSGDFEAEHSHLIKSGNRFLRYYLLEAANSVRRCDSEFRRYYDLKFKEVNRFQHKRALALTARKLVRLLFRLLRDNRLYIPPEN

SEQ ID NO: 224546 - protein, 310 aa, unidentified
METTIVGIDVSKDRLDVHLHPVGERFVVSRNAEGLDALIARIVPLGVQAVAVEATGGFETVVAASLGAAGLPVIVVNPARVRAFAQSLGKRAKTDPIDAAIIARFVEGTKPEIRPLPDADTRLLADLVARRRQIIQMLVAERQRERQLPTRYLKKSAARLIKALEKELNVLDEGIDESVRGSPVWCEKEDLLKSVPGVGSVVARTLLAEMPELGTLNRHEIASLAGLAPWTRQSGMWKGKSFTGGGRTTARTALFMAALVATRHNPLLKAFYQRLTAAGKPKMVAIIAVARKLVTILNAILRDNTPWQTA

SEQ ID NO: 224547 - protein, 412 aa, unidentified
MKQQAERAAGLDVHRDNVVAATRVNEPGGEVAVTKKRFPTTRRGVRELAAFLSEAGVTRVAMEATGVYWKTIYYALEGLFDELWLCNAQHVKNVPGRKTDLGDAEWLADVAAHGMVQPSFVPPPEIRELRELTRYRKTQVDARAREIQRLEKTLQDAGIKLTSVASAVWSVSSRKIIEALIAGERNPAVLASLVLGKLRPKIAQLEEALDGHFGPHHAIVCRQVIEHIDFLDGSIAALSEEITARLIPFEAAVTLVCSITGIAELSAQAIVAEIGVDMSRFPTAGHLCAWAGVAPASHESAGKRRPAGTRHGSTWLKRVLIEVARAASRTKGSYFSAQYSRIARRRGPNKAAVAVANSILAVIWHVLTNGCIYEDPGADYFERRHDPAVEAKRLQARIEALGFDVTLTLKAA

SEQ ID NO: 224548 - protein, 344 aa, unidentified
MGEVITIGLDIAKAVFQVHGVDVDGAVVIRKRIGRAKLLDFFADLPPCLVGIEACPSAHHWGRELAGLGHTVKLMPPSYVKAYLKRSKNDANDAAAICEAVTRPSMRFVPIKTKQQQTALMLHRTRQLLVRHRTMLSNALRGHLAELGVVSARGSNGTAELLRIIADSADNRVPSSARGILDVLAQRYISIGAEIGSIDKNILAWHRSCEASRRLAEIPGIGPIVATALVTEIGDWKAFSSGRNLAAWIGLVPKQHTTGGKDRLGSITKQGNRYLRWLLVVGATAVIRYAQKHGTKNRPWLARLMERRPTKVAAVALANKIARMAWAIMVRDDRYKEPKLLVAA

SEQ ID NO: 224549 - protein, 404 aa, unidentified
MHVVYERCCGLDLHKTSVVACLLIAEGEGRSRKEVRTFGPMTADLLALADWLAAAGCTHIAMESTGVYWKPIWNLLEDQFTLLLVNARHIKVVPGRKTDVRDSEWIADLLQHGLLRPSFVPPRSQRELRELVRYRTTLVRERAAEVNRLQKTLAVATDITGTSGRQIMAALVAGTTAPAALADLARGRMRAKLPQLEQALTGRMEHHQRFLLAQQLALVDFLAATIERVSVEIAERLHQCEDAITRLMSIPGVGRRTAEVLVAEVGTDMDQFPSARHLASWVGLCPGNNESAGKQKSGRTRKGNPWLRTALVEVAQAAGRAKRTYLGALYQRLVARRGKKKATVAVAHTILVIASYLLLRETTYQDLGNRYFDERDRKAVEHRLVHRLEELGYKVTLEPVIPAA

SEQ ID NO: 224550 - protein, 405 aa, unidentified
MMKLKYSICCGLDVHKNVIVATIVTTNKDGISEYLQKSFSTINSDIQRFHNWLIENNCYHVCMESTGKYWIPIFNYLENDIDVCLTHPKYVKAIKGKKTDKKDSKWIADLYKFDLVRCSFIPPKDFRQLRELSRYRFKLVCMKSSEKNRIQNCMTISNVGIASVLSDPFGKTATEIISYLLEHTADSMDEKAVRKLIKKGAKSKSDEIIEAIKGYTIETDQAKKLELARGHLEYLDDMITQTEVELYVRIKPYYEFVEFVSTMPGMTELSSTIVLAETGVDMDIFDDAKHLCSWCGLSPANNESAGKKKSVRIAKAGDYLKPMMVQCALAAIKSKKQPYFAIKYGRIKKRRGHKKAIIAIARMMMVCIYHMVSEKKPFTPTDYEELMDPQNHVESVVLNENNGKR

SEQ ID NO: 224551 - protein, 322 aa, unidentified
MTQHDPTSFPVVGIDVSKKSLDIFIDQLNQRVTLDNTDQAISTLVQRLKSVQVRLVIIEATGRYHRRVAATLLAAGILTSVVNPQRAREFAKAMGKLEKSDRIDAMVLAAFGRQIQPRAEQIQPQNRTILADLVSRRRSLVQLRVAEKNRSHDDLPQLAAEQSKTLLRLIEQQIEDLDREIAKLIDADDDWHNKSQIIDSVPGIGPESANQLIIDLPELGQLNRQQIAKLAGLAPLARDSGLFKGQRCIRGGRHDVRVTLYMLAHNAVLWCPRFKRFFDQLIARGKRYKVAMTACMRKLLVTLNQMVKTKTSWNQQLTLETA

SEQ ID NO: 224552 - protein, 347 aa, unidentified
MRKIAYLSMDVHARNCVLGDMDGNGKFRGNRSFTTCEINIIKALKAIKAKKKYLVMEAGPMSNWAAQVANDHATKVFICDPRENALIYKSSHKHDKVDTKKLCRLLRLGEFKEVYRPENDQRALFKAAVQHYQDLRDQLKALKQKTKAMYRQWGIINVFTDSVYSVSGRDKFLQQVKHRPIYLQLKRLYTLLDTTAAMKQEAEKSMASLGRNYPEIKEFKKMPGMGIIGPHTFDAYIQTPHRFAKRNRLWKYCRLAVTDRSSDGKPLGFKRLDKSGVSELKAVSYRAFLSAMKGDNEVRRFYHNSLQRTHDRKHARLNTQRKILSVMLSIWKKGEAYRSELFLDPSI

SEQ ID NO: 224553 - protein, 451 aa, unidentified
MSGTKKSRSKRDISPTHLNAAAIDIGATMHVAAVGPDQACEPVRSFGTFTGDLHRLADWFTKCGVRTVAMESTGVYWIPVFEILDQRGFEVIVVNARDAKHVPGRKTDISDAQWLQRLHEYGLLRASFRLKGEVAVMRAYLRQRERLLDYAASHIQHMQKALTQMNLQLHHVVADITGVTGMAIIRAIVAGERDPMVLASYRDPRCHASAETIRQALVGNDREEHIFALTQALELYDVYQAKVALCDERIEAVLKRLRKASSTPVGKPPTARTTQKQSNDPAFDVRAALYGLLGCDVTQVHGLGPYLTLKLVGECGTNLLAWPSAKHFTSWLCLSPSNKISGGKVLSSRTRRAGSRAAALLRLAAVAVGRTQTALGAFYRRLSARVGKAKAVTATARKIAVLFYNALRHGMEYSDPGASHYEENYRRRVLTNLERRAKSFGYTLQPAPTPG

SEQ ID NO: 224554 - protein, 410 aa, unidentified
MEPIVERCCGLDVHQATVVACLLVGKAHERPRKEVRTFSTFTADLEQLRDWLQREHCTHVGMESTGVYWKPVYAVLEGDFELIVGNAQHIKNVPGRKTDVRDSEWIADLVRHGLIAKSFVPPPPIRRLRDLVRYRRKLVESRTAERNRLLKLLESANIKLSTVVSDVFGVSGMAMLQALLQGDHTPREMAQLARNRLRRKLTELERALYGHVAEHHRTLLRLQLHRLQQVDADLAEVDRLLEGALAAYREPHLRLMQIPGVDRVTAAVLIAELGTDMSVFRSPCHLAAWAGVCPGNNNSAGKRRQGRVRQGNPMLKTALVEAASGAARTRGSYLKDKFYRLKARRGYKRAAMAIAHKILIAAYRMLARGVDYQDLGEAYLDHVGHRVTTANLVRRLERLGYAVQLQPRAA

SEQ ID NO: 224555 - protein, 414 aa, unidentified
MNSVGIDVSNGRSMVAVLRPLGEVVSAPFEVRHDSTSLLSLSQFLQELEGESRVVMEHTGRYYESIAKSLHEAGLFVSAVNPLLIKNYGGNSLRKVKTDKADAVKIAKYGLDNWAELRDYTPMDETRYNLKTMHRQFQLASKTRTALSNNLIALQEQSFPGVRKCFDSPVRSDGTQKWVDFTYTFWHVDCVRKASLKAFTERYRKWCKRHGYNFSTDKAAEVYTLAKSAVVLVSKDETTKVLVQQAAAQLTSISRSVETYRAEMNRLASTLPEYPIVMAQYGVGTSYGPQLMAEIGDVRRFARKQSLVAFAGVDPSPNDSGDKTSRSNKTTKRGSPYLRKTLFCIMSTLLQKSPADDSIYRFLDKKRSEGKPYYVYMTAGANKFLRHYYAKVMNYLDTLENDGLGDDPQQPPAD

SEQ ID NO: 224556 - protein, 342 aa, unidentified
MSKLIQPIQTTLFCGIDVSAKTLAVALHQQDRGFQQREFANSSAGHTQLIAWLLKCGSAVRVSLEATGIYSLDLALALDVTEGIEVAVLNPKTVNRFAQTLRRSKTDKADAMALAEYSLRMPFVGWRRPSVEALELRAIGRHIAALTQDHTRLNNRLHAAEGSATTPRCVRQDLKRAMDGVHKRIVRLRRQAVAMVHREPELKRKFERLVAMPGIGETSAVQLLSELASLDPEMTVRAWVAMSGLDPAHRVSGTSVHAPSRISRHGNRHLRRALYMPALVGVRFDPYLRAFYEALQARQKTKLQSLMAVARKLLHAIFGIFKTDSDWDGAKLFPQLALIPTS

SEQ ID NO: 224557 - protein, 392 aa, unidentified
MSATQSSDSSKSRAVLYLAFELGEATWKLGFTMGLGQRPREREMPSRAVVVLEKEILAAKERFGLPEDAPVVSCYEAGRDGFWLHRYLLSKGLENIIVDSSSIQVDRRQRRAKTDRLDVRKLLKMLVRWQQGEKDVWSVVRAPTMEEEDARQLHRELETLKEEQTSHSNRIKGLLSSCGVVMEVDRHFPKYLRQARLWDGAEVPADLRQRLLREFARMQGVNRQIRDLEKERGRRLRQDEEDQGVQKTRALLRLKGIGVNSSWLFVREIFGWRKIKNRRELGALVGLTGSPYKSGSLDHEQGISKAGNRRMRAMAVEIAWCWLQFQPQSALSRWYERRFAHHGKRSRRTGIVAVARKLLVALWRYLETGVPPEGAELADWRRKISYTQVLEE

SEQ ID NO: 224558 - protein, 338 aa, unidentified
MKTYAGIDLHSSNNYIGVIDAKDKRLYSKRHDNRIEDVLKVLGKFKASLQGVVIESTYNWYWLVDGLMDQGYTVHLANPNAIQTYNGLKHTDDKWDSFWLAHLLRLGILPEGYIYPKHQRPLRDLLRRRLMFVRQRTSQILSLQSMITRNRGLNFSGAQIKRFRDEFIDKLFSDRHLVFTAKRNIATIRFLDQIVSEIEIEVASQIKLKKEFISLLTTPGIGNILGLTIMLEVGNIGRFPKAGNYSSYSRCVESKKTSNGKKKGENNKKNGNRYLAWAYVEAANHAIRCCPKAQKFFQRKMAKSERVLATKALANKLTKATYYIMRDQVAFDEDKLFG

SEQ ID NO: 224559 - protein, 387 aa, unidentified
MHTHFCGIDISKDGFHAALIDALGRPIWSRGFPMSLPGFRDLLAAVQPSMTLLGLESTGVYGLNLFSFLHDQGCDVRILNPLLIANYARLSLRQTKTDKRDALTIAEFLKQSASTLPQSPPAHDGLRALARERESLSSQIVAAKNEIKRLLHVLFPESLKLLNPFAASSLKLFVAFPSKDAIAQAPPEALRKIWSGGHGRKPTLTLSRLLDASRSSVGIASPAYESILQSKIRVFLLLNQELELVTDRLIQGCRDQASQEMSLLASINGLGDVTTAHFVAETHGRTFSKVKKLIAFSGLDPIIKESGQWKGKGKISKRGSRSLRRLLFLMSTLVIRNNPVFRELYDRKRGEGKRYRQAVLAVAHKLLRVIHSMLRYRRPFNPIYQYS

SEQ ID NO: 224560 - protein, 457 aa, unidentified
MMETKRRREQRSMLPVHPDAAAIDIGATVHVAAVGPARDPQPVRSFGTFTGDLHRLADWFAQCGIKTVVMESTGVYWIPIYEILEQRGFEVWVVNARDAKHVPGRKTDISDAAWLQRLHEFGLLRGSFRPQGAIAALRAYLRQRERLLDYAAAHIQHMQKALTQMNLQIHHVISDITGATGMRIIRAIVAGERDPDTLASYRDIRCHSSVETVRQALIGNYREEHLFALAQAVELYEVYQAKVATCDEKIEGVLERLKQPCRAPAKPLRAARHKTRQPNAPAFDARGALYAVLGVDLTQIHGLGPYLALKLISECGTDLSAWPSAKHFTSWLSLAPGNKISGGKILSSRTRPSGNRAAALLRLAATTVGRTETALGAFYRRLSARIGKAKAVTATARKIAVLFYNAVRHGMDYADPGASYYEERYRQRVLTNLQRRAKAFGYVLQPTEIKAVSMAVS

SEQ ID NO: 224561 - protein, 327 aa, unidentified
MYLIGVDVDSVHLVCQRRRAGKPTTTKTFTNTPAGFRQFIKWATPRGHAARVGMEATGVYSVPFALTLHSAEDIEVAVINPKAIKKFADANLQRGKTDAMDAHCITEYLERMPFKPWQPPEEDILELPYITRRVVQLTHELTRERNRHLAARRMGRIGRVVAHDTTVNMRHLQRRIDAMEQEALGLIASIPHLQVQMELITSVTGIANKTGARILAELSTLPGDMKANQWVAYAGLDPRPYESGTSTNKPRRITKAGNRYLREALFFPALVASQKDRHVSAYYQKMIGAGKKPIQVIVAIMRKLLLALWGMLHSGTKWEGNKFYKIA

SEQ ID NO: 224562 - protein, 392 aa, unidentified
MVISVGIDVSKDKHDCFIQSSEGEVLVDVFTIPNNMDGFNILLEKIQRCATSQDKIKVGLEATGHYSYNLLGFLLDNGLATYVLNPLHTNLYRKSLSLRKTKTDRVDARTIASMLLSDVGLKPYTDTAYHNEELKSLTRYRFDKVKERAKLKTSVSRLVCILFPELEKLVPSLHIASVYALLAEFPGAKQIAAAHLTRLKALLETASKGHYKRDMALEIRDAARNSIGSWMPAKSLELQHTIRLIRELDNEITEIEEQIQTIMDELNSPITTIPGLGFRMAAMIFAEVGDFTRFDSPDKLLAYAGMSPSTYQSGQLKNCYPHMEKRGSRYLRYALYNATKYVCHWDPTFAAYLAKKRAEGKHYNVALSHAAKKLVRLIFAMEKSRRPYCLAA

SEQ ID NO: 224563 - protein, 363 aa, unidentified
MKKPSTFVGLDVHSTSIALAVWPPGADKPESREIPNDPTVIRRTFTRLQGDGPLRACYEAGPCGFALYRQLTTMGIPCDVIAPALIPQRPGDRVKTDRRDATKLVRLYRAGELTCIRVPTADEEAVRDLVRAREDIRKDLMAARHRLSKFLLRHGRLYSQGTKWTKRHWAWVRTQTFDHAAARVACDHYRLQVHHLEERLAALEQELAQLAASPAYRPAVERLTCLRGISQLSAISLLAELQDFRRFEHPRQLMAFVGLVPSERSSGLKERRGHITKTGNSHARRLLIEAAWSYRHPPALGPRVRRLLPGQPAEIVALVKKAQTRLHRRYLRLVGRGKRAPVAVTAVARELCGFLWALMAQAA

SEQ ID NO: 224564 - protein, 346 aa, unidentified
MQITTIGLDIAKNVFQVHGIDAAEKVVVRKQLRRSQVLAFFKALPPCLVGMEACATAHYWARELTKLGHQVRLMPAKDVKAYVKRNKNDAADAEAICEAVRRPTMRFVPVKSAEQQGQLMQHRTRDLLMRQRTQVINALRAHLAELGVVAAQGREGIKELLAIVADDQDARLPIDARASVIVLAAELQALQTLIGSIEKRLKMQHRSNETSKRLESIPGIGVIGATALVATVADPMVFRSGRDFAAWIGLVPREDSTGGKQKLGPISKRGDRYLRRILVVGACAVLKLARQKPEKYPWLTQLLARKPFKVVAVALANKMARMAWALLAKGGTYRAPALMPALAAAA

SEQ ID NO: 224565 - protein, 392 aa, unidentified
MVCVGIDVAKDKHDCFILSSEGEVLADVFTIANNRDGFELLFQTIRSCARPTDNIKVGLEATGHYSYNILGFLLENGLHTFLINPLHTNLYRKSLSLRQTKTDRIDARTIASMLMSDVDLKSYTDTAYHNEELKSLTRYRFGKVNERAQLKQSVSRLVNILFPELETLVPSLHMASVYAMLAEFPSARQIADAHLTHFKAVLTDASRGRYDRDKAVEIREVARRSVGSAMPAKSLELQHTIRLIRELNKEIDEIEAAIKAIIDEMAPPILTIPGISYRMGAMILAEIGDFSRFDSSDKLLAYAGLSPSTYESGKLKATGTYAHMEKRGSRYLRYALFNATKFVCHWEPSFAAYLARKRAEGKHYNVAISHAAKKLVRLIFALQTSGKAFQPT

SEQ ID NO: 224566 - protein, 395 aa, unidentified
MGLGPNLRRCELNCGIMEGFVAPGTLCGVSPGSCREVRPKISLRRKGNDMDLYIGLDVSLASTAICVVSAQGKIIKETTAASEPDELVAVLRAMPGSVVGLGLEAGPLSQWLYQHLTEAGFAAVLMETRQVKGALKAMPIKTDRRDAEGIARLLQMGWFRPVHCKSMSAQEMRALLCSRKAIQQGVLTLELSIRGVLRNFGLKMGQVAKGRFEERVQELADGNAMLEAAANPILTARRALRQELAGLEKLLRDHVRSDPVCRRLMTMPGVGAVVALTVKAAIDDPDRFRSSKDVGPWTGLTPRREQSGERDIVGAISRAGDAGLRTALYQAATVMLNRGRPSWLTAWALNVAKRRGKKRATVALARRIGVVLHRMWCDSTEFRFTRAEAMTAAAG

SEQ ID NO: 224567 - protein, 361 aa, unidentified
MKKPTQLLIAEVPRRSSRVGMTIGIDFGDVWRHYCTLNEDGEVVGRGRFRTSPSGVEKWFTDLPRVRIAMEAGTHSIWISEQLQELGHEVIVANVRELRAISHSDRKSDPVDAEKLARYARLDPKILRPIAHRTVAQQEALTWIRARNLIVRLRTAAVNAVRGLAKPCGYRLPASSTLCFAKRCVAVLPPGLAQALGPVLEQIAEMTKKIKHYDRLIKRLTETEYPETQALIQVYGVGQLTALTYVLTLGNKERFQRSRDVGCYLGLRPKRSQSGDRDPQLGITKAGNIYLRTLLVECANHVLGPHGRDSTLRQWGLHLASRGGKQSRNRAIVAVARKLAVLLHRIWITQEPYIPFYGVAA

SEQ ID NO: 224568 - protein, 411 aa, unidentified
MPSTLFVGIDVSSQSNSVFFIDQDGNNLIKKPFSVSNDIPGADSIISEVISHAKAIDASCVKIGMEATSHYAWHLHLHLASSPDLAPFNPKFFVMNPAVVSGFKKAYTHLPKTDDFDARVIADCVRLGRVNPTPMPDFKYVALQRLTRFRYHLVQTISSEKSRALNLLYLKFSSYKEDCPFSDVFGSASTSVFDSFTPDEIAVMPMEDLVDFVLSHGNNRLSNPEEIAKTLKSAANRAYRLNPDMCDTVSMTLTMTLENIRFLESQLKKLDKEISKQLNAFRQTLTTIPGIGDVLAAGLVAEIGDVKRFKSECAVAKFAGLVWNKYQSGNFSAEDTSLAKCGNQYLRYYLVEAANCVRIHAKEYADFYCKKYNEVTKHQHKRALVLTARKLVRLVFALLSKGQIYQPGGNG

SEQ ID NO: 224569 - protein, 346 aa, unidentified
MNNVTLLAIDLAKTVFQLHGTDAYGKAIIKKRVNRKKLSEFMVNLKPCDVYMEGCSSANYWGRQFKKYGHKVKLINPKYVKPYVKRNKNDKNDSIAIASAARDPEMRFGEVKTEEQQDVQSTHRIRSQLIHQRTALANSARGLLAEYGIAISQGINNLRKNLPEILGENKYNLNYLMLINIQEMYEDLVHLDKKIKRYNNLIEDIFEKNEECKKLAGIPGVGKLGATILASVLGNGAGFKNGRHFAAFLGLVPRQHSSGNKQKLLGISKGGDTYIRTILIHGARAVLRVVEKKTDRQSDWLKNLKARSNAKVSAVAMANKMARVAWAIVKENCSYQPDYMPNKYVK

SEQ ID NO: 224570 - protein, 346 aa, unidentified
MIIVGCDFHPSWQQVMIFDSDTGEISERKLVHGNGEAEQFYQGLPAPALIGLESCGNNQWFVDLLERLARQVWIGDAAQIRVSYVRKQKTDKRDAAHIVKLLIEGRFPRVWTPDSEVRDLRQLLIHRHRLIQIRTKVKNGLQHLALNRGMQKKHRLWTEAGQRAFLQLPLPGWASCRREDLLRLLARLEEQIRPLDEAVEKAAWAQERARLLMTQPGVGPVTALAFVLTIGDASRFARGKQVASYLGLIPSEHSSSGKQRLGAISKQGNSFMRMLLVEAAQTAVRLDEGMKKKYQHRCHSKIKGIAKVAAARKLAVRRYWMLRANTAYPEIVHNESSSRCPMAGAS

SEQ ID NO: 224571 - protein, 396 aa, unidentified
MDVHRSFAQIAIVEDGLCRDEGRIGVRPEELRAWASGLLPDDEIALEATTNSDAIATMLRPLVRRVVVSNPRKTRAIAEAKVKTDKVDARILAQLLAADFLPGTWVADDRTRMLRRLVMRRTHLVKQRTRVKNQVHAIMARNLVPTCPHADLFSGIGQRWLGRQDLPADEWRSVEALLRQLDFHGEELTQVDRDIALEALDDPIVARLMTVPGIDVTVAISILAAVGDFNRFDSPDRLVSYLGLNPRVRQSGNGPATHGRITKAGPAQARGMLVEAAFSAARAPGPLRAFYRRVKERRGFQIATVATARKMTVLCWHLITNGEDYAFARPSLNAHKRRKLELAAGAPSKRGPARGASHAYHVKQLRDQERALVEQAERSYEVMIAHWQPQRPPARA

SEQ ID NO: 224572 - protein, 451 aa, unidentified
MVMSEPQEIEDEEYEQVLERVAAVDVAKATGMVCTRLPHPSRPGRRQTKVWNADATTNAIIELGEYLAGLGIEKVTLESTSDYWRPFYYLLEAAGLSVQLVNSRDVKNVPGRPKTDKLDCVWQAKLTERGMLRPSFVPPQEIRQLRDYTRLRLDLTRDRSRQAQRVEKLLEDALIKLSSVATDIMGKSGRAMIGALIAGERDPQVLAGLARGRMRVKHAALVQALTGRFDAHHAELAAILLGQYDALTVQIDALTTRIESLIAAIPAARGVDADGTTGPGAGTGSDAAVRAAIDRLDDIPGIARHTAQVIIAEIGLDMSVFPTAGHLASWAKLSPRTIQSGPRNRSGKTGRGNPYLKGALGEAATAAAKTDTFLGERYRRIVKRRGKLRALVAVARSLLVIIWHLLADPAARYCDLGSGYYASRTDKDRKTRSHIRQLEALGYTVTLAQAA

SEQ ID NO: 224573 - protein, 315 aa, unidentified
MVVGIDISKDWFDAAWLVDGQVRCQQFAYTDEGIEQLLEQTPVGATFVMEATGTYHARLALRLFEAERHVSVVNPLVIKRYGQMRLLRVKTDRADAQLILSYGQSEAPSLWTPASEQVQELQQAHGWLNDLITERTRLLNRQQAHARRARPSAFVISQMELQFKQLQQRIDECEQHLEALVKKSFAGLYERLTTIPAIGVKTAIELIIITDGFTRFDDVKQLCAYVGVSPTTFCSGSSVKGKGGIAKLGQGRIRQLLYLCSWTAKSCNPACKKLYQHLKAMGKPAKVINIAIAHKLLRQAYAVATQNTRFDPNFA

SEQ ID NO: 224574 - protein, 442 aa, unidentified
MPHATSSAPLEPDWAAFAGLDWGDEKHYWKLRDAHSQQSQEGVLQNTPEALDAWAAELNVRFGGRPIAVCLEQSRGAVVYQLSKYPHLILYPVHPTTSARFREAFYPSGAKSDPQDGDVLLDLVEHHRDRLRRLDPDTPETRLLQMLVEQRRAWVDEKTRHSNRLTGWLKIYFPQVLDWIDDIDSPLGCDLLDRWPTLEELQKSHPGTLHTFFVQHNCRSEKRMQERIQAIYQATPAIRDTAMLEAGPAIVKQIVAVIRALRANIDELDKRIASLVSTHPERALFEALPGVGPALLPRLIVAFGTKRERYTCADQLEAYSGIAPVTQQSGKSKWVHFRWACPKFLRQTLHEFAAHSIAKSVWARAFYDMQIAKGKGHHAAVRSLAFKWIRVLFACWKNHTPYDEQLYLRALQNNGSRLSQILATQLTWKTVGGFQKLCSENA

SEQ ID NO: 224575 - protein, 423 aa, unidentified
MNTSTLCVGADVHLKEITLRAVDKLTSDEVIAPFNVANNLPGAQSAASRLAEVATRLGYTHIQIGCEATGMLWIPFHRFLGTCQLLEPFHLQQVCFNPKLVADFKDALVLRGPKDDERDAFDVAARVQVGHWPDSYVPDDFWQGLRRLTRYRFKLSRNLSQEKMRFQSYAFLKCSDWKRVKAFSDIFGATSAALLTEFTAAELRQMTHDQLAHLIAHRGRGRFYDPDATARTVQQALRTSYPIDDQMDLMITATLATGWEHIRAIKRLMKRLDQHITRCIEPVPNPIITVKGMGPVITAGLLAEIVDISRFPEHKHLAQYFGISWTKRSSAGFISQNTRMTKVGNPYGRYYFVQGADKLRQFNLEYKAFYWRKYNEVSKHRHKRALVLTARKLVRLVHALLTKNVPYVRPRTTVALEEADLLQ

SEQ ID NO: 224576 - protein, 459 aa, unidentified
MKKAKSVSQPKAQAALQIVFPHAAGLDIGANEIMVAIPPDREGVTVRGFGTYTPDLAALADWLKEAGVTHVAMESTGVYWIPIFELLEERGFEVIVVNARHIKHPPGRKSDVMDCQWIQQLHAHGMLRGSFRPEAEMCILRAYLRHRDNLLEDRAKHIQYMEKALLQMNLQLGQVLSDLTGETGLAILHAIVGGEHDPLVLASMRHGNCKHSQEDLIKALTGHYRKEHLFVLKQALEMFESFSQRLRECDQEIERLLEEMQPELPDDFPPLPPDPKPNSHSKNAPSYDARALLYPLAGVDLMAIPGMNEILLQKIISEVGLDMSRFPTAKHFCSWLGLAPHNAISGGRILYSHTLKNHNRAGQCFRLAARAVSRGKTVYSEFYRHIRARSGAKEANVATAHKIARTFYYMLKRRQPFLAPDLQTYLQVQREKDIRRLQARAAKFGFRLQPAEVSLLCYE

SEQ ID NO: 224577 - protein, 333 aa, unidentified
MSSVVLSKFQVVMTKDRKIYGIDISKSVFDIYNQDTGHYQLQNDEKGFKKLLKSLSKDALVVMEATGYYHYRLAQFLHKNGVLVSVVNPLSVKRFIQMKLAKVKTDKSDAKSIFEYGIFNDVPLYNALTDVQAECLQLFRLLDSYVKKSTATKNKLHGEDALGIPSKTVYRSLKRDLNHLKKEILILEKRLLELVKQDQQEQLTLLQTIPGIGLKTALFLIVVTDGFKKFETASQLCSYVGITPTIRESGSSVRGRSRISKVGNKKLRNLVFLAAFSAYKYNRACKALFDRIVAKGKSAKLALIAVANKLLKQAFAIAKSGLPYDENFVSKLA

SEQ ID NO: 224578 - protein, 394 aa, unidentified
MKLVGIDVGKNSHHFCVMDKETGEFNVAPSSFSNNKEGFDFLINSLKPYSKKSILLGMEDTGHYHVALLKFLLSNGYTVALINPKTTDLTRKMEGGITKNDKLDTITICDVLDTPERKKQYRITKVDRFDLYEQRQLTRHHHNLKEELNVYCNRLQKSIDLVFPEFNTLFGSKYGVVYMNLLKTFGSAEAIASTDIRTIRKCFEIKGRGGRISLTPEKLKECAKNSIGISSEVETIQIKHLVSQIMLIKEQIAEIDKKIEEFSIKNNSPILSIPGISHFSGTSILAELGDIGNYSKPSQIIKFAGVAPYHYESSQYNAQHTAITKKGSKYLRKTLYQIILPVINNNPVLKKYYLLKISQGKGHRCAQGHCIRKLLRIIYHLLETGQSFDPALLR

SEQ ID NO: 224579 - protein, 344 aa, unidentified
MGVAIGVDSHKSSFAAAAVDEVGRELKRREFGNNAKGHRQALKWARAIGSDSIFGIEGSGRYGAGLARVLLASGEDVREVPPFLSHRERKRTPSKGKSDLSDAVAIARIVARGEGLVPLVGARLHEDLRLLSDHRDQLVHTRTRLANRVHKDLSIMHPGYEQQIPKLTRKKQLAAAEALLGADGSVRARLARERIEDLFHLDARIAAVTKEIAARVTETGTTLTRLTGISFVLAARILGEIGDPRRLGSKACFAMLNGTAPLEASSGNTRRHRLNRKGNRKLNFVLHRMAIVCCRVDADTKNYMAGKVAEGKSKKEALRCLKRHLSNVVHRQLLADLERGAIAA

SEQ ID NO: 224580 - protein, 357 aa, unidentified
MESQEVKYVGVDCGKKSIEVVRINSENSLERRQFSTTESGINNLLQWLTLNDIVGLEAGSQSFRIAKSILNKGIQVIVLNPGDLATIYQSLKKTDKEDSLKIVRLIQRFPIEELPVVPIPNDEEEDNRRLCTEQENWTRQLTQSKNRLHSLFTQAGLTHITKKHLRTKANREISVALLPSRYQKEAERILKVLDLVEQNLKLIEEEIKEALKKNKAYAQTIMSMPGIGMITSLAIMSYMGNCKRFSSAKQAAYYVGLVPRVDISGDSAYYGRIINRGCHSIRRVIVQAAWSLVRCQHGGKVKEFYQRLYLKKGAKKSIIATSRKMIEVLYVMIRTGKLFDSMPENILNRKLTQYGLM

SEQ ID NO: 224581 - protein, 469 aa, unidentified
MTPRKGKHFRTSKPFEAATSFTLHHPHAAGVDVHSDVHFVAVPPGQVPAGFVSPDPGLPPGVRKFGANTGDLEALAAWLKDCHVTTVAMEATGVYWIPLFELLERRGLQVILVDPRQTKHAPGRPKSDVLDCQWIQRLHSYGLLTASFRPSDEIVVWRGYQRQREMLIRYAAQHVQHMQKALEEMNVKLTEVVSDITGLTGRKIIKDIVKGVRDPFKLAKHRHERCHATEAEIASALHGTWRKEHVFALKQAVAMYEFYHRQIRACDAEIEACLRGFAAKSADAAPTPKPCPRRRKANGPTFAARELLFRLAGVDLTVIEGISEATALVVLSEIGTDMSRFPTEKNFVSWLGLCPQHRASNQRILSRRVRKGANRAARAFRMAAQGCHHAKNALGAFYRRIQARCGGPKAIVATARKIAERVYRLLKHGEAYVRQAEAAYEEQYRLRTLKGMARKAATLGYKLVPAGSE

SEQ ID NO: 224582 - protein, 339 aa, unidentified
MQVTTVGLDLAKNIFQVHGVSENGEVAFNQALRRAQLLAFFEKLPPCLVGMEACGSSHYWARELSKLGHDVRLIPAMYVKPYVKRGKSDAVDAAAICEAVTRPTMRFVAIKSEEQQGVLFLHRARDLIVRQRTQLSNMLRGLLAEFGIVIAQGIGSAVKFAKGVLDGDKPGIPEVAIDVLGNLSNQLVALHLRVRWYEMRMRLQAGQDPHVMLLRTIPGVGPVTASAIVATAGDASQFRNGREFAAWLGLTPLNRSSGGKERLGRISKMGDQYIRRLLVTGMTSRLRQMKTHPERVDPWAQALLDRKPVRLATVAMANKTARVIWAVLTKNEYYRAHTA

SEQ ID NO: 224583 - protein, 438 aa, unidentified
MRSIGLDVHKHFAEVAIVQPGQGIVSRQRLPVTPAHLRQFAAGLGPDDQVVLEASFNTWAVADLLREHAGRVIVSNPKKTRAIASAKVKTDQVDAGVLAHLLAADYIPAVWVPDDATRTLRRRVSEHRGLVVQRSQFRNRIHAILNRNLVECPYTDAFGRAGRQWLTALPLPGPERSEVNRLLRLMAALEREIAQLEMELAQARLQDAGLRHLITVPGIGLITALALLAVIGDVKRFARPNRLVGYLGLDPRVRQSGDRPAYTGHISRQGQAHARGLLLEAAHAAIRVPGPLHAFYERVRARRGAQIALVAVARKLATLAWHLLTKDREYQWVRPSLKAQKWRLVELRAGLPKGAIRGIWTRPNREQEDEILRQAEAAYRSLVAARRPQTDAAAPMRKRLEGRRPDARRRSHPHPPLFSQGSTASAASIVLQLPEKRE

SEQ ID NO: 224584 - protein, 351 aa, unidentified
MSRSSFSAAIATLGIDLGKNSFHLVGQDQRGAVVLRIKLSRPQFTQRLANIPPCLIGMEACAGAHHIGRQLQALGHDVRLIPAQYVKPFLEGHKNDYRDAEAIAEAVQRPTMSFVAIKTPDQMDLLALHRVRSRLVSQRTSVTNQIRGFLLERGITVRQGLAPLQQALPGILGSSADALSPRLVRLIADLIEDWRQLDERIADVSAGIEALAAQDEHCQRLMSVPGVGPIISSAVVAAIGTGAGFKQGRDFGAWLGLVPKQESTGDRTILGRISKRGNKYLRTLFAQAAHIVLVRRPHGARVGLWPWIEAAGRRLRRNMLVIALANKLARIAWAVLARGHVYEPRSASYAM

SEQ ID NO: 224585 - protein, 407 aa, unidentified
MIEPIFKRTAGIDVHKKIIVATLLMKQDDGRVAEETREFGTFVQDYEELAKWLITNEIELTVMESTGIYWKHLYEVLEAHQIQMYVVNARHVKKVPGRKTDVQDSQWLARLARFGLLNASFIPPQDLRELRRISRYRVKLSGMLAGEKNRLHKLLDSIGLRLGNVVSDIDGVSANLIIQGIIRGENIETLVGYLHGQLKNKVDEIKKALAITLGARDLFLLKKLHAHIKYLNTELDELDCYLLTAMQPYKTQWEILQTLPGLAPISAALLIIEMGVDMGRFSNSESLSSWAGMCPGNNASANKQKSGKTRKGNQYLRRVLCETANAAIKTKSQFKDKYQTLVVRRGHKRSIIAIGHKMLRIVHTLLKDNKPYRDPGIDYKGMMIARNAPRWLKALQEYGYLATLQNT

SEQ ID NO: 224586 - protein, 328 aa, unidentified
MLLVACDVSKATVDAAWFDDSRQRWFERSKVANNRRGWRGLLGWLEKCSGKDRSAFTLVVEATGVYHRPFVDFAFGQELRVIVTNPGRAAENARSHNRLNKNDKLDARSLYGYGQELREFFDYEPDSPEINGLKALLSRLRQLDKDLTRERNRLEKCPYIADSQVLTASIRRQMKAIEREQKLIQAEIDALIRRHPELKYLQDLMCSIKGVGKGMSQWLLPLLYRQQFTSARQLAAFLGLTPIHKRSGTSLNKRGRLSGRGNGYVRSRFYMPAVSAITHNPELRHFHDTLIRRGKTEKQAITAVMRKLVHICYGVVKNDQPYRCPAPA

SEQ ID NO: 224587 - protein, 376 aa, unidentified
MVDHSEAFIGFDTSKLRNAVAIADGGRGGEVRFYGEIENTPAATAKLVRKLAAKYERLTFCYEAGPTGYGLQRQIKELGFECLVVAPSLIPKRPGDRVKTNRRDALNLAKLLRADELTAVWVPDGAHEAMRDLTRARETAMLDLRTKRQHVSAFLLRLERPYPESKKTWTKAHMNWIMSQKLEYPQHRIVLEEMMLAVRQAQERLERLEQAIAAAVPDWSLAPVVTALMAMRGIDLIAATTLLAEIGDLSRFQTPTELMAYLGLVPSERSTGDEIQRGPITKAGNRRARRMLVECSWSYLHPPRVGRAKQQKVDAAPPAVREIAWKAQHRLYRRYRALVRNGKRKTVAIVAIARELAGFIWAVARAATAARAAVAS

SEQ ID NO: 224588 - protein, 340 aa, unidentified
MQTITTIGFDIAKSVFQVHGIDAAGEVVIRRQLKRRYVLAFFEKLPPCLVGIEACASSHYWSRELQVLGHTVRLMPPAYVKPYVKRNKSDTIDAAACWEAVGRPDMRFVPVKTVGQQAALSLHRSRDLLVSQRTQLGNALRALLSEFGIVAGKGKAGLTHLVAELRAGTLDLPADAVVAAMALADQRAALDAAADALERRITAQAKADKKAVMLKTAPGVGPLSAHAALATLPDPSLFKSGRDFAAWLGLTPRLNGSGGKTRTGRITKQGNQPLRRLLVLGATAWLRQVRARPEKASPWLRGMLARRPSKVVAVAQAARTARILWAMLSHNQPYRAPAIG

SEQ ID NO: 224589 - protein, 376 aa, unidentified
MKNYSKFVGLDVHKADISVGIANGDRGEAGFYGTIENKPHAYLKLARKLSKSGEEILFCYEAGPCGYEVYRQLTKAGYDCVVIAPSLIPKKAGDRVKTDRRDAVNLARLLRAGELTPIYVPDTEQEAMRDLTRAREDMKAAERHSRQRLGGFLLRNGKVYPGQSKWTKTQLKWLEGLRFETAVQQIVFQEYFDMVKHTQGRVAAMEEEMRGALTGWTLQPVVEGLMALRGVSVVTAMTLMAELGDLSRFESPRQLMSHLGLVPSEHSSGERQKRGGITKTGNGHARRVLVESAWTYKSPARKTAHLQRKAEKASKVVQEIAWKAQKRLCKRYWYLINKGKLPVESCTAVARELVGFIWAIACEVTGKGALSATAKG

SEQ ID NO: 224590 - protein, 351 aa, unidentified
MIIIGVDFHPSFQQITFLDQETGECGERRLNHSDGEAEKFYRELKQRGVSVRVGMEATGYSRWFERLLAGLGFEVWIGDAAEIKKMRVRKQKTDRLDAKLLLKLLLENRFPRIWVPSPENRDLRQLLWHRHRLVQMRTRIMNQLQAVAMNEGYRWKKKLFSQQGRALLEKLTLAPWASRRRKELLELLDQLDPKITELTAAVEQEARQRPEVLRLMTHPGVGPLTGLVYVLVIGTPERFPCGKQIGSYVGLIPSEDSSAGRQRLGHISKQGNALLRFLLVEAAQAAARCNQDWRRRYVHLTMRREKRIAKVAMARKLAVRLYWMWRNGWQYSQMVEFGSHAGKLVTGHGVK

SEQ ID NO: 224591 - protein, 422 aa, unidentified
MPMKVVYQTCCGVDVHKSFLVATIIKTTSGVQPSYQKKRFSTFNNSILEFKKWLLDNSCRDICMESTGKYWIPVFNLLEDEINVTIANPKWVKAVKGNKDDTKDSKWIGDLFRLGLVPGSYIPCKEIRILREFTRYRYKLTSCRSSEKNRFQNALTVCNVALDSVVSDIFGKSATSVIDYLLEQSDNSINHEEISSRLLRSLKKKSESVIESIEGYQMTDSQKYRMRLVHAHMDYITSTISDIDSMINSLVEPYDNAVKLLCTIPGVDRNSAITIISEIGTDMTQFSNSKRLCCWAGLTPGNNESAGKKKSVRITRAGVYLKPALVQVAHAAVKSDKSPYYKAKYERIMKRRGKKRAIIAISRMILTAAYQMLSTGEVWNPIDLYKIDMPAPLKEKQKEKAIKQAKKLLIAEGIFTAEQLAS

SEQ ID NO: 224592 - protein, 404 aa, unidentified
MLHIGIDQSPKEHTVCIMDTTGCQLAHFAIPHDAAGFQRLHSECQQTFQMSPEQYLVALESGHCLLVDFLLDHGYQTFVIPGKAVDRYRDRHRQSGSIADRSDAIVLANILRTDRHLYTPWKADASLTHQVRSQVKSVLDLKRSVVSFTNRLRALLWRYYPIAADLFSTLDGKITLAFIHSYPTPQAAKALSKADFTAFCREHKYTRSDYITRRYAQLLNAQTYASLEVAEAYAGQAQALTRVIRTLVTERDRAQKELTRAFEQHPDACIFASLPGAGEFLAPALLSKFRDCRARYPTAAVAQAIAGTCPVTIQSGKKKRYVQFRRACDREFRYIATLFARSSVKQSSWAAAYLETVWPRCNKGSHAYRLLANRWIAIIWRLWVDQVEYDEAVHLRNRLANRTR

SEQ ID NO: 224593 - protein, 344 aa, unidentified
MYHYAGIDVSLEASAVCVVDGAGKILREAKVASEPEALIVWFMSLEPAVERIGLEAGPLSQWLYAALRDAGLAVELLETRHVRDAFKAMPVKSDRNDARGIAQLMRLGWFRPVHCKSIEAQETRAVLTARKLLQSKLRDVENSLRGVLRGFGLKVGKTTERTFAIRINELVPGHPSLELIARALLEAHAVLLREYNGLDKHTQKLARLHPSARLLMTTPSVGPIVALTYASAIDDPKRFRSSKATGAHFGLTPKKYQSGQTDYTGRISKIGDASVREALYQAAHVMLTKPVKNCSALKGWAMRIARRAGMRKAKVALARKLAVILHRMLADAKPFNSLAKAAVA

SEQ ID NO: 224594 - protein, 464 aa, unidentified
MTDKKLWRNRKERKEWARRLQSDDPGLEVVHPHAAGIDVGNGAHYVAVRPDRDPEPVRRFECFTADLHRLADWLQSCKVKTVAMQSTGVYWIPIYAILEERGFQVYLVNARHTKNLPGRKSDVQESQWLLKLHTYGLLNNSFQPPSEIRVLRTYWRQRGEHVHGAATCIQRMQKALTQMNVQLANVISDVSGLTGQTIIRAIVTGERDPRKLAELRDPRIHASREEIAKSLEGNWRPELLFVLQQEVEMFDTYQLRIAECDQQLQKHLASFVDTVPPSSSQGEPKRKKAKPAKNAPRFELCSELQRISGVDLTRIDGIDVMVAQTLVSEIGLDMSRWKTEAHFASWLGLCPDNRVSGDKVLGRGTRRVINRAATALRMAAVTLMRSRTYLGAQYRRLRTKLGAPKAITAMAHRLARLVYRMLKYGQGYVDKGAEYYEQRYRRQQIEFLTKRATKLGLQITVVHD

SEQ ID NO: 224595 - protein, 372 aa, unidentified
MTPMTRNGHDTSTLYMALELSAGKWKLAFGRELGAPPRIRTVDAGALSDLKSEIEAARRHLALPDDCALKSCYEAGRDGFWLHRWLLAQGFESLVIDPASIEVDRRARKRKTDRIDAIKLFTRLIRHAWGERVWKVVRVPTEKEEDGRRLHRERERLVCERGQHQARIRALLATQGIKSLRVEDKALELRRLWDGAPLPEQLRRELTRELERLKVIRAQIKAVEKEIDVDQASPAAQVTRQLRQLKAIGMVGAQVLGHEFFGWRKFSNGRQVGALAGLTGTPHQSGSTAHEQGISKAGNRRVRAVMCELAWIWVRYQPDSALTQWYRARFGSGPGRLRRIGIVALARKLLVALWRFVDQGVVPEGAIVRSAS

SEQ ID NO: 224596 - protein, 427 aa, unidentified
MSYRIAGIDVHKKMLAAVVADVEIEGEYQFEQRWFGTSPDHLRLLAEWLIEQKVEEAVMESTAQYWKPPWQALERYWKPACQKREGTGPMSGALHLAQAFSNRGRQGRKKDFRDAKRLVKRLVAQELTLSFVPDAEQRLWRTVTRKKYQLTRDHTRLQNRLESLLEETHIKLSSLVSDLLGASARRMLKALSEGETKPAALAALADKKLRATQAQLCDALGACTDLNAVYRRLLKMALEELQLLEQQIVQLDQEMASLLRPHHDAVQRLAEVPGLGVDSAQQIIAEVGAQAATFPSEKHLSSWVGACPGDQESAGVNYSHRSPKGNRHMRRILNQCANAAVKHKGSIFETMYRRLVSRLGHNQTIGAIAHRHCRLIWLILHKGVRYEERGPAVSERSRKRRTTKMIRELRLLGYRVVPGTSQPANPA

SEQ ID NO: 224597 - protein, 388 aa, unidentified
MSQPFDASKSLATLEQDNTVIAVIEMSQSKWLVAAVVPGVKRQPLKKLQADEEALLKLLNRWRTEAGQTGREIKRVVVAYEAGRDGFWLARWLRTRGVEAYVIHPASIAVSREHRRAKTDRLDTELLMRAFLGWLRGEKRHCSMAAIPTLEEEDARRPNREREALVGEQTRLVNRIKATLTRFSIHAFKPTLRKAADKLDSIRTAEGTPLPDNTRAELYRFLERLCLVREQIRAIERERLRRLAAAPAATSGPHAMVRLIARIIGIGVETADMLVNEILSRGLRDRRAVARYAGLTGSPDESGSRRREKGLAKAGNARVRRGMIQLAWRFLLFQKDSALARWFRARTSDGRKTTRKTMVVALARKLLIALWRLVTAGEVPQGVVLRPA

SEQ ID NO: 224598 - protein, 320 aa, unidentified
MPSLFVGIDVSQATLDVCILPPDRAFRVDNTPAGHATLIDTLRGLAADPAEVRAVLESTGGLELPVALALQAAGFPVAPIKPERARHFAKAHGQLAKTDAIDARILARFAQAIDLPVHPLPAEDVRLLRDLLDRRGQLVAMRTMETNHVSSTGDPKALASLKKHIAWLDREIGRIESDIDRRVAANPQWQEIDRILQSIPGVGPQTSHTLLGQLPELGRVDRKVIGLLVGLAPLANDTGGKEGPRHIVGGRQQVRNVLYMAALVASRCNPVARALYVRLMQRGKSAKVALIAVAHKLLTIANAMVRNRTEWRHSTVANSA

SEQ ID NO: 224599 - protein, 367 aa, unidentified
MKKISTVAATQSKNFREQKLTIGLDLGDRWSWYCVLDEAGDVLLEQRLSTTPKAIGEVFGGMPRSRIALETGMHSPWVSRGLSELGHEVIVAHARNVRLIGESRWKDDRFVARTLARLARIDPRLLAPVQHRSAQAQAHLMVIRARAGLVRARTSLINTARGLTKSYGERLRGCSPRNLNAEKARQLSPELQAALEPLPGAIESLSQRIYEYNQQIEKIATNSYPQVARLKQVKGVGTLIALTYILTLEDAQRFRKSRDVGCYVGLQPGRRNSGQSEPQLHISKEGDPYLRTLLVQGAHHILGPFGADSDLRRWGLKLAERGGKNGKKRAVIATARKLAVLLHRLWVSGEAYEALRNSRAVRLPAAA

SEQ ID NO: 224600 - protein, 349 aa, unidentified
MYYMGIDHHKQYSHITVLDEKGEVIKTEKVWNTGREVREFLSGLDDEISGVVEAGYSHYTMMDLMESVGVKMKIAHPEQVKAIAKAKIKTDKRDSKILAHLLRSDLVPEVYCRNEENREAQRILRHRVTYVRMQTQVKNRIRALLAKQREEVRQIVELEENLFKVSGIKALGSLELPGRDQQMLESYLETLEHLKGKIKLSDALVREILRSSEEARLISTLPGFKEFFPVLVSVEIADINRFDSSAKLHSYAGLVPSTHVSGDKLYHGKLVRQGNKWLRWAAVEAVWPAVRSDFDIRLYYQRRKKRKGANSAKVAKARRLLTIIYRVLNEKRAYIPYKREKHTTAFSCI

SEQ ID NO: 224601 - protein, 342 aa, unidentified
MFYAALDVSLRSVAICIIDQDGKVRLERSVPSEVPDLVRCLREFGEPIHQVGLEAGTLTQHLTYGLTEAGFDVVCMEARQVAAALSAMRNKTDKHDARGIAQILRSGWYSRVHVKSVESHHLRALLSCRKVMQRKCIDLENEIRGLLKIFGVKLPLRLSRGGFDIAVRDTIESDPALSHALLPMLQARRMLFDTFTELDRRVRKAAHADPVCQRFMGVPGVGEITALSFKAAVDYPARFKSSRTVGAHFGLTPRRFQSGEKDNPGRISHAGDADVRATLYAAANAMLMRSIRWTSLKAWGVRLMKTKGRRRAIVAVARKIAVVLHRMWVDGSDFRLGSEAAA

SEQ ID NO: 224602 - protein, 341 aa, unidentified
MKNVSMVGIDLAKSTFHLQGVNALGKKLFSRKLSRGRFFEFVVLHIPKTAVLAMEACATAHYWGRRFIDVGYEVKLINPGFVKPFVKSNKNDYNDAEAICEAASRPTMRFVPVKTIAQQEMLSVHRMREMVISQRVRLANQIRSLLAEFGHVTRLGTAALRALVVGFIAPDNERIGSLLKECLTHQYESLCHLDEEKKFYDKKISDFAKTNETCKRLTEIPGIGPICSTALYATVGQGYDFKNGREMSAWLGLVPKQNTTGGKPKLGGISKRGDSYLRKQLIHGARAVVLHRRKKSGKIGRWLNRLAARKNANVITVAMANKNARIAWSLLKHGTAYKEAA

SEQ ID NO: 224603 - protein, 369 aa, unidentified
MNEARIAGLDVGDKYSNFCLLSEDGSIDEEGRFKTTKEGVEGWARGKDGLRVVLEVGTHSRWISNQLKGLGLTPLVANARHLSLIYGRDNKTDRSDAEMLARLGRADESLLHVVHHRENQAQQHLAVVRARNCMVEARTKLVNHIRGVTKSWGVRLPRTSTRTLTRVGVLEKIPEEVWRALLPLLASVTAMTKTIDDYDEEIARLSAEEYPETEALQRICGVGPLTSLAFVLTIEDPSRFSNARSVGSFLGLVRKLDQSGERDKELGITKAGDPYLRKLLVQSSHHILGPMGKDSDLRRWGLRLAERGGRRAKARAVVAVARKLAVLMLTLWRSGKEYVPLQHPEPAAAVETRALDASAMGGLEPGQQG

SEQ ID NO: 224604 - protein, 341 aa, unidentified
MSNYSYFCGIDLAKNHFSLHAVDQNGKVILHKSVTRSKLLTTIANMPLMRIGVEACCGAHYWARTLNKLGHDARIMAVKYVVPYRTKGKNDLNDAAAICEAVQRPSTRFVPVKSPEQQAILSIHRMREHWVRERTALMNRMLALLSEFGLIIPVGRSSLMKQVPLMLEDAENELPHLARTVIADAYHHLDELNQRIADTEQVFDSFAKVSTNVQRVMKVRGIGPQTATAILASIGNGTQFDKSRDFSAWLGLVPKQYSTGGKPRLGRITKHGDKYLRTLLVHGARTMIANLGDKQDKLSQWCRGVLERRGMNRAIVALAAKNARIIWSLLHNQTEYENYAA

SEQ ID NO: 224605 - protein, 337 aa, unidentified
MEQRQYVGIDLHRRRSVIVRRSADGETLATTHIDNDPLTLAAELARAGEHPEVVLEATYGWYWAADVLAECGASVHLAHPLGNNWGHRRVKNDERDATDLVDLLRMGRLAEAWIAPPALRELRELVRYKAKLVHLRTSCKAQIHAVLAKEGVRVTASDLFGPSGRVFLDGCGLGESYAVRVTSLLKLLEVLDWEIDRLAERVAAWLVDDAGYWAIQAIPGVGPVFASVFVAEIGDVHRFPTARHLCSWAGLTPTHRESDTKVHRGHITKQGSRLVRWAAVEAVARQQQANPIADHRRRIADRRGKNIGRVAAARKLLTLVYYGLRDGDIRCLAGTAG

SEQ ID NO: 224606 - protein, 340 aa, unidentified
MGQINRYAVDIAKGVFQVHGEDAERSTKVQKRLARGKLLAFFAKAAPALVVLEACGTAHYWARELAKLGHEVHLIPPQHVKPFVKRNKNDARDAEAIFEASLRPGTHFVPVKSVEQQAARALHSGRDLLVVQRTALGNHIRSLLSEIGVTAAQGAAGAAALYALIDAEHVSIPAAMLAVLRPLLDQWRSLHQAVEALGDDIEKAARSDPRAKLLMQIDGVGPITAHAVLAAIGDGRQFACARDFAAWVGLTPQQHSSGDKTRLGRITKAGDKRLRRLFVLGASSWIRHARHKPDKASAWLTGLLARRPVKVAVVAQAAKTARIIWAMLISGEDYRAPATA

SEQ ID NO: 224607 - protein, 357 aa, unidentified
MSQQSNNCAIAVIGIDIGKNSFHVVGHDQRGAIVLRQKWSRGQISARLANLPPCLIGMEACVGAHHLSRKLQALGHQARLMPAKYVRPYSKGQKNDFRDAEAIAEAVQRPTMKFVATKTADQLDLQALHRVRQRLVSQRTGIINQIRAFLLERGVAVRQGLRFLRVELPGILATRTDVLSPRMSRVIEELAGDWRHLDARIEDLSGEIETRAHQDQHCERLMTVPGIGPIISSAMVAAIGTGDVFSKGRDFGAWLGLVPKQISTGDRTILGSISRRGNRYLRALFVQAAWVVLVKLGPKQWERYGLKSWIEAAKKRLHHNVLAIALANKLARIAWAVLNKGRTFTCVKTDAIASRPA

SEQ ID NO: 224608 - protein, 413 aa, unidentified
MQVLYDRCCGLDVHKKTVVACVMVTSSDGQVHKQVRTFGTTTMDLLTLADWLASFQVSHVAMESTGIFWRPIFNLLEEGRTIILVNAQHMRAVPGRKTDIRDSEWLADLLRHGLLKASFIPAKVTRDLRDLVRYRKTLVQERAQEVNRLQKVLETANVKLSSVVSDVLGKSGRRMVVAMIEGVSDAEALADLARGSLRQKLPQLQEALQGQVGPHHRVLLRQIFAHILFLEDTIQQLQQEIEQQLCLFEEAFHLLLSIPGIQMIAAAAILGEIGCDMSCFPSAKHLASWAGVCPGNKQSGGKRLSGQTTKGNTRLRSLLIEVVWNISRMKDNYLSAQYHRLARRLGKKKAAMAVAHSLLVIIYHVLRDKQPYSDLGADYFDSLDKERLTRQSIRRLEALGYAVSLTPKQEVVA

SEQ ID NO: 224609 - protein, 421 aa, unidentified
MKSASNGEISTALPADPPGGVTAGLDWARDDHAVSVIDDRGRERARCTLTHTAAGLRELVRFLNEHGAVEVAIERPDGPVVDTLLGAGFTVVVISPNQVKNLRGRYGSAGNKDDRFDAYVLADTLRTDRARLRPLVPDTDATVALRRACRARKDLVNHRVAIANQLRAHLRNVLPAAVGLFQDIDSAISLAFLTRFDTQDKIDWLTPTRLGDWLSKQGYSGKVASTVLHQRILNAAPGATGVHGAHQAHITASYVALLRTLVAQIKALSTQINTQLDAHSDAHVFTSLPRAGRVRAARLLAEIGDCRARFPTPESLTCLAGAAPSTRQSGKSRTVGFRWACDKQLRDAVTDFAADTRLVNPWAADLYNRARARGHDHPHAVRILARAWLHVIWHCWQDNLAYDPAKHRALQRITTPREEAA

SEQ ID NO: 224610 - protein, 428 aa, unidentified
MKKNSKQQTQQQQSKSQQSKQQPAASKQQANQQPAASKQVAKTPAAGKPQTPFAQQLETERKQMQESNVISGVAGVDIGDKRSYVRLVGLDGELLEEVKVATNPAAIEKYFRSWPRLRVVLETGGQTNWIRRLIAGLGHEVFVADARQLRLISQSYAKNDRNDAYWLAELGRTNTNLLAPVEPRGQQVEQHRSWLQGRETLVGARTKLINSLRGIAKSHGIRFGPCGMTKWAAAVRQECPAVLQTILKPMARAIAALTREINELDRRLDKLGKEQYRVTQLLQTVDGVGPLTSLAYVLELNNDVGRVKRSRQMGAVVGCRPKQRDSGESSPELGITKAGNPMLRRLLVQCSQRILGPFGVDSDLRRWGLSLAARGKKRAKRRAVVAAARKLAVLLHAMWRKNEAWQPFPNGEPAAATAASAASAAAAQ

SEQ ID NO: 224611 - protein, 340 aa, unidentified
MHNPKPGAVFVGIDVSAREIAVALQTDDQLEPVRTFANTASGHQQLGRYLRRDQQPVRVCVEASGNYSLDLCLALHAIEGIELSVINPRLARRFAESLGTRSKTDPVDARVLCLYAQRMPPVAWQPPSPASLHLRSITRAVEALTCMLVQERARHHAAAASTALPRLVTTELQRHQRYLEQRIQRLRREAVRIISTDADLARRFRLLQTTPGVAAISALQLRGELAVLPSTLDARQWVAHSGLDPRHHRSGTSIEWRPRLSKLGNRRLRRALYMPALVAVRHDPHLRGFYQRLCGNGKAPLQALAAVMRKLLHAFPAMFKRDQAYNGAHLCPEVPLACHP

SEQ ID NO: 224612 - protein, 388 aa, unidentified
MNTIPKTASTSTILAIDLGKYKSVACVHDQATGEIRFTTFDTTRAELQKRIVKDQPGVVIIEACLLAGWVHDLCGELGVRCLVANTASEAWKFKHLKRKTDRDDALRLAQLYLLDQLPTVPLPPTAVRQWRSLMAVRQALVGRQIAVQNRIRALFVARGLPAPRGARAWSETGLAGIASFAKPLAECGPDELWRGLLDLALVERRQTLALVTETEKKLNALGKENANVALLQTTPGMGPRTAETVAAYLHDAGRFQTGKQVSAYSGMTPRQHQSGEMDRRGRISKRGPALLRKMLVECAWCMVRYNAWARGFYLRLTGGGQRRKKQAIVALARKILVRSWAMLRDQKPWHDPQTAPKDPLPPSKRRRQAEAQQRRQAKQQPTLATTTT

SEQ ID NO: 224613 - protein, 345 aa, unidentified
MTISMIGLDTAKTVFQLHGVDSTGKAVLKRKLRRDEVIPFFEQQPRCVVIIEACGAGHHWARLFADLGHEVKLLAPESAKPFVKKGKKNDAADAAALCAAASRPDVRFVPIKSKEQQGVLALHSVRTLLVKQQTMLVNAMRGLAAEFGVIAPKGVAKVDQLHEMVVEEPTIPPTAQQAFGELNERRIAATHRIAELETQIVEHARTNGTVRQLATIPGIGPITASLIAATVGDNIGAFKSARHFAAWLGLVPRQHSTGGKPRLGRITKTGNSEIRRMLVLGATSMVFRAPHWNSAAGAWLRGVLQRRPVRLATVALANKMARIAWAVMTRGQVYRPSGRATEFAT

SEQ ID NO: 224614 - protein, 318 aa, unidentified
MFAIGIDMSKLTFHACFDDEKVMIFKNTEDGFKDFSKELTKRKYSKNETKIGVESTGTYHLPFCLELTKLSWSVLVINPLIVNRLAINKIRPTKTDKIDAGVVRLAVLQNQGYIFNESLELLQLKSLISERNALVKMRAGLKQRISAEQYRKPSNGNTSYERTLKYLKNEIKLIENNLPNYQTATQTLLKTIPGIGLTSAAVLVATIGDISRFSTPRQFIAYIGLDCRVKESGTSIKGKGYLTKRGNRYLRFILFNATLIAKRYIPQLKEFYQKKKKEGHHHFSAMCATERKLALIVYAVWRRGAPFQIQRPTTQQPS

SEQ ID NO: 224615 - protein, 316 aa, unidentified
MDEPRPACCVGVDVSKDRLDVHLRPSDEAFAVARDGKGLESLVERLKALNVSLIVLEATGGFETTVAAALAGASLPLAVVNPRQIRDFARALGKLAKTDAIDAKVIAIFAEKIRPQARPIASQEAQRLAELVARRRQIVEMIGMEANRRKRAADKRLGKKIDRHLAFLEKELAEVDADIDAGVRASPAWRETEDLLTSVPGIGPVTARTLIAELPELGRLDRRKLAALVGVAPFNRDSGTWRGHRIIGGGRTSVRNALYMAALVATRYNPLVKANYQRLVARGRPKKVAIIACLRQLLTILNAIVRDAKPWAVQKA

SEQ ID NO: 224616 - protein, 349 aa, unidentified
MKNKEVTKQVVGIDIGMESFYVCYKVQYKNGSIVIKGTKSFTNDALGMKDFFIWTERRNKNSEISIIFVMEATGVYYEELAYFLHYKKQKISVQLAQKIKYFAKSCNLKTKNDKVDSKMIAEFGIEKNLSKIDFWTPPSKNFKMIRDLSREHTSLKQSIVSIKSQLHALNFAHETNKEVVKMKKQQIVFYEKQIISVEKEMHKLVKADGKLSDKIDKIETIKGLGFVSIIKVISEVNGFLLFNNIRQLVSYAGLDIIEKESGKFTGKTKISKKGNTQIRATLYMPAMSAMQYNKTLKTFYQRVNEGRTIKKQGVIAVMRKLLILIYTLWKKDEEYIEDYQQKIIEKKAA

SEQ ID NO: 224617 - protein, 348 aa, unidentified
MHFYNRQHQFYCGIDLHARSMYLCILDAAGTVLLHRNLPTDAEHLLEALRPYREDIVVGVECIFTWYWIADVCVRHAISFVLGHALYMKAIHGGKTKNDKLDSQKIAGLLRAGMLPMAYAYPQAMRATRDLLRRRMYLMHQQSELLAHIQNTNAQYNLAAFQKRINYQSNRAQLSEHFPEPMVSKNIQADIDVLDALHRVLVSVEREVLQQARAHDPSVLQLIRSVPGIGKILSLVILYEVHDISRFCSAGNFISYCRLVKCPRESAGKKSGARNSKIGNVHLKWAFSEAAVTFLRNNEPAQRLHHRLLSKYGKAKALSIIAQKLGRTLYYMLKHKEAFDPIRFFQDG

SEQ ID NO: 224618 - protein, 491 aa, unidentified
MEKSTDRQASVTNRRPDRNDGYPETFEPRPMSGDEMHTQMMSFEDSTIRDAGFRAESEESKEKEKVKQEDEMMAWIGVDWADEKHEVWEYEVQSGQKRSYEIQQTAESLQDWVGQLRSRYRSGRVAVVLEQSRGGFIYALMSTDFIQLYPVNPKSLAKYREALYPSGAKSDPSDAELLGEMVRQNPERFRSWKPGDEQTRSLQLLVEGRRKLVDDMTGLTNQLGSVLKTYYPQALEWAGELSGEQACSFLEKWPTLQELRKTRAFRIREFYERHGRPSREVLDERVKQIQKSQPLTSDTAVMLSGVMMVKALVGRIRPLAAAIERYDQEIERIFRQHPDRAVFESFPGAGKALSPRLLAAFGADRDRFQTAVNMQELSGTAPVTERSGKSIWIHRRWACPKFMLQSFHEFADQARRFCTWSKLYYQHQRAKGKEHHAAVRALAYKWIRIMFRCWKDRQPYDDSRYTQSLIKRKSFLAERLTATSSEMLPST

SEQ ID NO: 224619 - protein, 390 aa, unidentified
MIGERAFAHGGAGLADLCAWLLSMTAAEAAAIAVAIEVPHGPIVETLLERGFQTHAVNPKQLDRFRDRFTVAGAKDDRRDAQVLADSLRTDRHCFRRLAAEDALVIELREWSRMTEDLQQERNRLANRVREQLWRYYPQALAVSDDLAADWFLELWAAAPTPEKAARIRESTLERILKAHRIRRITAAEVLRILRQPALTVAPGTTEAASAHIRAVAERLKLVNRQIHEAHRQLDGLCARLAEENTETPPGQEPEQRDVTILRSLPGVGRIVLATLLAEASEPLRRRDYHALRTLSGVAPVTKRSGKRCIVSMRQACHMRLRGAVYHWARVAIQHDELSRRRYAEFRKRGHSHGRALRGVADRLLAVACAMLARQAPFDPGYRRARAAAA

SEQ ID NO: 224620 - protein, 369 aa, unidentified
MADRITYVGLDVHKESIVVAVASGGLRGEVREYGRIANTATALDRLLRKLGGEGMTLRFCYEAGPCGYGIQRRLSTQGHECIVVAPSLIPKRAGDRVKTDRRDAASLAKLHRAGELTAVWVPDARHEAMRDLVRARLDAVHSLRRARQQLSGFLLRQGCHYGRPAWTKLHRRWLAGLTFDQAVHHLVLEDYIAAVEAAMARRDRLTVQIEAMLPDWTLAPVVAALQTMRGMALVNAATLIAELGDLSRFTNPRQLMAYLGLVPSEHSSGASVKRGGITKAGNGAARRLLIEAAWSYRFPARLSRELLLRQESQPKPIRDIAWKGQVRLCARYRRLARTAKPANVVTTAIARELTGFVWAIARQVTVTPG

SEQ ID NO: 224621 - protein, 368 aa, unidentified
MSVVSMPRGEVKWVGLDVAKDAIAVGVLDGVSEATPRLEKIAHDEVSIRRLVSRLGGPGRLRACYEAGPTGYELHRLLGSMGVDCEVIAPSLVPVAPGDKVKTDRRDARRLVRLFRAGELVTVRVPTREEEGCRDLSRLRAAAMVDRRRARQRLGSFLLRRHLVYRDGRAWTVKHRRWLRSLAFDDTGTQVTFAHLLASVEERELRVDAIDTDLARFFEAGLFVNEVARLGAYRGIAPLSALGLACEVCDWRRFPAPGKFMGFVGLVPSEYSTGASTSRYGITKSGNAHVRRILVEAAWAYRYPARVSPELARRHEGVAPDVIARAWNAQVRLCGRFRRLAARKDRRTIVATAVARELAGFVWAEMTA

SEQ ID NO: 224622 - protein, 429 aa, unidentified
MGAMSENEVLGQEPQFAALVGIDWADQKHAWCLQAAGTTQRESGEVEHTPEAVEAWVGQLCQRFGNRPIAVAVEQVKGALVFMLSKYEPLHLFPVPPAMSANLREALYPSGAKDDPRDADLLVDLLLQHRDKLRRLSPDSEATRRVQNLVEERRHLVEEKTAQSNRLTNHLKIYFPQMLEWFDRLDTELVCALLEQWPTLEELQKVPPARLRTFFRKQRCHYPELVERRLVGIRQAMPAIRDRAVIEAKSTVVKVSAQLIRSLIRGVADLDRKIEEAAAAHPDFFIFESLPGAGAVLAPRLLAAFGSQRERYANAAEVQAYSGIAPVTERSGKKKWIHFRWACPKFLRQSFHEWAGHSIAHSQWARSYYQQQRERGKGHHAAVRGLAFKWIRIVFRYWKDRVTYDESRYLAALARRNSPLAAIAAGTIL

SEQ ID NO: 224623 - protein, 357 aa, unidentified
MKISRIGMDIAKHVFQLHAVDSFERTVLKKKLKRSDVLAYFRTLAGCQIGMEACGGAHHWARLLIAMGHSVVLIAPQFVKPYVKTNKNDAADAEAICEAMSRPGMRFVPVKTVEQQDIQALHRVRSELVKQRTAKGNQIRGLLAEYGVVVQKRIECLRVALPELLEDADNGLTGAFRALLDGLRLDLIKLDERVGELDRQILQRCRGSVSAKRLQEIPGIGPITASALIAAVGDGSGFKRGRDMAAFLGLVPRQHSSGGKEKLLGISKRGDSYLRTLLIHGARSVQRVSVNKTDPSSRWLNALSHRRHKNVAAVALANKTARMAWAVLSKGQAYRAPAQHDDSKGSVLPTAANGALA

SEQ ID NO: 224624 - protein, 412 aa, unidentified
MTVFCGIDWAESHHDVALVDDTGRLLAKRRISDDAAGYRFLLDLLAEYGDTPEEPIPVAIETSRGLLVAALRTGKRPVYAINPLAAARYRDRHGVSRKKSDPGDALVLANILRTDMHAHRPLPDDSDQARAIAVLARAQQDAVWNRQQLVNQVRSLLREYCPAALDAFLGKQHGLARAEARAVLAAAPTPARAARLSLAQLRAALKRAGRQRGIDSEAERLREVLRGDHARQPAAVEDAMGYQLTALIRQLDAACLAADELAEAVEEHFRRHPDAEIILSFPGLGAQLGARVLAEIGDDRTRFADARALKAYAGSAPITRASGKKRYVGRRFIKNNRLVNAGFLWAFSALKASPGANAHYRRRRESGDWHAQAQRHLFNRMIGQLYHCLQTRQLFDEHHAFTSSSTDLAVAA

SEQ ID NO: 224625 - protein, 388 aa, unidentified
MRYFIGIDISKFKHTAAVIDQDGVVHIEPFDFDNDIIGFNSFFTSVSSFIQDDFIIGMEDTGHYADNLQKFLLSKNLKVAMFNPLATNHIRLAFNLAKNDRLDSLTIASALAMPRLYRIIEDEHFTYHEIRELSRYHQSLSKTMNRYKNRLQKFIDIAFPEFNKLFDTKYSKTYLKILKDFQSAQNIANTNIRTLRKALLSKGRCVSITAEELKSAARDSIGHSHIALDLEIQQTVEMIEKIDSNLNIVDKKIEEFSLQLNSPILAIPGISHISAMSILSELGDFTQYESAKKIIKLSGTNPYIYESGTYSMPRTRLEKKGSKYLRCTLYNIIQTVINNNPVFKDYYDRKISQGKSHRCAQGHCVRKLLRVIYHILTTGCEFDPSLLR

SEQ ID NO: 224626 - protein, 340 aa, unidentified
MTITTIGLDLAKSVFQAHCVDETGAAVLMKKLHRKQMLPFFSKLPPCLIGVEACGTAHYWARTLAAMGHEVRLIPPSYVKAYVKRGKSDALDAEAICEAVQRPTMRFVPVKTIEQQGILMTHRARSLLVRQRTMLANALRAHLAELGHVANPGIGNLAKLAEQVIADRNALPSYARTAFEILIRQIMAVGAEIAELDQQLATWHTESEASRRLAAIPGLGVITATAIAATVTDADQFSSGRQFAAWLGLTPQQHSTGGKTRLGGISKQGDRYLRRLLVVGATAVMRHIKDKPTPMADWIRKLSEKKPFRLVSVALANKLARIAWVVLTRKEAYHPYAHLT

SEQ ID NO: 224627 - protein, 429 aa, unidentified
MDGCDIIRLKQFRQIKEEIRGSGEYLIVGIDVAKDKNYAFFGTAAGKTLFKKLIFENNLEGFQKLLAHEDSLKIRHGLSKVIYGLEPTANYHKPLAEYLIRCAFNVVLVSGTAVKNNRQTIDGRWDKNDTKDAAVIADLIAQGKFLFCEYPLMPLRDLRNLLSLKRRLKRQEHGQKMRIRNHLFAQYFPELDKCYKVLSQEALSIVRWCLNPSEIAGLEYEDFVKRVAPSGRGGMPQQERLKRVWNKAFESVGCRAGESLDLEAKLLVDGLKNIRGYIAEVENKIVEICKYFPEYDYVLSIPGFGPDISSKVIGAIGNPLRFINGRQVLRIAGMDLSANRSGKNSENVTPKLSKSGKADLRYALYQAALIASVKNIQFMRYFTKTLRGREREKGIKTKMRVKLAAKMLIIAWTLMKKKVFFDSEYLKLD

SEQ ID NO: 224628 - protein, 393 aa, unidentified
MYLVGIDIGKLKHSFCLLEKETGEILVEPVFFENNRDGFNALLSSFKHLPQKDILIGMEDTGHYNLALLKFLLDRNYQVALINPVATNLTRKMQGGISKNDKLDTLTICDVLSSSQRVKSYRISKYSSFDLYEQKQLTREHHNLKEEENQLSNRLQKCIDVVFPEFNSLFKSKYGIVYMNILKEFGSADAIAHADIRTLRKCFDTGRGKHISLTAEELKEAARNSIGFPSSSEATQIKHLVARIELIKEQIAEIDKKIEEFSLQNNSPILSIPGISHFSGTSILAELGDIHNYSKPSQIIKFAGVAPLTYESSQFTAQHTAITKKGCKYLRKTLYQIITPVIQYNPVFKKFYLLKIAQGKGHRCAQGHCVRKLMRVIYHLLSTGTQFDPALLR

SEQ ID NO: 224629 - protein, 404 aa, unidentified
MLFVGVDWAEDHHDVCVMAEDGLVLSKRRVPDSVAGIGDLHGLVAEHADDDEAVVVGIEIDRGLVVWSLLEAGYEVYAINPMASARYRDRHATSGAKSDPGDAKVLADLVRTDRHNHRPIAGDSDLAEGVKVLARAHQSAIWGRQRQLNALRSALREYYPGALAAFGTDLASTDALAVLTIAPTPELGRGLSRSKIASALRKGGRQRNIERRAEEIQEALRAEQLEAPEVIANAHGLVTRSALALIATFNAQIAELEAALSEHFEQHPDAKVVRSLPGLGTVLGARVLGEFGDDRTRFSGPKSRKNYAGTSPVTKASGHSRVVLARFARNRRLADACDQWAFCALNTSAGARSYYDQLRARGKTHRQALRQLANRLVGLLHICLEREVLYDELMAWPQESDLAA

SEQ ID NO: 224630 - protein, 342 aa, unidentified
MKQYVGLDVSQRETAVCVVNETGQVIFEGKAKSNPGALTELLSKHAPHAERIGFETGAMASWLWHELRRVELPMVCIDARHAHAALSVRMNKSDQNDARGLAELVRVGWYREVKVKSEESQKIRAILVARSRLVSMRRDIENQVRSLIKECGLLFPRAIGQQFRNQVSELLGVDHLLLSVISPLLSIHENVCQQQGKFDNEVRRLAKLDDTTRRLMTVPGVGVVTALMFRHTIDDPSRFRSASTVGAYLGLTPRRSQSGETDINGKISRWGDRLLRTYLFEAATVLLYRTKKWSSLKAWGMKLAKRIGMKKAKVAIARKIAVILHCIWVDGTSFDWGQPKPI

SEQ ID NO: 224631 - protein, 344 aa, unidentified
MKKITTIVIDLAKQVFQVAVYNKHGVLKSNKAMNVKSMMRLVHQHPEAQIITEACGSAHHFARRFIQLGHDAYLIPPHICAKYRTGNKNDKNDTVAIYEAAKNQRTYFVSVRNLIQQDIALLHKLRKGHVDQRTKVANRIRGFALEYGVSFPLGINKLRQQLPDALENADNELTDIARSSLRGLLDMLLQFDVLEAKVKLQIEQLGKQLKPCKALVKIPGIGWLGATMIYARFGSGEAFKRGRDASASIGIVPSHSGSGGKNRLGSISKRGDTYLRWLIIHGARSVVNNIRDKQDGMSCWIRKQLITKHSNITTVAVANKLIRMAVAILKSGEAYRTPVAQRVS

SEQ ID NO: 224632 - protein, 371 aa, unidentified
MIGFSRRGRDRPSPPWVLEDRSVASVVAPIPIQEPEQLPGPLEPAYARPGLEDKTLSASSVFVGIDVSKSRLDVAIHPGGEQFSTGNDEAGLARLVERLAGQAIACIVLEATGGLELPAVGALIQAGLPVVAVNPRQVRHFAKAMGRLAKTDQIDARVLAHFAEAAKPQIRPVPDEATLALSDLLARRRQVIEMLTAERNRLIRSKGSVREHIASHIRFLEEEADRLDHELAHLLKESPVWQEKDDLLKSVPGVGPVLSTTLLAELPELGSLDRKKIASLAGLAPFNCDSGLLKGKRMIYGGRAPVRTALYMATLVATRHNPVIRECYGRLIGAGKAPKVALVACMRKLLVILNAMVREGIPWKEQACSLT

SEQ ID NO: 224633 - protein, 425 aa, unidentified
MKNSFLSTLFVGIDVSSRTNVVCALDFQGNKLLNEKVLNNRPGAIAILDSILGCLSSNDLKYVVIAMESTSFYSTHVANFLSSSEELLPFKPLVYCLNPKTVANYRKSFVDMDKTDPLDAYVIADFARCGRITSSPWRGAQFLALQRLTRHRLHLVECITREKAYMVSNIYLKFSELAVLDKGDKPFSNTYGATSAAVLTDFLSLDDITYAPIEDLVAFVKEKGKNRFSNPHETARILQKAARDSYRLDKVLYEPLNVAIASSFNVIKAMENEVKAVDKAIEKNIKGLNTAEYQSLTSIPGIGPVLASGILAEIGTIISFGSNDALAKYAGLTWRVNQSGDYTSDNTKMTKTGNRYLRYYLIEAANSVKNHIPEYKDYYYKKYGEVTTHQHKRALALTARKLIRLIFGLLTRNQIYSSDKVGEIK

SEQ ID NO: 224634 - protein, 394 aa, unidentified
MFYCGIDIAKFKHEASVIDSEGKALLDSISFSNSKEGCEKVLALFDKLSVQPDSVLIGMEATGHYWLSVYEFLTELGYNVKVINPIQSDAFRKMYIRQTKNDSKDSFIIAQIMRFGQYSATIMSDENVIALRQLSRYRLALVDNCGDSKRRIIALLDQVFPEYDNLFSDTFGVTSTELLLQCPTPEDLLAISSKKLTSLLRKFSRGRFGGAKAAELKAIAKSSFGVTFAKDAFSFQIRQLMEQIVFIEKQIEELESAISSLLRQTNQVITTIPGIGDTLGAVILSEIGDIHRFDAPGKLVAFAGLDVKVNQSGEFIGTKNKISKRGSPYLRRAIWLAAGRAAFCDPILSAYYQSLRSRGKHHLTAVGAVARKLCNIIFVILSENRAYEPIPPKG

SEQ ID NO: 224635 - protein, 372 aa, unidentified
MADKKRGKVKGCRMNSIVAGIDLGDRESLTTVLSPIGDVTDRFTFPMTEEGYAYFANRVPKETRVAFESTIMAYPIMRALRKHGYTDVTVAHPKTLTWIVKSKKKNDRVDSLKIAKLHMAGMLPESHLLDRNQQMVRDLLVQRAKLGVEIGRLKNSVIGYLKREDVYDSLPRTSDSFSIKRRHAIHSLNFNDDRDLVLGTMMDRLKFLEKQCLPLEDRVKTQAALSDDVRLLMTITGVDFYLASLISSFVGDVNRFPSDDHLASFFGIVPTSRDSANVKRRGKMTKDGSSTARWALSVTVDTVTQHNQPIKDYYESVKKRTGSGKLAHVATMRKLTRMLYHMLKTREHWKWENQRLTERKLSRLEMRGGVLS

SEQ ID NO: 224636 - protein, 350 aa, unidentified
MKSIIYIGMDVHKKTYSLCALLKETGEIIGETKIPADVSLIIKFIENAKKSVDSDDVQIKTGYEAGCLGYSLYWQLAEKGIECDILAPSTMHRSAKNKVVKNDRRDAKNIAANLANGTYKSVYVPTDEDVEIKEYIRMMHDFKIELKKVKQHINAFLLRFGHHYPGKSKWVPAHIKWLKELELSDMHREILDEYLSQLEILSEKIERFKHRLEELSQKETYNEKIGQLRCIKGIDTIAAMTMHAETSDFDRFPTANAFASYCGLTPGEDSSGESYHRLSITKQGNSMIRTTLIEAAQVLVRGTIGKKGKKVKSKQKDQDVKVIDYADKAVIRLQKKYHRMIFRGVKRKAS

SEQ ID NO: 224637 - protein, 395 aa, unidentified
MFIVGIDIAKRSHEAIIIAEDGQVVRKAFSFRNNCTGYNLLLEQVRRLTLVKSQIVFAMESTAHYWLALYARLLKDGYTVMVLNPIQSHSLRELYIRKAKTDARDSLIIADLVRFGRCKASNVPQDKILALRELCRSRAYLVDMAADLKRKLIALLDRIFPEYESLFDSVFSKASIAVLSKYSTPQKVKNANLGKLTDILMESSNGHFGEWKAHQLKEAACSSFGIDDSCGVYSTLLGMFLEQILSLTAQADSLEKQISVFFQEFNNPLTSIPGVGTVLAATILSEIGDITRFSSADKLLAYAGLDPSVKQSGEFKSNQNRMSKRGSPYLRRAIWLASTVAVHRDPMFQTYYEKKISEGLHYMNVIGHVSRKMTAVIFAVLRDGQPYQPILQSAG

SEQ ID NO: 224638 - protein, 402 aa, unidentified
MNAVGIDVSKSKSVVAIMRPFGEIVSTPFEIKHTSSDINSLVKLIKSIEGESRIVMEHTGRYYEVLAHQLSEANLFVSAINPKLIKDFDNDSLRKVKTDKADSVKIARYALDKWQNLKQYSVMDELRNQLKTMNRQFGFYMKHKTAMKNNLIGILDQTYPGVNTYFDSPARSDGSQKWVDFASTYWHVDCVRKMSINAFIDHYENWCKRKKYNFSKSKAEEIYGKAKELVPVLPKDDITKLIIKQAVDQLNSASITVESLRTLMNETASKLPEYPVVMAMKGVGTSLGPQLMAEIGDVSRFTHKGAITAFAGVDPGVNESGSYEQKSVPTSKRGSSDLRKTLFQVMDVLIKTHPQDDPVYQFLDKKRAQKKPYYVYMTAGANKFLRIYYGRVKEYLASLPES

SEQ ID NO: 224639 - protein, 320 aa, unidentified
MSLDCAYLRDPDQDKAKRKSCSNSVQDFAALVTWATARSGLSIQALAFIIEPTHVYHEQLVHFLFNAGATVYLVNPGRVRKFAEGIGILSKNDLVDADLLVRYGLLARNLVAYQPAAQEVNDLRSLLNRLDALEHNLRSELNRQEKVGKTMVFHRLEQQSIARSVKRLKAEIISFKRAIRACIKSTPSLQQNCNLLHTIPGVGAKTAWIMIVILGSRAFRSAPEVASFLGLNPIEKRSGNSQYRRPRLSKSGSGHYRQKLYFPAMVGTRKNPDIQALYERLLAADKSKMYALGAAMRKRVHICYGVVKHQAPYQAQTISS

SEQ ID NO: 224640 - protein, 409 aa, unidentified
MLAELVSCCAGLDVHRDVVVETVLKGKGEEVKKETRQYKTFSRDLAKLADHEKQQGVELAVMESTGIYWKTVYAALEDAGINVLVVNALHVKKVSGRKTDVTDSEWLAELGRCGLLRPSFIPPRDFREIRLLTRYRVKMVGYLAGQKNRLHKVLDDCGIRLGSVVSDIDGVSARRMIDALIKGDKTPEEIAGLACGQLHKKGKDIILSLEANISDRHRFLLRRIRNHIRSLEKEIEEMECQIVAAMKPYEQEWRLLQTIPGIDEIGAAMLLAEIGVDMSCFSSKDHLCSWAGICPGNNESAGKKKSGRIRKGNKYIRQMLCEAANSARRTDSQFKGFYQGLVVRRGHKRAIIAVGHKILEVVYIVLKKNEPYKDPNVNYEELIVRRNAPRWVRSLQKYGYWPVSCSSSQ

SEQ ID NO: 224641 - protein, 417 aa, unidentified
MEVLYSRCAGLDVHKDTVVACVRVASEGKVSREMRTFDTTTAGLLALSSWLAESGCTHVAMEATGVYWKPVWHILAADGFALILANAAHVKNVPGRKTDIADAAWLADLLAHGLIRASFVPQPALQEIRTLLRTRKQLGREKTAHVQRLQKTLEDANIKLDSVITNVIGVSGRAMIEALIAGESDPAALARLAHRRLKASPGKLSEALRGRVTPHHRFLLRLHLQQVDAVDTAIAQIDQEVEANLAPFRAAAQNLTAIPGVGALASRIIVSEIGIDMSRFPTAGHLLSWAGLCPRNDESAGKRRSTRLRKGAPWLKTTLVQCAWAAIRKTGSYLQAQFRRLRARRGTKKAICAVAASMLTAAYHMLKDGTEYQDLGASHFDQRSKQSQARRLIKRLQDLGIAVDIKPSHEPPVLVSC

SEQ ID NO: 224642 - protein, 418 aa, unidentified
MQTEFSQYTAVIGIDWADKKHDVCVQDMATGKRRASQVRHRAEDLDEWARSLHRRFGGPIAIAVELSKGPIINVLQKYDFFVIFPIDPSKLANHRKTFTSSGAKDDPTDAEFALDLLSKHTEHFKPLDPQSIEMRTLMTLVEQRRQLMNDRVRITNRLRSTLKQYYPQPLEWFDHIDTLLFCDFIRRWPALSQVRRARRATLEKFFHEHNMNRKALLERRIKAIKSAMPLTMDDAVIVPHRLRALALVAQLEVTLECIKQYDTEIASLAPQHPDYELFDPLPGAGPVFTPRLMVAFGEQRERFNNAAEVQKYGGLAPVTKRSGQSTWIHWRWQCPTFLRQTFVEWAAQTINKSYWAGLYYHQQRARGCSHQAAVRALAFKWIRILYRCWKTRTPYDETRYLKALQERGSPLLKMAEAA

SEQ ID NO: 224643 - protein, 343 aa, unidentified
MAEYVGLDVSMKETAVSVRRDGKRVWRGKCPSDPKVLADLLRRRASEASCIVFETGPLSIWFYHTLSAQGLPVVCIDARHAKAALDMAANKTDANDADGLAHLAEVGFFRAVRVKGFDSMVARTLVSARTKLVMMTTDLSNQIRGLMKTFGLIVPAGKGSRFEANVRTLLAEQDLIAPVILPLLEAWRAVRLRATELTRQLIACARQSRACRLLMSAPGIGALTATCFATAIEDPANFSRSRSVGAWLGLTTRRYQSGEVDYDGHISRRGDAYLRGLLYEAATVILTRSSAESALRTWGLRLREKTGFKRAAVAVARKLAVIMHAMLRSGQLFDRTAGALAAK

SEQ ID NO: 224644 - protein, 358 aa, unidentified
MRIIGVDLHTRQQTVAMLDTETGELLEKTLKHDGDEVRKFYSALPGQVLAGIEATGSMHWFLELMEELGIECKVGHPAKIRAAEPRKQKHDRRDAALLLKLQVEDRFPSIWMPSSELRDLRTLLLHRHQWVRLRTRVQNALQAIALSHGLRRGKTLWSQLGQHTMESLPLAPHAAHRRTELLALHGELQAQIDELDERVMNHAQLRPGAKLLMTHPGVGPVTALATDVFLGDPARFENGKALVSYVGMIPSEYSSAGRQRLGGLSKPGNPLLRFLWCEAAVHAVRRDPELLRFYRRKLAQKGLGKARVAAARKLGIRLYIMLRDQIEYQEFCRRGQMRQKSGAACAGMPEVGHSPATQ

SEQ ID NO: 224645 - protein, 424 aa, unidentified
MKVTYQTCCGVDVHTSFLVATIVKTTGGIEPSYQKKRFSTFNNSILEFKQWLLDNDCHDVCMESTGKYWVPVFNLLEDDINVVIANPKWVKAVKGNKDDTKDSKWIGDLFRLGLVKGSYIPCKKVRILREYTRYRYKLVSCRSSEKNRYQNALTVCNVALDSVVSDIFGKSSTSIIDYLLEQSGSSINHEEIASKLLRSLKSKEDAVIESVEGYQMTDAQKYRMRLVRAHMDYITAEINDVDKMIENMISSNTDFENAVQFLCTIPGVKRDSAITIISEIGTDMSQFSSSKRLCCWAGLTPGSNESAGKKKSVRITRAGVYLKPALVQCAHAAVKSDKSPYYKKKYESLVKRRGKKRAIIAIARMILTAIYQMLSTGEQWNPSDLYKIDMPVALVEKQKAKAIKQAKKLLQREGLLPPDEPLAS

SEQ ID NO: 224646 - protein, 430 aa, unidentified
MGLIVPSAMHPQQDDQPMPYEWFVGIDWGSQQHQVCVLDRDRHQVGERVVDHDGASLARLAAWLWIVSAGQPQRVAVAIEVPRGAIVEGLLERGFHVFALNPKQLDRFRDRHSVAGAKDDRRDAFVLADSVRTDQPSFRRLHLEEPQLLVLRELSRAEETLLEEFRRNANRLRDQLYRFYPQMLQLCPAADEPWLWDLIDLAPSPAHAALLSEEQVQRVLKVHRIRRVKAHEVLTCLQTPALPVAPGAAEAAQAHCGFLSPCLRVLAEQRQACGQQVSALLHTLAEQPDDGEGPSDVAIVLSLPGVGRKITAWFFAEAAQPLAERDYQMLRTHGGVAPVTKQSGKRRLVVMRRGCNPRLRHALYHMARVAMQRDAHFSSVYAALRAKGQRHGQALRNIGDRLLRILMAMLRHRTCYDASRIRREPVVQRG

SEQ ID NO: 224647 - protein, 456 aa, unidentified
MKIPQSTIRLLTWRLVKILLNREVSTMKSNTQNAKIEAITEKTLVLGIDVGSETHYARAFDYRGIEYSKKPFKFSNTEAGFVTFKEWILDLKEKHEKDKVVPGMEPTGHYWFNLGKFLQDNEMKPVLVNPHHVKKSKELDDNNPTKNDRKDPKVIAGLVREGRYMIPYLPDGVYADLRTASNIRFQLQAELTRIQNRISRWFNIYFPEYKTVYGKPDAKSGMLILKHAPLPEDILTLGIDGVNQIWRDAKMRAVGKARAKTLIEAAEHSVGSKEGAISARMEIRMLLEDYESRNIRLQEIMTLIEELVNQIPMAEKLLEIKGVGIKTVSGFLAEVGDISRFNNPKELQKLAGLALVENSSGKHKGRTTISRRGRKRLRYLLFEVAMSLVAKNPEFRELHTYYTTRRLNPLKKMQSLMAVAAKLIRVFYVMLTKGVDYDPKKMVGDIKRPAVYLQAA

SEQ ID NO: 224648 - protein, 358 aa, unidentified
MVDKVTEAAVVGGVDTHKDLHVAAVVDQNNKVLGTQYFSTTRQGYRQMLAWMTSFGTLKRIGVECTGTYGSGLLRYFQNAGLEVLEVTAPDRMERRKRGKSDTIDAECAAHAAFSGIRTVTPKTRDGMIESLRVLKTCRKTAISARRVALQIIHSNIISAPDELREQLRNMTSMQLIRTLGSWRPDASEYRNVTNVYRISLKSLARRYLELHDEIADLDVMIAAIVDELAPELIKRNAIGYESASQLLITAGDNPQRLRSESGFAALCGVSPVPVSSGKTNRYRLNRGGDRAANSALHIIAIGRLRTDAKTKEYVARRVAEGHTKMDAIRCLKRYISREVYTLLRNQNRRINSIPITA

SEQ ID NO: 224649 - protein, 371 aa, unidentified
MSIVMGVDQHRAQITAEWIDLASGEISRARVRPADRVGVRRFLARFAGEQLEVALEATTGWRFLVEELRAVGAVVHLAEPAETAARRGNKKRAKTDRADARHHRELLLAGRLPESWIPPDHILDLRAEVRLRHTLIEQHSEWQQRIQAVLYHHGCPQRRQLMKGDGRDWLASLALPAVARQQLTVSLQMTDSLDVLLAPLTKELRDYARRQTGCRALSDSYYGIGELCAVTILAELGDCRRFQNSRDAVRYGGMDITVFQSDRRRAPGRLSRQGPPALRWALYEAAHAARRPGSPDRDYYVQAAERLGGNRACLALARKLLKRCYHTLRELGEDALAEPAAGSGAARRASSGSTSPTDGSANHERANALAA

SEQ ID NO: 224650 - protein, 338 aa, unidentified
MKITTIGIDLAKNVFQVHGVDERGKAGLKKQLKRAQVLPFFANLPPCLIGMEACASAHFWARKLQALGHTVKLMAPQYVKPYVKSNKNDAADAEAICEAVGRPNMRFVAVKTAEQQAILAVHRARQGWVKARTAQANQIRGLLGEFGVVLPQGISHIAQRLPEILEDGDNGLPGSFRQLLARLGEHLQHLDRQVGELESTIVRWHQDSEPSQRLAQIPGIGPLGASALLATVGDARTFARGRQVSAWLGMVPRQASSGGKATLLGMSKRGDSYLRTLLIHGARSVLQQVERHPERAAPWLKALLARRPKNVVAVALANKNARIAWALLAHGWDYQKPG

SEQ ID NO: 224651 - protein, 365 aa, unidentified
MWEAPVRNYRTSVGLDVHARSVVACGLDQDTGEVFQRRLCPDHREILDWLQSLPGRVAVTYEAGPTGFGLARFLLAAGVLCLVAAPSKLVRPAGDRVKTDGRDAAHLARLLHLGQIVEVAVPTVTQEAARDLVRAREDCRGDLMSARHRLSKLLLRQGIVYCGGQAWTGKHEMWLRGQRFDNPALRLAYEAALDAMVACVHRRDRLDEAITTMAADSEFTPVVARLGCLRGVSTLTAFGLAVEIGDWHRLTGRSIGAYVGLVPTESSSGATRVQGGITKTGNGHARRLLVEAAWHHRAPYRPSRDLRRRWDAATLTARDRAHAANHRLHARWAGFDQRKKRPVVANTAIARELAGWCWSLAVMPD

SEQ ID NO: 224652 - protein, 391 aa, unidentified
MSLYFVGIDISKYKHDCCIISATDQKVISKFSIKNDKVGFEELITTFNSLSSPEDIRIGFESTAHYALNLELFLENAHHSFMEVNPVLIKEYKKSTTLRRTKTDSVDCESIARWLMTVEYKPHSKGFYHAYSLKSLTRLRDRLIRQRSFYLVKITNVLDHTFPEFKPFFNERLSKTAIYLLENYGSAEKMAHMNSASYDKLRCISRGKFSIQQFLHLKELAANTVGVNNSIFDIELNSLLTLYNSLCKEIKNLEAEITRLIEEVHPHYMSIPGIGPISAAVIYAEYGDISNFSNPSQMLAFAGIEPGINDSGTESHGGRMVKHGSSQLRYVLLNACLPLIRFDLTFATYYAKKRAEGKKHRVAITHVAKKLIRVIYALERQDVDFNAQKIR

SEQ ID NO: 224653 - protein, 426 aa, unidentified
MGETEYSSIERFRQIREQIRGSKEYLIVGIDVAKEKHHAFFGTATGKTLLRRLVFENSREGFDKLLFQAEALKAQHLFKTVVFGLEPTANYHKPLGEHLIKNEHMVVLVSGNAVKRNRELLDGRWDKHDLKDAANVADLISQGKCLFYDHPGEGLRELRSLISLKRRLKKHEHGFKVRIRNHLIAQYFPELDRFVGYGEGLAIVRWCLSPQAIRQMGCREFVRMVGSRNGGDRQRRRLQLIWDKTGESIGCATGEALAFEAQLMVEQLKQTQEAIRVTDEKIKERCIKFPEYTHLLSIPGFGPDVSAKVLAAIGNPSRFESAKQVLKLAGLDLSAQRSGKGSDGAIPVLSKKGKAHLRYALYQAALIASTRNRTFITYFTNKLKGREREKGIKTKMRVKLSAKLLTIGWTLMKKKERFNPEYLKLN

SEQ ID NO: 224654 - protein, 325 aa, unidentified
MGKKYTYYGIDVSQSSLQISYQSLQGTWQETEIANQIIAISEWLQNIDLTQSWFIYEYTGNYSSRLSYALNLVEAQFSILTPSQSKGFRATLKSISKTDKQDARMLCQYGQKMQPEATALPDVSLEQKRQKYKYLATLKAEKQAFTNRLDALSYLPNADKIVQNSLQETITFFDLQIQTLSAEVFTLDEDDFKRIYDLMTQVVGIGNTTATALIIATNGFQDFDNAKQVAKFIGVAPSDRQSGTSIKQKGHISKSACAAVRTSLYMAAQNAARFNHACKELFTRLRAKGKPYKLVIIAVINKLIKQTFAVVKNKATFDNFLINAK

SEQ ID NO: 224655 - protein, 521 aa, unidentified
MSRPRCKRSTKSRKTFLLQKPNGELTPRVQKVGPEHFGIVAVDCGKVRSRYLLADFYGRAILEPTPLPHTRGDFQAAIERLRQAMSQHDLRDVVVAIERTGTYHRPVQEAFRRSGFETRLVHPFTSKQYRQPADPGNKTDDTDLPAIFRATSQGFGLSEPIWPDDYLTLHLFRRHRSDLVAKNSMLCCQIREVLHAAMPGYAECFSNLWEAPVALALARQTTSVESVRQAGLQGLQEIVAQAKIVCRRDTLHKLLAWSEQAPPGHPHSLDLRRILHSLDDDRRGKTQQILELERTLAHLVVRTPYVLLLAIPGINIVTVADLAGELGPMYFYLNTNAITGRAGLMPSRYQSAEVDHANGPLRRRGHRRLRAVLMQTADNLVACNHYFHARAELWYRAGKDARWIRVKIAKIFSRLAFAMVAGRQLFPHPCCQPRHYILGKLLAFHAEHGTNPAETRQDLEAASEHLPAPARAQEARSLQEHLDGLSKRRRGPQALANIIPLVLARLGTMTVESTNNEGAGP

SEQ ID NO: 224656 - protein, 327 aa, unidentified
MYLCIVNHDGEIMAHKNLPTEPEAFLKLIEPYREDIVVGVECVFLWYWLADLCADEGIPFILGHALYMKAIHGGKAKNDKVDSEKISRMSRGGMFPMAYVYPRKMRADRDLLRRRCFFVRKRAELLAHIQNTNSQYNLKPIGRRLDRKKNREGVGEHFPLPGVRKSVEADIQLLDYYDIVIKDLENYIKRMTKTHNPHAYYLLQSVDGIGPILAMTIIYEIEDIKRFPRVQNFSSYARLVKCSRGSAGKIHGFGGGKVGNVHLKWAFSAATALLLRGNPRGQQYLARLEKKHGKGKALSIIGARLGRAVYFMLQRGEPFDREKFYAS

SEQ ID NO: 224657 - protein, 391 aa, unidentified
MRFAACRTRRTGRRGLIGVWPPASTEACPPTGPYDLSKGEVRVMMVVLGTDAHKRTHTVVAAGEAGADLGSITVAATPEGHLRAVRWAAQWETRRWAVEDCRHLSRRFEADLLAAGETVVRVPPKMMAGTRRSARTRGKSDPIDALAVARAALREPDLPVARLDGPSREVKLLVDYREALVRERTAIQCRLRWRLHELEPGYDPPPSSLNRYCILDEIQTLLETHDGMVADLARREVIRIREITREANQLEKEIGSKVGEIAPSLLQLPGCGGLTAAKLVGETADITRFRSRDAYAMFAGTAPIPVWSGNNTRFRLNRGGNRQTNAAIHRIAVTQIRIHPPAQELIARHIANGKTKREALRILKRRLTDVVYRTMNQDTINPAQTVPAVAA

SEQ ID NO: 224658 - protein, 312 aa, unidentified
MVCAGIDTGKRKLDAALKGGAERLQVNNAADGHAALARWLRRRRVKRVGIEASGGYEQDVVAELRRKGFVVVVFQPVQVRAYAMFHLQRAKNDKIDAALIAMCTADAKKIHAPPDPRLAPFAQDLTMLDQITDDIAGLKNRRESCRDRRIRQLWKEQIAQRKKLLKTELNRLVAAIRQYPDLAERLDLINSVDGIGLPTAVAILVRMPEIGRITREQAAALAGLAPYDDDSSDYVGVRHIAGGRERLRGALYCAALPASFRWNRQLIDLYRRLIAAGKGHKRALVACARKLLIFANTVVARGTPWVSRASPA

SEQ ID NO: 224659 - protein, 420 aa, unidentified
MLEQTQDQQEVIERIAALDIGKATLVCCARVPGKGARRAQEVTTYSTMTRSLQTMADRLLELGVTRVVMEATSDYWKPAFYLLEAHGFEVWLCNAKDVKHLPGRPKTDVLDAVWLCKIAERQMIRPSFVPPPPIRRLRDLTRYRVALVSDRTGEKNRVEKLLEDAQIKLSVVASDIFGVSGRDMMDQLIAGQRDPKVLAQLARRRMRSKIGQLEEAFVGHFTDHHAFLLKRMLARIDALSADITAMEVRIEEQIAPFAKAVERLDEIPGVGRTAAHVIIAEIGLDMSRFPTAGHLASWAKFAPGVKESAGRKKGTGATGHGDPYLARVLGEAAVSAGKTDTFLGERYRRIARRRGKKKAIVAVGRSILVIVWHLLSDPDAQFHDLGADFYDNRLGPERIKRNHVRQLEALGYTVTLEPAA

SEQ ID NO: 224660 - protein, 396 aa, unidentified
MTTIGIDIGGRKHAVARCRTGETRADREILRVSQDRAGFRELDAWLDGQADPVTLVTMESSGHYWMPLASHLRRQGVPVALVDPLAAKYFAKSRLGRTKSDPADARSLAEMAMRDAPTVRDPFAGVELRQAARFAMTLATEQARICQQLHRLVELGFPELLDVFEDPTCLTARAVLRLAPTAAIARCRRSRTLADANKGPGQRRLGDAKAQRLHDLAADSVAVPELQDEVAFEVGLLLERYDLLERQVEHAEARVATLLDGELARRLQTIPGVGPATCAVLIAEIGDIARFETFDQLLAYAGVHPAERSSGRKGADPETAWRMSKAGNAHLRAAAYLIAVAGVTHNPVIAAHYRRKRDAGKSKMNALGHCMRKALSLVWGVWRNGTDFDPNWHKGA

SEQ ID NO: 224661 - protein, 410 aa, unidentified
MIYCGIDWAERTHDVALVDDAGQLLAKRHITDDTAGYKILLNLLAEYGDTAEHPIPVAIETSRGLLVAVLRTGKRQVFAINPMAAARYRDRHSVSRKKSDPGDALVLANILRTDMHAHRPLPSDSDLARAVAVLARAQQDAVWNRQQTANQLRSLLREYYPAALDAFAMWTNGLCRPETHELLRLAPTPSRAARLTRTQLQAALKRAGRKRGIAADADRLREVFRADSAHQPPLVEEALGKQMLALVLQLEAACTASDQLAEAVEDAFPKHPDAEIVLSFPGLGVQLGARVLAEIGDDRNRFADARGLKAYAGSSPITRASGKKSAITRRWVKNDRLNHAGYLWAFSAITASPGAKTHYRRRRDDHGDWHAAAQRNLFNRMIGQLYHCLQHGQRFDEDVAFPTTAETAAA

SEQ ID NO: 224662 - protein, 401 aa, unidentified
MQEFNAAEHRIETAAALAAVGAGGLAGGHAAYIGLDVHKETIAIAVAEPGRGEPSYRGEIANTPKKVEKLIAKLSEAYDGGLLLFCYEAGPCGYVLYRQILASGHDCQVVAPSKIPKTPGERIKTDRRDALKLARLLRSGDLTAVWVPDQEQEMMRDLSRARDDMKSQERKARQQLNAFLLRHGHHWPRGKSRWTPAHENWLAGLKMDHPWQQVVLQEYIDAERAAGERVAQLSDHLMRALPEWSLAPVVDALIALRGVDKLAAIVLLAELGDISRFESPRQLMGFLGLVPSEHSSGGRRRQGAITLTGNGHARRMLVESAWSYRFPARQTKHLKGKARNASPEAKKIAWKAQTRLCGRYRTLTRAGKNTKLVCVAIARELAGFIWDIVRQEMPRLALQEG

SEQ ID NO: 224663 - protein, 331 aa, unidentified
MFPVGIDVSKNTLDLCMLYDGIKGRIKTRNIQNNRHSVENILRWLRLQHCSPEDVHVVMEATGVYHERLATELHDAGFQVSLANPHRSREFARGMGIMTKTDKVDAYMLACYAFLKKPHRWEPPAPEIRYLGALLRRRDVLLGDALREENRLEKYLSTDTPADIISSCMHMAQLLREEVSNIERQIKAHIKASPALRRDYTLLTSIKSVGPQLGMHMLVVLRSHNFVSAEQAAAFLGVVPIEKRSGTSVRRRPRMSKIGPPQLRAKLYMSALCGKIYNKRMRNIYDEMCLRGKPKMVAIGALMRKLVHWCYGVLKTGTVFNDEDLKPVLST

SEQ ID NO: 224664 - protein, 322 aa, unidentified
MSVSVLGIDIAKQKFDVALLVDGKTKHKSCKNSVEGFEMLKLWLEKQGTQKVHACLEATGNYGEDLAIYLHEAGHIVSIVNPARIKGFGQSELIRTKTDKIDAALIARFCVAMTPEPWIPPAPEIRSLRALVRRVDSLVDMRSQEKNRISTAHESVIPLIREHIAYLDKEIEKIRRQIADLIDQNPDLKQKKDLLDSIPGLGKATIPHLLAELNDLEKFRHVREVVAFIGLAPKETLSGSSIKGKPRLCKIGHVRLRKALYMPALVSIQCNPVMIAFYNRLKDKGKNGKVIVCAIMRKLVHVIFGVLKSGKKYDPDYKPAFT

SEQ ID NO: 224665 - protein, 421 aa, unidentified
MSTPTCPMFTAQVGLDWADAKHDFCLQPGGGGSREFGRFLHQPDQIDAWVQGLKARFGGTIAVALELAKGPIIYALQKYDFIVLFPVDPSLLAKYRVAFKPSRAKDDPTDAELALELMLRYPEHCQPLHPQSAAMRTLSYLVQQRRMLVDDRKRTVNRLCYALKQYFPQALDWFDHRDTLLFCDFLTRWPTLQQVKRARAATLERFFHDHNVRREPLVARRVEGIKSAIPLTEDVAVIQSFQLLAITLVDQLRVLLQAITRFDEAIALVAPKLPDYKLFSTLPGSGPILAPRLLTAFGEQRERFQNAGQLQRYSGVAPVTQRSGKKSWVHWRWQCPTFVRQTFVEWAAQTINKSFWAGAFYQQQRAKGSPHQVAVRALAFKWIRILYRCWVTHTPYDESRYLKALQLRGSPLLAGLSAKTA

SEQ ID NO: 224666 - protein, 440 aa, unidentified
MIELFNPFSAPESYRACLGIDWGEQKNCIHLLAAEAGEIERFEIDADPASMGAFVRGLRQRFGAGRILAVSEQSKGALVNLLVDVEFIDLLAVNPKAAAKYRLSLHPGGSKSDPIDANALLRMLFTHRDHMSRMCRGDEPSRRLDGLSRHRRNLVAQRVQVALRLQSLLRRYYPQALGMLGAGEIWDPISLAFLRRWPCFSQLARTREQTLRQFYYTQGSRSARAIGRRLQHWRSSAALSSDTLLEQLGVIELSDDLEQLRVLNKQIHKLDTLIRNAYAQHPDKVIFSSFPAAGPAMAPRLAAVFGTDRDRFESCAQLQAYVGIAPIKIISGTKLNRTFMRRFCPKFLKQTFHEWAGLSIQFCPWAKACYRMLLDRGKGTAAAKRAIAFKWIRIMYRCWKNRTPYDENAYVQALIKRRSPIVEWMKKLGYLDEENTILFA

SEQ ID NO: 224667 - protein, 408 aa, unidentified
MNENATNEPVALVAIDWSDQKHDIALLAAGAERAEYSQVLHRPKDLAEWINALRQRFGGKKVAVAIEQKRGALIHALMGYEFLQLYLVNPATLASLRKAFKQSGAKSDLLDRDLLLELIQKHRDRLTHWEPDDVPTRHLALLVQDRREAVNECTRLGEQLLDTLKNYFPAMIDLAGSNLTTQLACDLILRWPDLAALQGAKVQTLRRFFYAHNFRRPKILEKRLEALQAALPLCEDVAIIGAGRLKAIRLARAILALLPAIKQYDQQIAELFKAHRDAAIFASLPGAGPALAPRLLAVFGSRRDRWHHSLDVATYTGIAPVIEQSGKRSIVHWRWACPKFVRQTLHEFARCSLRSCPWANRFYQTLRARGKKHHGALRALAFKWIRILFRCWQNRCPYNPAKYAPANL

SEQ ID NO: 224668 - protein, 358 aa, unidentified
MRDYISFDSHKHYTLCEIEDRRTGRARQFRIEHGPGVIREFLCRHAEPGTPVAVEAIGNWYWIIDEIEQAGMRPVLVHPRKAKLMMGMINKTDKLDVHGLNRLQRNGTLPTVWVPPGGLRDLRELTRTRMVLVSQRTRLKNRITSAPAKYGLQLVGASDPYGKRRRRQLESRLARLPEQTRAMNALLLEQLDSLDVHIDATERRIRRLVEQTPEMLLLKTLPGIGNILAAAVCLEIGDIDRFASAERLASYAGTTPRVHSSGGKTRYGRLRPDVNRYLRWAFVEAANSVAVHHKRRPERHVSQLYLRIRQRRGHAKAVGAVARHLAEATYHVWTRQEPYRDPALKKGLSQGGESADAS

SEQ ID NO: 224669 - protein, 310 aa, unidentified
MSDVFIGIDIAKDQYDMYVHPSAEHDTFRKSGMDDVISRLRDLNPELIVMEATGGLEIPVAAGLAAAALPVAVVNPRQVRDFARAMGILAKTDAIDARVLALFAEKVQPKIRPLPDARMRALRELVTRRQQLVEMRTMESNRRRMLLSERASASIKLLLDTIETEIRKLDSDIKKHITNSPVWQEKADLLKSVPGIGDTTAPLLVVALPELGTLNRRQIASLVGLAPMNRDSGTLRGHRTIIGGRRMIRTALYMPTLSAIRFNPLIRRFHDRLRAAGKPPKVAITACMRKLLILLNAIIRDSKLWTPNIT

SEQ ID NO: 224670 - protein, 350 aa, unidentified
MMIIGCDYHPSFQQIAFVDTETGELQERRLGHREEAEKFYRDLGAQGVKIRVGMEASGHARWFERVLAELQFELWIGDAAAINAKRVRKQKTDRQDAQLILRLMLKDDFPQVWVPSWENRDLRQLLWHRHRMVQARTRIMNQLQAVALNEGLRCKKRLWRDAGREQLETFKLAPWASRRRRDLLEVLDRLTPTIAELTQAIEQEVEKCPEAQRLQTHPGVGALTALAFVLILGRAERFQCGKQIACYLGLVPLEDSSGQRRRLGHITKQGNSLLRFLLVEAAQVTVRSDPQWRSKYCHMALRRGRKIAKVAMARRLAVRLYWMMRKEWDYEQLRKFGSHAGKPGTGHGVK

SEQ ID NO: 224671 - protein, 315 aa, unidentified
MKEFPLFVGIDVSKDHLDVAVRPTGEAWQVSYDSQGISDLVGRLRELAPQLVVLEATGGMELAVAGELAAANLPVVVANPRHVRDFARASGKLAKTDSLDAQVLAHFAEALQPEPRALPDADTQELGALVARRRQLVEMITAEKNRIRTATRRIRPKVQQHIRWLEENLEDLDQDLGDFIRSSPMWKDKEQLLRSTPGVGPVLSMTLLSDLPELGNLNRGEIAALVGVAPFNRDSGNLRGKRKVWGGRSQVRAALYMAALVATRYNPVLRAFYQRLCAAGKPKKVAITACMRKLLTILNVMVRDNCHWNPIVQNS

SEQ ID NO: 224672 - protein, 327 aa, unidentified
MKSIYLGIDISKKTLDICLVDQKSEAFFKIENKIKAIKKLFKQITTLDAEIFIAMENTGLYNYNLYEVLKDYSFNVYVIDPKHIKRSIGLVRGKNDKVDAKRIATFIERNYQDFDCWKPTSEAVQNIKILMSQRRHKVKTRQAIKQQNKELKTVKRTKIISSSMKINLKEIEQINKHIAAIEKLIKEEIANDSVLEKDIERIRTIPGIGSVTAWTLAVKTDGFVRLTNPRKLACFAGVVPFEQQSGTSLKTKPRVSKMADMQLKSVLQMAAMRAVRMDNDLKHFYLRKVEEGKNKMSVLNAVRNKLIHIAMALIKNKSFYENRLVLS

SEQ ID NO: 224673 - protein, 333 aa, unidentified
MEHWIGIDVSKATLDFALRGKRGELLEHVCVANERKAVLGLFKRWKNLFKLDMTRCLLCLEHTGHYSRMLLELVVLQRWAAWVANPLDIQQSLGMQRGKRDKVDAQRIAEYARLFHHKARLFHAGYLKLERLKQLLARREFLVRDRGRNKAHVTDLNRYADRALQAEFDRMDQQVQRLLDKQIARVDELITAEVRSNPEIAKQHELLRSVPGVGEQLACHLLAVTDGFQRYNDPKALACHAGCAPFEYSSGSSVRGRNRVSHRANKRLKCLLHMGAMRAVRMAGELQEYYQRKLAEGKKPLLVLNAVRNKLIHRVCAVLRRNEPYTTNHLQLS

SEQ ID NO: 224674 - protein, 476 aa, unidentified
MVVPNEEPKKPTKPKRPARPRKSRERSLPVPVPASAAALHVINPDAAGIDVHSDMHMVCVPADRDANPVRQFGANTADLQEIVAWLKQCRVRTIALESTGVYWIALFELLEAEGFEVYLVEPGQLSRCGARPKTDVLDAQWIQRLHSYGLLRASFRPPDSVLALRAYWRQRQMQVRYAASHAQHMQKAMEQINVKLTEVVSDITGVTGMSIIGAILEGQRDPVKLAQLRDKRCQSSEDQIALALEGTWRPEHLFELRQAYELYQFHHRQITECDQQIEAELANFPNRAGAKTHTVKPRKRGRKSNDVRFEATGPLFQALGVDLTLIEGIDVGTALVILGEIGVDVSRFPTEKHFASWLRLCPPQDESNQTKKRRGHRKGTHRVTIALRMCAQSLGRTMTPMGLFYRRIRSRIGGRGAVKATAHKLACLVYRMLKYGQEYVTQSMEEYEAKVKANMLKALKRKAAALGFQLSPLPTQ

SEQ ID NO: 224675 - protein, 414 aa, unidentified
MLKIVYPICCGMDVHKSFVVACIATTNERGVTTYKSKRFSTFTGDLRRCAAWLAENNCKDVCMESTGKYWIPLYNILERTCNIVLAHPKYVKAIRGKKTDKRDAKWIADIFKHDLVTGSFIPPADIRQLRDLVRYRWKLTNFTTGEKNRAQNCLTVSNIKLDDVFSDVFGKTASAITTRILENPAEKITDVSGFRTKGMKATNEQVLAAVDGEMCEEQAEKLRIIRSHMDSLQLCKLDLESLILATAEKYLPQLGLVMTVPGIQSFTAIGIISEIGVDMSVFPTSKHLCSWAGLTPQNNESAGKKKTTRISRAGAYIKPLLVQCALNAVRAKKFPEVRNRYLALKKRRGHKKAIIAIARMLLTAIYNILKKNESYNPELYRQTDRPPAHREVSVAEAIFILQRQGYLVAAPPTP

SEQ ID NO: 224676 - protein, 426 aa, unidentified
MLNSQINKIQAITSDTLIVGIDIAKNIQWAQFINFRGIEVSKHICFENNYSGFNSIMEKIEEIKSKNNFLSVIVGMEPTGHYWKTFATFLHNNGIKAVQVNPYHTKKAKELDDNSQTKSDKKDALVIAKLIKDGRYSAIYFPEGEYANLRNLSNTRLEVSRLLNICKNRIHACVDEYFPEFETVFKSFIKGKVALHILKRIPFPTDILGLTLEDIISVIREVAKKSVGKRKAEELIRAAKVSIGVKVGLEGARIRLNNLLEEYELYHNQLEKIEKEMAQKLEKTGYKDILTSIPGIGIISAASFIGEIGDPKRFSNPQQIIRLAGYNLVEDSSGKHKSKTMISKRGRKILRTVLYKISLIVVCKNQEIKLLYKYLITRKENPLKKKQALIVISGKMVKIMYSLIKKEEVYDKEKVLGIYRKQQIVA

SEQ ID NO: 224677 - protein, 347 aa, unidentified
MNSMNYVGLDIHKKSISCCVRQADGTIIQEGTIPATRDALDNWMKQLPQPWMAGMEATLFTGWIYDHLVSAGAMVKVAHPAMLQAIAAGKKKNDRVDARKIADLLRCDYFPECHMAPREIRDRRRVLRYRNLLVRQAVQMKNKVSGLLMEAGVPYNQQKVHQKKYFAELLQKQKKEMPPSMPELLRLSRSTVEALTGMQRQLIRTPESDALLAACVERLASIPGVGRVVALTWALEMVDIRRFASVKKAVSYCGLCGAEKSSGGKTERTPISKQRNKHLQTTLIEAAKLAPRWSAELAQVYEREKQRGNRNRATLAVARKLVAYLLAVDREERPFDTQRIRVAGNAA

SEQ ID NO: 224678 - protein, 422 aa, unidentified
MMDKERRWFVGIDWGSQEHVVSLYDEDGNKIGQRKFPHGGTGLTDMIAWLLKASGGKPGEIHVALETPHGPIVEALLERGFVVYSINPKQLDRFRDRFTVAGAKDDSRDADVLADSLRTDMRAFRKLSVADPVIVELREWSRIDEELKVEHVRLTNRLKHQLWRYYPQMLELADDVGANWFLDLFEAAPTPEKAANVREKTIARILKSHRIRRFDAAYVLAELRKRALTVAPGTIEAAIAHIRSLIERIRIINGQLADAQRQLDRLCKKLCEPVADENGETTQGQKNEQPDAAILDSLPGVARTVLATLLAEAPDPLQHRDYHALRALCGSAPVTRRSGKSCMVVRRYACNRRLTNAAYHWAQNAIQRDPTSRAKYDALRARGHGHARALRSVIDRLLGVACAMLNNGTLFDPEFASKRAAA

SEQ ID NO: 224679 - protein, 351 aa, unidentified
MIIIGVDYHPSLQQIAFVDKETGECNEQQLNHSEGEAEKFYRDLKLRGANVRVGMEATGHARWFERLLAELGFELWIGDPAEIKTRRVRKQKTDRKDAELLLKLMLEDRFPRIWVPSPENRDLRQLLWHRHRLVQMRTRIMNQLQALAMNEGMRWKMKLWSERRRAEFEKLPLAFWARRRRQELLELLDRMNPTIKELTAAVEQEAKKRPEVLRLMTHPGVGPLTGLAYVLIIGTPTRFHCGKQIGSYLGMIPSEDSSAGKQRLGHISKQGNSLLRFLLVEAGQAAVRHDPEWRRRYLHLALRRESRIAKVAMARKLGVRLYWMWRKEWSYQQVLQFGSHAGQFAAAHGVK

SEQ ID NO: 224680 - protein, 402 aa, unidentified
MYYLGIDVARLSCECAVIGNNGEGVCKPFGISTNKNEYSRLTDKLKKLNIAKNELICGLEATGNLWENLYEYLTTKGYKVMVLNPYQTNKYHQAMLKKAKTDAIDAYVIAGLLRSGHARESHIPDDTIQSLRDLVRLRASYQADIKTYKRKAYSLLNLVFPEYLMCVKDPFAIVSTEILINYPTAFDFKALKPKHVLKIARHYQGNNFDEALASKIISAAKDSVYSGKAKSARGISLKSLLMQIKSFKEQIDMLTSEIDDILRPKDPSSTGLGDNILSIPGVGPNTIASILSEVGNITRFSNQREFIGYIGLYPEIKESGESAKKPILTKRGSPLLKHALYLAAVASLKHNPIMRSVYNKKKSQGKSSKQALIVVARKLACVIYSMLKSGTQYCESRVLVAA

SEQ ID NO: 224681 - protein, 325 aa, unidentified
MTQAYLGIDIAKKSFECSLRMHGKVMHRTFGNDTEGLKEMDKWLGKHKVEQLHAGMEATNCYWEAVAQHLYKQGYQVSVVNPGRIHDYARSKLMRNKTDKLDADVISDFCATQQPLLWTPPPAEVSELQALVRHLETIKAMRNQESNRLGTALHSDQVRLSIQKHVTYLDQNITQVEDLIQEHIQHHPQMKHNCDLLKSIPGISDTTAAKLLSENIQAFTSTRELVAYAGLNPQQRESGTSLRGRPQLSKVGRAGLRRALYFPAITAMRYNPLISRFCDRLAQKGKVKMVQIGAAMRKLLCLALGVLKSQVPFDPNFSLSTQASP

SEQ ID NO: 224682 - protein, 223 aa, unidentified
MNYNTVYVGMDVHKETFSPCCYTNEKEQAEYSQKVDAHYSKVLNYLEAMRFRYGDDVMFICGYEAGCLGFALYHQLTSHNVKCIILAPTTMSKPTGKKKVKTDKRDAALIARCLAHHDYSPVHIPTEQDEQLTDKLERLDQRIEELASKEDYQENVNYLSCFLGVKTQTALSTLVEVGDFKRFASAQQFASYLGLTPGEDSSGEDLNRLGITKAGNSHIRNFC

SEQ ID NO: 224683 - protein, 343 aa, unidentified
MQIHSVGIDLGKTTFHLVALSAAGKVLLRKKFTQKQLITFTANLQCSLIGMEACAGAHFLSRTLREQGHDVKLIPAQFVRPFVKSNKNDFLDAEAIAEAVSRQNMRFVPIKTDDQLDLQAIHRVRDRLVARRTSVINQLRAFLLERGMTFAKTPFKLKVAMPDILENAEANLTPRIRNLVSLLWSEWKDLEQQIVGLNEEIEQIASSDPACQRLRQIPGIGPLVATAIVAAIGNGAAFHKGREFSSWLGLVPRQHSTGGKARLFGISKRGNRYLRKLLVHGARSAVLRVKRERSPFGPWLDTLETRAPINVVVTAAANKLARIAWAVLSSGQDYRAAVNSVAA

SEQ ID NO: 224684 - protein, 340 aa, unidentified
MSKDITVCAGIDIGKHKLDIAIDGSAERLQVDNNSEGRRSLSSWLRQRRVERIGLEASGGYEQAVVVSLRADGFVVIVFQPAQVRAYAKFVLQHAKNDAIDAVLIARCTAAATDIREPPDARLAFLAQHLTMIEQLTEDVGQLKTRREASREQRIREFWKREINRLKVLLNSELKQLVAVIREHRDLAHRLDLIASVDGVGLRTAVAILVRMPEIGRVTREQAGAIAGLAPYDDDSGLRRGSRHIKGGRQRLRQSLYAAALPAVFYWNPQLKVFYKRLLAAGKSHRLALVACARKLLIFVNTVVARGTPLDAFSSHHIMVAHHEAGRERECTKLIVNGFR

SEQ ID NO: 224685 - protein, 401 aa, unidentified
MKKFNPEQHRIETASALEIVRTAENVDVYAAYVGLDVHKETIAVAVAEPGREEPIYRGEIANKPKSVQKLLAKVSADYDGGLLLFCYEAGPCGYVLYRQILASGHDCQVVAPSRIPKAPGERIKNDRRDALKLARLLRGGDLTAVWVPDQEQERMRDLSRARDDMKGQERKARQQLNAFLLRHGYHWPRGKSRWTPAHENWLAGLKMEHPWQQVVLEEYIAAERAAGERVAQLNDHLMRALPEWSLAPVVDSLIALRGVDKLAAIVLLAELGDISRFQSPRQLMAFLGLVPSEHSTGTRRRQGGITLTGNAHARRMLVESAWSYRFPARQTKHLKGKARNASPEAKQIAWKAQTRLCGRYRTLTRAGKNTKLVCVAIARELAGFIWDIVRHEMPRRGAQAI

SEQ ID NO: 224686 - protein, 351 aa, unidentified
MKILAMDLGKSNTVICFYDSESGRHRFGKVKTTPQLIHDLLAEQLPDRVVFEISSSAGWVYDICSVLKLDTQVANPNTAAWRWKNVKNKNDKKDALKLAQLSAMNQLPVVHIPKPQVRQKRALIQYRQTLVARVIQIKNSIRSILDKQGYTMAMGKSGWTKKSLEHLNRLSLPFDKCDSYNLWRGQLYIELQMFDSTQKLLSDVTVNLDKLAESDRQIQLLQTAGGVGPRLSEAIVAFIDEPQRFTGGKQVGSYAGLTPRQYQSGSMNRQGKISGQGNKLLRSLLVEVSWLGLRYNKWMQQTYQRILRGSASRKKIAITAVARKLLVRCWAMLRDGTAWHDEPLDVGKMSV

SEQ ID NO: 224687 - protein, 415 aa, unidentified
MDVQMKHACGLDVHQATVVACLLSVLDSGKVKKQIRTFGTTTRELLSLRDWLLAEGCRRVAMESTGVYWKPVYTILEGPLDLTVANAQQIKNVPGRKTDVKDAEWIADLLLHGLLKPSFVPPPPIRELRDLTRYRRKLADSQSAECNRLLKVLETANIKLASVASDAFGVSGMEMLDALAEGTATPAEMAELARGRLRGKIPQLEPALDGRMEEYHRYLLKLQLRRLRGLDQDLAELDARIQEKLKPYEKQVELLREIPGVDWILAAVIVAELGVDMKVFGSSGRVAVWAGVCPGNHESAGKRRNVRVTKGNVHLKTALVEAAHAAASTKGTYLRDKYFRLKARRGAKRAVVAIAHKILVAIYHMLSGDVSYHELGDLYLDKLNKHHLTRNLVRRLERLGYCVTLQQQVVQQPAA

SEQ ID NO: 224688 - protein, 348 aa, unidentified
MTKQLMTGIDLHGNNLVIGIVDQEGRRLQHQKLACDLKLVDKYLSPLKKQIKRIAVESTYNWYWLVDGLQALNYPVVLANPAEIKQYSGIKHADDKNDAFFLAELLRLNILPTGYIYDAQLRPVRDLLRRRMGLVHQRTALMLSFKSLYTRTTGQDLSLSRLKGLEAAQAKQLYEHPANQLIATLQKEHIDQLDQSIERIEKTVLASARELPCYRPLQTLPGIGRILGMTMTMEIGEKERFKSAGDFASYCRTVASKRMSNGKKKGDNNQKCGNKYLAWAFVEAANFAKRYDDPCRKWFDRKAAKTGTVIATKALACKLAKAAWHVINDNSTYDPKRMFPELTQKPRL

SEQ ID NO: 224689 - protein, 412 aa, unidentified
MQVIIERCCGLDVHQEAVVACVLIGAPGERPRKEIRTFRTMTRDLEALRDWLQELGVTQVGMESTGVYWRPVYAVLEGHFDLIVGNARHIRNVPGRKTDVKDAEWIADLVRHGLIAKSFVPPAPQRELRELLRYRRKLVESQAAERNRLLKLLETANIKLASVASDVFGVSGRAMLKALIEGSASPEAMADLARGQLRRKRDDLVLALEGRVEEHHRFLLATQLRRLEAAEHDIAALDNRIKAKLAPYCVQHALLMQIPGVDWVVAAVLIAEIGVDMSVFLSVYHLAAWAGVCPGNHESAGKQKSGRARKGNVHLRTMLVGAAISAARTKGSYLKDKFHRLKARRGAMRAALAIAHKILVAAYHMLAKGLPYRELGEAYLDQIAQTRTVANLKRRLERLGYHVTLEPKPAPA

SEQ ID NO: 224690 - protein, 379 aa, unidentified
MYSLWVGIDVSKEGFSVAGIHSGGKEAFSKAYAMDSTGFEELLKTVRAHCEEDSEVLMAMESTGCYHINLFSFLTSQGIRTMVVNPLLIANYAKLSLRKTKTDKKDAMTIARFLLDHHKEISQLSISQDVQDLRDLSRERESLSHLVSATKVEIKRVLRTTFPELETIGDIYTGVMLRLIQEYPSARLVKAAKRKGIAKLLKGPYLGNKLTYTAEDILGAAKTSIATVSPGKEIILRGKIATLVHLQARLEEITKLLTDLCKATRVDDLKILRSIKGVGPKTAAPFLAEMGMVNNFVSHKKLIAFVGMDPSVSQSGQFVGMSKLSKRGNRHLRRAIYLMTASVVSKNTWFKAYFQKRKAEGLAPQKALFATAHKLYMAS

SEQ ID NO: 224691 - protein, 350 aa, unidentified
MSIVAETVEHVVGIDTHARTHTYCLVHTRTGAVVDTATFPTSKSGNARAISWIHRRSPGSVLAAVEGTSSYGAGITAALLEQGFDVAEVRPAARSAHAHAGKSDLLDAEAAARSAIGRDYNTLARPRQTGARTALRVLLASRSIIDQQRTANRNALTALLRSVDLDVDARKPLTDAQIRVIAAWRIGRGATAAAASGIARREARRLAVTVLEQTELLKDNHRQLHQLTEQLAPGLQDLPGLGPVTAAIIVCAYSHHGRVRSEAAFAALGGIAPLPASSGNTSRHRLSRSGDRQLNRAFDIAVRTRMSYDPATRAYITRRRTEGRTNREIRRCLKRYVCRSVFRQLQASMA

SEQ ID NO: 224692 - protein, 478 aa, unidentified
MFWLVGSFGLYLYKPLGYVSAIWGNGCLPERNYSMQNKQVVELLNSSSYLSVGFDVGADFTWMSIALPNQTIFGKPLKIIHSDPQSRDLAVQKIKEAQEKWSLESRCFLESTGIYHIPLLCFLRDKGFDCNTINPIITKSSTNMNVRKLHNDRYDSKKIALVGLKADLKVSILPNDNVIDLRNLVRDYYYFKDLQSAIVLKLTAELKISFPEYIPVFSKITTKSALKILESYPLAKDILNAPKDDVVEIIHKTARFGEKYALKKYDCLISAANAALTFGRALSSNAVRIRTYVKIYREYQDHLDEIMSAIKDCVESMKSSDRIIYDRIQLLQSLRGVGFLSAVVLMAEMGSFDLFSSPKKLFAYFGADPGVNDSGKFKGDKVHMSKRGSNLARRILHMIAINNLIVKKGTKAPVNPVIYEYYTLKCQSKKKNVAIGAVMHKICNIIYAMLRDNRPYELITPEEHRKRYAEQNNIRSAV

SEQ ID NO: 224693 - protein, 343 aa, unidentified
MSIVALRIVFVGLDYHASSVQVCVMDSDGKMLVNRKCANDWRAVMAAVHERCGKEVQVQAAIESCCGAADLADELISRGWTVQLAHPGYVARMKHNPDKTDYSDARMLADLQSHGFLPRVWLAPEEVRELRRLVHHRQTLTKERKNLKLRIGATLREARQKVPGNANPWTQAWLAWLESSAELSPNARYITSRRLRRLEALQEELRQVDKRLERQTREDPLVQKLLRIKGIGLVTATTLRAEIGRFDRFRTGKQLARFCGLSPRNASSGQRQADAGLIKAGNNEMRALLMETAHRLIRCDERWTALAARLSGRGKAKSLIVAAVANRWVRWLYHQAQPSCLAA

SEQ ID NO: 224694 - protein, 366 aa, unidentified
MKKISTVEFERIQIFKENQLTIGLDLGDRTSHYCILNEAGEVILESKLPTTPKGIEEVFSRISRNRIALETGTHSPWVSRQLTQVGHEVIVAHARNVRLIGESSRKDDQLDARTLARLARIDPALLSPVRHRSAKAQIHLTVIRARAALVSARTALVNAARGLTKSYGQRLRKCGTEQMNREIAKGLSHELRDVLNPLLREIESLTERIAEYDGRIEQIAKEVYPQVAVLKQVKGVGPLIALTFVLTLDDPSRFRRSRDVGCFVGLRPGRRNSGMSEPQLHISKEGDRYLRTLLVQGAHYILGPFGQDSDLRRWGLKLAERGGKNAKKRAVVAVARKLAVLLHKLWVSGEVYEPLRNNSKAMAAVA

SEQ ID NO: 224695 - protein, 353 aa, unidentified
MEKKKGRVVGLDVHPDSFAGAVVEATDPAGARVLSSSTRVELERLEQWALRHTREEDTLVLEASGNAFSVAMRLRAIGRKAEVLDSHRAGKVGKVYCANDRVDAVKIARIYLSALSPIVWQPDEKTLERREIFSAYQAVVKESTRAKQQLRSMLNEHCVRLEKGFRLCHPNALTRLLALREWTPARRMLLQQLHDTLVGARTRRTLLRRHMAQEIVAEEALLRLTRLCGINLITLYGVAAAVGDVRRFPHSKKLVAYLGLNPSVSQSGNFEGSGATSKLRPCAWSCLRTWTSCSRWRCRARARSSSSPGTRTTAKASRLPWTKRSSFRQSALASSPSVFTRLFCSSNFCGHTT

SEQ ID NO: 224696 - protein, 347 aa, unidentified
MSTHGPSVLGIDTHKHTHVAVVLDGLGRHDGSLQFPATDAGAAQLLTWSRDHGTPLTAGVEGTGSYGYQLTRSMQAAGITVVEVNRPDRANRRRKGKSDPVDAEAAARAVLAGQATAVPKNREGAVEALRALTIARNSAVKATTTASNQIKALLVCSDQDLRDQMRVQSLLQLATRASQLTPSSGLQAALGSLGRRWLQLHDEVLELDKLIRDIVRRTVPKLIERPGIGIHSAAQLLITAGGNPERLHSDAAFAALCGASPVQASSGQRQRHRLSRGGDRAANNALWTIANNRMIHDVRTREFAERRRQNGDSRKDTLRVLKRYIARETFAIIRAALRSEQALTEAA

SEQ ID NO: 224697 - protein, 326 aa, unidentified
MQGKETSEQETAVKSNAGIDISKNWLDVHVVPAGATLRVANTRDGIRKLKRWLRQFELGRVVIEATGKWHREVRRSLHASAIAVAVVDPFRARMFAKACGVLAKTDRVDARVLAQFAAVMAPAVRAPAPQVLEELAELVTARASAVAEETALKNQLSAAIHPFLKRQLGRRIDRIGKDIAALEREILRCIHADPGLARRYEVLTSITGVGPVVATTLIACLAELGTCSRRQISMLAGLAPVADESGERQGVRVVWGGRPNVRRVLYLAAITAARFNADMKAFFDRLTSDGKAAKLAIIAVARKLVVLANALIAEDRIWQSHSPKHA

SEQ ID NO: 224698 - protein, 344 aa, unidentified
MTYYTGIDVSLRSVSICVVDDKGEVCLEAKVAAEINAIVDRLRRFSSDVKSVGFEAGTLTQYLTYGLQAAGFEVICLEARQVSVTLSAMRNKTDRNDARGLAQILRTGWYSRVHVKSLHSHQVRALLASRKAILKKCVDLENELRGLLKVFGIRLPSRVGHGSFDAELRETVSSDEMLACALVPLLDARTVLYKTYLKLDNAVKGLVRVDPICRRLMSIPGVGPVTALTFKAAVDDPSRFKSSRTVAAHFGLTPRRFQSGEVDNSGHISRAGDADVRSALYIAAHSLLTRNAQWSTLKAWGVRLAKTRGHRRAVIAVARKLAVVLHRMWIDGSEFRWGTVATPA

SEQ ID NO: 224699 - protein, 352 aa, unidentified
MKIIGCDFHPSYQQIAMVDTETGELWEGRLEHEQGEARRFYQALQGQTVRVGIEAVGNSQWFEQMLVEMGHELWIGDAAQIRRLVVRLQKTDRRDAKHILDLLLDGRFPRLWVPSTQMRDVRQLLRHRQKLVEIRTQVKNQLQHLALNQGVRRKRRLWSVQGRAVLEQLPLQGWTARRRSDLLAMLDRLEEQVGELDRAVRTEAEQRPEVRLLMTHPGVGPVVGLAYVLTIGPTTRFPRGKQVASYLGLIPKERSSGGRQNFGPISKQGNTMMRTLLVEAAQTAARFDEELRRDYGRLKARKHSALAKVMVARKLAVRMYWMLRENKPYTQLYAQRPIARMQDSPGHSVVAG

SEQ ID NO: 224700 - protein, 406 aa, unidentified
MTAVMIGVDPHKGSHTAVAISPAEEPLGNLRVRASAVQAQRLVTWAAKWPERTWAVEGAGGLGHLLAQQLVAAGELVLDVQPKLGARVRLLATGDSNKNDPNDALSVAVAALRSRTRRQVSAEDHEAVLRVWSRRHRDLGRAKNQAACRLHAVLCELVPGGVPDEITAAQATRILERVTPSGVAGQARTGLAADLLADMRRLDEQRRESKKKLAAAVRASGTSLTDLFGVGPFVAATVIGDVADVARFATRDRFAAYNGTAPIEVSSGNRKIYRLSLRGNRRINHAIHMTAITQIRHAHSDGRAYYDKKIAEGKTHKEALRSLKRRISDAIYARLRADARHPASSANEGPGGQPGNDSDSSAAGSHPERQLFGQATPGPSASLRPATPASRTMPPERGSKKIRRSP

SEQ ID NO: 224701 - protein, 364 aa, unidentified
MTTLAQSGGPCRVLGGVDTHKDVHVAAVIDDVGRILATGSFPTTRHGYRQLFVWLRGFGEIVAVGVEGCGSWGAGLARDLTARGVRVVEVNRPNRQTRRRRGKSDTVDAEAAARAVLAGDATVTPKTGTGPIEALRQLRVARGGAMKARTAAANQLHSLIDTAPDSVRAQLRALSLKKKVALAASWRPRNTTTPEGASRYALCSVARRWRDLAVEIGELDARIKIILDDIAAPLLAVHGVGYDTAGQLLVTAGDNPDRLHHERSYAALCGSSPVEVSSGRTNRHRLNRGGDRHANSALWRIVIVRMNSHQPTKDYIARRTAEGLSKQEIIRCLKRYVARELFRHLQHAVTDPQHQATELDQRAA

SEQ ID NO: 224702 - protein, 341 aa, unidentified
MQLAVLGIDLGKNKCSIVGLNSAGAVVLRRRLRREGVIEFTTKLKSCVVAMEACCGSHHLGRVLRAQGHEVRLMSPEYVRAYVKSQKNDDRDAEAIAEAATRPTMRFVELKNEEQLDMQTLHRARDRLVGERTALINQLRAVLFERGIIVAQGRRKLERQLTVMGTQVEALSQRMRMLIQDMRAQWYELDRRIAEFDKELADWARDDEAARRLRTIPGIGVLNATALVAAIGHGESFARGRDLAAWLGLVPRQVTTGGKPRLVGITKRGNKYLRKLLIHGARAALPTLLESPTPLGGWLRGLMARMHKNAAVVALANKLARIAWAVLRHGESFSIELSTTA

SEQ ID NO: 224703 - protein, 341 aa, unidentified
MNQVSTVGLDLAKHLFQLHGADSAGAVVFRKRLRRGQLLAFLATLPPCTVAMEACGSAHYWGREIAKLGHTVKLIAPAYVKPFVKRQKNDMADAEAICEAAQRPTMRFVALKSANQQAAAVVFRTRDLLVRQRTQAINALRGHLAEFGVIASKGLVHTSKLIAALEDPASDLPQAARGILAVLVEELRSLDERVAVLDREIARHAKESAVARRLMTVPGIGAVTAAALTALAPPADTFRRGRDFAAWLGLTPVQRSSGGKERLGKTSKMGERSLRRLLIIGASAVARWAARKGVPAGSWLGRMLARKPPMLVRVALANKMARIVWALLAKGGVYRAPGAAV

SEQ ID NO: 224704 - protein, 345 aa, unidentified
MNCSRIIAIDLAKIVFQVCVVESHHRVVCNKTLSRAALWRWLARQKPSLVALEACGGAHHWGRVARGLGHSVMIIPPRQVRPYRQGHKTDANDALAIAIAAQQAKIKTVAVKTLAQQSLQASKRTQEHLSDQLTATGNALRALIAEFGIVMAKGAKALATRVPAILDDQDDALPADVRPTLHLLYQQWRQQREALQLAERILVRRSQQLEPCVRLCALEGVGPKNAVGLYNRLDDGTHFKNGREAAACIGVTPKQSSSGGKVRLGSIGKFKGDQRLRASLITGALSAVRALDKRPPRNAKEQWLKSLIDRRGKSRAAVALANKNVRTAWAILCHNTEYRPQPLTH

SEQ ID NO: 224705 - protein, 386 aa, unidentified
MQASNASTPIRNDLSTIFVAIELSRKSWLVTIHSPDKDRMSRHKVESGDHAGLLALIERIRERAARALGAVPAVMSCYEAGYDGFWLHRLLLAAGITNHVFDPASIMVDQRARRAKTDRIDGEQMLRTLMAYCRGEPRVVRVVRVPSPEQEDARRASRERDRLIKEQTAHTTRIKALLRLLGMAVGNPHRRDWLTWLAAQRDWQGQAVPPRIKAELEREHARLMLVRQQLDALAPAPAGAELTPAAAEMAQRSDLLLRLKSLGPVFATTLTNEAFYKDFRNRREVASYFGLTPSPWQSGGTDREQGISKAGNRRARTKTIELAWLWLRHQPDSALTQWFRQRTLNASKRIKRIAIVALARKLIVALWRYLTTGLVPAGAVLKATKA

SEQ ID NO: 224706 - protein, 338 aa, unidentified
MTIETLGVDIAKNVFQLHGVNRNGRVLLKRRVMRDQVLAAIAQIEPCTVVVEACTSAFYWQRQFEALGHRVKIISPQYVKPFVRRQKNDGNDAEAICTAARQPHIPLVPKKTVEQQDIQALHRARQRMVNHRTAVVSQIRGLLLDRGFAFAKSITRARRIIPEILSDLENELTPLAREAIAELYDLFRDLDRRIASFDKKINRVFRECEACQRLARIKGVGPKTATAVIAAVGDGSEFKNGRHLAAWIGLVPRQFSSGDKTVLMGISKRGNQHLRSLLVHGARAVVCAAPGKTDLGNQWVNQLRERRGFNRATVAVANKNARIIWAVLQKGEPYRAAL

SEQ ID NO: 224707 - protein, 407 aa, unidentified
MSYFVGLDWASQEHAVCVINEHAHIVWRTTVPHTANGLAELRTRLARLAPPATLRVAVERPSGLLIDSLVDGEFIVVPVHPNALKASRARYAAAHGKSDAGDAFILADLLRTDGHRFRPLQPLSDETRALRALVRTRDDFVAQRVALANQLRALLESFWPGAAQIFADVASPIALAFLARYPTPRSAQRLGEKRLAAFLAQQHYCGRRPVPELLARLHAAPTAPGGEAESEVKGELVRALVAVLDPLVDQLQHLSSAVEQAIAVHADGPLMMSLPRAGRINAAQMLAELGDDRHRFISYEHLAAEAGVAPVTQASGKHRAVTFRWACNKRLRLALTTFADNSRHTSAWAAQVYQRARARGCDHPHATRILARAWLRVLWRCWQDHLPYDPALHRSAHALAHAAAASA

SEQ ID NO: 224708 - protein, 411 aa, unidentified
MRLFVGDDWAEDHHDVELMDEAGRVLARRRLPEGVAGIARLHALIGEQLGEDGEDAEVVIGTETDRGLWVAALVAAGYTVYGVNPLQASRYRERHGVSGAKSDTGDSHMLGDMVRTDSHQLRAVAGDSPGAGAVKVVARTHKTLIWERTRQVQRLRHQLRDYFPAALAAFEDLDAPDTLELLGKAPDPARAAKLTRAQVSAALKRARRRDIPAKATAVMAALRAPQLAQPPAVTAAYAVTARALIAVITTLNEQVKTLEKEVEAVFGRHPDAEIYLSQPGIGTILGARVLGESGDDPHRYASAKARKNYAATSPLTRASGKKKVVIARYIRNDRLTDALMAQAFAALTASPGARALYDAERARGKEHNPALRKLANRLTGILHGCLKTRTLYNEATAWPQQENTPQSSLAA

SEQ ID NO: 224709 - protein, 483 aa, unidentified
MKSKPEEQNKRATNHPTQHHWHEMNRKQRREMMRKMQTEDLSLEVIHPDAAGIDIGNESHYVAVPPSRDSQSVREFGCTTAELKAMAAWLKQCRIQTVAMQSTGVYWVAVYDILEQGGLEVYLVNARDTKNLPGRKSDVQESQWLMKLHTYGLLRNSFRPSQEIRMMRTYWRQRNDLVQSAGRHIQRIQKALTQMNLQLANVLSDVSGVTGQSIIKAILAGERDPHKLAAFRDPRVKASAEQIAQSLEGNWQPDLLFVLKQEQDGYEFCQKQMAECDRQLEQYLQQREDRSHGAPLPEEKRKGRLKKKKGNAPQFDLREGLFRMTGTDLTRIDAIDVMTATTIISEAGWDMSKWKTEDHFVSWLRLCPDNRISGNKIIGKGRLPTNNPISIALRMAASTLRLSKTYLGAQFRRLRTRLGAPIAIKAMAAKLARLVYRMLRYGMKYVDQGAALYELRHREFQIKHLKSKAEKLGYRVTPIPAAA

SEQ ID NO: 224710 - protein, 349 aa, unidentified
MSNIITIGMDLGDKFHMAVVFDSDGNELKIVKVTNTKIGISKFFKPYRSAQVAIEACTHSPWISRLLNEMGLIVYVGNPRKLRCIWDSIDKSDAKDARMLGMVCRLEPRLLHPIHHRSKQAQADLTTIKSRDMLVRSRTQLINHVRGIVKANGDRLPKCSTASFANRCSDHISNELWSALSPLFEIITQLNQQIKELEREIEQLSIKKYPETKYLRQVPGVGPITALSYVLYIEDPARFNKSRQVGPFLGLTPRRDQSGDVDKKLSITKAGNKYLRHLLVGCAQYIMGPFGPESNLRLHGLAIAARGGKNAKKRAAVAVARKLAVLLHRLWITGKEYEPFYNIQNKEAA

SEQ ID NO: 224711 - protein, 457 aa, unidentified
MGNARARRIPARLVEDEDYQLRHERVAGIDVAKAKADVCTRLPPARDGGRRASRLEEVPATAAAVLALAGRLLSDRVSLVVMEATSDYWRIWYYLLEAAGLNVQLVNPAHARQLAGRPKTDRLDAQWIARLAEMGLLRPSFVPPPEIRALRDLTRTRLQLTRDRTREWQRLEKLLEGALVKLSSAVHSLARTKTARDILEAIAGGEGDPGALAALAHDGVKGGRAAVGQALDGMMPGAHHLMLIRVHLDHITFLDRSVAAVEDEIRAALDAIEGAWGISADGVPSPDPGPGAAALTAAGRLAEIPGVSPGLAMAIIAETGLDMTRFPTAAHLVSWAGLAPVARQSGPRSRKPGKGQGDAYLKGYCTQAANGAAKTETFLGERVRRLSKRLGGNRAKCAVGRSILVIIWHLLADPAARFADLGPGWHEHKAGRDRKIQAHLKQLRALGLDVTITPAAA

SEQ ID NO: 224712 - protein, 443 aa, unidentified
MIELHLGGCKQNNQNRRFIMNLTQNDRLKQVTFDTLIVGVDVGSKTHFCRAFDWRGFEISHRVFKFSNTGMGFLTFLRWTEELMNKTEMKKVIVGCEPTGCYWLTFQKFLQDHDIQLVTVNPFTVNRSMELDDNSPEKSDLKDPKTIAHLVKDGRYSTSYLPSGVYAEIREASVCRDQIMKQHIRLSNQIQGWLQKFFPEYLECYADWDSTSGLMLLKEAPLPEDILKIGAGGINQIWRDAKVRAAGIKRAQILIEAAQNSVGLEAGEAARLEIWVLVNDYILKAEQLKRLDEYLEEKVREVPNVEKLLAIKGVGMSTVIGFIAEVGDIGRFTDPKQIQKLAGLEIVKKSSGKKKGQPRISKRGRRKLRRTMYESARALMNWNPAFQDVFLYYRNRTRNPLGGMQAKIAVACKAIRVFYVVLQTGCDFDEEKFRKDIIRPEAS

SEQ ID NO: 224713 - protein, 346 aa, unidentified
MEKSITDLSSVTTVGLDLAKLVFQVHCVDASGRVVVAKAIKRNKLLEFFASLPPCLVGIEACGSAHHWARELIKLGHDARMMPPAYVKPYVRRQKNDATDATAICEAVTRPSMRFVVIRSLENQAALMRHKAREMLVSQRTQLLNGLRGHLTEVGVIAAQGPRHARELAGLIEACDENIPIEVREALAELVHQLHRLDEAIARLDRTIVKIARKDETARRLMSIPGFGPITASAMAASVQDASSFAGPREFAAFLGLTPKQNSSGGKQRLGRISKMGNRNLRKLLVVGAHAVLFHRKRHTDPLRMWAKKLMEKKPFKLVAVALANKMARIAFAILRGKTTYREIPA

SEQ ID NO: 224714 - protein, 349 aa, unidentified
MKKHITIGMDLGDKYHIGVVFDRNGQELEIAKIMNCKTDICNYFAQYKDATVAIEAGTHSPWISRMLGKIGCTVYVGNPRKLRFIWDSDDKSDERDARMLGLVCRIEPRLLKAIRHRGHQAHSDLAVVKSRHMMVRTRTKLISHCRGVVKANGERLSSCSSEYFARRCVDQVPAELWPALEPMFNLIAQLTEKINELDSKIAHMCNHQYPETQQLQQVSGVGPVTALAYVLTIEDPYRFTKSRQLGPYLGLTPKRDQSGDIDKQLPISKAGNKYLRQLLVGSAHYILGPFGPDSHLRRHGLAIAARGGKNAKKRSAVAVARKLAVLLHRLWISGQAYEPLRGVSIKKAA

SEQ ID NO: 224715 - protein, 422 aa, unidentified
MLEETQDTEELIGRVAALDIGKAELVCCVRVPSAQGSGKRLQEVRTYPTMTRSLLVLADRLGALGVTRVVMEATSDYWRSPFYLLEAHGFECWLVNARDVKHLPGRPKTDKLDAVWLCKVAERQMLRPSFVPPPAIRMLRDLTRYRADLVAVRTAEKNRVEKLLEDAQIKLSVVASDIFGVSGRAMMAALIAGERDPKVLAQLARRRLRAKLSLLEEAFYGRFSDHHGFLLERMLDRIDQATADIAALEAKIDQEIAPFQAAVDQLDEITGVGRTAAQVVIAEIGVEMGRFPTAGHLVSWARFAPGVKQSAGKQKGKATTGHGNPYLARVLGEAAVAAGKTDTFLGERYRRIARRRGAKKAIVAVGRSILIIIWHLLSDPDARFHDLGPGFYDTRIDADRRKRNHVRQLEALGYKVTLQPAA

SEQ ID NO: 224716 - protein, 360 aa, unidentified
MRTITIGVDLAKQVFSVCSVDAAGRVADRRDLRRGAFVQWLPSVAAGTIVAMEACSGAHHWARRCQDHGLEPRLMAAQFVAPFRKSRTAKNDRNDAEAIATAARQGNMRFIPVKTVEQQVRLSWHRVREGYKAEALATSNRLRGLLAEFGVVMAQSDSALRRTLADLDALGLPSLLVELLCDVDAHWQQLQARIADIDRRIQAHARVDEACTRLRAIIGVGPVTADAVVATIGSAHAFANGRQFAAWLGLVPMQHSSGGRTRLGCISCRGDGYLRTLLIQGARSSLQRAKAVAWEKATPEQRWIQDLERRLPFGKVLVAIANKHARQLWAMLAHGEHYDADAWMKHPMVQRPARQRCVSE

SEQ ID NO: 224717 - protein, 349 aa, unidentified
MGEVSTIGVDIAKSVFQVHGVDADGTVVIRKRVGRAKVLEFFAKLPPCIVGMEACATAHQWARELKKLGHDTRLMPPTYVKAYVKRGKNDAADAAAICEAVTRPTMRFVPIKSVDQQSALMLHRTRDLLIRQRTQLINALRAHLAELGLVAAKGHEGLQQLVMAVTDSSDERLPSHARFACQAIIAQLHAVQTQINGLDKRVTQAHRANADSKRLEAIPGFGVILSTAVVATMTDPKAFRTGREFAAWIGLVPRQNSTGGKERLGSISKQGDRYLRRLFVLGAISIVRSARTRPDKYPWVTKLLGRRPAKVVAVALANKMARVAWAVLARGETYRAPTRSSSAAIAAAA

SEQ ID NO: 224718 - protein, 342 aa, unidentified
MKDTTIGVDLAKSVFQLHGASATGQLKFRKRMSRPQFQKFMAEQPSSLVVFEACGSASYWAREMIKLGHEVRLIAPQYVKPFVKRQKNDATDAEAIVIAAQRPEMRFVVPKTEEQQARAVIFRARERLVHQRTELVNALRAVMYEYGHIVPQGIGNIKRIEAILNEPGSDLPELVREECHDLLQQIAEKTARIAAKTTKVTELTAAAQVPRRLQTMPGVGPLTALAIEAFAPEMENFRCGRDFAAWLGLVPRQHSSGGKERLGRVSKAGQADIRRLLILGAMSRLGWMGRKSIAEGSWLARLMARKPRMLVAIALANKMARAIWAMLTKQEDYRNPALVGAA

SEQ ID NO: 224719 - protein, 354 aa, unidentified
MLSVGLDLHKRYSQVEALGEDGERRSAARLVNEFEEIEGFFRSLREPCRVVLEAGWNWGSMYDWLERVENVVEVQLAHPYGVRAIAAAQVKTDRIDARMLGQLLRVGLIPRAYIPGKETRQLREAVRQRLFLVRVRTMLKNRVHALLDRHHVVPPPVSDIFGKRGRDYLSKVELPGCAQDLLRQDLRLLEMLGSEVRQAEVLLARALKGDRRVELLLTVPGLGVLLATVVALEIDSVERFVRPAKLVSYAGLVPTTYSSGGKTSHGGLMKMSNKWLRWALVEAAWIAVRHDPYFRHQFGLRCRTKGPKTAIIAVARRLAEVLWHVLTEDRPYQVRQPASKRREYGLTRAALIQD

SEQ ID NO: 224720 - protein, 428 aa, unidentified
MDQVVERPAALDVHKAQVTACVRTPGEDGRRVQEVREFKTTVRSLLAMRDWLKSLGVTHVAMEATGVYWRPVWAVLEDDFELLLCNAAHVKNVPGRKTDVGDAQWLCQLLEFGLLRASFVPPKPVRELRELTRRRRTLVGERAQEVNRLHKSLEDTGIKLDCVASDILGVSGRLMLDALLAGQRDPQALAGMAKGRLRVQHSGLIEAFEGVRFSSQHALLIGGILRHIDFLDAEIAALGEAIGTHRAAERTQEDQPAPFELAVQLACSLDGIQHRTAQMLIGEFGTDMTRFPSDKHFSSWAAQCPGNHQSAGKRRSGKTRKGPKWLDGTLHDAAMGAIRVKDGHFARKYRRIKARSGHKTAIGAVKHAILIALYHMLKNGELYRQPIIHPDAERKQQERATKRLVAQLERLGHSVTLQTATTEATVAP

SEQ ID NO: 224721 - protein, 340 aa, unidentified
MPLYGGIDLHANNSVIVLLNEQDEVIYRKRLSNDLPTIIRQLDPYRVEMKGLVVESTYNWYWLVDGLMEAEYRVHLANPAAMQQYSGLKYTDDHSDARWLAHLLRLGVLPEGYIYPKAERAVRDLLRKRAHLVRQHTANVLSVQNILARNTGARFSVKRIQELTKQELKSLLTEEPQVLAVTSSLAVLDCLRQQIKTLEKTVHKRLHHTPAYEQLLTVDGIGTILAQTITLETGAISRFPTVGNSASYCRCVDSNKISNGKRKGTGNVKNGNPYLAWAYMEAAQFAMRFQPAAQRFYQRKLAKSRNNTVLARKAVAHKLSRACYDIMRDLVPFEAAKAFG

SEQ ID NO: 224722 - protein, 415 aa, unidentified
MDVLYPRCAGLDVHKDTVVACVRLAGDGHVSSEVRTFDATTPGLSALSAWLAENGCTHVAMEATGIYWKPVWHILADGDFTLILANAAHVKNVPGRKTDVADAVWLADLLAHGLIRASFVPEAPTQNMRALLRTRKQLVREQASHVQRIQKTLEDANLKLGSVLTQITGRSGRAILAALIDGERDPDRLLALVQRGVKASPEKLRAALQGRVTERHRFLLRLHLRQVEALDAAIAEIDAEVDRDLDPFRQAVCQLRTIPGISDLTAQVIVSEIGTDMSRFPTAAHLISWAGLCPRNDESAGKRRSTRLRKGAPWLKTTLVQCAWAASRKKASYLQAQFQRLRYRRGPKKAICAVAASILTAVYHMLRDGTFYQDLGPNHFRRDSPEEHANRLVRQIAKLGFSCVLTPAASVAVSV

SEQ ID NO: 224723 - protein, 343 aa, unidentified
MEYFAGLDVSVKETSVCVVDDTGRIVREAKVASEPEALLPVLTNPAYHFKRIGLEAGPLSQWLYSALAEAGLPVICVETRHMRAVLKAQINKTDRNDARGIAQMMRAGLYRPVHVKTLRSQKLRMLLTHRKLLQSKAIAIDNDLRGTLRNFGLKVGMVGTVKFESRIKELVENMPDLAVLVESLLVVRRVLREQLGILHRRLLAIVRDDEVCRRLMTVPGVGPVVALTYRATVDVPARFRNSRAVGAAFGLTPSKYQSGEISRTGAISRCGDEMMRVMLYEAAQIMLTRTNQWSWLKAWAMQIARHRGMKKAIVALARRLAVIMHRIWVDGTEFRWTREVAAA

SEQ ID NO: 224724 - protein, 337 aa, unidentified
MNYSGIDLHSNNSVVTVIDDTDRVVAEKRLPNDLTKILTFLAPWQSELTGVVVESTYNWYWLVDGLQAAGFVVHLANTTAIKKYDGLKHSGDETDARYLAHLLRLGILPTGTILPPEARSVRDLARKRIQLVRSRTTHILAIENIAARQHGMRLSSAEVHRLTTEAIEQMGLPAEVALAMQANLAVIKTLSTQIKLVEERLEEKVQPRAEYALLKTVPGIGPILASVILLEVGSIERFASAGNFASYARCVDSQHMSNGKKKGEGNTKNGNKYLSWAFVEAANYALRFCVEAKRFYERKKAKTNSILARKALAHKLARACFHILKECKPFDTTRCFT

SEQ ID NO: 224725 - protein, 388 aa, unidentified
MTQAPVPHSVPTAPDYDRTLVLAIELSTKSWVLAAQVPGLPRVKAKRTIEPTAEALLAAIQGYRERAHAAGRHIERMVATYEAGWSGFWLARWLATHGIETHVVQPSSVPVDRRARRAKSDGIDAELLLRTLLAWLRGEPRVCSMVPVPAEADEDARRCIRERAELVAERVALVNRIGAVLATLGVADYNPLLRNRRERLDALRTALGTSLPPHAHAKISRMLDRLDLVRAQIADLEQERDAVLEEEAPSRAGAMIQQLATLRGIGVQSATVLVREAFVREFANGKALGSYAGLTATPYSSGGTEREQGISKAGNRRLRTVMVELAWLWQRYQPGSAEVSWFRERVSGTGARMRKVMVVALARKLLIALWRFATQGVVPGGAVMKLAS

SEQ ID NO: 224726 - protein, 357 aa, unidentified
MRRPKAKSNDKLIAGIDLHGNNLVIGVINQDGTRLMHRKLDCRLEQVEEFLRPLKLRLQSMAVESTFNWYWLVDGLRARGYQIDLANPAKIEQYSGLKHADDKDDAFHLADLQRLNILPKAHIYDPELRPVRDLLRHRTNLVHQHTALLLSLQSLYARTTGQRLDLGEAKKMEPKQAPQLYEHPANQLIAQVQVEHIGALAKSIHRIEKAVLDCAREIPLYEKLLTLPGIGRILGMTITMEVGDISRFKTAGDFASYCRMVDAKRLSNGKCKADNNRKCGNKYLAWAFVEAANFARRYDESCRRWYDRKAAKAGKIVATKALGCKLAKAAWHVMAQQCNYDEKRMFPELANKPMKTS

SEQ ID NO: 224727 - protein, 407 aa, unidentified
MELVALYKRVIGLDVHQAQITACALIEESDGTTRIEQRQFGGFKRDRRELAEWVASLRPDEVVMESTGIYWKSPYAALEAVGIRAKVVNARHVKNVPGRKTDVGDAHWLATLARAGLLRGSWVPPAKLRELRLIARQRQKLVGQLASEKNRLHKVLTDSGVRLGVVVSDLHGRSARAMVKAIIAGESPSEVLRHASRRLKASREEIFEALQGDLTDSHRFVLDELMRHIEEIEARIARFDARLLGELEAEHNTLALLQTIPGVDLIGAAMLLVEIGSDMGVFGSADRLASWVGICPGNNESAGKRKSGRLRKGNLYVRRLLCEFAHAASRTTSVFKSKFQSLVVRRGHKRAIIAIGHKILRTIFFMLQRREHYRDSATDYEALSVQRNAPRWIKALTKFGFINPAST

SEQ ID NO: 224728 - protein, 371 aa, unidentified
MTNYSIFIGMDVHKNSIDIAIAEEGRKGQIRHYGKIDGTLAALDKVVRRLVSTDKKLHFVYEAGPCGYEIYRHLAAQGLDCSVVAPSRIPKPSGKRIKNDRRDAMMLARLHRSGDLTAVYVPRAEDEAIRDLTRAREDAKGDEKRSKQRLLSFLLRNGTRYTGGSPWSKAHIRWLSDIKMPHRSQQVVLQEYIGTVNQCKERVQRLTEQIQQLLPDWQLFPIVQALQSMRGVSTIVAATTVAEIGDLKRFHTPSELMSYLGLVPSEHSSGQKTKRGSITKAGNGHVRRVLAEAAWSYRLPARVSRALLKRQEDLSESVCDIAWKAQLRLCSRYRHLWDKGKAKQVIVTAIARELCGFMWAIANEIEAPANA

SEQ ID NO: 224729 - protein, 378 aa, unidentified
MGDYSEAFVGIDTSKLRNAVAIADAGRSGEVRFLGEIENTPAAMAKLVRKLSAKYKRLTFCYEAGPTGYGLHRQIKELGFECMVVAPSLIPKRRGGDRVKTNRRDALSLAKLLRADELTAVWVPDGRHEAMRDLTRARETAMLDLRTKRQHVSAFLLRLGRPYPQSKKTWTKLHMSWIASQKLEHPQQRLVLEEMMLAMRQAQERLVRLEQAIAAAVPEWSLAPLVTALMAMRGLDLISATTLLAEIGDLSRFRTPSELMAYLGLVPSEDSTGDTVKRGPITKAGNRRARRMLVECSWSYQHPPRVGQAKQSKVDAAPREVREIAWKAQCRLYRRYRALIRNGKLKTVAIVAIAREFAGFIWAVARAVTTARVAAASA

SEQ ID NO: 224730 - protein, 343 aa, unidentified
MHKSSAELLTCCGIDVSALQLAVAVQTEDARCWQRGFPNRASGHRALIVWLQKIGGRVRVCLEATGLYSLDLALALHAASGIEVAVLNPKTANRFAATLCRSKTDPADAQVLCEYARRMPFQLWQPPSSIALQLRALTRHIAALAQQHTRDSNRLRAVSASIAGSGCVRQDLQRSLRQLQHRAEKMRAAALALIQQDAELRPRFALLLSMPGIGEISALHLLGELALLAPGLSVRQWVAHSGLDPAHHESGSSVRKPARISRAGNRYLRRALYMPALVAVRHDPHLRAFYQTLLARHKAKLQALMAVARKMLHAIFGMFRWRSAYDGSRLLPKIELPALAAVA

SEQ ID NO: 224731 - protein, 391 aa, unidentified
MILVGIDVAKDKHDCFISNSEGEVLFEPFTIPNNMDGFEDLFQKITSVSDGLTNVKVGLEATGHYSYNILGFILSKGLTTYVINPLHTNLLRKAQSLRKTKTYRIDSRTIASMLLFDQSLKPYSNESYHNEELKSLTRYRFTKVRERAKLRTSVSRLVNILFPELEHLVPSLHMSSVYALLSEYPGASFIASCHLTKLTNLLDKASKGHYKRDKASEIRDAARKSVGSVMPARSLELKHTIALIRLLDSEIDEIENQIDEVMSTVNSNITSIPGMGATMAAMIIAEIGDFSKFDSPDQILAYAGLSPSTYQSGQLTSTYAHMEKRGSRYLRYALFNATRYVCIWDPVFREYLAKKRAEGKHYNVAISHASKKLVRVIFALRKSGEEYRIVA

SEQ ID NO: 224732 - protein, 385 aa, unidentified
MTNQRQQSTFIPRDYDIFGGLDVDKKSMAVTFRDHGTMRKSLKLPYSASQLLNYTRKHFPGQRVAFVYEAGPTGFGLHDELTAASHPCLVVSPSMVPTVQRKRVKTNRLDSNKLSEGLRGGQLRGIHVPPPGYRELRHLVQLRDTQVAQLRASKCRIKSLLLYEGIPFPAANGKWSAPVLRELELLPCNATVRFKLDELINALQFHFLAAARVQKQIRQFCQNDPELRQCISFLTSLPGVGTITATHALARLGDWRQIKDVRQIAGFLGLVSSEHSTGDKENRGEITRIGDSRLRNKLIQCAWTAIRKDAELRAFYRRIYERQPKKVAARKAIVAVARKLTTRMYAVLKEQRPFVIRADSSIAPLTIAETVGPRERLDAAQNEQP

SEQ ID NO: 224733 - protein, 342 aa, unidentified
MRFTFILGIDISKDWFDACLMNRQFEIVGEQRVVNRSDQIMEFISNLLDQYDITDINSIFMCVEHTGLYNQNLVRCWLTKGGDLAIIPANKISGNLAGPQGWVEKTDTLDARRIAEYGIRFSDKLLHYRVKSHTLELLQRLQRQRSRLLNAINTLRVPVSESEDFDIVSIVERIKQNQAGSLAALETDLENIDKLMEQTIAEDPYLNRVYHLITSVPGIGPITAFEVIIATEGFTKFRPNQAKKFARYAGVIPLRHISGTSVRKKPRNTKIANRRLKPLLTMGATSLIRGKNAIGQYYQRKILEGKHHLTVINAIRNKLLLRIFAVVRNDTTYKVDFEFVRN

SEQ ID NO: 224734 - protein, 427 aa, unidentified
MPYQIAGIDVHKKMLAIVVADVAVEDDYHFERLKVGTSPAQLRALADWLVEREVEEVVMESTAQYWRPVWEALEQYWRPVRRTRAGASPVSGTLHLAQAQSNRGAGGRKRDFPDAERLVKRLVAQELTLSFVPDAEQRLWRTVMRRKYQVTRNRVQLHNRLESLLEEAHIKLSSLVSDLLGTSARRMLQALANGETDPATLASLADARLRATAAQLSDAFGACTTLHPVYRRLLKLTLDELRLIEDHLGQLDQQMAELLAEHHEPVQRLAEVPGLGVDSAQQIIAEVGATAATFPSPKHLASWMGACPGNEESAGVNYSHRCPKGNRQMRRVLNQAANAAVKAKGTIFAIVYRRLVPRLGHAQAIGAIAHRLCRLIWKILHQGIRYEERGPAVSDEAKKVRARKMIRELRSLGYRVELLAAPSSSPA

SEQ ID NO: 224735 - protein, 346 aa, unidentified
MLIIGCDFHPGFQQVAIFDNQSGEIEQRRLRHREEAEQFYRGLAAGVLVGMEACGQYPWFERLLAESGHELWLGDASAVRAAVVRRQKTDRRDAEHLLDLLRQGRFPRIWVPSLEERDVRQLLVHRHKQVQARTRVKNQLQAIALSQGMQKKRKLWSQSGRAELEKLELLPYAAGRREQLLHRLDQLEQEIAGLNRQVEEEVKQRAAAQRLMTHPGVGPVTALAMVLTLGPAERFASGKQVASYFGLIPSEHSSGGRQQLGHISKQGSSFMRFLLVEAGQSAARYDPELGRFYRRLAVRKHRALAKVAVARKLAVRLYLMLREEWNYAQLCRAVVQVSPSHSVVAS

SEQ ID NO: 224736 - protein, 438 aa, unidentified
MFALAVKLAEQNLLKGGSPCWQKGLTMKIVHQICCGIDVHSKMLVACLIHASGEKEIRTFGTMTWGLLQLRDWLLAAGCQHVAIESTGVYWKPVFNILEDGLTVILINPEHARALRGRKTDVKDAERIADLLQAGSLNASFIPPPEVRELRELTRYRESVVRERSAVANRVQKVLESGNIKLGQVASDPLGVSGRAILRALVEGKTDPGELASLARRQLKEKQAELALSLQGRLTPNQRFVLGELLKRWEELAVADRRVTQEIDTYLHDHPKLAQAVKTVDTAPGLGRRAAEIVVAEIGTDMTEVFPTAAHLASWAGVCPGNKATGGKRLSGRTRKGNTYLRSVLVQAAWGASMKKNCYLSSQFHRLVKRLGRKKALLAVAHSLLVIIYHMLERDQTYTELGGDYFDRHHVEQQRDYHIRRLQMLGLKVSVEELLAAA

SEQ ID NO: 224737 - protein, 348 aa, unidentified
MQSTANLPVIGLDLAKSVFQVHIVDANSGEIQRRQIKRARLAQFFANCQPSLVAMEACASSHYWARRLVSLGHEVKILPAQHVKAFLLRDKTDAMDAQAIWVAAQQPHIKGVPVKTSRQQACMALHGMRRQLMKMRIMQTNALRGILAEFGIALPVGHKQLLKVIQEDLAKAQEDDVLSADLVASVQEQLKRINGLQDDIDLISQRLRAMLQDDPKMQAVYQIPGVGELTATALVAAVGDFTVFKSSRQFASWVGLTPRQVGTGGKTQQLGISKRGDSYLRTLLIAGARAVIAKAAQSTWIQQLLQRRHCNVVVVALANKIARTVWAVMARGQAFNPTKWNPYEQVVA

SEQ ID NO: 224738 - protein, 354 aa, unidentified
MKYFAGMDVSLEETAICVVDETGRVIKEARAASEPEAVHALLSRFDVLFERVGLEACSLTAWLHSELMSAGWPAICIESRHAKAAMGAMPNKTDRNDARAIAQIMRTGWFKAVHVKTPICRSWRSLLVARRTVLNEMRTIENVVRAILRESGLKLGTPARKDFIFRARELATGEEALMRMIEPLLEVLVTMLREFTKLTKQVLIIVRDEPVCRRLMSAPGVGPITALAFRATIDQPERFRKSRDIGAHLGLTPRRYQSGETDIQGRVSRCGDELARTALYEAAHSLLVRSKKWSALRAWGMKIVKRRGMARARVAVARKLATILHRMWIDKADFCFGREQLANPTTRAITTVAA

SEQ ID NO: 224739 - protein, 426 aa, unidentified
MNANNDETPNEYAAFIAIDWADQQHVFSLQVAGQTKKETGILEQKPEVIGPWVAQLRERFGGRSVAIAVEQSRGALIHALMSYDFIVIYPLHPTTVAKFREAFKSSGAKSDPLDTDQILEIVTKHLHQLKPLNPDTKETRLLGRLVEDRRNAVDLRTGHIQALLAALKEYFPQAIELANGNLTSRLAGDLLKKWPNFEAFQQAKPSTIKRFYYGHNIRSPQVLEKVLNLAQRAQPLTTDPAIVESGGRLSQLHAQLIQTLNPLIESYDRRIEKVFQAHPEAHLFSRLPGAGPALAPRLLSFFGTDRSHYETAQNVHSFSGIAPVTKSSGRTRVVYFRRACPKFDRQTFHEFARLSLAKCQWARNYVDYYKAKGKKYHTIIRALAFKWIRILFRCWQDRTPYSEDTYLKALKKRGSVFATLHLEQKS

SEQ ID NO: 224740 - protein, 355 aa, unidentified
MIIIGADYHPGFQQIAFVDTDTGEFQERQLQHREEAEKFYRELAAQGQKVRVGMEASGHARWFERLLAELNFELWIGDAAEIQTKRVRKAKTDREDARLLLRLLLEDRFPRIWVPSWGNRDLRQLLWHRHRMVQARTRIMNQLQAVALNEGLRAKKKLWRECGRQQLESFPLAPWANRRRQDLLALLDRLNPTIAELNQAVDQEVERCPAAQRLMTHPGVGPLTALAFILIIGEAERFGCGKQIASYVGLVPLEKSSGNRRRLGHITKQGNSMLRFLLVEAAQVTARSIPEWRSRYFHLRMRRGRKIAKVAMARRLAVRLYWMMRKQWDYEQLKKFGSHAGQPGTGDGVYKTPRN

SEQ ID NO: 224741 - protein, 427 aa, unidentified
MKYTQNEKILQVTEDTLIAGVDIAKESHYARAFDYRGVEYGKYLRFENNREGMTKFFRWAKDLMERHKKNKLIVGIEPTGQYWLCFAQYLKDNNIKVVLVNPFHVKRSKELDDNSPTKSDKKDPKTIAMLVKDGRYVEPTIPEGVYAELRVAMDIKDRLNKQIGMTKNQITRWMDIYFPEFNTVFSDWEGKAALITLREFPTPEKIAKKSAEEIISIWKKEVQRGVGEKRAIKLIETAKESIGKKQGIKMAEYEIKTLIEQYEFLKKQIEEIEKKIEELMVEIPGVKELLEIKGIGVNTVAGFIAEVGDIEKYEHPKQIQKLGGLNLVENSSGKYKGETTISKRGRKRLRRVLFTAVMALVAKNEEFRELHKYYTTRAQNPLKKKQSLIVLCNKLIRIFYVILKKGVKYDPIKMIKDIKRPLLQEAA

SEQ ID NO: 224742 - protein, 415 aa, unidentified
MEIIYSRVAGIDVGKREVAVAVRMPGDIPGQRRQLVRKYKTFYQVLREMVAWLVQQGVTHVAMEATGVYWKPVFHALCEAEQIEVLLVNARHAKNVPGRKTDVKDSEWLAQLLECGLLRGSFIPPKDIAAIRELTRYRKKLIEERTREMQRLSKVLEDGGIKIDSVASSITTLSARDMIEALIAGERDPRVLAELARGVMRNKIPDLTMACAGRFGDHHALLARMHTDHIDHLTTMIEGLDHRIEEVVDPFAEPLRLLRSIPGIGERAAQVIISEIGVDMSRFPTAAHLASWAGLCPGNNESAGKHKTGRTRKGNVEVRTILTECAWSAGRTGTYVGAQFRRMHRRFGKTGGGKAAIAIAHTLIVIIWHVLHDRAEYRDLGADYFTRHDNPDARKRRLIHDLQSMGYEVTIAPAA

SEQ ID NO: 224743 - protein, 375 aa, unidentified
MATVRFVGLDVHAETIAVAVAEAAGEVRTLGTIPNRPEAVRRLVRKLGPPDQLRLCYEAGPTGYVLYWQLIALGVHCDVVAPSLVPTKAGDRVKTDRRDAEKLARSYRAGDLTAVWVPDAEHEALRDLVRAREAAKKDQLRARHRLGKFLLRHGRRRPAHLKMAWTAGHLDWIRTVHFESAAHRVVLADYLHEVDRVATRIADLNAAVLEAVRTAPPQMRAVIQALQALRGIATVSAATIVAEVGQLSRFEKPRQLMGYAGLVPSEYTTGARRRLGAITKTGNAHLRRVVMEAAWAYRFGPVVRGPLRARQAGLDPAITEIAWRAQKRLHDRYRTLGSKGKNGNQVITAVGRELLGFIWDIARTVERQVPLVATA

SEQ ID NO: 224744 - protein, 347 aa, unidentified
MRFYTKQHRYYCGIDLHARSMYVCVLDSQGEILMHRNMTCSPELFLKAIAPYREDVVVGVECIFTWYWLADLCGQQNIPFVLGHALYMKAIHGGKAKNDKIDAHKIAVLLRGGMLPMAYVYPAVMRSTRDLLRRRMHLMRKRSELLAHIQNTNSQYCLPQFGKKIAYKRNRPGVAEHFTDLSVRKSIEMDLSLIDHYDKLLTEVELYITQNAKVHDVNAFYRLRSVHGIGKILALVILYEIHDIKRFPTVQDFVSYCRLVKCSKESAGKRHGSSGAKIGNVHLKWAFSEASVLFLRANAAGQRFVDKLTSKHGKAKALSILAHKLGRAVYYMLQQDKAFDMNKFLNS

SEQ ID NO: 224745 - protein, 409 aa, unidentified
MEPIVERGCGIDVGQATVVACLLVGRAHERPRQEVRTFLTFTRDLEALRDWLLAAGCTHVGMESTGVYWKPVYAVLEGHFELIVGNAQHIRNVPGRKTDVKDSEWLAELVRHGLIAKSFVPPPPIRELRDLVRYRRKLVESRSAERNRLLKLLESANLKLASVASNVFGVSGMRMLHAILDGVSTPEQMAQLAQRRLRSKIPALERALVGRIETHHRLLLGLQLRRLEQLEVEITALDQLIDQRLEPYRSWRTLLTEIPGVDRVVAAVIIAELGVDMSVFRSVHHLAAWAGVAPGNHESAGKRKSGRTTRGNLHLKTALVEAATSAARTSGYLKDKFYRLKARRGYKRAALAVAHKILVAAYHMLATGVAYHDLGEGYLDRVGHQHVTRNLVRRLERLGYQVQIERKAA

SEQ ID NO: 224746 - protein, 323 aa, unidentified
MQGKVSFEENAMATVYVGVDVCKEWLDIHLHPLGESRRFGNDKTGMRQLKRMLAGYRPESIVMEAIGKFHRCAHRSLSADGFSVSIVDPLRARLFARACGYLAKTDRLDARLLALLAASLRPGADTPPSPHIEALQELVNARSAAKGEITALENRARTATTAFLRGELSRRVKSLERHVDRLDKEIERRIDEDPQLCRKVEILTSIPGIGRITAWALMAGMDELGNCSGKQAAMLAGLAPIANDSGARTGRRSIRAGRPAPRRALYMAALSARRYNPALTRFAKTLQAAGKPPKVILVAVMRKLVVLANCLLAQDRLWTPNPP

SEQ ID NO: 224747 - protein, 461 aa, unidentified
MDRRPASPPTPQTPAEIDSLPVHHPHAAGIDVGDRTHWVCVAATPDGSPTTREFPAHTPGLRELVAWLRRCGVTTVALEASGVYGHVLYLTLVEAGFATVMTSPAFTRQIKGRPETDRLDCQWIHRLHSHGLLPPVFQPDDATQTLRAYVRQRGNLVRLSGQYVQRVQKSLLLMNLKLTAVVGDVTGVTGLKIIRAILAGERDPQTLAKLRDRRCKSGESEIATALDGRYRAEHLSELRSSVTMWDKHVEVIGELDAEIAAHLRVTKRKSELPPLPAKPRVRGKKPHDPKFDVRTALYYVTGVDLTAIEGIDEIHALTLISELGTDMTKWPTVKQFASWLGLCPQFQKTGGKVKSSRTRLGKNRAATALRLAAWGLMRSKSYLGAYLRRQRSRLGAPKAITATAHKLARILYNLLRYGLAYTKRDEQAYAEQVRDRLEKSLHRRAKELGYELVKKPEPATG

SEQ ID NO: 224748 - protein, 407 aa, unidentified
MIASLPTKPRKYACFCGIDIAKNKHVACVIDRDGKLIVRSQSFTNDAEGYQRILNRLKEVGGPSKVAIAMEATGHYWYSLHDFLARHRYDVAVLNPIQTAKQVTKGIRKTQTDRIDAHHIAVLLKNGEQRPALIPGELGMTCRQLTRLHQTMVNQQSRIKRVLWSRLHPVWPEYEDLFATPFCKTGRTLLNTAPTPQDVLALPREDLLNLIRKTSRGKYGAVQAEKVRRAAENSVGTHRGIAATRVSIRLLLAQLDALKPTREQLEGEIETLAARLPDYLITLPGASPLSVVSLFGETDPIEAFASPSKLIAFAGLDLVVSQSGDYQAPRRHISKRGSPYLRHTLWAMAHRACYQEGDLRNYWLRRKGQGLSHLESVTAVAIKLCPVVWRIMTDRRPYLLQRPATKP

SEQ ID NO: 224749 - protein, 355 aa, unidentified
MNSEKYVGLDVHQATISVAVMDSTGKLVMECILETKAATILEFFAGLRGSLSVTFEEGTCAAWLYDLLKPHVAKLLVCNPRKNALLKVGNKSDRIDARKLAELLRGNHLKPVYHGETGVRMLRELSRSYLTIVKDLSRVMNRLKALYRSWAIPCAGRDVYYGRHRAEWLEKIREPGVRRRAEQLYQQLDMLQHWRQQARRELLAESRKHPITAQLRQIPYLGPIRSALAVALIQTPHRFRTKRQLWAYSGLALETRVSAEYSYATGQLGRSKKLISIRGLNKDHNHDLKGLFKGTATMASVRPGPFQDFYQGLLAKGMKPTMARLTLARKIAAITLTVWKKGAHFDAEKLKPQAA

SEQ ID NO: 224750 - protein, 413 aa, unidentified
MDVLHPRCCGLDVHKSSISACILLREAGRVQKHPRRFGAMTQDLQELAEWLRRFGVTQVAMESSGVYWKPVWNILEGQFTVVLANAQHIKNVPGRKTDQKDAEWIAQLLQYGLLRPSYVPCEIIRDLRDLTRMRASLSQEASRLSSRIKKVLEDRNVKLASVATNVLGKSGRAMLEDIISGEDDPERLASLALGHLRVKIPQLRRALEGKIRSHHRFLLRRLLDQVQFVEQEIALLDQRLEDIGGQRPELAQAVERWDTIPGIDRVAAWALLAEISDNMAQFPTAEHLASWAALCPGNHESAGKRLRGTTRQGSPWLRRMACQCAWAAARTKNTYLSSQFRRLAARRGKKRAIIAVAHTIIVIGYHLQTNQSNYEDLGGNYFDRIHSDGLKRYLVKRLQQLGHKVTLEPMEAA

SEQ ID NO: 224751 - protein, 364 aa, unidentified
MKKISTAKMKSQAANKKVTVGIDLGDRSSRYCLLDEEGVVIAEGSTPTTKAGIAKVFGAMARCRIALEVGGHSPWVSRQLEAYGHEVIVANPRNVRLIGESTRKDDRLDARTLARLARIDPMLLSPVRHRGAEAQADLAVIRARRVLVRVRTMLINAARGLTKSFGERLRKCGAGQAGPTLAAELSPEIRAAVVPLLAEVEALNQRIAAYDRQIEQLVQKHYPEVERLKQVKGVGTLIALTFVLTVDDPNRFQRSRDVGCYLGLRPGRRNSGKSEPQLHISKEGDCYMRSLLVQGAHYILGPFGIDCDLRRWGLKMSERGGKKAKKRAVVAVARKLAVLLHKLWVSGEVYDPFRNSRPLVAHAA

SEQ ID NO: 224752 - protein, 363 aa, unidentified
MNSVYHTELSSLEETRGQFNGGKADIKLGIDVHQDFYVVVMQVGGSNPKPPQRFHKQAFLLWAAKLKSRSAEVHAVYEACGFGFSLQRQLSQLSIHCYVSCPQKLDEHNKRVKTDSLDAKALCLRLDRFVRGNREALAMVRVPSEEEERSRAIHRQREQLVKVRKMLEAQGRSLMVNHGIEPVKNWWKGNNFAALPLPAWIKELLQNSQPILIALQQKISALTLQLQVAAAFNQPRGLGAMTSVMIDREIGDWHRFNNRRQIASYTGLCPGEYSSGHTRLQSCVTKHGNPRLRAALVELAWRLVRFQPNYSAVRKWKERLAKGTLTTGAARKKAIVALARQLAIDLWRIRTGRLSAEALGLEI

SEQ ID NO: 224753 - protein, 338 aa, unidentified
MKRYPGVDLHRNCFTVCTRTEGGQEALRSWSIHELHRFARAVRSTDEVAVEATGNTRLFCEGLRERGCRLAVVDPRQFEVISRSVKKTDTHDAKVLAEFLAKGLLPEVRMKDGIQARIASLTQTRDKLVKLRTILKNKINNLLAARGILIRKESLASEKGLVGVLRAPVEDLERVELEILVEQIRHLNESIEKVEAVLREQGPKLPGWKNLTSIKGIGDTGASILLSTIGKIEDFADEGKLAAYFGIVPRVSNSNETERSGRITKRGCKLRRTALVQCSLIAMRYSPYLRAYYERIAARRGTGKAIIALARKFLGIIYKTLKNDWVFEDFPNFVLVKT

SEQ ID NO: 224754 - protein, 341 aa, unidentified
MKNLFIGIDFSKQTFDVSFFEKDVTGEIFYSRFSNNKEGFKHLVKWISSNTGVRKDEWLFCGEHTGLYSLELPVFLLKHNLFIWLENPLQIKRSLGIKREKTDKTDSLEIARYAFRFQDKAICYKLPDKIFTSLQNLMSFRGRLVKNRQELSVAAKEMRSVFNRDKTARYIYEQSMHEIDSLNKKIKGVEAQMLLLLDDTEEVKTNYARLTSIKGIGMINALTMLIYTENFTRFTDCRKFACYVGVVPFDKSSGTSLHRGKRISRLANIQIKTLLTQAAKCAVVHNPKLRIYYQRKLAEGKGMKIVINNVRNKLLQIMFALIKKGQSYMDGYENQLEIKLV

SEQ ID NO: 224755 - protein, 338 aa, unidentified
MKLYGAIDLHSNNNVTVLIDEQDKVVYEKRLPNDLGVIAQQLAAYQSSLEGIVVESTYNWYWLVDGLMDQGHQIHLANTAAIQQYEGLKYTDDHSDARWLAHILRLGVLPEGYIYPKEERAVRDLLRKRGQMVRQRTANLLSLQNLITRNTGSSISSNRIKTLDSETVDALLPNQDLVLAVKANLAMIQCADGQIDILERTVTDRVKLRAAFSFLKTVPGIGQILALTIMLETGEIQRFSTVGDYASYCRCVGSQKLSNGKKKGSGNTKNGNKYLAWAFVEAANFAIRYNARIKSFYQRKKAKSHGVLALKAVAHKLCRACYCITRDQVPFNVAKAFA

SEQ ID NO: 224756 - protein, 451 aa, unidentified
MAKRREKRERRSVVWEPDAAGIDIGAEEIYVAVPPDRDEESTRRFSSFTCDLHALADWLGRCRIRTVAMESTGVYWIPLFQILEERGFQVYLVNAHYLKSVPGRKSDVSDCQWIQYLHSVGLLRASFRPPDAICALRTLWRHRGSLLEMAAEHILHMQKALSQMNLQLHHVLSDITGTSGQAILDAILAGKRDPVELAQLCHSRVKSPRDKVAQALVGDYRPEHLFTLKQSLEGYRYYQKLILELDQETARLMQALPSATEQPLPPRTKATAYHRQGNDPHFDLRSELYRISGVDLTDIPGVSAATAQVILTEIGSDVSRFRHASAFASWLGLCPEKRVSGGKVLSCKTRKVKHRAATALRMGANSLCRAKGYFGEFFRRMRAKLGTAQAITATAHKIARILYHVLSTKEPYTETIFHLYDEQAHQRAEIRLRKQAARLGFQLVTIPATGE

SEQ ID NO: 224757 - protein, 304 aa, unidentified
MLENGKTKPKVFSNDPEGFQQLLTWLNRHYVSSVHACMEATSIYGEALAEFLYQADFTISVVNPARIKGFAKGELLRTKTDKVDASLIARFCLAIRPPVPVPLPPSVKELQALLRRLESLMEIQQQEKNRLETATGAIAASIKSHLDYLEQSIEQTKQLIEDHFDLHPTLKQQRDELTTIPGIAEHSAAVVLGEIGNVQSYQNARQVAAHAGLTPVERSSGSSVHGKPRLSRMGNARLRNGLYWPAIVAMRHNPLLKAFSERLLSHGKAKMQVIGAVMRKLLHLAFGILKSQKPFDPNFLSTTP

SEQ ID NO: 224758 - protein, 356 aa, unidentified
MLKYTHKVVYLGIDVHKKTYAVTAICEGQVVKKDTLKADGSFLLSYCKKYFPEAQIQTAYEAGFSGFHLHRYLEENGIKNMVVHAAGIEIASGNRIKTDKRDSLRLATQLSVGRLKGIFVPSKEREDARAVTRLRESFVRKRSSVGSQIKALLFQHGLIPYYSEQKTSSKWIQSLAAREFPSGLRLAIHQYVDLWLEFDERIDKIEQQMACQAQQEGELELLYRSVPGIGPIAARTLANELGDMTQFKNEGQIFSYAGLTPSEYSSGEHIRQGHISRQGKPILRRILVQAAWVAIRKDNDLAQIYDRISAKAGCKKAIVAIARRLIGRIRACIRTGNLYTLRREIILDKTAPAVTS

SEQ ID NO: 224759 - protein, 384 aa, unidentified
MPISSYAAVSTQLNAIFVSLELSRSTWLVTSLSPGRGERISRHQVKGSDVPALLERFAQLQAKARERTGELYPLVVIQEAGLDGFWIHRCLVSEGIESHVVDAASIAASRRGRRAKTDKLDGEALVRTLLAYKRGEPRVCAMVTVPSVEDEDRRRISRERRALVVERVRHVNRIKGLLFAQGIGDYEPLRANRRARLDELVTGDGRYLPRHVRREIERELDRLEMVVGQIKEVERERDAMLEASTAEASEPASARLLQLRGIGPEFAGVLHAEAFFRDFSNRRQIACYAGLAPSPWQSGTMDREQGVSKAGNKRLRTTMIQVAWLWLRHQPESELTRWYAERVQANGGRVRRVMIVALARKLLIALWQFSSAGVVPKGALLKAA

SEQ ID NO: 224760 - protein, 418 aa, unidentified
MKSMEITAVGIDVSKRKSTVAIRRPGGVIVACPFDISHSSHDLEKLVSILRTTGGDIRVVMEHTSNYWKPIALTLKNAGFYVSVVNAMLIHDFSDNSIRKLKTDRADSLKIANYALTFWNQLPPFNDEDETRLVLKEQSRMYERLASTATSLRNGLIALADQTFPSIDQAFGHAIKNADGHEKWVDFFSIYWHRDCVLRLSIEKFTESYRKWCLRRNYKFRTNTAHKLYALAQDAVPTLPKNNGTKALVLQACKSLNAVCEAKQSTQEEMNRLASLLPEYEVVMQMEGTGPITGPALMAEIGDVRRFKNKKALVAFAGIDAPPFQSGNFESKSRHVSKRGSPHLRRTVFLVANIILTLSHKDNSVFCFMDKKRAEGKHYYVYTIAGSAKFLRIYYARVSEYLRTQEPPAAAICLDCKD

SEQ ID NO: 224761 - protein, 342 aa, unidentified
MYYIGLDVHKKTISYCVKDASGRVHQEGKLGATRRELDIWMRTLPQPWTVAMEATIFTGWIYDHLHPHATQIKVAHPLMLRAIAAAKKKNDRVDASKIADCLRCDFLPECYMAPTEIRDRRRTLRYRYLLVRQMVQTKNRISGLLMETGVTHNKQRLHKVGYFRELLASNEEVSESIRPLLRLSRDTIARLQKTERALVSSLQRDPLLTERIKRLRTVPGVGPITALTWALEMGEISRFRSIRQAISYCGLCGDERSSAEKSIRTPISKQRNKNIQFVLIEAAKLAPRQDHDLALLYEREKQKGNANRATLAVARKMVAYLLAVDRGQRDFVPADDCRCDAA

SEQ ID NO: 224762 - protein, 337 aa, unidentified
MEYFAGLDVSMEETHICVLGREGALIREGKTVTPPKAISVFPAGGPECKGVVFETGRMAPMLFHGLVELGISVQCIESRQAYQALKSLAGHKTDRNDARGLAHLARTGFYKPTHVKSLSAHAVRSLIAARKRLVGQRVTIDNQIRGLVVVFGVRLPRALSPAFKDAALAVSDGVPSLHAALCGLFAAREAILAAVAAIDGDIKKMTRKSKVCQRLMTVPCVGPITALAFAAAIDDPRRFGKSRDVGAFLRLVPQRHQSGEINYTGSISKRGDVKVRTLVYEAANVMLTRYAAPLKLKSWALAIAARSTMRKARVALARRLAIILHAILRDQTDFKAT

SEQ ID NO: 224763 - protein, 359 aa, unidentified
MKFKMQDKQNQLIERISEKHLVVGVDIAQQLHVARAVNFRGIVVGDPLTFENSEDGFASLLKWMDKLQRLNKLEVAIVGMEPTGHYWINLPKWLFKQGIEVVTVNPHLVKRNKENRDNTQSKSDKKDALVIADMVKNGYYSFVRDTSESFEILRVLMSNRDVVVKRLVSTINQLNRWVDIVFPELRQVFKDITAKGAIATLRLFPSPMELRSLKPDDVVSGWKSIMKRQPGLRKAQLLLQLARKSVGTRQALEAYKFHLEQLLEEYDLAVLQLERVEQEVKDVLKQIPFAKKLLAIKGISEISLAGILGEAGDLSGFSHGNSLLRHAGLHLAEASSGKWKGQIVISKRGRSRLRRVSFT

SEQ ID NO: 224764 - protein, 412 aa, unidentified
MEVIHRIIAGLDVHQAVVVVCLRVQRGRRVTRTERRFGTTVPELLAMSDWLTEAGCPLAIIESSGVYWKPVFNILESSLEVVLVNAYQAKSMAGYKTDRMDAERLAELGAHGLVRGSFIPPAVIRELREITRYRKSLVQTRVSQINRAGKVLEGANIKLASVVSDIVGVSGRAMMRALIAGERDPAVLAGLAKGTLRSKTDELIPALTGRFMAGHAFLLAQILDHIEYLERQIEAVSEEVARLCEPFREAVELLMTIPGVGTTTAQTIVAEIGLDMSRFTSAQHLASWAGLCPGNNESAGKRRSGRTRKGNRWLRAALSEAAWSASRAKGSVFQALHRRLAFRRGKGVKKAQVAVAHALLVSVWHILNEMTPYRDALLLQRTAPDPQKITRTLVKRLEKLGFTVTLELKTAA

SEQ ID NO: 224765 - protein, 366 aa, unidentified
MLYLGIDQHHKQITVSVRNDEGTVILRRQVSTRPEKTRAFLDDIRRQSGEDGFMAVLEVCGFNDWLLALLPEFGCREVVLIHPDKRSRRKTDRRDAGKLSELLWLNGERLRNGQKPQGLRRVVIPSANDRQDRQLTSLRKRVGQQQTRTINKIKNILRRHNLTWQQPTKTFQTRKVRHWLEKLELPEIDRLEMDQLLAQWELWERQLEQLEPQIARRFHQSRTAQRLATAPGASAYSALAIASRIGSVERFASPRSLANYFGLTPGCRNSGETTDRLGSITKEGSGMVRFIVGQMVLHVLKKDRPMRDWYSRIRRRRGSKIARVAVMRRLVTIFWHMLKYQESYFAGGPPRRKWQAACRQEAPLSQ

SEQ ID NO: 224766 - protein, 346 aa, unidentified
MLYAGLDLSRKRLDFRLLDEAGETVEIGAAPPDADGLRGLAARIDRFAEPVRAAIESMNGARFVHDQLESAGWQVEIADAVRVKGLAPLACKTDRIDAWVLAELARRDLVPAIWLPDPQVRAERERARFRLHLVRHRSSLKQRVHAVLLAHGKPCPLSDLFGLAGRRLLERLALPEPWAGTVAASLQLIDELDGQISACESELQRLDADHRYVPLLLTVPGIGWVLAYTIAAEIGEISRFPSPTKLAGYTGLCPRVYQSGGSDRSGALSKQGPKYLRWALIGATMHASRHPLYRDRYQQTKQRLGKQRGAKVAQVELARRLAEAIWHMLSRNQPFAPAGAASPLAA

SEQ ID NO: 224767 - protein, 412 aa, unidentified
MRRVIGIDIHRTFGEVVIWEDGRLRRLGRVDMTRTALEGLGGKFLSTDEVVIEATGNCMAVSRVLSPSVRRVVIANPLQVKAIAHARVKTDKVDAGTLASLFAAGYLPEVWTPDAQTERKRRLTARRYQIVRHRTRIKNEVHAILHAHLIPKCPHADLFNQRGRAWLGRQELPDDERHAIDRHLRELDRLGEDLAILDREIAEGALDDGAVKRLMTITGVKLTVAASIMAAIGDIHRFDHPGKLVSYFGLNPRVRQSGLGPAHHGRISKVGRSHARAMLVEAAWTAAKAPGPLHAFFVRIRARRGHQIAAVAVARKLAVLCWHVLTKEEDYLWARPALVANKMRAMELQAGLPQKKGNQRGPAYAYNVKALRDQEMELAQQAERNYARFVDRWRTRSPKGQARERLTPARNE

SEQ ID NO: 224768 - protein, 355 aa, unidentified
MENRIRAEVQAVVGVDLGDRSSQICRLDRESGAILEEKRLSTTSASFQRYFAKSSPCLVVMEIGTHTAWVRRLLESYGHQVIAANPSKVQAIGSSQQKTDKRDAQLLAQLGRVDPKLLSPVHLRSPEAQQALAVVRAREGLVKVRTLLINQVRGAVKSSGFRLPGCSSKSFARGASAALPQELKASLGPLLEVIADLSERIRGFDRDLEAWAQRFPVTQRLRQIKGVGVLTALVFVLTLDDPHRFAHSRSVGAYLGLVPASRSSGKSSPQLPITKQGDRLLRRLLVQGAHYILGPFGQDSDLRSFGLELCQRGGKSGKKRAVVAVARKLAVLLHRLWISGEDYEPHRRPAVEIAA

SEQ ID NO: 224769 - protein, 379 aa, unidentified
MSECSGYVGLDVHKETIAVAVARAGRGKAEYWGEIGNCRKSLMLLVKRLGAEGERLSFCYEAGACGYGLYRELVELGHECAVVAPSLVARKPGERVKTDRRDCLKLASQHRSGELTAVWVPGPEQEAMRDLTRAREDMKAIELKARQRLGAFLLRHGRVYREGKSRWTQKHFRWLERVKFDAPVQQIVLQEYIDTVREAQTRVAGLETQMRQALQGWSLRPVVEGLMALRGVDVITAMTVLAELGDITRFDSPRQLMGFLGLVPSEHSSGARRRQGAITKTGNGHVRRVLVEAAWSYRFPARKTAHLRRKAAIAPARVQTLAWAAQKRLCGRYQHLYHAGKAKQSVCTAVARELVGFIWAIACEVMGKPHTSRAAGIMG

SEQ ID NO: 224770 - protein, 477 aa, unidentified
MCPGETAAIDAQWGDRAFERQYRDWMGLRWLVCSCVRVHDQQAHLAWRLSRGKCKMHDERRWFAGIDWASQEHVVTLCDGQGKKIGQRKFAHGGTGLAEMVDWLLKASRGEPGEIHVAIETPHGPIVEALLERGFNVYSINPKQLDRFRDRFTVAGAKDDSLDAYVLADSLRTDMPLFRKLTIAEPLIVELREWSRVEENLKVERLRLANRMWDQLWRYYPQMLELADDLGAYWVLELWEAAPTPEKAARVSKKAVSRILKSHRIRRFDAAHVISELRKPALSVAQGTIEAATSHIRVLVEQLRLVNHQLADAGRQLDRLCKKLAEPVAGNDGENVPGQRHEHRDVTILHSLPGVGRNVLVTMLAEAPDALRRRDYHALRNLCGSAPVTRRSGKSCIVMRRRACNRRLSNAAFNWGRVATQHDPVSKAKYEALRARGHGHARAIRSIVDRLLYVACTMLKNGRPFDPAIARKENAAA

SEQ ID NO: 224771 - protein, 466 aa, unidentified
MENNYILYVGMDVSKGKADAAILKVSDRRSVKPKFLRKKLSFKFVKSEVASFLETVRSYSDVNCTSICFALEVTGIYSTNVYDYIKANLYENESIKFLNTDFVNQWRIAHNIAKSDPLDAQTISTIIGTDSDVQYVNDNVFENKNGYQDLKALVHRHYQIKKIYSQEINRLIAQCDCLFPELQYVFEPKSAAFIAVLSSYPTTHDIINASRLEVFNVVYEATKHRCSMDKVDKLFELCQDTLVPDDISSYGKSIILDLVENIKNIKGQLKSIERYIKDIASLNPAYKLLLTITGCGPITAATVIAETGNIRRFKNADCFVSYSGTSPRNKRSGTSVETMGKISKKGSRYLRHAIYMIAEFARRHNPVLKHQFERIKNGNKKRHKLANIAIANKIARYIYSIMKNKSSFVILHDHIMRLPEETRDTFFNSISLDFPKNTRKQIYQYSDINGELHRFVYIKTDEMIPA

SEQ ID NO: 224772 - protein, 344 aa, unidentified
MDATTVGVDLAKNVFEIALADKRGHIFERQRLNRARFDRFFVNRVPCRIVMEACGSAHHHARRLRDQGHEVCLLPAQYARAYVRRNKTDAADAAALIEAARCPDIRPVPIKSVDQQALQQLHRLRSQWMGARNSRISFLRGCLREFGISIPLGPKRAIDAVRVTLADPASPVPSLLHPSLIELLEEIDSLEQRCKNLDRELKRLHVDDPVIERLLKIPGVGDLTATALRASVVDVHRFPTGRHFASYLGLTSREHSSGERRRLGRISKQGDPYLRTLLIHGARSVLLAAQSAQRRGLTLDRLRTWALDLQERRGHNKATVALANKLARIVWATWRHERDFASVP

SEQ ID NO: 224773 - protein, 323 aa, unidentified
MNKYNETFGVDISKDVFDCFGSESGHVQFKNDESGFKKFLKSLSSDVLVVMEATGYYHYRLAQFLYKNGVIVSVVNPLSVKRFIQMKLAKVKTDKSDAKAICEYAVINQVPLYTALTEVQSESLQLFRLLDSYLKKRTATKNKMHGEETLGLPSKFVYRSLRRNRKHLDKEVKGIEEKLLSLVKQDQQHQLTLLTSIPGIGIRTALFLIVCTDGFKKFETASQLCSYVGITPTIRESGSSVRGRSRISKIGNKKLRNLLFLCSFNACKHNKACKEVYERIVNKGKSKKLALIAVSNKLLKQSFAIAKSGRPYDGNYVSVLRIK

SEQ ID NO: 224774 - protein, 401 aa, unidentified
MKFAGIDIAKREHWMAVVDAEGRAVLPPTAYANDSEGLAAMVADLASLGGEVEAAMESTGCYWRSCHRALSLAGIPVAVMNPVRTCAARKSSNLGRAKTDAVDCLVIADFARRERPAPTVSPDGDLAQLRELARLRRSLSGDAARCKLRLTALLDQVWPEFARLFADRFCGSALASLRWLSEGSGDLDSLADALGGASRGRFGSAKASEVAASLSSTCGVPASPAHLLELRLLLGQLDFSAAQIAEADAAMAPLLESAAPTLRTVPGIGPALACQIAAEVGDASRFESPGKLVALAGLDPARFQSGGFESERTRISKRGSAYLRRSLYIAAQAALRSDCEFRDFYDRLRARGKSHRCAVCAVARKMLCVVWALMRSGEEYSRERHSAKGEAPEGASPVEVG

SEQ ID NO: 224775 - protein, 425 aa, unidentified
MNKQSQQTNTPQNLSDAVVVGIDWADREHVVCVIDQNDRSKIETLKQSPEAIDAWVAELSRRFPGKTIAIVLEQSKGALIHALMKYEQLVLYPINPKQLSRYRDAVHPSGAKNDPEDAKLLAQFLKRHAEQLRPWKPDTQATRTLARYTEIRRKIVGERHRLSQQLGSLLKGYFPLMLELFPGKPPLMTAVIKRWGSLGKLKRVHPKTLRTFLKENGIANQDRQTQLIEAVRAAVPLTRDKAIIEPNALYARMLAGQIQDLSNTIEQLEKEIAIAVAAHPDEKIFRALPGAGDALVPRLIAAFGSDRDRYDSAEEIQCYSGIAPVTRQSGKTRHVSRRYACPKFLKQTFHEFADHARKWSPWSAAFYRQKREAGCKHQAAVRALAFKWIRIMFRLWKDHTIYDEAQYIEQLKKRNSPLVKFIQNV

SEQ ID NO: 224776 - protein, 397 aa, unidentified
MTARPEPHTNVVEDQPVPDVSSNQPADVRLWVALDVHKFSIVAATLPAAGGRPEVQRVETTERAIRRFVDRLGGPAGLAVCYEAGPCGFDLFRLLSGLGVACDVIAPSLVPVRAGDRVKTDRRDAKKLVRLYRAGELVFVAPPSPEFEGLRDLVRCRDDLRCARTAARHRVAKQLLRQGRIFRAGKTLWTKQHQAWVRRQRLNDPHAQSALEHMLCHLDALDAQLAAIDHELGQIATAEPWSDPVRWLCAFRGIGLRTALGLLAEIGDFRRFRHPRELMSYLGLTPSEYSSGDQQHRGHITKTGNRHARRLLVEAAWHYQHPPRRSQRAEALEHDLPSPVAARAWQAQIRLHHRYRTLTQQGKRSTVATVAVARELCGFVWAAMTEQPLRDEEAAAA

SEQ ID NO: 224777 - protein, 341 aa, unidentified
MKLIRVGIDLAKNVFQVHGVDRSEKVTWRRRLRREEWIDAVREHAEPSCEIAMEACGGAHHWARVLQKLGYRVKLIAPQFVKPYVKSNKNDAADAEAICEAMARPGMRFVPVKTVEQQDLQAIHRVRASLVEQRSAKANQIRGLAAEYGLVAPKELLHLRRALPRWLEDDGNGLTTRFRWLLRGLRDELVAFDERIAELDREIEQIAQAEPDAKRLMQLRGVGPIIATAMLATVGDARQFSNGRQMSASLGLTPKQFSSGGKERMLGISKRGDAYLRSLLIHGARAVIRTARSKTDPLSRWVIRLADRSHPNVAAAALANKTTRIAWAMLSRGTNYQAAVN

SEQ ID NO: 224778 - protein, 344 aa, unidentified
MENYAGIDVSLELSSVCVVDAQGKILKEAKVASEPDALVEFFETLGFAVKRIGLEAGPLSQWLHAGLKGAGFETVLLETRHVKAALSAMTVKTDRKDARGIAQLIRMGWFRQVHAKSVDAQEIRALLIARKQLLGRLIDVELSIRGILRGFGLKVGPVTRRNFEARIRELVAGQATLERIAGAMLSARSALKAEYGRLHKAVLAIVRDDAVCRQLMTVPGVGPLVAITYKSAIDDPHRIVKSKAAGALFGLTPKKYQSGEKDVTGGITLAGDETVRTALYEAANVLLSRITRFSKLKRWGMDVAKRRGSKRAKVALARKLAVILHRIWVDGTTYRWAEAGSIAA

SEQ ID NO: 224779 - protein, 403 aa, unidentified
MRAICGIDWASDWHDVHISDETGGVLAIEQFSHDERGVGALIDLLVAHRVEACAIERPDGLLVGRLLAAGVTVLAIHPNRLKAARDRFRAAAGKNDRFDALVLCELARTDRHRFPALAPCGDETLALRALVRTREDLVKARVALANQLRAQLEAFWPGAARIFADVDSPIALAFLERYPSPGEARGLGERRLEGFLARHAYCGRRSPAELLARLRSAPTAVVGELECDARRCAMIGLVATLHPIVEQISQLTSQIAGAVRAHPDGEIFLSLFRDRKSVVTAAGLIAEIGDNRSRYPTDDTLAADAGQAPVTVQSGKRSSVSFRWACDKRLRDHVAVLADSTRHWHPWARDTYQRARARGADHPHAIRILGRAWTRVLWRCWQDHTAYDPAQHKALNALLAEGG

SEQ ID NO: 224780 - protein, 382 aa, unidentified
MIQTTLRVEDSDCERLFAALELSNKKWKLAMSGRGKKREATVPAGNMAALLEAFDKARAHFKLDGVTPVRTCYEAGRDGFWLHRELERVGIENLVVDSSSIEVDRRQRRAKTDRLDAWRLLRQLERHADGDRRALRVVRVPSAEAEDARRPHRELQRLREERTAQANRIRGLLVLHGIRLNVGPKFVDRLSEARGGDGAPLPPHLQAELLREFVRWQLVSEQIKVLEAELAAQLEAETPIDPGVATIQKLYRLRAIGVTGATVFTRELFGWRDFHNRREVGGASGLVNMPFASGDRSSDQGISKASNRRVRATLIQITWGWLRYQPDSELSQWFQKRFAGSPRLRRIGIVALARRLLIALWRYVQRGIVPTGAQLKPVSAAA

SEQ ID NO: 224781 - protein, 371 aa, unidentified
MKQVSTVGTEGRTAARKMPARKTSEKLTIGIDVGDRSSHYCVLKEEGAVVASGVMGTTKKALAQAFGALPESRIALEVGAQSAWISRLLRAWGHEVIVANARQVKLISQSSRKDDRVDAETLARLARADPELLRPVRHRGEQAQLDLARVRVRANLVEARTALVNAARGLVKPFGERLASCDAGAVGVATLAGLPAELAAVVQPLVEQVAALTVRIRKLDVELEQIAREQYPETRLLKQISGVGSLIALTFVLTIDDATRFAKSREVGCYVGLRPRRSQSGASEPELPISKEGDRYLRALLVQAAHYILGWRGPDTDLRRWGLRLASRGGKNAKKRAVVAVARKLAVLLHHLWVSGEVYEPLRQARAAAAA

SEQ ID NO: 224782 - protein, 348 aa, unidentified
MDHIGIDVHKRDSQIDILAEGGEVVEQRIRTEGERFAAVLGARPRARILIETSTDSEWVARCLETLGHEVIVADPNFAPMYATRSRTVKTDRRDARALAEACLLGAYRPAHRLSDPQRHVRGRLGVRDALVHTRTRDLSVIRALLRQHGYGVPSGSAERFTDRVRGLPLPGRVRSVVAPLLAVLGPRNQPLAYSDATIEHLAVQDPRVPRLRSVPGVGPVTAAAFLAAVDDAQRFHHAHQLDAYRGLVPRESSSGETQRRGPITKAGHSRVRWMLVHAARSILRGRPPAAEALWTWALRIATRRGTQVAIVALARRLAGILYALLRDGTVYAPRRPAALPDPVAALPA

SEQ ID NO: 224783 - protein, 345 aa, unidentified
MPIVGGLDIHRKQITFDYLDTVTGEVKRGPIAPADRAHVRAWLARFAGCGDVAFAVEGCAGWRYVAEELAAAGIAAHLGEPAGTAALRGRKRHAKTDKTDARHLRTLLAEGRLPECWIPPAQILEYRALLETYHDLRRAHTAWVQRIHAVFFHQGAPPLSEGALRTEPGLAALRAAAATHLSAAGQQQVATALDMLAATEAQLGPLRHQLRQAAAHLTGAKVLTARLYGVGPVTALALTCWLAGKDRFSSSRKAVRFTGLDITVHSSDRKGPPGRLSRQGPPVLRWAVYEAGKTHARTSAPDHGYYATVADRKNSKRAALSEARKIVRQACHILTELGDDALTAA

SEQ ID NO: 224784 - protein, 373 aa, unidentified
MERNTTFIGLDVSKETIAVAIADGGRRGEVRFYGTISSKPEAVAKLVKTLTAKHGSLAFAYEAGPTGYGLYRQLIELGYTCHVVAPSMTPARPGSQVKTDRRDAVVLASLFRAGELTSIWVPDTEHEAMRDLVRARISAVETVRRARQQLLSFLLRHGRIYKDGIKHWSKKHRRWLGDQRFDHPAQQIAFEEYNRAIEQAEDRRSRLEKQVEALLPSWSLHPVVAAIQALRGVSLIAAVTIIAEVGDFRRFANPRQLMGWLGLVPRERSSGSTRSQGKITKAGNSRARRMLVESAWTYRLPARIAGDLLRRSANLSQEARDIAWKAQVRLCARYRRLLRSGRPKNVVTVAIARELAAFVWAIAIQTPAPAQTA

SEQ ID NO: 224785 - protein, 407 aa, unidentified
MDVLYPRCAGVDVHAGSVTACVRIASGAEVTYQHHTVPATTHRLLELADVLAAAGCTHVAMEATGVYWKPVWHVLEGQFTLVLANAMHIRNVPGRKSDTNDATWIADLLAHGLIRGSFVPPAPIQELRDLTRTRKQLVGEIARHTLRIQKTLEDANLKLTQVVSDILGTSGRAILNALVAGETDPAQLADLTTGRLKATRAQLIAALHGRVTPHHRFLIALHLTQIEALDGAVRKLEDHLGDALAPFRAAAERLTTMPGLSDTAARVLIAEIGVDMTRFPSAGHLVSWAGLCPRLDESAGKRRSTRIRHATPWLKTTLIQAAWAATRKKGSYLQAQFLRVKNRRGPKKAIVAVAASMLTAAYFILRDGVEYHDLGGRYFADRDKQQLTKGLLRRLRDLGVVVEVKVA

SEQ ID NO: 224786 - protein, 311 aa, unidentified
MSEKAFFVGIDVAKDRLDVAVNPSGETKTFSHNHQGLSSLTAYVRSLAPSLIVLEATGGYHKTVLSTLAAEGLPTVAVNPRQIRDFAKATGTLAKTDRIDALVIARFAEAVRPEVRPLKDEEAERLQALITRRRQLIEMLTAEKNRLAMAAQWTRKDIRAHIHMLERQLKRIDDQIKDLIDQSPLWRQKDKILQSMPGVGPVLARTLLAELPELGTLNRRQIASLFGLAPFSRDSGRFRGRRMIWGGRAHIRTVLYMSAVVAARFNPVIRAFYQRLKEAGKRFKVAITACMRKILIILNTMIKNNTCWKYA

SEQ ID NO: 224787 - protein, 368 aa, unidentified
MDNLVELAARHSMQQVVLGLEATSNYGYHLTAFCQNSEKLAPFSPQIHVLNPRTVNNFKKSYNDLPKNDDIDAWVIADKLRFGRLPEEVFMDERFLALQRLTRTRFHLAQTIAREKTYFLNNLFLKFSSLRQEKIFSDPFGATAIAVVEEFYSPDEIAAMPLEELVSFLQEKSKNRLVDAEGVAKALQKAARSSYRLSKSLADPVNACLAASISVIRALQSELKRLDKLIAQHLEAFPQTLTSIKGVGPVYAAGILAEIGDIRRFKSQKALAKYAGLVWNEHQSGQWKAQDTPRVRSGNKYLRYYLVEAANLIRVHDQEYREFYQAKYNEARTHKHKRALVLTARKLVRLVFALLRSNQLYTPRKRGD

SEQ ID NO: 224788 - protein, 369 aa, unidentified
MDDITYVGLDVHKATVCVAVAEGGRNGEVRQVGVFENRPEILCKMAARLGKGGRGLSFCYEAGPCGYGLHRLLTGCGHSCIVVAPSLIPMKSGDRVKTDRRDAMMLAKLHRAGELTAIWIPDAAHEAIRDLVRARATAGRVLSKARQHLQGFLLRHDRIYLGVRAWTVAYRRWLTTLRFDHPAQQIVLQDYIHAVEDAEVRRDRLTRQIEEVLPSWSLAPVVAALQAMRGVALVVAVTVVAEVGDFRRFANARQLMAYLGLVPSEHSSGSTIRRGGITKAGNALARRVLIEGAWTYRMTARVSRKLHDRLEPLSVVIRDIAWKAQVRLCARYRRLAAAGKPKVVVTTAIAREMVGFIWAIARIAQPALD

SEQ ID NO: 224789 - protein, 344 aa, unidentified
MSIKVVGIDLAKHFFQVCVLSNENKVTSNKKVTRAKLLDVIRQFPENTLIAMEACGSSNYWARTVVNMGFSVKLIPAQHVKPFVGHQKNDANDARAICEAASRPNLHSVPIKTIELQDIKSLRCVRQRLVDQRIAISNQLRGLASEYGVVIAKSFKCLREQVPEVLEDPNNEFSDVMRKLIYSLWLEVDGLTEDIKSISIELESLCKQQPRYQALLAIPGFGPIVTAAFLSQVGTGKQFSNGRQLSAWCGLVPRQASSGGKVKLGRITKNGNNELRALLIHGARAVSKYTPDKTDALSRWFNALAIRSGKAKAIVALANKLTRIAWVIVTTGDEFKANCAFKTA

SEQ ID NO: 224790 - protein, 428 aa, unidentified
MNDARRREDVKQQFAAFVAIDWADEKHTFTLQAAGQGKKESGTLEQKPEIIGAWVAKLRERFGGHPVAVAVEQSRGALIHALLSYDFLVVFPIHPRTVAKFREAFKSSGAKSDPLDTDQILQILTKHLDLLKALRPDTEETRLLGRLVEDRRKTVDLRTSHILALQASLKEYFPQALEILSANLTSRLACDFLKKWPSFPAFQQAKPSTVKRFFYGHNVRSPELIVKVLKVAEKSQALTTDGAIVESGRRLSQMHAEVIQTLNPIIEQYDQKIEKAFHDHAETKLFAHLPGAGPALAPRLLVAFGTDRSRYEAAENVQSFSGIAPVTKSSGKTRIVYARCACPKFLRQSFHEFARLSVAQSQWARNYVDYYTAKGKKYHTIIRALAFKWIRILFRCWKNRTAYDENKHMEMLRKRGSIFAILHLEKKS

SEQ ID NO: 224791 - protein, 370 aa, unidentified
MDEVSTFIGLDVHKATIAVAIATGGLRDAAEFLGTIENTPSALAKLLARFGRKHKRLSFCYEAGPCGYGVYRQLTEAGHACSVVAPALIPRRAGDRVKTDRRDAVSLAQLHRAGELTAIWVPDTAHEAMRDLVRARLTAVQGVRRARQQLSGFLLRHSRVYDRKTVWTRTYRHWLAGLRFEHPAQQIVLQDYIDAVTDAERRRDLLGEQIRLLLPDWSMAPVVVALQALRGVALVVAATLVAEIGDLTRFDNPRQLMAHLGLVPSEHSSGASVRRGGITKTGNAAARRAMTEAAWTYRLPARISRGLLGRNEGVDKMVRDIAWKAQVRLCARYRRLAASGKPTKTVVTAIARELVGFAWAIARHVQPVRA

SEQ ID NO: 224792 - protein, 394 aa, unidentified
MDRIGLDLHTRESQLCILTAAGEVVEQRIVTSRERLSAVLGGRPPARIVLEASTESEWVARHLESLGHEVIVADPTYAPMYATRSRRVKTDRRDARTLAEACRLGAFRAVHRASDAQRHVRAELAVREALIRTRTRYVAVVKALLRRDGWRLPSGMPEHTARKVAALPLGAAARAELTPLLTLLAPLQGQIDAADRQLEAVAAQDPVVRRLESVPGIGPVTAVAFVAALDTVDRFTSARQVAGYLGLAPSERSSGEHQRRGRISKTGNPRVRVLLVEAGWRLLRSRQSAAAPLRAWAERLAARRGPRDRGGSARPAAGADPVRAVARRERVSAGGAPRRLGTHRLDERDPGSDGERDAIYGRSREPPTSGRHRLFGSQDAPMSTPHQLRARTED

SEQ ID NO: 224793 - protein, 414 aa, unidentified
MKLLFIGDDWAEGHHDVVAQDDAGKILARRRLPEGADGIARFHEMVASCLGEDAEPDPTRVIVVIETDRGPWVKALAAAGYRVYPANPRQAARHKETVANSGKKDDFFDAGCLADMGRTRRHQMRELAADSDVAEAVKIAARAHQKLVWERTRHLLRMRSALREYFPAALEAYADLTLAGKDALELLAKAPDPESAARLTVTQVTAALKRAGRRGDLAQRARDIQAALRSPHLAQPAVIAEAYGASVQAGAALITALNEQIKIMEARVSALFHRHPDAGIYLSQPGIGDITGARMPGEFGDAPGRYASAKARKNYAGTSPLTIQSGKKKTVHARYIRNRHLIDALHTQAFAAISASPGARGYYDELRAREIGHEDALRRVASRLTGILHGCVKTGSEYDETTAWSHHSTPAQAA

SEQ ID NO: 224794 - protein, 356 aa, unidentified
MQTQVTKKIDFTGKQLFIGLDVHKKSWSVTIVVDGMEHRTFTQPPDPMTLFNYLQRMFPGGNYNSAYEAGFCGYGIHRQLNSLGIKNIVINPADIPTSQKDKLQKRDPIDSRKIARGLEKGQLRGIHIFDREIEELRSLNRTRFYLMRDLRRSKNRIKSFLQYFGISIPSEYDNNLWTLKYVSWLKQIKMQTMSGQDAFSNLIGSYEYHREQLLTLSRQIRQRMREYDNELYTLLKTISGIGPLTSSALITELGDINRFPHIDHLSSFVGLIPRVRDSGETTHTGGITFRCNSFLRTMLIEASWQAIRKDPAMMQYYQKHIINNKGHKVIIKVARKLLNRIRYVMKTRQAYVTGVA

SEQ ID NO: 224795 - protein, 367 aa, unidentified
MSHIIYCGVDFHARQQTICCLKTETGEFTSHELKHDHKEALRKFYAELGGPVIVGLEASGYTPWFEQLLEELGHQVWLGDATEIRRRARRRQKNDRRDAELILELLCHDEFPRIHRPLPQSREILRMLRYRHKLVKVRTMVKNSLQALSIQAGLSLQARLFTRQGTQQLEALTLSPVMRHQRQQWLELLQELNQRITETEGWLKQQALSDPRIQLLRTHPGLGLLSSLGIVHTLIPVSRFPNTRKVAAYGGFDPMERSSADKKRYLGISKAGSRLLRFLLIEATQTAVKTDPELKRFYHRLVQRRGKPKAKVAVARKLLIRSFIMLRDEINYAEFQQRAIAARLAREFARPNVPVPLIGQPASPAKG

SEQ ID NO: 224796 - protein, 422 aa, unidentified
MHKQEESAFAAFVGIDWADKKHDVCLQVAGSAKRERLVLEHRPGAIQAWAEQLRERFGGAPVAVSVELSRGPVVSALLEHDFFRLFPVQPTTVANYRKAFAPSGAKDDPTDAEVILELLVRHRDKLKPLALESADMRALRRLVEWRRDLVQDRTRLTNRITDALKAYFPQVLAWFPDKEAALFADFLERWPTLRHAQRARRETLEAFFRAGNVRRASSIEKRLQAISDEQPLHTDEAVTGPARLLVEALLPQLRVLSAGIARFETEIAELAPRQPDYQFFDDLPGAGPTFAPRLLVAFGENRERFPTAASLQKSSGIAPVMERSGNKAWVHWRYSCSKFVRQTFVEWAAQTIPRSFWAKAFYDSCRARGARHQAALRALAFKWIRVLHRCWLDRVPYDESRYLMALQKRGAPLLNHAARNAT

SEQ ID NO: 224797 - protein, 411 aa, unidentified
MRRIRDRVAGLDVHRDSVTACGRLVEHGEVVEELERFSTTVAGVTELGSWLLSRGVTTVAMEATGVYWKPVYYGLEGLVEELWLCNASHVRNVPGRKTDLADAAWLADVVAHGMVRPSFVPPPPIRELRELTRYRKTQVDVRGQEVQRLEKVLQDAGVKLTSVASTVWSVSARAMVEALIAGERDPAVLADLAKGRMRAKITELAEALASNWGQHHSIVAARIIAHIDFFDVSIAELTTAIGDRLGPFGNLIERMTEVPGISRITAEIVIAETGGDMTRFPTPGQLCAWAGVAPANHESAGKHRPAGTRKGGRWLRRTLIESAKSASRTKDSYFAAQYRQIARRRGPNKATVAVAHSLLTVLWHLMANPDQHYHDLGGDYFHRRRDPQREADRLVRQLEQLGYHATLEPAA

SEQ ID NO: 224798 - protein, 337 aa, unidentified
MYYGGIDAHRSYLTVAIMDREGRLVHERKRVPVGDGTPIVEELEGFRPLEVAVETCPFWPWIHDVLEPTEIGFHLAHASELEAIANAETKTDSVDARLLARMLAANLIPEVYPKPANQREILYLVRHRASLVTERTRLACRIHSHLHQRGLELPREQLLGKKGRHWQREQAWPRLSAEQRALVETHLELIDTLGTQIGELDRRIETRAREHPGASLLQTIPGIGPYRSLLLIGELMPISRFASPDRLVSYAGLAPRTRSSGGKTRYGSTPQAANRWVRGELVSAIPSHMRSTPDSPLGVYYERQKDRIGWQKARVAAARKLCRAIHVMLSTGEVWRG

SEQ ID NO: 224799 - protein, 334 aa, unidentified
MDLYIVGVDLAKEVFHLHAANKKGEKLWARKLKRAEFYNFVRDLPRCKIAMEACGGAHHWARKFSELGHEILIIAAQYVKPFVKRNKNDKNDAAAIVETALRPDMHFVGMKSLHQQDVQCLHRVRSRLVHERTAIIQEMRGFLMEYGLVMPVKASSFRKRIADILEDATNELTESVRSTLKELYDDFKYTDKRVRDLEKRLEQICNTTPVCQSLQKRAGFGVMCATALYCEIGDPRVYKNGRQFSASLGLTPKHRGTGGRNLIQGISKRGNVYLRQLMVHGARSVVSKVKLKINEKYEVSSWIKRIEEERGFNKASVALANKNARWAWHVLVGH

SEQ ID NO: 224800 - protein, 345 aa, unidentified
MEITTLGLDLAKNVFQVHGISSTGEVVVRRALRRAQMIPFFSKLAPCLVGMEACGTSHHWARELTSLGHEVRLMPPAYVKPYVKRGKTDASDAEAICEAVQRPTMRFVPIKSVEQQAALALHRTRDLLVRQRTQLVNMIRGVLGEFGIELPKGITYALAFVRRVVAGEAPDIPQLAAKAIGALAEQALETQARIRQLERELLAWHRSSELSQRIATVPGVGLLGATALAATVTDPTQFRSGRQFAAWLGLTPLQNCSGGKERLGRISKMGDKYLRRLLINGMTSIVARNAHRPGVADARVTALLARKPLRVATVAMANHAARAIWAIMARGEIYRAPAPPEPVAA

SEQ ID NO: 224801 - protein, 479 aa, unidentified
MNHRRLVGIDLGVASAHTVRVLDGEGNTLAKRKAWPTVESLAEIETAALAGCPEGTRLEVVVEPTGPAWLPIAVFFANRGHVVHRVSSAKAADLRRFLSRHTKTNGIDADTLARLPLFDPAGLRPLELPGAERAALDRRVRATDRLTRAGAEHKRRIKDLVRQLLPMTPLTGDLGAADLAVLERWADPNALVKAGVKRITAVIAKGSNNHQGVERAEQWLDAACSALELYAGHPAVAFAELGAEVATEVRLLKAIQAELAAHAAQREYCYRWVDPGGLARSLPGLADVGGPALVACMGDAGRFAHAKQFRSYTGLVPKASETGDTDRKGQAMSKAGSSLLRTTLIRAADHARHQDPQLARIYYLQMVERGKDHLGALCVVAANLAERAWVVMHRQTPYVVCDTDGAAVTAAEAKAIIAAHWAVPAEVRARRRSKKGGKAPQQVLAAHGKPSARSAGRRGDLPHPASSPATTIDVKKRTA

SEQ ID NO: 224802 - protein, 341 aa, unidentified
MKNLFIGVDFSKEKVDVAIIFADGLTETAPRVFNEFKTTVSGYKQLVKWVEQNSYGIDSSLWLFCGENTGDYSKGLCNFLYGKGYDMWLENAKSIKDASGLRRLKSDRADASMIAEYAMRNYDKAIMYEPLSESLAQLRELFLYRQMVVRHRCSFQVRRGEKRLTMEKSPVKTMISQSGRHIVSELNKEIEKIDKRIAELIKSDEELTEVFTIVTSVPGIGTQNAVCLMVYTDNFRRFNYDSRKISCYYGIAPFGKDSGTSVHSDPHVHYMANRQIKAMLTQAALAAVNFNPVMARYYMRLVERGKKKQVALNNVKNKLVHLVTAMVRNRQIFTPEYKISA

SEQ ID NO: 224803 - protein, 414 aa, unidentified
MALTRWVGRAIGLDVHRDFCEVAICEDGKVRSAGRVPSTPEGLGVPAASLLKSDRVALEVTGSCWEVARILEPHVNRVVVVSPDDTGISSARAKTDKLDSRTLASLLWRGELDAVWMPDERCRILRRRLARREQLVRARTRSKNEIQAVLQRRLQSKPALADLFGVKGRHWLAGLQLPVEERESIDAGLRHVAFMDSEIAAVDRLIAQQALGWPEIRRLMTVSGVNLICAASFMAAIGEPSRFLTSRRLVAYLGLDPKVRQSGEAPARSGRISKRGSASARWALVEAAWSVVKQPGPLRAFYERLRARRGHGKAIVATARKLTVLFWCMLTRGEDYAHQRPALTKKKQRQLELTAGAPARTKAAAGVWSTNQAILHAERALAEQAEVSYQRMVSDQKAGRPSRKAGASATPERA

SEQ ID NO: 224804 - protein, 316 aa, unidentified
MNRSEVFVGIDISELELEIGILPQSQTWKSPNDETGMSELIKRLAELGPELVVMEATGGLERAVHSILEEAGLPVRVVNPRQVRDFAKALGILAKTDAIDALVLAKYAQSVKPEPRPAKDKQTRELEALLKRHCQLVEMLTQEKNRLRTTAKPVRGNLEAHITVLKKYLKEVDKDTRSFIKRMPIWRDKDKIIQSAQGAGPVLSATMLSSVPELGALNRRKIAALIGVAPFNCDSGKFKGRRRCWGGRAGVRSILYMATLAAIRCNVIIRPFYQRLIAAGKDKKVAITACMRKFLTILNTMVRNGAKWNPVRATGL

SEQ ID NO: 224805 - protein, 623 aa, unidentified
MNDDFTDLPDDIEALKTALIAALAEVAVAQAQRSSDLALIAYLKLEIAKLNRDRFGPRSERTARLLAQLELQLDELTASASADELAAEQAAAKTSRVNAFDRKHPARRAFPEHLPRERIIVPGPIRCACCGGARLAKLGEDVTETLEVIPRSWKVIQTVREKFTCRDCESISQPPAPFHVTPRGWAGPSLLAMILFEKFGQHQPLNRQAERYAREGVELSLSTLADQVGACTKVLMPLFGLLEAHVMAADRLHGRACWGGRPHGIACQNWVLSQHPRPEPSMNQYKRIAIDTSKAVFTLHGIDQADRPILRINLSRAQMIAFFTKLPAIEIAMEACGGSHYWARELAALGHRVVLIPPQYIKPYVKRGKNDRNDAEAICEAAGRPGMHFVPVKSADQQAQGMVLKVRETLVDQRTALVNTLRGHAAEFGVIAGKGVSNIIPLLEKIAAETAIPLEARETMALLGEEIARLDARLKQMETKLNQAHKANPVSVRLASIPGVGPITALTLATEIDPTAFESGRHLAAWAGLTPREHSTGGKQRLGGISRAGNERLRALFVLGATSVIKVAERPGNKLANEWLLKLLRRRPRKVAAVALANKMVRIAWAMMMSGETYRRAPAAGVS

SEQ ID NO: 224806 - protein, 381 aa, unidentified
MPAEALLVHHTPSRPRLYMAMELASKSWKLAFSNGTARKPRVVTIEARSEDALDDAIVRAKKRLGLPPDAPVVSCHEAGRDGFSVHRFLEGKGVESLVIDPASIAVPRHKKRKKTDRLDALKLLACLVRHHRGDDDVWRVVRVPTVDQEDEREPQREREELCEERTRHRNRIKSYLARLGIRVRTLRGLTESLGDFQTLWGDPIPPEMASAICREVERLQLVEEQLSLIDAEERERLEQPRTEMDAMATTLVELKGIGVVGAMVVVKELLGWRDFKNRREVGGASGLTGTPYDTGESSREQGISKTGNRRIRRIMIELAWSWLRYQPDSPLTHWFVEKFTTGGKRSKRKGIVALARRLLIELWKLLRYGVLPEGVALYRSV

SEQ ID NO: 224807 - protein, 347 aa, unidentified
METAPDTVGYRLFVGVDIAAATAMAAWHAAGGKVGRPVQIAQSPEGHAELHEKLRASGVPAGEILVVMEATGSYWITLATTLAQWGYAVSVINPSQAHDFAKALLKRAKTDAIDAQTLAQLAALLQPERWTPPPAIYMELQQRLAQRDSLLDLRQQVRNQLHALEQGPVVIAVVRQRMETPIATLTVQIKEVEKEITPVLAQDAAWAKAATLLQTIIGVGLVTAAWLVTSTLNFSVCPSPDAAAAYAGLVPYVRESGTSVRGKQAISRSGNKRLRRTLYLATLAATRWNPQIKAFYTRLRAAGKPAKVARCAAARKLLHLAWAVVTKDRAYDPAYPQGSTAQSASAA

SEQ ID NO: 224808 - protein, 362 aa, unidentified
MRTITIGVDLAKQVFSICSADVAGRVQERRDLRRDAFIHWLPSVSAGTIVAMEACSGAHHWARRCHELGLEPRLMAAQFVAPFRKSRTAKNDRNDAEAIATAARQGNMRFVPIKTVDQQVRLSWHRVREGYKAEALATSNRLRGLLAEFGVTMAQSDAALRRTLADLDALALPPPLLELLRSVDAHWQQLRERIAQCDGRIQLHAKADESCARLRAIIGVGPITADAVVATIGSAQSFANGRQFAAWLGLVPMQHSSGGRARLGRISRRGDGYLRTLLIQGARSSLQRAKAVAWEKATAEQRWIQGIERRLPFGKVLVAIANKHARQLWAMLARGEHYDADAWLKHPMVQRPASRRAAPATN

SEQ ID NO: 224809 - protein, 321 aa, unidentified
MDQEGQVLRSGRVPNLRAEIEKFLEGGEAMEAVIETGRSSYTMVDVLEEMGVAVKIAHPNEVKAIARAKIKTDKRDSEVLAHLLRMNMIPEVYRRSTENRQAQRVLRQRSYYVSAMTALKNRVYAFLAQQREEIREVVARETNIFSEKGQKVLLGLDLAPREKKLLEALLKTYRHLETRIGESKAFVEKLYEESREAQFIRTIPGFGKYLSVLVAVEIADLTRFADPAHLHAYAGVIPSTHSSGDRTHHGKIIKAGNRWLRWAAVEAVWPAIRADFDLRLFYQRLARGKGANKAKVAMARRLLTIIYKVLKEGRNYIAYPR

SEQ ID NO: 224810 - protein, 348 aa, unidentified
MEHYAGIDVSLECSSLCVVDAVGKIVREAKVASDPEALIAWFGSLGLQVVRIGLEAGPLSQWLYAAMKQAGLAVELLETRHVRRAFETMLVKSDRNDARGIAQLMRHGWFRPVHCKSLPAQEVRALLTARKLVQSKLQDTENSLRGILRGFGLKVGKTTPTRFAGRIKDLVAGHPSLEVIAQAMLAVHAVLQREFKGLEKRVRLLARSDPSTRLLMTTPGVGAIVALTYASAIDDPARFRSSKQVGAHFGLTPKRYQSGQTDYTGRISKIGDAAVRTALYEAAHVMLTKPLKGCTELKSWAMRIAKRAGMSKAKVALARRLAVIMHRMLVDRTSFNSAARRAPVAIAA

SEQ ID NO: 224811 - protein, 341 aa, unidentified
MYSIGLDISKATISIHIPLNSLDLEIENSAKGLKSFYSKLKKLYKKELEKIVFVYEPTGSYSALITKFCANKTIKAFIINPKQSSNFAKALGYRSKSDKIDAKMLSLAISIAKQSEIKVPVINATAEDIKELMSYYMFTVKQRVAVQNHHEALNVKDGNSYALKDLKRRIKEMKQKEDEIIQKIDDIIKGDDKLLNDYQNIKTIPGIGTITAIVLLHLFIKYPQANQKQIVSLVGLDPVIKESGTSLNSKPRISKSGSRLYRGVLFMATMVSIKYNNQMRDFYDRLKTNGKHSTVAQIAVMRKLIVITHSLYKNNSKYDAKVYQLAGGNKSNKSEVEEDLV

SEQ ID NO: 224812 - protein, 305 aa, unidentified
MRKPSTTALRRRGKLQGEQLTIGLDLGDRSSFYCVLNGTGEVVLEAKVATHPEAMRKTFEKMPPSRIALETCTHSPWVSRLLTELGHEAIVAHSRNVRLIGESRRKDDRLDAQGLARLARIDPQLLSPIQHRSAQAQADLSVIRARYALVRARTALVCAARGLTKSFGERIRGRNPKGFCSATSEALSPPLQVALAPLLSALEAITVRIREYDAQIEQLAEESYPETALLKQVKGVGTLIALTYVLTLEDPRRFRKSRDAGCFVGLQPARRNSGQSEPQLHITREGDSYLRMVRMSRSPRVRMEG

SEQ ID NO: 224813 - protein, 411 aa, unidentified
MLEVKVEKCAGIDVGKKFLAVCVLIGLANRKPVGEVRRFGTSVKELERLRAWLLESGCTEAVMESTGSYWKPVFNILEGSLKIILANPEQVKALRGKKTDPNDSRWLASLLRHGLVQASFIPSRDIRDLRDLTRRRRTLLSEGASERNRIQKILEDANVKIGDVLSNVFGTSGQAMLEALLANNRSPTEIAELAHWRLAPKIPQIVESLEGHRMREHHRFLIRQSLDHMQYIEKMIGDLDAEIAKRLKPYQKQIELACTAPGIGPTAAASILAETGMDMTPNGPFPDCHHLASWAAICPGNNESAGVRKSGRTRRGNRWLRATMQQTAWAGVAKKDSAFQLRYQKLKSRRGPQRAITAVAHAQLIAMYWTLRNGTPYSDQIRQSEDVHRERQIQHHLRQLTKLGHQIEKEV

SEQ ID NO: 224814 - protein, 346 aa, unidentified
MEHYVGLDVSLKLTAICIVDRTGKIQREGAVHSDPEAIAAFIKSNAPHVARIGLETGATSTWLWTELNKMGLPVICIDARHAKAALKMQINKSDRNDAVGIARIMQCGWYKEVRVKDLDSHAVKAVLVSRALLVKIKRDLENQIRGLLKNLGLVIGPAKMNAFALRAAELSEERPELAVAVKPLLTARLAIEQQISDLDRRVMKLARSNAQVRQFMTAPGIGPVTALCFLATIDDPGRFKRSRSVGAYVGLTTRRYASGEIDWTGRISKCGDKMLRSYLYEAANVLLTRVAKWSALKAWGIRLAKRSGLRKAKVAVARKLAVILHRMWIDGTEFKWSSKETAERPA

SEQ ID NO: 224815 - protein, 346 aa, unidentified
MTIVEDRPVITGGVDTHAGTHVAAALDPVGGLLGVREFPATAAGYVGLLGWLGEFGDVALVGVEGTGSYGAGLARHLAAAGVRVVEVDRADRQDRHRQGQSDPLDAVSAARAAQSGRAAGAPKGRDGAVEAIRALMVAKRSARSERTQAINQARALIVTGPDDLRARFAGHAAPALACAVAALRPRPGDVPGYATRVALRELGRRVQFLDAQLERLDELIIPLVTARAPALLSLHGVGPDTAALLLIAAGDHPGRLRSEAAWAHLCAVAPIPASSGKTSRHRLNRGGNREANHALWRIVITRMSSHPATRTYVARRTKEGLSKKEIIRCLKRYVAREVYHHLRDGA

SEQ ID NO: 224816 - protein, 440 aa, unidentified
MNQEDRSRLEEFRQFRKEVRGSTEYLLVGIDVAKDKHYAFFGTAAGKTLFRRLVFENSIEGFRKLLGQAEAMKVQEGLTKVVFGMEPTGNYHKPLGEHLIRCGHGVVLVSGVAAHENRKTLDGRWDTNDSRDAANVADLMSQGKCLFYEFPVGVLQDLRNLLSLKRRLKRMEHGHRVRIRNHLVAKYFPELDRYYDQSESTALAIVRWCLDPSEITGLEYKRFVQMVSSVRGRSSQEKRLQTIWKMAVDSVGCEAGPTVEFEAQVMVEGLKQIRESIRQIDEKIQEICSQFPEYEFLLSIPGFGPDVSAKVLGAIGDPFRFQNGRQVLKMAGLDLSAERSGKGSERVVPVISKKGKADLRYALYQAALIASIRDRHFMVYFTHQLSGREREPGIKTKMRVKLAAKLLIIAWTLMKKKEPFHPSYVRVEFQSFSAGAGRER

SEQ ID NO: 224817 - protein, 415 aa, unidentified
MAKVMEAIYRCIAGIDVHSKTVAVCVRRIDDQGAIHAEVRTFGTMTQDLRALRDWLMAEGVTHVAMESTGVFWKPIYNVLEERFKILLVNARHVKNVPGRKTDVRDCEWLAQLLQAGLLKGSYIPPRPQRDLRDLTRMRAQLTVEMTSVANRIHKILEDTNIKLGLVATDILGVSGRSIIEALIAGETNAEKMAEMARGRLRQKITQLQQALVGNVTDHHRWLLKELMGHLTYLETQIERFNQRIDEAARPFEKAVTALIEIPGYDRVSAQSVIAEIGPDMKAFPTAGNLCSWAKVCPGTSESAGRRKSSATGHGDRWLERILVQVAWAATHKKDSYFGALFRRLAGKRRPKPAIVAVAHSILTTTYFILKYDSTYKDLGADHFDRIAKDKVRRYHVKRLEGLGYKVELTEIAAA

SEQ ID NO: 224818 - protein, 378 aa, unidentified
MTRISVGVSKNRSTVCIMDQDGKVIMRPFLVWHSTEELDFLADTLKRLNGEVRVIMESTSVYQYPIALQLKERGLFISIVNAYEMKQFANIDFRGGKTDKKDSRTIASYGISYWDKLVEWQIPKDTYFNLDLLNRTYMNAKKHRQIILQELQHYIDCAMPGMDKELHSLNLNTKKDFMLDFVEKFWHRDEIVNMTEAEFTEVFTAWAKEKGYRPGKGKAAKIYAIAKSCIPYYPANPTVKTILQCIVDKLSGVNRTLVTIVTQMIEEAKKLPEYQIVREMPGVGDPLAARFFGSAGDIRRFKNSKALVAYAGIDSPPDESGDFSSTHRHITKKGSKVFRDTGYEIMMALRAQKRTWEKVRKNAEVYDYMLRKEAEGKP

SEQ ID NO: 224819 - protein, 359 aa, unidentified
MENKVTKKMDFTGQNIYIGLDTHLKSWTATIRVEDTFYKTFSQDPDSKTLSNYLKRNFPGANYFSAYEASFSGFSAHRGLNKLGIKNIVVNPADIPTTDKERKQKDDARDSKKIAEQLGASKLVAIYVPGIEAEGDRSMLRFRRTLTKEIARNKNRVKSFLYYHGMTIPVQFADKKYWSKRFTKWLRELELPSESARVTLTEIVELVEFLRKKQYQMLKRIKELSQTKQFKQNTELLISIPGIGLITAMSFLTEIEDSARFSNLDKFCSFVGLIPTTNSSGEHEAVGSITKRQNKILRSLIVESSWVAIKNDPALMLAYQKLVKKMKPTKAIIRIAKKMLNRIRYVLREQKSYEYAIVK

SEQ ID NO: 224820 - protein, 344 aa, unidentified
MDYFAGLDVSVKETSVCIVDDAGRIVREVKVASEPEALLPVLMNPAYHFKRVGLEAGPLSQWLFSALTEAGLPVICVETRHMRAVLQAQINKTDRNDARGMAQMMRAGLYRPVHVKTVRSQKLRMLLTHRKLLQSKAIAIENDLRGTLRNFGLKVGVVGKVRFEARIRELVEKLPDLAALVEPLLIVRRTLREQFCILHRRLLAIVRDDEVCRRLMTTPGVGPVVSLTYRATVDVAARFRKSKSVGAVFGLTCAKYQSGEVDWSGKISRCGDEMMRVMLYEAAQSMMRSKKWSWLKAWAMQIARRCGMKKAIVALARRLAVIMHRIWVDGSEFRWAREQATAAA

SEQ ID NO: 224821 - protein, 350 aa, unidentified
MLIIGCDYHPSFQQIAFVDTDTGELQERRLEHREEAEKFYRDLGAQGMKVRVGMEASGHARWFERLLAELNFELWIGDAAEIRTKRVRKQKTDRQDAQLILKLMLKDDFPQIWVPSWENRDLRQLLWHRHRMVQARTRIMNQLQAVALNEGLRCKKRLWREHGREQLESFRLAPWASRRRQDLLELLDRLNPTIAELSQAIEQEAEKFPEARWLMTHPGVGALTALAFVLIMGRADRFQCGKQIASYLGLVPLEDSSGNRRRLGHITKQGSSMLRFLLVEAAQVTVRSLPEWRSQYFHLMMRRGRKIAKVAMARRLAIRLYWMWRKGWDYEQVKKFGSHAGQPGNRHGVQ

SEQ ID NO: 224822 - protein, 339 aa, unidentified
MGLHCAVDLHGDNGYYGIVDETGKRIMSKRLPNDLSLVLGALSPYRDRLDGGVVVESTYNWYWLVDGLKDSGIQARLANPAAIQQYNGLKNTDDETDAFFLTEMDRLGILPEGYIYPKEERPVRDLLRRRLLLVGQRTAHILSFQNMVARERGEQISSNNIQKLWPEEIGKLFDDERLVLMGQTNIEMIRFLTKKIHQIENRVLADAKLKPEYEKLLTVPGIGKILALTIMLETGDINRFKKVGNYTSYCRMVKSSRSSNDKKKGENNRKNGNRYLCWAYVEAANFIRRYCPEAKAWHQRKAARSKQVVATKALASKICKACYFIIKDQEDFDVRRMFG

SEQ ID NO: 224823 - protein, 351 aa, unidentified
MNKNKQFYIGIDVSKPYFDASLMAVIDHVKQEPMIERFTNDQSGMKHFDKWLKKQGVSFDKQSLVVIENTGIYHRNIWSYCSEKGLPLHIGNAAHIKWSFGIARGKNDVIDSKRLCHYAFKEADTLKASPELNKDLLKLKDLMSSRSKLIVQISGIRRHLNELKTSNDKATQTLIEKAHKQAISGLQKSIEALETEIKRILQSDDRLHKNYQLLTTVPGIGHLTAVYILCCTNNFHTKISGKQLACYAGVVPFEHISGISVKGRNRVHKMANKELKSMLHLSSLAAIQRYPEFKHYYERKKTEGKHSMSVLNAIKNKIILRAAAVVNNQLPYQENHPYESQKFRKKYLEKS

SEQ ID NO: 224824 - protein, 329 aa, unidentified
MQTPSVVLNVGADVAKDEIVVACSEGSFAVRKVANQRLAVLTFLKSLPAGSRIGVESTGSYHELFADAAHQLGFLVFLLNPKDTRHYAKAVGLRGKTDRVDAELIARMIAHEYTKLHAWIPPTAQQRELDRLIKRRATLISLREAVAMSLHGLGGLADELKALRTRFNQLIARLDARVKALVEASPERKQNFTRMCTITGVGPVVGIALVNALERVPLKSADAFVAFTGLDPRPDDSGQHRGKRRLSKRGPAELRRLLYMAAMSAVKTKTWKPLYEHYRAKGLSSTATLVILARRIARTAWSMHTHKTTFDVERLTQQSSKRSVAGVSQ

SEQ ID NO: 224825 - protein, 413 aa, unidentified
MIEPVVKCCAGLDVHRASVVGTVLEEDDEGQVRKETREYGAFRKSLVELGGWLRKRGVELAVMESTGVFWKPVYEILEEQIAKVYLVNARSVKKVPGRKTDVLDSEWLAELARCGLLTPSFIPPKDFRELRFLTRYLLKLIGYMAGEKNRLHKILDDSGIKLGCVVSDINGVSAKAMIEALIEGKMRPEEMAKLARGQLRKKEEALRLSLHGTISDRRRYLLQCIQRHIRWLERQKAEIVRQVVAAMEPYRREWELVQTIPGFDELSAAMLLAEIGIDMSRFGKSERLTSWAGMCPGNNESAGKRLSGRTRKGNKYLRQSLVEVSNSARKTQSQFQSIYQGLVIRRGHKRAIMAVGRKLLEVAFVVIHRKEPYRDPKIDYEQMVVLRNAPRWITKLRKYGYIPVSLTQKSAAA

SEQ ID NO: 224826 - protein, 344 aa, unidentified
MDHFGGLDVSVKETSICIVDDTGRIVREVKVGSEPEALLKVLGNPAYRFKRIGLEAGPLSQWLFSALTEAGLPVVCVETRHMRAALKAQINKTDRNDARGIAQMMRAGLYRPVHVKTLRSQKLRMLLTHRKLLQSKAIAIDNDLRGTLRNFGLKVGLVGTVKFEARIRELVEDLPDLVALIDPLLIVRRTLREQVVILHRRLLAIVRDDEVCRRLMTIPGVGPVVSLTYRATVDVPARFRKSKSVGAVFGLTSSRYQSGEVDWSGKISRCGDEMMRTMLYEAAQSMLHSKKWSWLKAWAMQIARRRGMKRAIVALARRLAVIMHRIWVDGTEFRWTREQAAAAA

SEQ ID NO: 224827 - protein, 371 aa, unidentified
MVKVAKYVGLDVHKSSISIAWCEGGARAEAVSLGKIEHDVSRLVKKLARLGERCDVHVAYEAGPTGFGLYRKLCELGFPCIVVAPNRTPVAPGPRVKTDRRDAASLAFNLRSGTITPVSVPDEETEALRDLTRYREDVREELQRARQQVVMFLLRHDRRFEDGKSHWTIKHREWIRAQRFAHECQIQVLEESYQEVVRLEEKLERVEEIVERTALAHTQFGELFRALQAFRGVRIVTAATLIAELGDLRRFESAPQLMSYLGLTPREHSSGDKVSRGSITKAGNGHVRRVLVESAWHGRHRPAKTKTLAARSKGLPEGVLALSWKTQHRLHERWKRMRVRNKEVNKIVIAMAREMAGFVWAMGQLVLPKAA

SEQ ID NO: 224828 - protein, 361 aa, unidentified
MHLTANISIPQKNFIAIDLHSDNAVICVRRNALNKAGELVGKNIWCGRVSIRDGLDNFIKVLVPHCQDFDHVALVESTYNWYCLADALEERGWLLRVADPSTVSQANLKSSDDRTDAQYLAERLRVGSLKHYLPLNYSSRALRDLCRYRMAMVQDCASLKIKLINLYRNQLSKNVRVADLLERCQPHMQPNYRFNSDILEEFKDPNIRLRVAFEISRIAMLEKMIEECNAEIQKQCKDQELVKLCKTIPVCGPVLSAVICTEIGTMQRFKSAGDFVSYCRLCSTSKLSNGKSKGLGNAKNGNAYLSWAFTEVAQYASRNPVIREILQRLLRKYGGLRVKAKLRNPPCLVHAYVPNCQTVQA

SEQ ID NO: 224829 - protein, 355 aa, unidentified
MTRPTYLPKNYETFIGLDVDKSSFSYTISSDSKILKSKKMPSNPEHLYNYIQKHFNQEKVICAYEAGPTGFHLHDYLTEQDILCLITSPASIPRPLNKKVKTNRIDSEQITKHLMSGDLKPIRVPQGPYRELRDLVKSRIQYAADRKTARQRIKAYLLYTNLYTNLKDPDSRWTRKYINELKQIECSPTQRLRLSMLIEDLEYARNKLLIVQRILRSFCRENDEINQYIGYLRSIPGIGPVTAITLLGKIGNPEHLTNPRELASFVGLTPKERSTGPSVNRGSITHMGDKTLRFLLVEAAWTAIRKDTQLSQFFHRIRKKNNPKIASKIAITAVARKLTQIVYRVLKDKREYIQH

SEQ ID NO: 224830 - protein, 344 aa, unidentified
MEHYAGLDVSVKETSVCIIDAAGKVIHEVKVATEPEALRAVLLDDTFTIERIGLEAGPLSQWLYSGLAEAGLPIICVETRHMKAALSAQLNKSDRNDARGIAQMMRVGLYRPVHVKTLTSQKRRMLLTSRQLLQAKAIDIENDLRGTLRNFGLKVGPVGTSKFEARICELVADNPDLAAIAEPLLIARRVLREQLAVLHHRLLAVVREDEVCRRLMTVPGIGPMVALAFRATVDVPARFKNSKAVGAVFGLTPRRHQSGEVDRTGGISKCGDAMMRRLLFDAAHVMLTRTIRWSWLKAWGMKIARHRGMKRAVVAVARRMAVIMHRMWADGTEFRWTNTTAAAA

SEQ ID NO: 224831 - protein, 361 aa, unidentified
MTDGSKQRPLMTAGLDIGGDKYSYLCLIDSEDGQMIEEGRLRTTPEALRRRFASERPLRIAIEAGTHSPWVSRLLEECGHEVLVANARKLRLIYANKRKTDQIDAENLARLARLDPRLLYPLKHRGEDAQAHMALIRSRQALVDCRTQLVNHVRGAVKSFGHRLPKCPARSFHKRASEHIPEALWPALGPILEQIGSLTERIRQYDRKLETISKERYPETELLRQVEGIGPLTALTFVLTLEDPYRFEKSRSVGAYLGLVPATERSGDSDPQKRISKEGDQMLRKLLVGSAHYVLGPFGSDSDLRRHGEKIASRGGKNSKKRAAVAVARKLAVLLHSLWISGEAYEPLRNAHRCGGREKAA

SEQ ID NO: 224832 - protein, 343 aa, unidentified
MNIATVGLDLAKNVLQLHGVDPQGHMVVRKQLRRTDVLRYFATLDPCVIGMEACGSSHYWGRELAKLGHTVRLVAPQFVRPYVKSNKTDAADAEAICEAIQRPNMRFVPVKTQAQQTMLSLHRARAGLVKSRTALANQIRGLLGEFGIVLPQGIRLLGQRATEALSSRDSEYCEPFRALIHMLVDHLRELGNKVAELEGRIRAIHRTDAPGQLLETIPGIGPLTASALAASIGDARAFRSGRELAAWLGLVPRQHSSGGTPRLLGISKRGDTALRTLLIHGARAVIRMAAAKTEMADSWLMKLCRRRHKNIAAVALAAKNARTAWAMLIRNQAFQASHVPARS

SEQ ID NO: 224833 - protein, 407 aa, unidentified
MSTFIGIDWSEKHHHVHVLNAHGATLSQFVIPHSVAGMETFEQQRTKLGVPPSDCAIALETAYNLLVDFCWDHQYPLYVIAPHITHSRRASYRASRAHDDDSDAFLLADLLRTDRERFLPWQPDGALVRQLSVQLDSIAQLTHTIVVYHNRLRAVLLRYYPTALGLFHDLHSQVSLRFLQRYPTPQAAQALAYTEFVSFCKAQRYTWDKLLPEHFAHLQRPALAADPSVVHAYQAETVFLAEVLLNLVQRKEALLRAVQQGFQEHPDSYIYTSLPGAGALLAPQFLVMFGDRRERYPDPAIIQALAGTCPVTHKSGKSHRVRFRRACNRTYRQTAQQFAQASVRQAAWAATYYAQCRARGHTKSHAYRCLANRWLNIIWTLWQRREAYNETYHTQQIQQHRRPIAAR

SEQ ID NO: 224834 - protein, 424 aa, unidentified
MNLTQNDRLKQVTFDTLIVGVDVGSKTHFCRAFDWRGFEISHRVFKFSNTGMGFLTFLRWTEELMNKTEMKKVIVGCEPTGCYWLTFQKFLQDHDIQLVTVNPFTVNRSMELDDNSPEKSDLKDPKTIAHLVKDGRYSTSYLPSGVYAEIREASVCRDQIMKQHIRLSNQIQGWLQKFFPEYLECYADWDSTSGLMLLKEAPLPEDILKIGAGGINQIWRDAKVRAAGIKRAQILIEAAQNSVGLEAGEAARLEIWVLVNDYILKAEQLKRLDEYLEEKVREVPNEEKLLAIKGVGMSTVIGFIAEVGDIGRFTDPKQIQKLAGLEIVKKSSGKKKGQPRISKRGRRKLRRTMYESARALMNWNPTFQDVFLYYRNRTRNPLGGMQAKIAVACKAIRVFYVVLQTGCDFDEEKFRKDIIRPEAS

SEQ ID NO: 224835 - protein, 410 aa, unidentified
MKSAVITAVGVDVSKSKSTVAVRRPGGEIVMHPFDVRHTNSDLKKLVSTLKKLGGDIRVVMEHTSMYWRPIALTLKKAGFFVSAVNAMLIHDFSDNSIRKLKTDRADALKIANYALTFWDTLPLLNDEEETRLLLKMQSRANERITATATVLRNGLIALADQTFAGVNLAFDPNTKNTDGHEKWVDFFLRYWHRDCVCQYFMEVFTESYRGWCKRKNYKFRTATAHKIYIMAQECVATLPKCESTKTLIGQACKSLNAVCEARHNTQLEMQRLAALLPEYEIVMQMEGAGPVTGPALMAEIGDVRRFKNKKALVAFAGIDAPPFQSGAFESKSRHVSKRGSPHLRRTIFLVSNIILTLSNPENAVFCFMGKMLRGKTLLCLYCCRKRKVLEHLLCSRERVPSLSSSSGCL

SEQ ID NO: 224836 - protein, 474 aa, unidentified
MGKGSGGSGMTRGDRRRNARRERLRGLLPRDGAVIGIDLAEDKQAIAVVDHDVRVLARKTVRVKAFRLGQALDWAVAQARAKGFSRVAVACEPTGPRWLQVQRLCAERGLPLVCVQPLVSHIAREQQDYTTHKSDESDVVMIARLAIELHCYIPEELDEAWAHLRHLGRRRAQLITAATASVQRIRDFLSVAWPTVAETCAYPLESTTWLAAVQVVTSRCGGQPARLAEMGPEAFTAAVRGAQRGWGGQKAWGPICRRVFAALTDTEGVVASCRRGLLRRVADELGDLQRTRAQLRAVEADMVCVLDELGLGRLADIPGLSAVGAAAILAETGDPRRYDSSSSLVKHAGLSPAENASGAFAGQAHISRRGRPGLRLAVWRAVWPMLQYNPVMAAKYTAMTRAAGAAADAAAAADAGSRQVSAAAAAARARRAKARVACAASLLRWIYSMIVHDTSWDAAAASGQDAPRRQPEAA

SEQ ID NO: 224837 - protein, 408 aa, unidentified
MNTLYVGIDVSSKSNVIYLMLPNGDKHSNFSVANSHEGSTQLVKRILSALTSHSLDTVLIGLEATSVYGDNLVYFLREDATLAPFNRKIHVLNPKQVKKFHDTYNDLPKNDYVDSFVIADCLRFGRINKEVYMGEYRYKALQNLTRARFFAVQNLVKEKQRFMNVLFKKYSTMTQEKVFSDDFSTTALAVYDEFESAEALANMDLHELTDFIIEKGKNRFPDPDAVAKAIQKAARSSYRLPKTVNDSVNQVLSISITSMKALESQIKEFDKAIKAQMELLPNVLISIPGIGPVYSAGIMAEIGDINRFNSQAALAKYAGLAWKQHQSGGFESEVTRLIPSGNRFLKYYLCEAAFSLVRCDKEYSDFYRLKYKEVNRCQHKRALALTARKFVRLVFRLLKDNRLYCPAK

SEQ ID NO: 224838 - protein, 351 aa, unidentified
MSQGTDAVIINTIGIDTGKNTLHLVGLDDQGTIVLREKLARSRIKTRLANVPRSLIGIEAGMGTHYVARELIALGHDVRQVPPAYAKPFRQTHKNDFRDAYAIAEAVQRPSTRCVPVKTDDQLDLQALHRVRSRLVGQRTAVINQIRGFLLERGIAVRQGLRFLRQQLPEILAKRIEVLSPRLIRIIEDLSGDWRRLDERIEHVTEEIEQLAHGSESCRQLMTVPGIGPLIASAMVAAIANGAAFAKGRDFAAWLGLVPKQMSTGDRTILGRISKRGNRYLRMLFMQGARVILLRPTNWAKHSFGPWLMAASKRLHHNVLATALANKLARIAWTVLAQRRSYETRVIAGAV

SEQ ID NO: 224839 - protein, 348 aa, unidentified
MHFYKGAHTFYCGVDLHARTMFTHVLDHAGVTVFARDLPARPDAFLHAIGPYRPGLVVGCECMFAWYWLADLCEDESIPFTLGHALYMKAIHGGKAKNDRIDAAKIAGLLKGGMFPMAYVYPRQKRATRDLLRRRCCFVKERSQLIAHIVNTNSQYNHPPLTAKLCYARNRTEGIAERFTDAATRVSIHADLKLIDHFDEQIDEIERVVLKTAKIDDPVTLGFLRTVPGIGKILSLVMLYEIDQVKRFPEVGNFLSYSRLVRPEHESAGKKKGSGNKKIGNAHLKWAFSEAACLMLRAWPDAKKWLARQERKRGKRKALSVLEARIGRTVYHLCRKQRPFDPKRFFSS

SEQ ID NO: 224840 - protein, 360 aa, unidentified
MTSMTTTAVFVTGGVDTHGHTHHAAVLDHIGRQLGDREFPTSPAGYRALLQWMSGHGVLDRVGVEGTGTYGVGLARHLREAGVQVVEVDRPDRRARRAQGKSDPLDAYSAARAALSGRASVVPKVRDGKVEAIRAIRVARSSAVKARTQAINPLKALIVTGSPGFRQQLRHLSTPLIITHCARLRPSPDLGDPEQATKTALRRLARRHQQLTEEITEADRELHQLVRDVAPALLDLPGVGPEVAGQVLISIGDNADRLKSEAAFAHLCGAAPIPASSGRTHRHRLNRGGDRSANNALYVVVLGRMRHDARTRAYVERRTHEGLAKPEIIRCLKRYVAREIYHTLKLATPTKRPEQLLARP

SEQ ID NO: 224841 - protein, 434 aa, unidentified
MNCNTQNAKIKSITEKTLIVGIDVGSETHYARAFDWRNIEFSKKPFAFSNDEAGFASFKAWLEDIKEKFGKTIVLPGMEPTGHYWFNLGAFLQDNGMKPVHVNPHHVHKSKELDDNNPSKDDRKDPKTIAALVNEGRFNYPYIPTGVYAEIRSLYGLQVITQEALIRVKNRIARWLSIYFPEYKDVYRSCDAISGVMVLKVCPLPADIVMLGADGVNKIWRDAKLRAAGMKRARPLVEAAKHSVGSTESPEAAKYEMELLLGDYDVYTKRLEELTEKIEVKLEEIPYVDKLLEIKGVGKKIVSGLIAEIGDISRFDNPKQVQKLAGYAIVACSSGKHKGESHISYRGRKRIRYVLYEAAISLIGQNAEFKEIHRYYLTRQNNPLKKMESVIAVACKALRVFYAILTKGVSYDGKFMLESIRYPENQVLGNRIVA

SEQ ID NO: 224842 - protein, 279 aa, unidentified
MKEYIGLDVSMKETAVSIRRNGERVWRGKCVSDPAVIAQVVRKRAPEVDRIVFETGPLSVWFYHALRAEGLPAICIDARHAKSALDMAPNKTDANDADGLAHLAEIGFFREVRVKGFDSMLARTLIAARSRLVRITVDLSNHIRGFMKTFGLLIPSGKGSTFEAHVRRLLADQPKLSAILLPMLEAWCATRLQAARLARQIAAEARQNDGCRILMSIPGVGAITATSFVTAIESPDNFPKSRSVGAWVGLTTRRYQSGEIDYKGHISRRGDHHLRKRPA

SEQ ID NO: 224843 - protein, 369 aa, unidentified
MGEYSEVFVAFDVAKKKHAVAIAEGGREGEVRFLGDVENSPLPIEKTIRRLAARYDQLHVCFEAGPTGYGLYRQVKALGHNCMVAAPALVPKRAGERIKTNRRDAVTLARLHRAGELTGVWAPDPAHEAVRDLVRAREAAGDDLRRKRQQLLSFLLRHSRIYSGGGHWTLAHRRWLAGQKFDHVAQQIVFQEGIDAIEDSLQRLRRLEKQLSLIVPEWSMAPVVEAYQAMRGASFLVAVTFAAEIGDVRRFDTPRQLASFLGLVPAESSTGDTIRRKGLTLAGNRRARRALVEAAWTYRYPARVSETLRARLEGLPKPVRDIAWKAQVRLCARYRRLNATGKKSPVVVAAIAREIAAFLWAIGREVAPA

SEQ ID NO: 224844 - protein, 370 aa, unidentified
MTFLGIDLHTNCFTCCYLEERSQERRTESFQISGEGFERFFRTLTPQTHVLIEATINTFAFVERFQHRVGEVVIANTFRLKLISLTNKKTDKVDAEKLARILKMQVLSGEQQVSPVVIPPGFVQDLRSLFSSYVLMRKEITATKNRIHSLLKQALFPFTKEYIFGKKTRPSILAISDDPVLKAQLGLLFELLESLETKAEEFSDLILVAAAPFMSEIDVLTSMKGVSVFTAAAIMSDIITVERFPNSKHFTSYLRSAPRVESSNEKTIIKSTNKCGRKMSIILLSQSLNHFRDSNPKLTAWHDRLVTYKKKGLVRMGLCRRVFAEMFQMLKKGEYHYYRDQKNHEKKMSEYRAFLKSRGIEFGEILRLAS

SEQ ID NO: 224845 - protein, 410 aa, unidentified
MEVLYPHCAGLDVHKQTVVACARHMVNGTVTREVRTFRTTTKDLLALSEWLAGQGCTHVAMEATGVYWKPVWHILSDGDFTLVLANAGHVKNVPGRKTDVNDATWLADLMAHGLIRGSFVPDIQTQELRGLLRTRKQFVRERSSHVQRLQKTLEDANIKLDGVISDIVGLSGRRMIEALIAGESDPEALAALAHRQIKASPAALREALRGRVTNHHRFLLQLHVQHIDALDAALNAIDREVDIHVESFREAVLLLTTIPGVSDLSAQVIRAEIGGDMSRFPTVGHLISWAGLCPRNDESAGKRRSNRMRKGAPWLKTTLIQCAWAAARKNGSYLQAQFHRLRARRGAKKAIGALAASILTAAYHMLKDGTLYHDLGPDHFDRRAKTVQTRRLLTRLQRLGYAVQITPLAA

SEQ ID NO: 224846 - protein, 453 aa, unidentified
MNGWLEGCQEDRGIYAREVFSLAFMPRKPLDILEANDTRGSGRGGFIIPGRCLTASAGFGAEPQGVHRRLLHGGWGKEFGRPGIARHPSGTSSPWVSTWHAWLPVCLNTEQLLVGACRKAVTSYLQGWPEMNASELIFVGIDVAKETLEVAVDDKSKTRCIANAGREIEALVKELIPLSERIGVVLLEATGGFERQAAAALCAAGLAVMVVNPRQARDFAKSMGYLSKTDAIDARVLSHFARTLHQSAQRERLLMKLPDANQEALEALLIRHHQLVGMRVAEGNRLAQSHPSQHKSIKAVLKMLDRQMASVDNDMSGMLKAHFADKLALLKDFKGIGPCTQASLMGALPELGQLSHAQIGKLVGVAPLNADSGRHKGKRITWGGRTAVRSALYMAALSAVRYNPVIKAFHQRLIAKGKPKKVALVACMHKILTILNAIVKSGSPWNPEHHKCA

SEQ ID NO: 224847 - protein, 353 aa, unidentified
MKKIIIGIDISKEKLDATAIDVRSGQLQIIKLGYQTFENRPMGFRKMLVWSRHLLAEAGLEDVLFCCETTGGFDRGLCDYIYTKGLDIWRESALQIKQSSGIHRGKDDKADSLMIAEYAMRHLDKAVYYESPDKTVRELKALLLYRHKLTQEKTAKKVRMNQLKSTAARSHSMTFILRDSARGVRTLEKSIRECDRQIRELIKSEETFKRNYHHLTSIRGINIVNATAMIVYSNNFRNIKDANKMATYYGVASFRTKSGTSVDKRAEVGQYSNSTLRMYITQAASCAISENGIYREYFLRKTAEGKAYGIVINNVKNKLIHLAFSLVKNDMDYEQNHELMRVQNEKNVKSSHN

SEQ ID NO: 224848 - protein, 355 aa, unidentified
MKNQAIQYLALDVHQATVVASMRNEQGTVVMQATVPTEAEAILRLVRAAGARVHVAFEEGTQAQWLHDLLEPHAEHVVVCNVRGKSAVANKSDRIDADDLSEKLRLGALKPVYHGAPSVLTLKELVRNYNSIVEDATRVMLRIKAIFRARAIRTPGRSVYGGAKRSKWLDQLNTPGARVRAASLLEQLDLLQDLRRKAKAAMIAEARTQPGWKSLRSIPFLGVVRVAQLLAIMATPHRFRTKRNLWPLAGLAVVTRSSADQEFIGGKLRRRAQRPRTRGLNRNHNPILKSIFKGAATAAAAKAGPLQDIYAACVARGTKPELARVTLARKIAAVALHLWKKGELWDPKKLTMQTT

SEQ ID NO: 224849 - protein, 335 aa, unidentified
MYYVGLDVHYRTSTYCILNAHGRELKCETVRGHWTKLLERLATIKGQWMICFEATCGYGYVHRELSRMAQRVIVAHPGQLRLIFRSKRKNDRVDARKLAKLLYLDEVPTVYVPDEEVQSWRELIEHRRRVVDRQTVCKNALRSLLRSHGLIAAKGLWTKNGLTWLRQLPMPTAASGLKRDLLLEELAEVRRSVRTLTRALDKMGRRHPGVILLRSIPGVGMRTAETIVAYIDDPKRFRRSSQVAAYFGLIPSQDASAGVNRLGHITKQGPGTARKYLVEAAWQGVYRSPTIRAYFERVLRGKKERRKIALVATAHYLLRCMHAMLVSGAFWREAA

SEQ ID NO: 224850 - protein, 349 aa, unidentified
MTDQHLSYVGQHVYVGVDVHKDTYTVTCIHNKRSVKTATVQADPAGLAASLPRWFQGATLCSVYEAGFSAFVLHRALTKAGITNIVVNPASIAVAANDKVKTDRRDSKKLAIDLADGRLQGIYVPTEAEELARLLPRTRAQIVEPRATIARQIKAKLHQFGLIAPASRRLISNRYFREIAAWSLPPELRVSLSLLAEQWRFATRQLIEMRRLLREQAQAQQEIETVYRSVPGIGAVAARTLAPELGDMTRFANERALCSYTGLTPSEYSSGASVRRGPMSRQGARRVRHLLVEIAWRAMPRDAVLKEIFDRIAAPRGKKRAIVALARRLTGRIRACVRQGTTYAVGTYA

SEQ ID NO: 224851 - protein, 471 aa, unidentified
MLIVVAGAVADIGLQPRVRRRVWRDDPGGPRTVATSTNPSIRFHLVLPGNLQFSSGGEAVKRIRERVAGLDVHRDTVVACCQVKQPDRSIEVTKQSFSTTANGLGQLAAWLSDAGVDTVAMEATGVYWKPVYYCLEGLFGELWLCNAQHVKNVPGRKTDLSDAEWLADVAAHGMVRPSFVPPPEIRELRDVTRYRKTQVESRAREIQRLEKTLQDAGIKLSSVASKVWSQSSRAMIEAMIDGERDPSVLAQMAKSRLRAKIPQLEEAFSGRFGSHHALVCRQVIEHIDFLDRSIATLTADVTERLCPFESAVTILCSIPGVSRTTAEVMIAEIGVDMTRFPTSGHLCAWAGVAPASHESAGKRHPVGTRNGSTWLQRALVEAARGASRTKGTYLSAQYSRLARRRGSNKATIAVAHSILDVSWHLLTNGALYDDPGARFFELRHDPAVEAKRLQRRIEDLGFDVTIAPAAA

SEQ ID NO: 224852 - protein, 346 aa, unidentified
MRFYNRPHTYYCGIDLHVKTMYVCILDGAGQVLVHRNVPSTPAAFLEAVAPYREGLVVAAECMFTWYWVADVCAAEGITFVLGHALAMKAIHGGKAKNDRIDSHKIAVLLRGGMLPQAYVYPAAMRSTRDLIRRRLHLVRKRGQLLAHIQNTRAQYNLPVFGRKLAYRTNRDGVVEHFPDPSVQKSIAVDLALIDQYDALVIDLDLTIVREAKRHNADAFHRLRSVPGIGKVLALTILYEIHDITRFDRVQEFASYARLVKCQKQSGGKTLGTGGAKMGNVHLKWAFSEAAVLFLRHTEGKKLIARIAKQHGKGKALSILAHKIGRAVFYMLSRGTVFSMEKFLAA

SEQ ID NO: 224853 - protein, 354 aa, unidentified
MSQTLNTAIAVIGIDIGKNSFHVVGHDARGAIVLRQKWSHGQVEARLANMPPCLIGMEACVGAHHLSRKLASLGHDARLMPAKYVRPYSKGPKNDFNDAEAIAEAVQRPTMKFVATKTAEQLDLQALHRVRERLVSQRTGIINQIRAFMLERGIAVRQGIGFLRTELPTILATRTDALSPRILRVIEELTGDWRQLDQRIDSLSGEIEALARQDQACSRLMTVPGIGPIISSAMVAAIGTGDVFSKGRDFGAWLGLVPKQISTGDRTILGKISRRGNRYLRVLFVQAAWVVLVRIKNWERYGLRSWIEAAKKRLHHNVLAIALANKLARIAWAVLAKGRAFELTRTNDAGVRPA

SEQ ID NO: 224854 - protein, 427 aa, unidentified
MSEERSVELRVSVDVGYRRHSVAMGLSSGEVLEEFEIDHRPEGFQEFFSRIEKHQKAKSCTVAVAMEGYNGHARPLDSLVRQRGYRLYNLNNLKFARFKEIFPGAAKSDRIDARRGLELFQLSDHLPLAKEVLQEVRGTPKENEVLKRLTRRRRRLVNERVRVVNNLQADLQAVCPGLLEITSEASNQWFLNFLVSADSLSQLARLRKSSLLKIPAVGRKYAGLIQDWQKRAHFSEEAGWVSEMIQEDAKRCLELEEKIKTLETKIEQVAKDSKIAKILLSIPGFGPVCTSELAGEIGTVERFNKEGSLALYLGMSTLDNSSGNYQGTKAPKHVNTRAKAAMMIALDRHRKYVPESQRYYERKRTQGKGHNQAIRALGRHLCRIIYKMLKEQREYQLRSKEGDTQARVRSRSCVKTKIRRSKISRRG

SEQ ID NO: 224855 - protein, 361 aa, unidentified
MPGTMTWVGFDVHARSAHAAAIDVMTGELSRARFGAGFQTPVAWLCSLPGPVRACYEAGPTGFGFYRAAVKAGIDMRVIAPGLTPRGRSDRVKTDRKDAELLARCLLAGSLTAVRVPSVEVESARELVRAHDACRRDLMNARHRVSKMLLRHGRVYPKPSTWSQEHRRWLAAQQFEQAISELTYADLIACVDGLTARKSALAERISVLATDEQWWPTVARLRAFRGVDTLTAFAIHLELGADWTRFEKAHRVGSWLGLTPSRQQSGESDRQGSITKTGSTLARRLLVESAWHYAREPRIGATLRNRQDGQPEHVLQISHRAQQRLHRVYTGMRARGKPHNVTVVACARELSCFLWAAATAP

SEQ ID NO: 224856 - protein, 385 aa, unidentified
MSKLNLTDTPAAAEYTTVYVAFELSKAKWKVGVMLPGCERMSRFTVDGGDLAALSAWLAKWRTRAEATGKPVRIVSCYEAGYDGHWLHRWLTSQGVINYVIDPASIQVNRRARRAKTDNIDLEQLMRTLLAYLRGEPGVCSMVRVPSPEDEDRRRASRERDRLLKERSSHSNRITGLLHAQGVRDAMPLKRGFLASLDTVRTGDGRPLPARLKAEIVREHERLCLAHKQISELEAKSKAEVRTAARGSVEEKIKDLIDLRGLGVVSAQKLMHEVFYRSFDNRRQVGSYFGLTNCAYDSGDSHRDQGISKAGNRRGRTLAVELAWLWLRFQPGSELSRWFNERVGALKGRIRRITIVALARKLMIALWRYVTTGVVPTGAVLRQSV

SEQ ID NO: 224857 - protein, 335 aa, unidentified
MAWNLAKNIFQAHGGDAAGAVIFRRKLRRDQVLAFFAAQPPCVVAMEACPGAHYWGREISKLGHTVRLIAPAYVKPFVKRQKNDAADAEAICEAAQRPTMRFVAVKSEEKQASAVIFRTRDVLIGQRTQLINALRGHLSEFGFIAPQGPSHIQQLIDQVEDPSSRIPEAARCCLVFLIEALRRLEEQVRELDAEITARAKADDTAHRLMSVPGIGPLIATALEALAPPAETFRSGRDFAAWIGLTPLQRSTGGKERLGRTSRMGERTLRRLLIIASSAVVRWAKRKGVPSGSWLHRMLTRKPPMLVIVALANKTARIAWALMTKGGIYRAPTVVA

SEQ ID NO: 224858 - protein, 391 aa, unidentified
MLPTRLREQNESDKVLIKGDSMSVRRILAKTINTDLEYEAIGIDLAKNCVSVALLTTDGEVVCIDRLDYSELEKSAQVLCPTTFAMEPCTEMNYLVQKLEAWGHRCLVIGGKNVQNYVENHYSGQKTDLNDAQALAFLAQDTQLRPIKAKDMEQQKYASLTTLREQYIKQYRQTIVSLKGICQSWGLNISKGISGKARLKDLIENHAAFPEELKESLVDMVTHAQTAQKALNKITKTLEELAKNDKLCQLIQTIPGLGPVCSCRLRATIGDIQRFKNPKDFPAYYGLVPRSIATGHNEKKGRITHRGDKTMRSLMVQGAGSVVNMATKGKLKSKQLTKWILKKQKEKMPWGKLVCAVAAKLLRIVRAVLISSKPYNPKIAGVAKCSLPKGT

SEQ ID NO: 224859 - protein, 422 aa, unidentified
MQKDERIEFVIDKLIVGIDIAKHKHWARIIDCHGRDLRKPFRFENNKEGFDRLAAEIQLVQQKAGMTGVVVGMEPTGHYWKPLARWLQGLGYTVVMVNPMWVKRHKEDYDNSPSKSDRKDTGVVAGLVKDGKYMQVMLPTGVYADLRELIVVRRQQKQALNSGLNRLETVLDEYFPEFHTVFKGTLGLAAQCVLTECPFPSYITALNVEELTDKLKRASNNRVGQKRAQLLRDVAARSIGVTEGLQGARERLESTLAEIRFLKDRLRKTETAMAEKLYQTGLAESLLSIPGVGVATAAGFLGEIGDPHNYENWRQIRNLAGLNLKENSSGNRESRTEITKRGRPGLRSLIYQIAVTAVACNPQLRALYRYFLARDVNPLTKKQALIAVGLKLVRIMHALMMRGQRYDPALALGEVREFQLEK

SEQ ID NO: 224860 - protein, 334 aa, unidentified
MALELLAIDLGKRAFHIYGIDTDGVILSRKVSRAKLAEVVGELGPTAIAMEACASAHYWARCWLAAGREVRLINPRFVKPFVKGSKNDAVDAEAIFEAAMRPTMRFVPVKSKDQQDLQSLHRSRDRLICQRTALINHTRGLLAEYGIVLPQGPWRFMAQAPTAIAGADLSDLVRAIFGELMDQLDDLDRRIQRLDAMIVTLCRTNETCRRLAKLPGVGPIIATAIVGSVNDGRQFRSGREMAAWIGLVPRQYTTGGKPRLGGIGRRANHYLRRQLIHGARAVVSRSAKHDDRQSTWLKALVARRGFNRTIVALANKTARIAWVLLSRKEEYAAP

SEQ ID NO: 224861 - protein, 351 aa, unidentified
MITIGCDFHTRIQQIAMLDPTTGEIIERCLEHENDDVERFYAALPGPARVGIEATINARWFEKILDRYHHELWVGDAAEIRAAMVRKQKTDSRDAAHILDLLLTNRFPRIWMPSPADRDLRQLLRHRHKLVGYRTSVMNQLHGLAMSQRLCRKRKLWSQVGRRELEALVLDPWASRRRQELLQLLDQLNPWIADLDREVQKQAEGSPEATHLMKQPGVGPVTALCFVLTMGPISRFQRSKQVVSYLGLNPSEESSGGKQRLGSISKQGNSLMRYLLVQAAQTASQSDPELRRFYQRLKFRRGHSAVAKVALARKLAVRLYWKLREAAQPIPPARMQGSSRNPMVDPSPSRS

SEQ ID NO: 224862 - protein, 342 aa, unidentified
MDEYDGRQFVGIDLHRQRSVIVRQSESGEQLSAVRILNDPASLELQLEEAGADPEVVLEATYGWYWAVDVLHAAGARVHLAHPLGVKGFRYRRVKNDVRDAADLADLLRMGRLPEAWIAPPQTRELRELVRYRAKLVAIRSGLKAQIHAVLAKAGVLIAVSDLFGVTGRQRLAKVPLGPAYAQRIRSLLELIDILDSHEARFAAMIAERLDTHRGYQAIQQLPGVGPVLAAVFVAEIGDVHRFAGPAHLCSWAGLTPTHRESDTVVRRGHITKQGSKLVRWAAVEAIQHQPDSTKIARDRKRIEARRGKNIAKVAAARKLLTLVYYGLRDGHIRALDRTKAA

SEQ ID NO: 224863 - protein, 360 aa, unidentified
MPMLAEQPEKSRLTELVDIVIGVDTHADTHTAAVVTATTGAVLATMTVSSDAEGYTELVEFAELQSGLRAWAIEGTGGYGAGLARHLADLDELVVELDRPGRPARRAGAKSDPLDAARAAREALSRTRLAQPKTGKDRAALQMLVTVRRGAVEACGDAQRQLRALVITAPEQVRDRFRGQSTAEMVATGARLRPCSAAADVEVFTALSMLKTLARRIVALQTEAAAHQDTIREIVRSWRPDLLPLPGVGPLTAAAVLTAWSHPGRCRDDGAFAMLAGTAPIPASSGKTVRYRLNRSGDRQLNRALHTIAVSRLRYDPDTRAYAQRRRAEGKTDAEIRRCLKRYITRQLFRQLEHSSASAA

SEQ ID NO: 224864 - protein, 467 aa, unidentified
MKHNQQRARSGKKSRGSISLLERIQPDAAGIDCGQNSHFVAVPTDRDPQPVREFRTFTAELHRLADWLAQCGVKTVALESTGVYWIPLYEILEQRGFEVLLVNARDVHNVRGRKSDVKDCEWLRELHSVGLLRASFRPAATIVPLRSLMRQRQTLVEEAATRIQRMQKALTEMNLKLHTVLTDLTGQTGLKIVRSILNGQRDPEQLAAHRDHHCHASHQEIVAALTGNYRAEHLFALRQNFAAYEFHLQQIAECDTAIEKLLAKLAEQQPPPSGPLSTPRRKRGSKHAPTFDIRTSLHRLTGGADLSQINGIGPHAALQIVAEIGTDMRRWPTEKHFTSWLTLAPNNKVSGGRLLTSRTPPSANRAAVILRRCAMSLGRTSTALGAFYRRLAARTGKAKAITATARKLAVLVYRVLSGDLIYNDPGAAAYHQLNRARELKSLRKRAKLLGYQLVNHSTGEVLSIPVS

SEQ ID NO: 224865 - protein, 376 aa, unidentified
MREKLRFLGLDVHAETIAVAVAEANGEVRSLGTIANREDSIRKFIKKLGSPEHLRACYEAGPTGFVLYWQLTQLGVECAVVAPSLVPKKPGDRVKTDRRDALKLARCHRSGDLTAVWVPDEDSEALRDLVRQREAAKQDQLRARHRLTKFLLRTGQRPPLGLKAWTERYMRWLAQVRYRQSAQEVTRLDCMNEVEHMSARVKRLEEAILEVVKLAPQAMQEVIRGLQALRGVAHISAVTIAAELGNISSRFESARKLMGYCGVFPSEDSSGKRIRKGGITKAGNAHLRRIVVESAWCYRHLPRVGEKLRKRHEGIPAEITEIAWKAQNRLHKRYMKLMNAGKDQRKVMTAVARELLGFIWAIGTRAEATARQRIAV

SEQ ID NO: 224866 - protein, 364 aa, unidentified
MKDCITWVGMDDSANKINVAVLCGQEDKIREEFVITNDDAGMGRLAKRLKGLPGEVHCVHEAGTNGYHIHRFLKKHKLQCDVAAPSLTPRRAGQRVKTDRLDAKRLAFLYRAGQLTRITIPEKEQESLRDLLRAREDALEDLQRARHRLSRFLLRRGLKCRTGKAWSRGYLQWIKALRFEDAQDQMVVEEYRLALDEEMDRLHRFDEKVEELSQQPQCKKLVSYLMALKGIQTLTAMTILAEALDLRRFVGAPAFMAGIGVVGSEYSSGDKEQRGRITKTGNAHMRRVIIESAWHYRHGAVAGKTLKKRREGLPAEVIEIARKADKRLNKKYWHLVNRGKRTQAAAVAVARELAGFIWAIGQVA

SEQ ID NO: 224867 - protein, 325 aa, unidentified
MAYIGIDVSKQKLDCLWVRDLSKGKVKTKVFPNRHQDYPGLLDWLVRQTGEDISNLHVYLEATSIYHEPLAYWLHDVGVTVYVLNPAQVRHHAKGMGVRSKTDRKDSMMLARYGIERNPQPWQPEPTEVRELKRLINRLEAVEDDLQRERNRLEKAEFNTDTQASESISYMLVALEREVQRLQQAIADHFEAHPPLKQDRKLLESIPGIGNVLSARLVATLRSRDFRSARQAAAFLGLVPILKESGTSVKLRSHLSKTGAPGIRRKLYMAAVVSTRCNPDISEQFARLKARGKPTLSALGAAMRKLVHIAFGVLKSQSEYRPQGV

SEQ ID NO: 224868 - protein, 331 aa, unidentified
MSVHVGLDVGSRTTAMGWREKGRPAGSWDIAQTPKGRKAAVKKLLALKPLSVVMEATGIYYLDLAMELSAAGLPVSVINPKSSRNFAKLMLQHSKTDALDAQLLAEYGERMTPRLWVPPSPIQLELKAIGRHINRLTCHRTRAKNELHALQATETTSALLIEDEEEAIATFGKRIERFRQAGRELIANCPTLNAQFSHMVAAPGMGEVSTFAVLAELTTLPVTLKSSQVSRHAGLDVRLTQSGTSIDKPGRLSKCGNTYLRSAMFMPAMSAIRCDPYVKAFYEALVGRGKRKMQAICAVMRKYLTGLWACMHAGEDFDTAKLFSKTLLLKA

SEQ ID NO: 224869 - protein, 373 aa, unidentified
MTLKAWMADFAEKYGKNVVIPGMEPTGHYWFNLGAYLQDNGMKPVHVNPHHVKKSKELDDNNPNKNDRKDPKTIAALVNEGRFSYPYIPTGIYAEIRSLSNLRLQTQEEITRIKNRIARWFSIYFPEIKDVYRNPDSVSGLMILKEAPLPQDIVKLGVDGINKIWRDAKLRAAGLKRAKTLVTAAEHSIGSQEAPDSARIELKNLLNDYEIYKNREEDLMSLTEEKLSEIPHIDKLLEIKGVGLKTVSGFVAEVGDITRFDNPKQLQKLAGYAIVECSSGKHKGESHISYRGRKRLRYVLYEAAISLIARNEEFKEVHRYYRTRKENPLKKMQSVIAVACKVLRIFYTILTKGVTYDGAKMMQDIKRPQMLAA

SEQ ID NO: 224870 - protein, 416 aa, unidentified
MLFIGDDWAEDHHDVEIEDEDGRRLTRARLPEGMEGIARLHALVAEHAPPSWAELPPEQAARQVVVGIETDRGPWVTALRAAGYQVFAINPLSAARYRQRHSTSGAKSDAGDAHVLAEIVRLDRDHHRPIAGDSDLADAVKLLARAHQTAIWERTRHVLRLRSVLREYFPAALEAFEDLAAKDTLTLLGRAPDPARAAKLTRSQLVAALRADHRHHVEAKAAILLTVLRAPALRQPATTEGAYAAIVAGQVRVITALNEQIAQLQQVVAEHFGRHPAAEIYLSQPGFGVVLASRVLGEFGDDKTRFTDARARKNYSGQSPITRASGKKTVVLARYATNHRLGAALHLQAFAALGASPGARAYYDALRARNIGHHAALRQLGNRLVGILHGCLKTGTAYDEDTAWQHHRSDTNNAAA

SEQ ID NO: 224871 - protein, 342 aa, unidentified
MEKIATIGLDIAKSVFQVHGVDASGEVVERKRLSRARVIPFFAKLPRCLVGIEACNTSHHWARALIALGHDVRLMPAQYVKPYVKRGKNDAADAEAICEAVTRPTMRFVAVKTREQQSVMMLHRVRLMLNRQRTQLSNAMRAHMSEFGIVAPVGRMGLERLLAIVADKDDESIPADARICLEMLDAQLAVVKEQILENDRRIRASARETEVGRRLMEIPGVGPLLASAFVASVADPRMFKTGRDLAAWIGLVPRQNSSGGKERLGGISRAGNRYLRQMLVVGAMAVIRHAERHGTRRPWLLQLLSRRATKVAAVALANKTARMVWALMTSGEHYREPSAVHA

SEQ ID NO: 224872 - protein, 344 aa, unidentified
MDYFVGLDVSLRSCALCVVDTKGKVVLERDLVCEVNDIAACLCDFEFPIERIGLEAGTMSQHLYFGLQAAGFDVVCMEARQVKAALSAMRNKTDKNDAKGIAHVLRTGWFSPVHMKSREAHGLRALLSTRKALLKKTMDLANETRGLLKIFGIRLPKTVSHGSFDGIVRPMIEMDDILAHALLPLLDARVTLYQQYLELDRRVKRAARHDEVCLRLMTVPGVGPIAALTFKAAVDDPTRFKKSRTVGAHFGLTPRRFQSGEHDNPGRISKAGDSDVRAALYAASNALLMRSMAQSQIKSWGMRLMRTKGRRRAVVAVARKLAVLLHRMWVDCTEFRQEQVGSTA

SEQ ID NO: 224873 - protein, 380 aa, unidentified
MPEAVIGLDVGKSSHWACVATRDGEVLLSTPVANREDDLDSLFGRFPDALVVVDQSRNIGALALARARAAGMSAAYLPGLAAHGAARLFAGDAKTDERDAMVIAKTALGIPDALLPVGDPGPTIAAARALAAQRNFLTCENTRNKNRLRSILLESCPAFEALVDLSDGSQLRLMASLGGAWSVADAGPRRAAALTRGAARGKIEALVRSTTSSTRPDASVVAGEDRAVKLLARRISENSAEIEAITAEISALLEGDDTYRCLLTVPGIGPKTASELAISIDIEDFPSHDRLASYCGLAPRNRQSGTSISSVTASRQGNKRLKNLLIFSCNCLTRTEGRWGDYYTRCRERGMSHGKALKALARKRLKVIYAVMRDRVPYAA

SEQ ID NO: 224874 - protein, 395 aa, unidentified
MYYLGIDIGKNNHEAGLIQANGNHVGKSFRFSNTEDGYQALLSFLESRLPADESFSIGMEATGHYWLALYAFLLGQGFTLHVINPIQSDSLRNFHIRQQKTDAVDCFLVAEVIRFGNFSETKLADEDVLALRNLARFREALKDSCANYKRQVITLLDQVFPEYDRLFSNIFGESSKAFLKTYGTPDQVIDVHTKSLATLLRKASRGRHSTEKAREIKSLAARSVGVPFCAETFAFQIRILIEEIEFTEKQIAAIDARIKQQLEKLNSVILTIPGIGPATGAIILGEIGDIERFSNPKKLVAFAGMDPTAYQSGNYTGTNNRLSKKGSPYLRRAVWMAAVVASRWDPVFKAFYDKKRSEGKSHGTAIGAVARKLLYTIHAVLKANKPYEVRLDTLE

SEQ ID NO: 224875 - protein, 396 aa, unidentified
MTYGAIALDIHRKFSKVSLVEETAEGEIRVVERARLEHADREAMRRWLGRLPQGTPVAVEAAFGWPWIADLLEELELDPHLGHPPALKILAQHEAKSDRCDGDRLGRFQLWGILPESYLAPPEIRQIRERTRYRMALTTLRTSIKNRIQAILHRLGILHAFSDLFGKQGRQFLDRLELPPASRAVLDGSLQLLDELQRQIKVVEKWMQENLEEDQIVRLLQTIPGIGLILAYVIRAEIGQIDRFPSARHLRSYSGTAPVSDDSAERHGVRHCSPACNHALRWALIEAVTGVLLTKGSKALRLRGLYGRLTHGGRCNKNQAKVALAGEVAELVFVVWKKQTPYRDDAPARPGAARPRSARPPQAEEKEQTSPANMRPDQSRRPIARRSTPCAGQALV

SEQ ID NO: 224876 - protein, 316 aa, unidentified
MSISETFIGIDVSKEQLDCASRPNGTTSSFKNSVTGIDALIKQLQEQRPRLVVLEATGGLERALVAALVVAQIPVVIVNPRQVRDFARAVGQLAKTDRIDAAVIAHFAEAVKPEVRTLPDQLTQEMDALMKRRGQLVAMLSVERNHLVSATSPVSNHVKEHISHLEELIKRLDQEIDQMIGKSPIWKAKDELFQSVKGVGPVLSRTLLAELPEIGQLSRQKLSKLVGVAPLNNDSGKRKGKRSCWGGRSRVRAILYMSALSATRFNPVIKEFYQRLLAKGKTKKVALVACMRKLLTILNSMVKNNTPWDPSFAQRG

SEQ ID NO: 224877 - protein, 355 aa, unidentified
MPPKPSGLTGSLIAAGLFVGPVWLLERKVRIRKEGSKKMIEPSMIVAGIDTGKLELHVCVMPGERRFTVMNDAVGIAALVEACRAAGVSRCGIESTSIYHRKAARALRQAGFAVIEPQPRQIKAFAQAVLQWSKSDPLDAKVIARYAAIAETVREGQAAEIEALSEPLTYIEQLEARIAWLKTSRERFADARIGKDIEADIKRLKARRARELKKLEIRLRKNEALARRLDLLLSIPGVAERTAIGFLIRMPELGSLGREQAASLAGLAPHLCDTGQFRGERHIYGGRERFRHTAFMAAFAAAMQWNEDLQVFYRRLLAHGKTHTAAVVACARKLVILANAILARGTPWQEKRVMP

SEQ ID NO: 224878 - protein, 365 aa, unidentified
MPTRKLQNPEDFQGQKFYVGIDVHKKSWTVTVRSLSFVVDHFTQPPSTEALVSHLQRKFPGGEFYSVYEAGFSGTGIHEQLCKRGIKNIVVHPGDIPRTDKDKKNKTDIHDSRSIAFNLEKGNLHSIFVMSRQQQEFRALFRLRESKARDMARTINRLKSCLLFFGIDYSSTFEGYISARVITWLRRLRMANEAGAFTLKKYIDDLVHQRNELGKITKVLRIQVKKEYSLPYKCLLSVPGIGFTTAIGLLAEIGDFNRFKDPAEYCSFLGLIPWQHSSGESVHVKGIQPRCNKHLRPLLVEASWAAIRNEPSLLKYYRKHAVKNSKHAIIKVARKLALIAKGVAQKLQIYRTEYSPLPEQGLCGQ

SEQ ID NO: 224879 - protein, 372 aa, unidentified
MSQSSTLYVGMDVHKETIAVAYVAKDHDAEVVSLGTFGTRQCDIDNLIRKLQSKAKHLVFVYEAGPCGYWLYRYLTKKDYVCWVVAPSLIPKRAGDRVKTDRRDAMQLARLMRSGDLTPVYVPAVDDEAIRDLSRAREDTLRDLKAAKLRLKAFLLRHDIRYTGRANWSPAHLRWLSEVICPTPAQQIVFQEYVQTVTEQTERLGRLELELHEQVQTWRLHPVVEALQALRGVQFTVAVTTVAELGDLTRFDNPRQLMNYLGLTPSEYSSGARRQQGSITKTGNTHARRALVEGAWAYRYPAKVSRHLQRRLEKLPTAIQAISWKAQVRLCTRYRHLMATGKHAHQVVVAIARELSAFMWAMAKQVAGSPKA

SEQ ID NO: 224880 - protein, 374 aa, unidentified
MNFIGADLHSNKVTCCYRDETSSTEDPSKGRVIETFTLDPIGMAAFLKTLTADTYVLVEATITTFSFVRLFKDRVKEVIIANTYELKQISLARCNTDKIDADKLCRILKAQVLSGEQLVSPVTTPPVEIQELRGLFSTYRLFKKQNTQLKNRIHSLLKEQLHGFTQEEIFGKRDRQEIRAISPGSTMHFQVNLLMDRLERDEADVELLQDKILLHAEPFMAQIDILTSMKGISVFIAIAIIADIIDVSRFRNSKVFTSYLRSAPRMSNSNTSTSNRGTNKMGRKLAATLIVFSLNHVLDASPKLSHWYERLCQYKKPGMVRTGLRRRVFAEIYQMLKKREYHYGRNIAKHEEKMTQYKRFLGKAKNIAIPKINA

SEQ ID NO: 224881 - protein, 317 aa, unidentified
MERRQLSMKVAGIDVGKRKLDTAVQGLEDLICTPNTEAGFSELIGWLRAREVGRVGLEATGGYERGIRAALEDAGFEVVVHQPLEIMYFGKMRRRRIKNDKEDARLIAAATAQVDAVKAAQDPRLRDLAERLTAYEQVTDQIVELKTFMESVSLKDIARLIEGQIRSLVRLKTRLAADILTRIRAQADLLSRFRLLLSLPGVGPIVAASLVIRMPELGSMSRGQAAALLGTAPYDRDSGQWKGKRFISGGRARPRKMMYLAALQARRCSPTFKAFSDRLLARGKPPKVTIVAVMRKLIEAANLILQRGQPWTAQLAE

SEQ ID NO: 224882 - protein, 386 aa, unidentified
MHDGTNLPVPERTGIPGDYATLFVSLELSRSTWVATSLAPGSKKMSKHTLVGGDGRKLLDLLARLKTRAEQRIAAPVKVVAIHEVGLDGFWIHRLLEANGVESHVVDPASIAVPRRHRRAKTDAIDGETLLRTLMAWQRGEPRVCAMTVPPSPSEEDCRRVSRERATLLRERIQHTNRIRGLLFGQGITNYNPLHKNRRECLEELRTGDGRSLPTHVKAEILREIDRLELVLRQIGEVEAERDEILRPAEASSPAALLMRLKGIGAEFATVLYFEGLFRHFENRRQLAAYAGLAPSPWKSGSIDHEQGISKAGNPRLRTTMVELAWMWVRYQPDSALSCWFRQRVGSERGRTRRISIVALARKLLIALWRYVTHGEIPAGAVMKPV

SEQ ID NO: 224883 - protein, 350 aa, unidentified
MIIIGCDYHPGFQQIAFVDIETGDCGEQRLPHREEAEKFYRDLAGQGKSVRVGMEASGHARWFERLLSELRFELWIGDAAEIRTKRVRKQKTDRQDAQLILKLMLEDRFPQIWVPNWENRDQRQLLWHRHRMVQARTRIMNQLQAVALNEGLRCKKRLWREAGREQLEAFRLAPWASQRRRDLLELLDRLNPTIAKLTQAIEQEVEKCPEAQRLRTHPGVGSLTAMAFVLIIGRADRFQCGKQIASYLGLVPLEESSGNRRRLGHITKQGNSLLRFLLVEAAQVTVRSLPEWRSKYFHLAMRRGRKIAKVAMARKLAVRMYWMMRQGWDYEQLKKFGSHAGQPGNRHGVK

SEQ ID NO: 224884 - protein, 340 aa, unidentified
MTITTVGIDLAKNVFAVHCVDQHGKTVLVKPKVSRAALPELIASLPPCVIGMEACSGAHYWARLFRQYGHEPRLMAAKFVSPYRMAGKSGKNDAADAQAICEAVRRPHMRFVPVKDESQQAMQCLHRIRQGFIEEKTATYNRLRGLISEFGVIAPQSTDALSHMVSEQKSSLPLQVQQCVNDLLEHIDRIEDNITEYDRILSRMAKTDHRSQRLMELKGIGPTTACALVASIGNAHDFKNGRQLAAWLGLTPSQYSSGGKSKLGRITKAGDSYLRTLLVQGARSVLIGAEKRTDLFSRWVCSLVDRRGYWRAVVAIAAKNARLCWASLHYGDDFRLYSAS

SEQ ID NO: 224885 - protein, 412 aa, unidentified
MKDLLEISCGLDVHKEKIVACILTGPLGKPTRSEIREFSTLIPDMIALRNWIVSKNCHHVAMESTGIYWMPIYEILEDAFSGDITLLVVNARHMKNVPGKKTDMRDSEWISTLLRAGLLNGSFIPEKRIREFRDLNRYRKSVIRDITSQKNRIEKFLQSSGFRLSSFISDIFGASGRNIILHLIEHGQIDKTALDSCLKTKTRNRIDEILMSVNGTLSEHQKAFLRILMTHYDSLKKHLAEIETSLEKDMAPFALQVEQLNSIYGISTTAYCAIIAEIGIDMKPFKTAEHICSWAGLCPGNNESAGKRKSTSVTKGNPYIKSMLCEIAWVIAGKRNTYLSAWYWRIKQKKGAKKAIVALARKLLVIIYTMLKQGTLFDESCFETRRKHCEQKQLSRYIRELEKHGYHVEAQS

SEQ ID NO: 224886 - protein, 351 aa, unidentified
MLNVGLDYHTKHSHISILDDQGEEVMEKKLDSQSEVAEFLKMLPEAKVLFEAGYGWPRLAKMLEETDVELIMCHPENNRRIATDRRKSDRRDAHNLAVYLKTGTYKPAYMPDAEIRDDRQLIRGRIYLAWQLTRIKNQIHSLLAYAGVPKESTDIFAKKNRYYLETVKVPEKTKKILDVNLESLDLHMKLIGELNKQIAEMNRNDPGARLLKTIPGIGDISARLIIAEVGDVRRFPTDKSLACFAGLTPKQHQSGNTMRTMGITKEGNPNLRWVLVQAAWIAIRMDPALREFYEKLEKEKGKAKAICAVAHKLAIAAWHIMTKQTPYRPQKPNAEGKPVVARGKLAAPAAQ

SEQ ID NO: 224887 - protein, 426 aa, unidentified
MSNSQKLEAITPNTLIIGVDIAKKLQWARFTDYRGLELGKALKFRNNKNGFESILASIETICKLKKLDKVVVGMEPTGHYWKPLANYLILNKITVVMVNPYHTKRAKELDDNSPTKSDKKDALTIARLVRDGRYYEVYMPQDIFAELRVLSNSRISLMKRYNALKNTITAVMDEYFPEIVTVFKNPLKGKASMQIMKSCPFPAMILELGVDGVLAEIKKAVKKTVGMKKAQQLIETAKDSIGVNYATASAKLKLGLMIEELELLTKQLEQIERAMELTLADTGMKQIILGIPGIGVVTAASFLCEIGDPLRFDHPRQINKMAGYNLVEDSSGKNISGTTISKRGRKNLRNVLYQMARTMVAVNPEMKELYQYLKTRPNNPLKKKQALVVISKKIVTVIYNLVKKQTEYKAELVFGKFRKKQMKQTA

SEQ ID NO: 224888 - protein, 343 aa, unidentified
MTKFESIVRVGVDLGQTVVQVHAVGGAGTVIVAKQLQRSALTRWCERLPEGCIVAFEACSAAHHLARELSAAGLVPKLIAPALVSPYRMAGATGKNDATDAEAICEAASRPQMRFVPAKSLEQQAWLAVHRLRDGYMKDRTACMNRARGILFEFGVSLPVSADRFHVLLLEALAAHRQELPTIARAGLRRCCTHLREVQRQVAWCDQQIAKHVRIDANAKRAMQVRGVGPIGASALAASLGDLTQFGNARQFSSWLGLVPRQHSSGGKQRLGRITKRGDPYLRRLLVIGARSALAVAPRHDDAVSVWALRLQGRVGWPKACVALANRNARTLWRTLTKSVEVA

SEQ ID NO: 224889 - protein, 316 aa, unidentified
MTHPITLAAGIDTAKDKLDVAIAGGPTAFTVENRPAGWRRLAAALAAAGVNRVGIEATGGYERGVVAHLRTAGFTLMVLQPLQVKAYARLHLRRAKNDRLDAMLIAACTAALDAPRVAPDPRLPPLAAAVTLVEQIEEDIARWKTRLEHIDQPRLRRLVVADLKRLETRRAVELKRIAQAVRRHDDLARRFDLVQSVPGIGERTALALIVHMPELGRISREEAAALAGLAPFDDDTGQHKGQRHIAGGRSRPRRSLYAAALPAAFRWNSGLIALYRRLIAKGKPHKLALIACARKLLIYANTVLARGTPWRATPAT

SEQ ID NO: 224890 - protein, 372 aa, unidentified
MIKLTRTMNKCHSNTELSSHEGTRRQFNGGRCAIKLGIDVHQDFYVVVMQVGGANPKPPQRFQKEAFLHWAAKLKQSSGAEIHAVYEACGFGFGLQRALSALGMRSHVVCPQKLDEANKRVKTDGLDAKALCLRLDRFVQGNRDALALVRVPSEQEERLRAIHRQREQLVKARKQLEAQGRNLMVNHGIEPVKIWWKPRKFALLPLPQWMRELLNNSQPILIALQEKIGALTLQLQAAAGSKQPRGLGAMSSVIIDREIGDWNRFNNRRQVASYTGLCPGEYSSGNTRLQSCVTKHGNPRLRAALVELAWRLVRFQPNYKPICKWNATLCKGALATGAARKKAIVAVARQLAVDLWRIRTGRLSAETLGLSN

SEQ ID NO: 224891 - protein, 317 aa, unidentified
MTKTSTAVAGIDTAKDKLDIALYGQARHWCVENNLQGWKRLRSELAKAEIERVGIEATGGYERGVVRHLREAGFTVLVLQPIQVRAFAKAHLRRAKNDVLDAALIAACAAVMEKPPIEPDQRLTDLADLLTFVEQIEEDIARLKTRLEHIAEPRLRRIVLGDIVRLKARRRAQVRLIAKQICSHHDLAARLNLVLSVPGIGERTALALIIRMPELGRISREEAAALAGLAPFDDDSGKHKGQRHIAGGRGRLRRSLYAAALPAAFRWNKALIDLYARLIARGKAHSAALVACARKLLVYANTVVQRDSPWIPQPEPT

SEQ ID NO: 224892 - protein, 457 aa, unidentified
MPQPKRSRSRTGLSAVHPAAAAIDIGATMHVAAVGPDRDTEPVRTFQTFTDDLHRLADWFARCGVKTVAMESTGVYWIPVFEILEQRGFEVMVVNARDAKHVPGRKTDVSDAEWLQRLHEYGLLRPSFRPQAEIAGLRAYLRQRERLLDYAAAHIQHMQKALMQMNLQLHHVVSDITGVTGMNIIRAIVAGERDPNVLASHRERGCHASVETICQALVGNYREEHVFALSQAIELYDVYQTKVAACDRQIEVILKRLKKSATPPASKLLPPKHRSRQPNAPSFDARAALHAILGVDLTQIHGLGPYLALKLVGECGTNLTAWPTAKHFTSWLGLAPHNKISGGKVLSSKTRRTSNRAASLLRLAAVSVGRTDTALGAFYRRLAARAGKAKAITATARKIAVLFYNTLRHGMSYADPGATYYEERYRRRVLGNLQRRAKSLGYVLQQADRDPTQVVVS

SEQ ID NO: 224893 - protein, 388 aa, unidentified
MQTAADHPEAPTAIRHDLGAIFISLELSRSTWLITSLSPGGGEKMSKHSVRGGNVAGLLERFAQLQEKARARTGRTFPIIVIQEAGLDGFWIHRVLQNEGIESHVVDPASVATSRRRRRAKTDRIDGEALLRTLLAYKRGEPRVCAMVKAPTPEEEDRRRLCRERKVLTNERVQHVNRIKGLLFGQGVSGYEPLRRNRRQQLNELRTGDGRPLPKHLKTQISRELDRLELLLEQIKAVETERDALLAAQKVALPGPAAMLLDFNGIGPEFTAVLWSEGLFRHFDNRRQVASYAGLAPTPWQSGSVDHEQGVSKAGNPRLRTTLIQLAWLWLRHQPQSALALWFKERVARNGGRHKKTTIVALARKLLVALWKYVTAGVVIEGAVMKTA

SEQ ID NO: 224894 - protein, 433 aa, unidentified
MLKINYMSTLFVGIDVSSKSNVVYAMDFEENKYISSSFGNNQPGADELASMIAECMQNHKNLDTVIVCLESTSVYSVHIANFLSTCETLMPYKPYVFVVNPKTTANYRKSYIGMEKTDPADAFLIADFARVGRTKKLEPWRGSQFIALKRLTRHRMHLSECIAREKTYMVSNLYLKFSELQLLDGDDRPFGNIYGATSSAVLTEFLSPQEIIDLSEEELLAFLAEKSRNRISDISRTSELLRKAARDSYRLDKCMYEPLNVSLASSFNCIQAYQKEIKLIEQAIEKCINGMNPNAFLILKSIPGIGPIWASGMLSEIGDISAFHSSDALAKYAGLYWLKNDSGDFTSEDNQVSKAGNLYLRYYLGEAANSVRRYVPEYADYYAKKYAEVSKHQHKRALALTSRKFVRLVFGLLVKNQLYTGEKLDTELHTGQN

SEQ ID NO: 224895 - protein, 404 aa, unidentified
MLNAVGVDVSKGKSTISVLQPGGVVVRKPFDVTHSKDDLKELAKYVKSLNGETKVVMECTGRYHEPMLRSFLASDIFVCAVNPHLIKNYGNNSLRKGKSEPAVSRKIARYALDNWAELRQYSTMDTTREQLKTLNAQMDFFTKQKIAQKTNLISILDMTYPGINSLFSSPARPDGSEKWIDYAASFWHVDCVRSLSLKTFTERYQAFCVRHSYHFRPDKAQQIYDAAQELIACFPKEKAYKDMVQLCIRQLKTTIATVEQLRQEMNDLAKQLPEYDTVMSMVGVGKTLGPQLIAEIGDVSRFTHREALTAYAGVDPGVDESGQRKYKSNGTSKVGPPRLRKALFLVISSLLQTQPEDDKVYQFVNKKRAEGKPYHVYMTAGANKFLRIYYGTVKECLALQSESI

SEQ ID NO: 224896 - protein, 434 aa, unidentified
MDGRAKRRKSQKQQQKTMNDSKQWQQHRAFGALDWASEKHSVIVVDQTGKVIEDFEIEHSALGWKKFREKLQPHGSIPFAIETSQGVAVEQLLEAGMVVYPLNPKSAQAYRERKAPSGVKDDWLDAWSFADALRVDGQDWKALRPEEPLIKELRLLCRDEVTLIEQRTAFVNQLRHALAEYYPAALEAFEDWTSVSAWMFLQRFPTPELLAQGGKRQWQKFLHSRRLWGSDQGPRRMEIFAHATEFAGTAPTVKAKSLLALSLVQMLFAIEKQLAVYRQRIEELFARHPDHDLFGSLPGAGPKIAPRLLSEIGDDRQRFGGDPQNLQCLAGSAPVTKRSGKQRKYWHVHQRWACDKHLRHAIHLFAEQSLSRCAWAEIYYQHHRQKNQSHANALRRLAHRWLKIIYKMWIDRTPYNAELHHRNQLQHGSWIFSA

SEQ ID NO: 224897 - protein, 368 aa, unidentified
MNSITYIGMDVHSTNYTLCAFTIEGQKTFAQTSINPNIKELVKYLETLNIRQGGNAEFVCGYEAGCLGYALYHELTAKGYRCVILAPTTIPTTSVEIKTDKRDARKIAKCLAYGTYSPVYVPSDQDNAIKEFIRMRDDTQSMLKQTKQQINALCLRYGKGYNGNSRWTGKHRQWLRNVKFENAIVQETLSEYLATLEQLCDKVERLDKRIEEFSRMEDYAEKVNKLVCFKGIRTHTAMSLIVETSDFRRFPRAPQYAAFLGLVPGEHSSSDSCHRLPITKAGNSHLRRLLTEAANSYGRARAERKSANLKQRQQGNAPEVIAYADKANDRLRRKYVRIATRSKANIAKTAVAQELACFVWGMMNDKIF

SEQ ID NO: 224898 - protein, 350 aa, unidentified
MLIIGCDYHPSFQQIAFMDTGTGEYGERRLEHMEGAGQFYRELRARGVEARIGMEASGYTQWFEQLLAELSFELWIGDAAAISRKRVRKQKTDKQDAELLLQLLIEDRFPRIWVPSREERDLRQLLWHRHRLVQMQTRLPNQLHAVALNEGVRLKKRLWRRKGRAQLESLALMPWANRRRHDLLELLDQVDPTIAELSASIEQEAEKRPQVVRLMTHPGVGALTALAFVLILGTPERFARSKEVSSYLGLVPTEESSGERRHLGHISKQGSTLLRFLLVAAAQITVRSDPDWRRYYLHLAMRRERAVAKIAMARKLAVRLYWMWRNGWQYAQLPKLGSHAGQPGNRLGRQ

SEQ ID NO: 224899 - protein, 345 aa, unidentified
MEPMYYIGLDVHKRKISYCVKDRSGQLHAEGSLPATCFDLDCWMKTLPQPWSAAMEATMFSGWIYDHLKPHAAALKVAHPLMLRAIAAAKKKNDRIDAGKICDCLRCDFLPECYMAPTAIRERRRTLRYRNLLVRQMVQTKNKIGMLLMEAGISYNKQRLHKAGYFRELLATTPGIDDGLRSLLRMCRETVVRLAKTESALVRSLARDHLLVDRVERLMSIPGIGPITALTWSLEIGDVQRFSSLKKAVSYCGLCGDEKRSGNTVQRMPLSKQRNKHLQYTLIEAAKMAPRHSSTLALLYDKEKQKGNANRATLAVARKLVAYLMAVDRSERNFLVIQSEVHTAA

SEQ ID NO: 224900 - protein, 414 aa, unidentified
MLGQAKQRTYCPTDFDIFLGMDVDKKSIDFTCSDSQKLLRSVHIPNHAESLVRYVQKHFPNQRVLFAYEAGPTGYGLYDGLRAAGFSCLVTPPSMIPTAPGQRVKTNRLDSKKITEALRAGQLKSIHVPSLIYRHLRHLVKVRDLVVRQIGGTKCRIKALLLFEGIPFPEARAKSYSWSRSVVVQLQKLSCSGAVRFRLDRLLEALEFQRQQCLKVTREIRNFCRQDPELKRSVSYLVSIPGIGQIVAPHLLARIGPGQNLQEHRVHELAAFLGLVPTERSTGDRVRRGSITRGGDSRLRSKLIQGAWTAIRQDPELREFYRSVYRRHPQPVAARKAIVAVARKLTTRIFAVLKEQRPFILRPQVHSRPLLPGEIGPRERLDDKQKEEDRDLPSFVPETEVPGPPPKRGASKPV

SEQ ID NO: 224901 - protein, 413 aa, unidentified
MSIDPGTAAARVTAGVDWAKDDHAVCVVGGQGEALERFTVRHDAAGLRQMAARLLRAGVLQVGIERSDGPAAAALLRAGLAVFVIPPGQVKNLRGRYRSVGSKDDRFDAYVLGDVVRTDIQRLRPMERDSEQTAALRSAVRARRDLVGHRVAAANQLRAHLQIVFPAAAALFAEVDSEITLAFLSRFTTQEQADWLSPKRLAAWLKSVSYSGRTDSAVLHARMLAAPGGKTGRHARLHAGTTLALVAVLRVLNAQIQALAASIGAQMDAHPDAPVFRSLPRAGTVRAARLLAEIGDARGRFPTRDSLTGLAGVAPYTSQSGKVRTVAFRWEADKQLRDALCDFAGDSRRASPWATDLYDKAVARGCDHPHAVRILARAWAHIIWRCWQDHIPYDPAAHNSLQVILKQQQPAAA

SEQ ID NO: 224902 - protein, 457 aa, unidentified
MSQRNRKPRKSKINVNNLPQHLRHINLNAAGIDIGSDRHLVAVPEGRDNVSVRQFSAFTSDLNDIADWLEKCGVTTVAMESTGVYWIPLFELLEQRGFEVKLVDARHVKNVSGRKSDVLDCQWLQQLHTYGLLQGAFRPPDEVCVLRSYVRQKQMLTQASSMHIQHMQKALQQMNLLLHNVVSDITGVTGMKIIKAILAGERDPNVLALNRQKGCRNSKETIAKSLVGNLRDDHMFALKQAVELYETYQAKIAECEQALIKHLGTRPNVTDDQPPDSGKAVRARERMRADVDVREKLFKMTGVDLFATPGLAADTLLTLASEVGFDMTPWKSVKHFTSWLGLCPGTKFSGGKALDRRTKRSANRGAQAFRMAAASLARSQTALGAFYRRIRSRTDGRRAITATAHKIARIYYSMLTKGTSYVEAGQQAYEQMYKERRINALKKQALSLGYQLQPCAS

SEQ ID NO: 224903 - protein, 449 aa, unidentified
MIERVLFESNVMIPCGRELSTWGYESSRILPFGHAPLHLEGAGLKSLRSLGPLWITLENDSSRFSKTLKKKASLTFSAIILLLNKIPAERRLAMIKSNKLDFTGQPIYIGLDVHRKSWSVSIFSKYGEYKTFSQPPEVDKLVHYLRLHFPGATYRSVYEAGYCGYWIYDQLREKGIQCIVVNPADVPTQNKERRTKRDRIDCRKLARHLRSGEIEGIYVPSRSKLEDRSLIRARLSMGRKQTRCKNQIKGILLFYGVVIPEEREMGHWSRRFIQWIEGIRMERASGDLALEIHLEELYHLRQMISKLNRAILALARTEPYRTWVCLLRSIPGISTLTAMILLTELGEITRFPSLDELSSYIGLIPDIQASGEKEHTGGITQRRHSQLRWMFIEASWVAIRKDPALQMAFHQYCKRMLRSKAVVKIARKLLNRVRYVLKNQTPYVPSVIE

SEQ ID NO: 224904 - protein, 394 aa, unidentified
MILVGIDIGKNKHTFSIIDKNSGEILLSPSDFSNNLKGFLFLIPKLSSYTKSKLLIGMEDTGHYHFALLKYLLDRRYTVALINPTTTDLTRKLQGGITKNDPLDSLTICDVISSNHRNKPYRVTTLNRFDLYEQKQLTRHHHNLKEELNTYKNRLQKCIDIVFPEFNSLFHSKYGIVYMNILKAFSSAKAIANADIRSIRKCFEFKGQGKRISLSAEQLKLTAKSSIGIPSVAEEIQIRHLVSQIELLEKQLSEIDKRIEEFSLKNNSPILTIPGISHFSGTSIISELGDICNYTKASQIIKFAGVAPYHYESSQFTAQHTAITKKGSKYLRKTLYQIILPVISNNEVFYAYYTKKLNEGKGHRCAQGHCIRKLLRVIYHLLSTRQPFNPKLLV

SEQ ID NO: 224905 - protein, 322 aa, unidentified
MSKVIGIDISKQKFDVCFLEGQNKSSDVFTNDLAGFKKLAKYISSSDHVVMEATGPYFLKLATYMVDNGYRVSVVNPLVIKHYSRMRMSRAKTDKKDAFLIACYGQGENPPLWNKQEEYIMQINQGLTLLQGFEKQLTMNKNQMEALSVLPYRDKLALKALRSIVSCLEKQVLNIEQHLQEVVMTHYQDSYKALQTIPGIGPKASLLLIAVTGNFEKFTNSRQLISYLGLSPRIYESGTSVKSKAHICKMGMSKARRTLYMCSWTAKFYNPQCKELYQRLLEKGKPERVIKIAIANKLVRMAFAVGKNLSNYDKNYRANVCF

SEQ ID NO: 224906 - protein, 346 aa, unidentified
MKQITTIGLDLAKQVFQVHAAAADGSPIFNRKLRRAEVLRFFEKTPACLVGMEACGSAHYWAREIRALGHDVRLIPPVYVKPFVKRGKTDAADAEAISEAVTRKTMRFVPVKSADQQAAAIVLKTRALLVNQRTQVINALRGHLSEFGIIAAAGTTKVAGLISIVRDKTDLRLPKAARLALMEVASQIDALKAQIEKLEQAIVATVRRDEDARRLVTIPGVGAIIAASVRALVPDPGGFKSGRHFAAWLGLTPKPHSSGGKERLGRISKMGNPVLRSLLVVGATAVLRHARGNPNASRWIATLLARRPYKVVAVALANKMARIIWALLVKGGRYQENGARNQMATA

SEQ ID NO: 224907 - protein, 362 aa, unidentified
MIVIGTDTHKTSHTAAGVNRATGEVLAERTVRAKRRSFEDLLRWARRLGGEWVWALEDCRHVSGALERFLLARGERVLRVAPKLTAGARDSARERGKSDAIDAVAIARAAIRHGIETLPVAQLAGIELDIRLLVDHRERLVNTRTRLINDLRWHLHDLWPELEIPTGGLIAVHWPERLAGRLARAEQTARVQIARDELRRIRELTRAINALEGQLAPLVARAAPALLAERGCGVLVAAKLIGEIAGIHRFATDSKLARIAGSAPIPASSGSTIRYRLDRGGNRQINAALHRLALCKGLHDPDTAAYLARKQAEGKTHREAMRCLKRHLARRVWHLLQPTHTPPPQPATTIHCNLPISGFALT

SEQ ID NO: 224908 - protein, 428 aa, unidentified
MDEINRNRLEEFRQLRKEVRHSEEFLIVGIDIAKDRHYAFFGTATGKTLLRRIVFSNDHEGFRKLLDQAEALRAQQGLKKVVYGMEPTANYHKPLGEYLINLGRVVVLVSGVTVARNRESLDGRWDKHDGKDSANIADLISQGKCLYYEYPSAELRGLRGLLSLKRRLKKQEHGYKVRIRNQLIAQYFPEMDRDYERLGAEGLSILRWCLPASEIVQLDVEPFIERVTSRRIRMEKRRRLEEVWEKAAESIGCEGVPGVDHEAKVMVEGLKQIREMIKETEGKIRGLCEQFPEYPYILTIPGFGPDVSAKVLGAIGDPDRFQNGKQVLKMGGLDLSADRSGKDSDRAIPEISKRGKADLRYGLYQAALVASLQNRHVMIYYTNKIRGREREKGIHVKMRVKLAAKLLVIAWTLMKKKEPFNPAYLNAE

SEQ ID NO: 224909 - protein, 425 aa, unidentified
MKKRSPYKVAPVKSLDASPLVEDVEDQRVIVGIDVAKEKMVAAVVDEGDAVLKIVGWSHPIETAGFVELVRALAGSAADVAVAMEPSGVYGDALRWQLIEAGFEVHRVSPKKSYDASEIYDGVPSSHDGKSSAIVAWLHGQGKSEPWPVRTERERGLTALLRVLEVHSKQFRQNRNRLEGFVARHWPELTRYLDLDKATLLELLLAYGGPAAVAANLGQARELMLRVGGAALGREKVEAVLESAQHTVGMPQVAEEVAMVQAIAAEARRNQKSERAARGRVEELSAAEGSTKEMQAVVGKTTAAVIVAAAGDPLNYESPQAFQKSVGLNLKERSSGKKVGALRITKRGSGTARMFLYMASLRLIQSDETVRAWYTKKVARDGGRQKIKAVVAVSRKLTLALWHVARGEEFDSSKLFDRRRLGLSS

SEQ ID NO: 224910 - protein, 425 aa, unidentified
MHTKQYSRQQEKRNRIGNGTLVIGMDIGSEFNAACFMDKEGNVLGRYPTIYNSRKGFDYFQAMVVKTRRKHRLTDVLIGMEPTGHYWRKIAFFAKEQGYDVRFVRTTAVKHQRELDESSSAKSDIKDAYTIGNIVREGKYIDTVIEESVFRQLRTLAHARERILRYIVGSTHGLQAVLNDYFPELRHLFWSMRSKGLWRLLETYPFPEDVCHAGLPAVTTLLMKGTGKKRRVREQAEQVFKAAVESVGLKAITKADRVRLTMYLEEIKRSDARRQLLEGQMEELLKEIPCAQYILSLPGVGKVSCAVFLGELGNPEHFTNPRQIIKYAGYDPKENDSGSRVGRKIISKKGRWLMRKCLYFIALNVIHRSSFFKEHYEHKKKGLDRPLKKKEAICAVILKLIGVLFALMRDRRIFTEEMPRCEKAA

SEQ ID NO: 224911 - protein, 358 aa, unidentified
MEAQVKKLDFTDQNIYVGFDAHLKDWKVTIMAEDIVYKTFTQPPKPEVLYNYLKNNFPGGNYHSAYEAGFCGYWIHDKLVSFGIKSIVVNPADIPTTDKERVQKEDKRDSRKIARSLSSGNLTPIYVPSIKTQRDRSLLRTRAMLVKDLARYKNRIKSFLYFYGISIPDSFKNPQSHWSNRFMSWLESIDMGEESGKEALNVLISECKNLRISILNITKQVRKLSRTEPYQEQVILLRSIPGIGLLTAMIILTELETINRFRNIDKMCGYIGLVPSTKSSGEKERTGDITPRGHNVLRTALIESSWTAIRNDPSLMKSYLSYIKRMDSNKAIIKIAKKLLSRIRFVLTNNKPYICSIV

SEQ ID NO: 224912 - protein, 395 aa, unidentified
MRFAGIDIGSEHHVVAVVGEDGAVLTKAVRFAEDAEGYDRVRIALGDPGQLLVAMEATGHYWQNLFAVLAAHGYQVALLNPLRTSRFAAEEMARTKTDAIDALGIARFAQQKRPSATPLTDEATVELRELVLMRERLVQELGDKARQLHRVVDLGFPEFTRHVKKVDTDLALTLLHELPTAAAYERVTPAWIARLVYDGRHRVGGELAKALFTAAGSSVGQHHGPAFQLEVRYLCQAIRLLKQQLRELEEGIERKLEDNEVGKLLTTIDGIGPQTSARIIAAVGDPARFHSAAAFAAYLGVVPSLKHSGKHTPTRAGCSPLGHARLRRALWMPVLSAVRRNPWLRAFYQRLRAAGKLPKVALVAALRKLSQAIYSVAKNRRPFVPRLGAATIEAP

SEQ ID NO: 224913 - protein, 347 aa, unidentified
MRFYTKQHKYYCGIDLHTKKMYVCILDGEGQIRLHQNIKTEPESLLRILTPFREDVVVAVECMFTWYWIADLCIQENISFVLGHALYMKAIHGGKAKNDKIDSHKIATLLRGGMLPQAYVYPVKMRATRDLLRRRNHFMRKRAELFAHIQNTRSQYNLPDPLGCIAKPQNREGIVERFDDPSVQKSMAANLEMIKAYDHTLTQLEHDIIASAKEHDLRSYALLQTIPGVGRILALVILYEIESIERFPSVQDFVSYSRLVKCIKESNGKSYGPSGKKIGNAHLKWAFSEAAVLFLKGNEPGKRYLERLAHKHGKAKALSILAHKLGRAAYFMLKNKEAFNQKQFLNL

SEQ ID NO: 224914 - protein, 373 aa, unidentified
MKFIGLDWKDKGYTTRIINEEGADLSGSFEVEKNREGFSEFIYKVRKYCDGDSNILFGIERERDPIVEYLLTLGYKVYLVCPNMMKSLRKRYSSTGKYNDEFDSYIIADTVRTDRNRLTQIEPRDDKIRKIEFLLRHRDKTVDDKRRLTNRLTCYLKEYFPAFLDFFSDITCPTALSLLKVYPTYEDTKELSKEDIKAFLRKHHYHKESGALRICKAIKEGQVKIDTTVIQERSRSAILLIKRIELLNEEIKEYENDLKETTENDKDAEIFKSLPGAGDTLSPGLMVIFGKNRSRYENAEEINSLSGIVPFTKQSGNWETHLFRFGCNHFYRNIITRLAYCSLTKSEWARSYYNEKRAEGKSHYHALRCLARI

SEQ ID NO: 224915 - protein, 341 aa, unidentified
MKAYVGLDVSQNKTAICVIDEQGERLCQSNVETHPVLIHGFLVAKGYAGAKVGMETGPLSVWLYHSLRSLGLDVDCIHARHVHAALSMQLNKTDSNDAFGIAHLVRSGWYRPNHVKSLDCHQLRLMITAREKLVHIRVTLTNQIRGLLKTFGVVLPPGRNSVFERSVIECEPSLDAIKPTIFLLLDAWNNVSSQIREMNKLLVKHAKSDPVCRVLTSIPGVGTLTAISFKTAIDDPQRFQSVADVGAFLGLTPKKYQSGEVDRNGGISKHGNRQTRSLLYEAASCLLSRYGTNTGLARWANSLRQRMGYKKAVVALARKLATVMLSMWKSGELYREQLKPA

SEQ ID NO: 224916 - protein, 356 aa, unidentified
MTSLTDLREVVDVVIGVDTHVHTHSAAVVDAATGGILGEITVEATAEGYAELVEFAGEHATLRAWAIEGTGGHGAGLSRHLLDLGEIVVELDRPKRAPRRNGAKSDPLDAIRAAREALARTRLGSPRSGGERQALSVLLAARRSAVNAATEAQQQVFSLVIAAPEPIRARFRGQKLPGMLATAAALRVHPSWDVETTTTVLALRSLARRFRALTKEAVEHQKAILAIIRCWRPDLLEQFGVGPIVAATVLCAWSHSGRIHSEAAFAMLAGVAPIPANSGQVTNRYRLNRYGDRQLNRALHTIVQSRIRYHASTRDYVARRTTEGKTSREIKRCLSRYIARDLYRLLESGPPRLDEP

SEQ ID NO: 224917 - protein, 349 aa, unidentified
MGEVSTIGVDIAKSVFQIHGVDADGTVVIRRRVGRARVLEFFADLPPCLVGMEACATAHQWARELMKLGHDTRLMPPTYVKAYVKRGKNDAADAAAICEAVTRPTMRFVPNKNVEQQSALMLHRTRDLLIRQRTQLINALRAHLAELGLVAAKGREGLHQLVTVVTECGDERLPSNARFACQAIVTQLHAVQIEISGLDKRITQTHRANADSKRLDTIPGFGVILSTAVVATMTDPKAFKTGREFAAWIGLVPRQNSTGGKERLGSISKQGDRYLRRLLVVGATSVINSARARPYKYPWVIELLGRRPTKVVAVALANKMARIAWAVLAKGETYRAPTRSSNAAVAAAV

SEQ ID NO: 224918 - protein, 387 aa, unidentified
MRRSKSRIVGLDVHPDSFAGAILQGMDPWKARVVSTSTRVALPLLEKWVLRHTREEDILVMEASGNAFCVAERLRALKHEVVILESHRAGKVGKTYCATDRVDAIKIARIYLSALSPVVWQPDTKTRERREVFSAYQAVVKEGMRLKQQIKSMLNEHCVRLEKGFRLSHPSAIVRLFQRRKWTPAQKMLLQQLHAGLVGARARRQQLRHYMAQEVLAQKELLRLTRLCGINLITLYGLIAAIGEIQRFATARKLSAYFGLNPSVEQSGNYEGSGALKRHGRGAIRALLVQSAKKLLQVDNPLQKWGLAIAMRRGRNKAAVAVARKLCVAVWHVMQGHVIGAIERMDTLHTKLHKLATDLGLSAIKQLGYDTKEAFVQKKLFLLRSYA

SEQ ID NO: 224919 - protein, 340 aa, unidentified
MQIRSVGIDLGKTTFHLVALGASGKVLVKKKFIQKQLLAFTANMQTSLIGLEACSGAHFLGRALKQQGHDVRLIAAQFVKPFVKSNKNDFVDAEAIAEAVERKNMRFVPIKTDDQLDLQAMHRVRDRLVSRRTAVINQIRAFLLERGMVFPQKPAKLKAAMADVLENADNALTPMMRNMIGMLWDEWKTVEQQIGELTDRLEQIAESDASCCRIRQIPGIGPIVATAIVAAIGNGAAFRKGRDFAAWLGLVPRQYSTGGKAKLLGISKRGNIYLRKVLIHGARAAAMRIKRDRFAIGGWMNALEARAPRNVLVVAMANKLARIAWAVLSSGEDYRQRRAR

SEQ ID NO: 224920 - protein, 343 aa, unidentified
MQEITTIGLDIAKSVFQVHGIDASGEGVARRQLRRRQVLPFFRKLPACIIGIEACATSHHWARELEKLGHEVRLMPARYVKPYVKRNKNDAADAEAICEAVTRPTMRFVPIKSPEQQSVLMLHRTRQLFVRQRTALINAIRAHLAEFGIVAGVGRNGVEKLLGLIAEGADERIPPAAHECLMALAAQLAMVKRQILEADRRVLAWHRASKTSKRLEAIPGVGPLIATALVASIPDPHVFRSGRDLSAWIGLVPKQNSTGGKDRLGSISKAGNRYLRQLLVVGALSVIRRAKQLGYTRHPWLVRLMERRSVKVAAIALANKIARIAWAMMARNESYRTPLPTPA

SEQ ID NO: 224921 - protein, 437 aa, unidentified
MLPCLDPNAAGVDIGATEIYIAVPGDRDPEPVRCFPTFTEDLQAAADWLKTCHIESVAMESTGVYWIPFFQILEARGFTVFLVNAHHVKNVPGRKSDVSDCQWLQFLHSVGLLRGSFRPEQAVCTVRSILRHRDSLVQMASNHVQHMQKALDQMNLQLHHVISDITGVTGVAILEAILAGERNPHTLAALRDRRIKASTDTIAKSLVGDYRREHLFTLGQSLEAFRHYQELIAACDREIAQYLEGFESKVDPPPAPSSPSKDGSKPKASQPRFDLQTHLHRIFGVDLTKVPGINVLTTQTLLAEIGPDFSRFASGPALTSWLGLCPDNRVSGGKVLSVKTRKVKNRAATALRMAAQSLYRSQSYLGHYFRRMRTKLGAPKAITAAAHKLARIVYHMVTTRQAYDETICAHNEVQNRQRLEARLRKQARELGLQVVAI

SEQ ID NO: 224922 - protein, 380 aa, unidentified
MSVIGRPRALAATGSEHAAVVASLELSRSKWLVTSLLPGSEVMSKHVVPAGDAAALLELLGRRRRQAEERIGGPVRAITIQEAGLDGFWLHRLLEKNEIESHVVDAASVAVPRKRRRAKSDGIDGETLLRTILAWRRGEPRACSMVKPPSPEEEDRRRLVRERAVLVQERIRISNRIRGLLMSQGVAGYQPLRRDARRRLDELVTGDDRALPPRLKRELLRALDRLALLGEQIDAIEAERDTSSQSVPAQLLLRLRAIGPETAAVLALEAFYRRFDNRRQVAAFGGLAPSPWQSGRVERDQGISKAGNPHLRKIMIELAWLWRRYQPGSALSQWFRERARGADARARRTLIVALARKLFVALWRYVNTGLVPEGAVFKPA

SEQ ID NO: 224923 - protein, 343 aa, unidentified
MQAITTVGLDIAKSVFQVHAVDAKGNVVLRRQIKRRYVLAFFQKLPPCLVGIEACASAHHWSRQLQALGHTVRLMPPAYVTPYVKRHKNDAIDAEAICEAVTRPNMRFVATKTREQQSCLTLHRTRHLLIRQQTSVINAIRAHLAEFGIVAPVGRNGVDQLLGIVADASDKRLPELARACVAALGTQLGTLKAQILQFDRLIMAWHRSSEASRRLDEIPGVGPALATALVATVADPRAFRSGRNFSAWIGLVPKQHSSGGKNRLGSISKRGDRYLRFLFVAGALAVIRYAKIHGTKHRPWLTALLARRHTKVAAIALANKIARMTWAIMAKGEHYKEPVALAA

SEQ ID NO: 224924 - protein, 428 aa, unidentified
MGAGVLGVGVDWAESFHDVALGRPGTGVIEQFRIDHGPAGVTRLVARCLELEPDPAEVRVVLETRHGLLVEALVDAGFTVLPVNPDLVARRRGPAKKKDDAADARICCLLALDQYAELRRLVPHGQIGAELRAIARDDERAARDERRIGNRLRAGLLAVFPAAIDIAGGDLGAAVFLKLLQRWPSAAELAAATCEELEAFARSARHGWPGRFTGQVIAAMAAPQLPVRPELARAKAGSIRLAAAQLLLLREQRRAWERRMGELLLGAPRCGRDKTPKDPDPGKAFPGGEIYLSMPGLGDRLAARVAGEIGEHHQQFTTPNALQCYAGRAPVTRRSGRSEFTVARRLAYNRHLGEAVQQWAFCSLSRSAWAREFYDQKITAGKSHHAALRTLGNRWLEVLWHCLHKGVLYDEATHTANRLRSRPLKPAA

SEQ ID NO: 224925 - protein, 372 aa, unidentified
MKKTYHIGIDMHAQTAAIAWASSDGKLEYHGTCSASVQATEKTLRKLAKRLGTPFEELRVCYEAGPTGFVLARRLEDLGLEVTVVAPSLIPQKPGEKVKTDKLDALRLARLHRAGELKPIHIPDQEDEMVRDLCRARTDAVEDMRRAKQQLSAFLLRNGHRYSGKTTWGAPHLRYLRELKLPANQRFVLEEYLLALDSAHSRIERIEAKMQEQMETWARARAVEHLMGFKGFQLVAAMTLTAELGDLRRFQHPRQLMAYLGLVPGEYSSGTKRRQGGITKCGNSHARWMLVESAKAYRTRPAVSVLLTTRQEKLPRAVKEISWRAQNRLCMRYRRLKARGLHENKAAIAVARELSAFLWELQQTFPADQSAK

SEQ ID NO: 224926 - protein, 391 aa, unidentified
MFYIGIDIAKKNHEASIIDSSGKSLSKSISFPNSTKGIEKFNNFIAEFGVTTNNCIIGMEATGHYWISLFSYIIDLGFTCYVINPIQSDAFRKMYVRQTKNDSVDSFIIAQIMRFGEFSISNFSDENTFALRNLTRYRFALVDECSDWKRKLIAILDQVFPEYSSLFSNIYGVASKELLSKYPLPEDMLSIPAEELGDLLCKCSKGRLGINKAEEIQSCARETFGIKFAKRSFSFQIKQIISQISFLEEQLKEIEIEISYLLEDICPIITTITGIGSVLGASIVSEIGNISRFERANQLVAYAGLDTRIKQSGDFSATNTKLSKRGSPYLRRSIWLAATVAAFKDPALSIYYQGLRARGKAHGTAIGAVARKLTNIIFAVLRDQKPYTPNI

SEQ ID NO: 224927 - protein, 347 aa, unidentified
MRFYTQQHPYYCGIDLHARVLYVCIINDKGEKVLHQKIPAEKDALLELITPYQDQVVIGAECMHCWYWVSDLCLDYAFEFVLGHALYMKAIHGGKTKNDRIDSYKIAMLLKGGNFPIAYVYPRQMRATRDLLRRRTHIVRHGADLKAHVTNTFSQYNLPAHNLNLRYPFARKELRNCFADPSVQRNVDIDLNIVDFYTRELSKVEWFIEKHAKYHSAQDYSLLRTIPGIGRILALTIIYEIGDIKRFSSVQKFASYSQLVKCKAESAGKIYGTSGNKIGNAHLKWAFSEAAVLYLRGNEEAKRYLQRLLKRMSKAKALSALAHKLGRCVYFMLRNKTVFDPERFLSS

SEQ ID NO: 224928 - protein, 422 aa, unidentified
MAAYLHFVDSVTLHDIAKAFSVCSVIDDKEEMIIKPFSFNSSADGFKKLINNIVSLNCNTKDIIIGMEATGLLFENLYRYLTDLNYNVILLNPYQTAQYRNMVTMKYVKNDNIDALIISLLIKSGRYSKGYVNEEQLQSLKVLFRHKENIKDKLKSLKRETSSLLAVVFPELDKVIKDPYNVSGLILLDKYPTAKHFENVTVKMILKLFRKVKGNNFNEAKAELLLSYTKDTIYSGVAKDARAFFIRSNITLIRALQEQIKSLEDEMLKIFDKPINSSEVTKEDEDYISSVLDNLRTIPGVSDKTLLAVLAECGHLDRFKDAKSLIGYLGLYPTQEQSGNTLKYGHLAKRGAKYAKKALYLAAVAAARHNNELKQIFRNHIASGRARKEAIIIVARKLTYIIWAIYNHNKPYDPTRVFVAHP

SEQ ID NO: 224929 - protein, 343 aa, unidentified
MDVSTIGLDIAKSVFQVHGIDAAGEVVIRRCLRRRQLMGFFQKLGPCLVGIEACATAHYWGREIAALGHEVRLMPAHYVKAYVKRGKNDAADAEAICEAVQRPTMRFVSLKSPEQQSVLMLHRTRELLVRQRTMLVNALRAHVAEFGIVTRVGLPQIKELLAVIADKDDHRLPPDARACLESLGRQFLSVHEEICAADRRLHAWHRSDPVSQRLATIPGVGPVTASALAASIADPSVFKSGREMAAWIGLVPRQNSTGGKQRLGKISKQGDQYLRWLLVAGAMTVIRHARRRGTANQPWLDDVMARRPTKVAAVALANKMARMAWALLRHGGAYRQPVITASL

SEQ ID NO: 224930 - protein, 359 aa, unidentified
MKTQVKKIDFTGQNIYAGFDVHKNSWKVTIMAEDILYKTFTQPPNPEVLFNYLKSNFPGGNYHSAYEAGFCGYWIHDKLTSFGIKSIVVNPADIPTTDKERVQKEDKRDSRKIARSLSSGTLIPIYTPTIQTLRDRSLLRTRAMLVKDLGRYKNRIKSFLFFYGISIDEAFAEPKKHWSRRFISWLESLAIDGGSGKEALQILISECKNLRSSILKVTREIRELSKTKTYQEQAILLKTIPGIGLLTAMTILTELESIDRFTNLDKLCGYIGLVPSTKSSGDKDKTGDITPRGHSVLRSAIIESSWIARKCDPALMKSYVIYCKRMDSSKAIVKIAKKLLNRIRFVLINKKPYECLIEK

SEQ ID NO: 224931 - protein, 357 aa, unidentified
MRQQNYKKDFNGQNIFVGIDVHLKTWSVSVALPGGYLKTHTQKASAKELFEHLNKNYPNGTYHAVYESGFSGFSTCYALRELGVDCIIVHAADVPTTQKEKVTKSDPTDSRKLARSLMSGELDGIYIHSKDNLDDRGLLRHRAMLLKLMGGIKSRIKHLLYNNGVPYPEEFEQKSKHWSRRFISWLQHDVQLLSETRVTMDLLIEELLYFRKHILNVNKKIRTLANTDRYREKFENLISVPGIGAIVSMCLLTEIDDVWRFSNQRQFASFLGLVPVMQASGDNCYVGEKTFRGNKILGPKIIEASWVTIRYDSELAAKFGHLCNKGMKRNKAIIRIARKLSNVIFTILRENRKYVCH

SEQ ID NO: 224932 - protein, 389 aa, unidentified
MPTVADRPEAQTAIQTNLAAIFISLELSRSIWLITSLSPGGGEKMSKHSVPAGDIAALLARFSELKQKALARTGKSFPIVTIQEAGLDGFWLHRVLQSEGIESHVVDPASIATSRRRRRAKTDRIDGEALLRALLAFKRGEPRVCAMVRVPTPEEEDRRHLCRERKVLIAERVKHVNRVKGLLFSQGVSGYEPLRRDRRQRLDELTTGDGRPLPTHLKTQISRELDRLELLLDQIKAAEAERDALLAAQQPATPAPAGRMLLDLKGIGPEFAANLWLEGLFRHFDNRRQLASYAGLAPTPWQSGSVDREQGVSKAGNPRLRTTLIQLAWLWLRHQPQSALAQWFKERVSRNGGRLKKTTIVALARKLLVALWKYVTAGVVIEGAVMKAA

SEQ ID NO: 224933 - protein, 463 aa, unidentified
MPKAWKSRKKLALKVDVTAGLEALHHHAAGIDVGNAEHYAAVPVGRDPQPVQTFGSFTADLHRLAKWLKACRIETVVMQATGVYWIALYEVLEGYGLQVNVVNAKYTKTLPGRKTDVLECQWLQKLHTFGLLNNSFLPPEEIRVLRTYLRQRENLVAAAGSCIQQMQKVLTQMNVQLANVISDLSGMTGMAILQAILDGQRDPQQLAALADPRVQASRKEIAQSLEGHWREDLLFVLRQVHDLYFTYLENITACDQRIEAHLKTMQAKVDVVAQPLPEARPKDRLPNRKHIPQFGLREELYRITGVDLTRIDGIQVQTAQVLVSEVGVDMTRWPTEDHFSSWLGLSPNNQITGGKVIRRGTKKVLNRAATALRLAAQTLHRSKSYLGAKYRRLRAKLGAPKAITAMAHHLARLIYRLLRFGTQYHDKGVEYYERKYRETEMKWLQKQAAKLNMQLIPTGALTK

SEQ ID NO: 224934 - protein, 466 aa, unidentified
MKKAGESSKTKRRGVPTALQAIRPMVAGIDVGSREHWVCGPARADGEPNVRVFGTTTIQLKEMVDWLAEQGTESVAMESTSVYWIPLFELLESRGIEAVLVNARQLHNVPGRKTDFQDCQWIQLLHSCGLLRGSFRPGNAIVAMRAIHRQWANLVEERTRCVQWMQKALDQMNVQVHRAVTDLTGTTGMAIVRAIVAGERDPVRLSTLRHHHCKKSVEDIARYLTGTWREEHLFNLKSALQFFDAVEALIATHESRLFEAMAVLQPDERKDAAVPPHPNPAKEKAIKNRGDQPARTALWRFAGIDLTRIDGIGIGAARIILTEVGLNLSVFPSEHHFVSWLRLCPRRPISGGKPLKTRRNALGANRISGALRMAASSLQRTKTALGAAYRRIARHKGAYVAIFATARRLAQLVYRMLRYGQDYVDAGEEVYDRQFEARRLAGLREAARAMGFSLTAQPATTPAKSG

SEQ ID NO: 224935 - protein, 467 aa, unidentified
MGKGSSGTTGGDRRRNTRRERLRAMLPRDGAVIGIDLADEKQAFAVIDHDVRVLARKTVRVKAFRLGPALDWAVAQAGAKGLARVTVACEPTGPRWLQVQMLCAERGLPLVCIQPLVSHIAREQQDYTSHKTDEADCVMIARLAAELHCYVPEELDETWADLRHLGRRRAQLITQQTASMHRVRDFLSAAWPTVIETCAQPLLSKTWLAALEVVTARCGGQPAGLAAMGEEAFTASVRGAVAGWGGQRAWGTISSRIFAALTDTEGVVVSSRRGLLRRCAGELGDLRRARAQLRAVEAEMVAVLAELGLSRLGDIPGLTAAGAAAILAETGGPRRYDSSSSLVKHAGLSPSENASGAFHGEARISRRGRPGLRLTVWRAVWPMLRFNPVMAAKYQAMTAAAPASAGSRQAAAADAAARARRAKARAACAASLLRWIYSLVAHGTSWDPEVAAGRKDHQAAPRYLEAA

SEQ ID NO: 224936 - protein, 446 aa, unidentified
MDPNGNQIQLDPTEDEEIVARVAAIDVAKDSGMVCTRVPHPDRPRRRVTTVWSVPARTAAIMDLAGQLTDKGIERVVLESTSEYWRPFYYLLEARGLTVWVVNAREVKNVPGRPKTDKLDAVWLAKLNERGMLRASFIPPVEIRQLRDYTRLRVDLTGERSRHIQRLEKLLEDALIKLSSVATNMMGVSGRLMIEALIAGERDPRVLADLAKGRLRVKRAALIEALTGRFDEHHGELAAMLLEQIDGLTAQIGRLDTRVEQQLADIPAAQAPPGGTGPDGQPAYLPAVDRLNEITGIGRHAAQAIIAEVGLSMAVFPTSAHLTSWSKVCPRAVQSGAKTHAGKTGKGNPYLKSALGEAAAAAGRTNTFLGVRYRRLARRIGKLKALVAVARSILVIVWQLLADPTARYRDLGPEFFDNRVRPERRKLNHIRQLEALGYKVTLEPAA

SEQ ID NO: 224937 - protein, 390 aa, unidentified
MIYVGIDVAKDKHDCCILGSDGEVLFPPFTIQNSLQGFDELYDRICSLSSDTSKIKVGLEATGHYHMNLLHSLLDNGLASYVINPLHTNLFRKGQSLRKTKTDKVDASSIAMMLLTDRTLKPYSDSSYHNEELKSLTRYRFNKVYERSRLKVSISRLVSILFPELEKLVPTLHISSVYALLSEYPGASYIASANLTHLKHLLSKSSKGHYGRDIAIAIRDAATSSIGTIIPAKSMELKHTIRLAEVLTEEIDEIEATINSVMKTLESPITSIPGINTRMGAMILAEIGDFSRFENADQILAYAGLSPSTYQSGQLTASYSHMEKRGSRYLRYALFNATRFVCLWDPTFRAYLAKKKAEGKHYNVAISHACKKLVRTIYRMQLTGEPYHKA

SEQ ID NO: 224938 - protein, 372 aa, unidentified
MQSTTKFVGLDVSKEKISVAIADVSGEAPRYYGSIPHTPAALRKLIKELGAAETLSFCYEAGPTGYETYRWITSMGAHCAVIAPSLIPKRSGDHVKTDRRDAEQLARLYRAGELTPVYVPEREDEALRELVRAREAAKEDAHRARQRILKFLLRHQIERPATIKRRWTKKYRVWLGQLTFPYESMHVAFSEMLHALDEIEQRMGRLEKALVEQAATGSKASLIQALQSLRGIGLLTAITLAAEIGTFARFRSPAQLMAYLGLVPREYSTGLSTRRGSMTKAGNGRLRRTLVESAWSYRHRPAVKGDLAKRLDGMPADVQLLSWKAQERLHYKYRHLVFGKNKHKNVAVGAVARELIGFIWAVARTVEQPAAS

SEQ ID NO: 224939 - protein, 346 aa, unidentified
MHYIGMDCHITTLDFAVINEAGRLVKSHSVATSVNGFMEFVKTVPPPRTIYMEEGTLAAWALETCVRFKEKLVITDAKKNHWIGSSGQKDDAIDALKLAQLARGGYIKEIHHPVGQRRRFRELMTAYHDTVRSTTRIKNKIKARFRQNGIQCTGATVYLETYREEWKDKLPQEATPLLILGGLWRQLEQSEQTEEGLLAAARAQSKQYPEIKLFKDIPGIGFISAATISAILETPYRFADKRKVWMYAGLGIMTRSSGDKVYSEKLSTDYNRLLKYTLKQAAEAAIRAKDNPFRRKYLDMTLLHGIAPHRAKLTIARDMLATMWAMWRKGEKYRPEIREKAAYKQG

SEQ ID NO: 224940 - protein, 339 aa, unidentified
MKYTPVGVDIAKHVIQVHFIDEHTGEMIDKQLRRQDFLMFFCNREPCLIGIEACGGSQHWARELTKLGHKVRLLQARFVKAFVTGNKNDVMDARAIWMAVQQPCKEIAVKTEEQQSFLVLHRTRMQLVKFRTAQINSLHGMLLEFGETIHKGRAAMDREFPEALERLKERLPPYVISVLDNQFNKLNELDLQIDDIEKQLTSVARQNETCRRLLDIPGVGPLIATAAVAIMGEASAFKSGREFAAYVGLVPRQTGSGGKIRLPGISKRGDKYLRTLFIHGARAAALLTKEPGPWITELKKRRPASVAIVAMANKLARTVWAIAAHGRKYNKNHVSIRPY

SEQ ID NO: 224941 - protein, 345 aa, unidentified
MSKHSVRAGDTAGLFARFTQLREKCRQRTGYSFPIITVQEAGLDGFWLHRVLEKEGVESNVVDPASISTSRRRRRAKTDRIDGETLLRTLMAYKRGEPRVCAMVRPPSPEEEDRRRISRERKVLTGERVTHVNRIKGLLFAQGISNYEPLHKDRRRRLEELKTGDGRALPSHIKSQLYRELDRLELLLEQIKAVEAERDALIAAQATNATPAPVKMLLNIKGIGAEFATVLWAEGLFRHFDNRRQVASYAGLAPTPWQSGSVDREQGVSKAGNPRLRVTLVQMAWLWLRHQPHSALARWFTERVHRNQGRFKKSTVVALARKLLVALWKYATSGVVIEGAMMKNA

SEQ ID NO: 224942 - protein, 344 aa, unidentified
MTEYVGLDVSKEETAFCVKDLAGKVLARGKVPTDPEALFEALKAHCLCPERIVLETGTLSGWLARELGRLGLAVDVIDARQAHAVMGLQHNKTDANDAALLAEIARTGFYRGVAVKSEAAQEARILLKARCHLVRQRRDTENTIRGLLATLGIRFPRGSGKLAGRVREALEDAPGLRLMIEPLLSSVAALGRELGRLDEAVTARAKSAPACRLLMTVPGVGPVTALAFAATIDDPARFAKSRTVGAYMGLTSRRWQSGEMDYSGRISKHGDAMLRSLLYEAANSLLTVVRRAHPLKDWARRIRKRTSHKKACVALARKLAVILHRMLITGEAFRWPEKQAATVA

SEQ ID NO: 224943 - protein, 349 aa, unidentified
MIIIGADYHPAFQQIAFVDTETGDCGEQRLEHCEGAQKFYRDLATQGKKVRVGMEASGHARWFERLLGELNIELWVGDAAVIRAKRGRKAKTDRQDAQHMLNLLLKDDFPQIWVPSWENRDLRQLLWHRHRMVQARTRIMNQLQAVALNEGLRCKKKLWGEQGREQLEAFRLAPWASRRREDLLQLLDEINPTIAKLTLAIELEAEKCPQARLLMTHPGVGALTALAFVLIIGKAERFQCGKQISAYLGLVPIEESSGERRRLGHITKQGNSLLRFLLVEAAQATTRTIPEWRSKYIHLMMRRGRKIAKVAMARKLAIRLFWMMRQGWNYQQVSKFGSHVGQPGHRHGV

SEQ ID NO: 224944 - protein, 326 aa, unidentified
MEHELHYIGIDTAKEKLDVDVLRPDGRHRTKKFANTTKGHDELVSWLKGHKIDHAHICIEATGTYMEPVAECLYDSGYIVSVINPALGKAFAQSEGLRNKTDTVDARMLAEFCRQKRPAAWEAPHPLERALRALVVRHQALTDMHTQELNRTETAREVQRPSIDAHLLWLEAELKRLEKQIKDLTDDDPDMKHRRKLLESIPGIGEKTSAVLLAYIGLKDRFAHARQFAAFAGLTPRRYESGSSVRGASRLSKAGHVSLRRALYMPAMVATSKTEWGRAFRDRLAANGKKGKVILGAMMRKLAQVAYGVLKSGVPFDAARHNPVAA

SEQ ID NO: 224945 - protein, 375 aa, unidentified
MPRYSTAFGMDVHLRSTTVCALDAETGEAVARRFRGNPWGEVAEWMSGFPGPSLAAYESGYLGFAPQRELSALGVDCVVAAVSKVPRSAADLSSKNDRNDAARMAKAILSHDVTPVWVPSPEIEGLRDLAAAHDAATARLAAAKQRLLAFLARRGHVYGGTTPAGNPRKYWTYGFLRWLDKVRPADDGGIRALAALRNEVEAADEAREALLAEYRAAVAAGPLSAEVEALQSIKGCGFVLAAAFASEVGDFSRFRSGRQVTAYFGLAPKQRSSADSVRLGGISGAGNALVRRLAVEGSWRYAQAGHQPKLMPKGSGVPLEIRMHGRKGSERLLRRREEMLERGMPQAKANAATAAELVRWLWALGMMCREAGEET

SEQ ID NO: 224946 - protein, 354 aa, unidentified
MRIIGCDYPPGFQQIAFVDTDTGECGERRLQHREEAEKFYRNLAAPGMKVRVGMEASGHARWFERLLAELQFELWIGDAAEIHPKRVRKQKTDRQDAQLILRLMMEDRFPRIWVPSWENRDLRQLLWHRHRMVQARTRIMNQLQAVALKEGLLCKKRLWRERGRQQLESFPLAPWASRRRSDLLELLDRLSPTIMELTQTIEQEAEKCPEAQRLRTHPGVGSLTALAFVLIIGRAERFQCGQQIASYLGLVPLEESSGNRRRLGHITKQGNALLRFLLVEAAQVSARSIPEWRNKYFHLAMRRGRKIAKVAMARRLAVQMFWMWRKGWDYEQVRKFGSHAGKPGTGDGVQSNPE

SEQ ID NO: 224947 - protein, 370 aa, unidentified
MEVIVGIDVSKDRLDVQVVPSGEAFAVGNDHAGVEELAGRLIALAPQAVALEATGGYERLAVAGLSAAGLSVVVVNPAQVRAYAQALGRHAKTDAIDAAVIAAFVAATRPQIRPLRDGETQALAELVARRRQIVAMIVAEENRARTAIGRQAQKSIKRLLTALRRELQSLDADLDDHIRNSAVWRVKEKLLVSVPGVGPATARTLLAEMPELLDRRQIAALAGLAPWTRQSGRWQGKRFIGGGRDKVRATLFMAPSSPPSTTRCSRPSAIGSWPPASRRSSPSSPPCASSSPFSTPSCGTRNHGKALDVQDSRSPQVGGASPRRPWHMALAVVNCGDAEFERSDDSARLPLEQRRVQSPANFQLSRRAQG

SEQ ID NO: 224948 - protein, 309 aa, unidentified
MSSWVGIDVSKNTLAVWVRPSGVNFIVCNSSEGHQALLLSLAEIQVERVLLEATGGYERAVMDCLAQVGYPVVRINPRRARAFAQAMGKLVKTDPVDACALAHLAQVIEPGACQTVSLARDELQELVRRREQVVKLRDDERRRLTLARSGVVQESLQTNISQLNEQIARLNSAIEAVAQRTDSQLVKQLGAIAGIGPVTVASLLAYLPELGQLNRRQIAALAGLAPYNNDSGQHSGKRCIKGGRASIRRVLYMATWSVIRCHSSFGARYASLRARGKCAKVALVACMRVLLIRLNAMVRDHSSWRAEAV

SEQ ID NO: 224949 - protein, 348 aa, unidentified
MLADEVDNVIGVDTHRDTNTAQAVAAKTGAIGPHTTTDADELGYRRMLAFADEHTPGSRVWAIESTGSYGAGLTAYLHEHGERVVEIDRPRRGARRNGAKSDELDALRAAREALGRRHLAEPRRRGEREAIRVALRTRQGAVRARVIAIGQLKSLIVTAPESLRSSLRRGSDRDLVGRCARLRICSSQSVEQRMTVRALRSTARRALALEAEATELEAELRPVLEALCPQLLAEPGVGIVSAAELINAWSHPGRIRSEAAFAMLAGAAPIPASSGQTVRHRLNRCGDRQLNRALHTISMSRLRHDPRTRAYAQKRREEGKTPREIRRCLKRYVARQLFRLLEAEAKMA

SEQ ID NO: 224950 - protein, 343 aa, unidentified
MECYVGLDVSLKQTSICVVSGTGSVVREGVVASDPDAIAAFVRSKAPGAIRIGLETGPTSTWLWTELKRLGVPVICIDARHAKAVLKMQINKSDRNDAAGIARIMQTCWFKEVRVKDLDSHTLKALLVSRALLVKIKRDLENQIRGLLKNVGLVIGRAKFNVFAVRAAELIEDRPELIAVVGPLLKARKAIEQQTDDLDRKVVKLARYDAQVRRFMTVPGVGPITALCFKATIDDPTRFKRSRSVGAYVGLTTRRHASGEIDWTGRISKCGDAMLRSYLFEAAGVLLTRVPKWSALKAWGMRLAKRNGLRKATVAVARKLAVILHRMWIDRTEFNWSKQEVAA

SEQ ID NO: 224951 - protein, 412 aa, unidentified
MEQVIIGVDPHKLSATIEVVNNQEHLLGSVRFTTDQRGYTAMRSYVKAWPNRVWAVEGANGAGRPLAQRLVEAGEQVVDVPAKLAARVRLFDTGHNRKTDALDAHSIAIVAVRTKGLRVLAADGELEALRMLTDRRDELAHLRVQTVNRLQRLLSELFPGQRKKDLSALQAKAMLTTVRPRDIAGKTRRRMAAEELADLVAVDAKLKKIKAELKAMVIARGSTLLQINGIGPAGAARTLADVGDITRFADRNRFASWTGTAPLDASSGEQIRHRLSRAGNRRMNHVLHIAAIVQLRNDTEGRAYFRRKVAAGKTRMEALRALKRRLSDVLYRRLVADARTRDLDAKSRGLIDDGTGPGGHCGATQESSAADLPPHVDTSDQPLPGPARPTLPRPIRTRKTATSPSSLTRPLT

SEQ ID NO: 224952 - protein, 367 aa, unidentified
MRQGISVAAQGCIAAVGIDVGDRFSHWCALYEDGAVAGRGRVCTRSEAFVDQGKQWRGVRVAIENGTHSGWISRVLSAAGCEVVVANPSRWRGTAHNSKNDRNDAEALARVVRVDPRLLFPIQHRGEQQQVDMAVIRVRAQLIKARTQLVNTARGVVKSLGGRLGRADAAYFVPRTWPEVPAALRDALGPVYRSLVALNEQICKLDKQIEQLSRQRYPHTAQLRSVPGIGPVTALTYVLTLGDPHRFQTSRAAGAYLGLRPRQRQSGQRDPDLGIARNGDGYLRSLLVECAHHVLSRGPDSALKQWGLALAGGGKRPRRRALVAVARKLAVLLHKLWMTGQRFCPFPEETVDADQRAHRSLRAAAAV

SEQ ID NO: 224953 - protein, 353 aa, unidentified
MNNVAEQSEVILGVDTHLDVHVAVLIDVVGRVVATTSIPTTTSGYEHLMRWARGFGRLTRAGIEGTGTYGAALARRMQADGVKVLEVNRPDRSRRRVRGKNDPTDAESAARSVLAGEAAAIPKAQSGVVEAMRAVTMARRSAVKAKTQAMNQLRALLVTAPESLRAKFSNAKPDQCVARCARLPSLGDTPLLQALASTLRLLARRWIALANELDELDAALAELTRRAGRRLLTRFGVGPQTAATLLVTAGDNADRLRSEAALAALCGASPLEASSGKTIRHRLNRGGDRAANNALWTISMVRMRSDLRTRAYVARRTAEGLSTKEIQRCLKRYIVRELYPLILADLADSRMQT

SEQ ID NO: 224954 - protein, 403 aa, unidentified
MGAVAGLDWAAEKHDVLIADEHAEVLAKRVVDHTEQGIRELIELLLEQQVERVAIERPEGLLVGRLLAADIEVLAIHPNQVKAARERFRPAGGKSDPFDAFVLCELARTDHHRFPRLAPSGDETVALRALSRSREDLVATRVELANRLRAELERFWPGAAAIFADVDSPIGLAFLERYPSPADARQLGPRRLEAFLARNGYCGRRSPERLLERLRGAPAGSCGEAEVEARRAIVLALVAALRPLVEQIRLLSSQIAGAVRSHPDGGIFLALFRDPKSSVTAAGLVAEIGDNRARYPSAAALAADAGMAPVAVESGKRRAATFRRGCDHRLRAHLATLADSTRHWHPWAHDVYTRARARGCDHPHAIRILGRAWTRVLWRCWQDEIAYDPSRHGNLNRLQTTRG

SEQ ID NO: 224955 - protein, 347 aa, unidentified
MRFYTTQHPFYCGIDLHARTMYVCILDQAGETLLHRNMTATPEALLKAIAPYREQIVLAAECMFTWYWLADFCAEHGIPFVLGHALYMKAIHGGKAKNDKIDAHKIAVLLRGGMLPQAYVYPAEMRATRDLLRRRMHLARKRGELLAHVQNTNSQYNLPAIGKKIAYKANRDGVAERFADPAVQKSIEVDLALITYYDALLRDVELTIVKTAKHHDANTLYLLQTVPGIGKILSLVLLYEIHDIERFPRVQDFASYCRLVKCARESAGKRSGTSGAKIGHAHLKWAFSEAAVLFLRDNPAGQKLLTRLEKKHSKGKALTILAHKLARAVYYMLKRQTAFDLETFLHA

SEQ ID NO: 224956 - protein, 415 aa, unidentified
MNRLIERCAFLDVHKSAVTACVRVPDGTGGRRQDVREFHTTTAGLITLADWLRSWAVTVVGMESTGVYWRAIYYLLEDEFECRLFNARHLRHVPGRKSDVQDAEWGCQLIEHGLIRESFVPPRPQRELRDLVRYRKAKIQERTREVQRVEKTLQDAGIKLSSVASKVLGVSARKMLEALISGTHDPDVLADLAKGTLRRKIPALREALQGRFTGHHALLIGQMLAQIDFLDETIQTLSERVEELTRPFSREIELLDSIPGVDRRAAEMLLAEIGPDMSRFPTDAHLASWGGICPGQRESAGKKHSAATRKGSKWLRGTLTECAKAVVRTKGTYLSARYHRIKSRRGHAKATVATAHKILTAAYHILKQSVAYHELGEEFFYRRDTENTQRYRHRLIRQLERLGHTVTLDAAPQPA

SEQ ID NO: 224957 - protein, 424 aa, unidentified
MLEQYRLFVGIDWATEVHEVCVLDGERRVIDRRKVEHSGSGIAQFVEALLKLSGNQPEQVAVAIEIPRGAVVETLVERNFHVYSLNPKQMDRFRDRHTVPGAKDDSLDAFVMADSLRTDLHLFHRVQLDEPLIVRIRELSRTEATVQQATVCAANQLRELLIRYYPQMLKLCPSLDESWHWTLLEMAPLPAQVSKLSRTKVEKLLKEHRIRRFTADEVLTQLKAAPLQLAPGAAEAASEHALLQLPLIRVLKQQREVIAKRIEGVLAELASPTAAGGEPGQPEKHRDVTIILSLPGVGRIVAATMLAEASQALTERDYHALRSYAGAAPITRQSGKKKVVVMRRSCNERLRNAVYHWSRVSAQKDGHSKDHYAELRGKGHTHGRALRGLGDRLMAVLISMLGSGTLYDPDFKKHSQPSAMPGAA

SEQ ID NO: 224958 - protein, 451 aa, unidentified
MQNRNVKMEVVNPNAAGIDVGSRSHFAAIGQGKEEIKEFGVYNEDHQQLIKWFLDNEIKTVAMESTGTYWQNLYSALISAGFQVILCNGKFTKNIKGKKTDVKDAQWIQKLHTIGLLTGSFLPDEATEQLRTYCRHRTNLVSQSADTTRKMQKYLRLLNLRLDVVVKDVTGLTGLAIIDAICKGEKNPEKLAALRHGNCKKSEEEIAKALQSNGRKDYLFGLKQEYQLYINFQEKMKECDVEIEKLLNEQINNDNEKKQHVIDKKVYKKINKNTPKNLDINLLSYQYFGGVDLLAIEGVSHATALAVMSEVGNGIRKFGTGDQFASWLRLAPNNKISGGKMLSSRIPKGSNRLKIALRNAANAIGNLKDTALSNFFNRIAYRKGRPAAISATARKLAVIIWNMIVKGVPYKPQSNYEFLDQKRKRKVQEMKKLIHKFDIKTDELGLQLNGL

SEQ ID NO: 224959 - protein, 320 aa, unidentified
MSNITLGIDVGKFELAIALRKDGKFTDKLVENNPKGFQKILKFLKNNAPEAEVYLESTGRYDEKVTDFLSEEGFDVKVINPTQIRDFARTKLARHKTDKVDARIIAEYGSIFGGRTYTKIEDNIRELRELYRMSLSLKDELVATKNHLENQDTFPKFVADLWKKRAKDLENDIKLVEKKMKEIILADPDLKLKFELLIKVPGIGECTAIAVLAEVTRLENFRTARELAAFIGLTPKHRTSGSSIRGRPRISKMGLKILRKALYLPALTAMKHHPSLKNFAEKLRERGKKFKQIICAIMRKLVHIIFGVLKYDVPKFRSEG

SEQ ID NO: 224960 - protein, 339 aa, unidentified
MILYGGMDLHGDNVFCTVMDREYRPVFERRLPNDLAVVLEALEPYRERMAGVAVESTFNWYWLVDGLQAQKYPTRLANPARMQENIGLKSANDKTDARFLAKQMVMGVLPEGYIYPKKERPVRDILRRRMRLVHMRTGEWLSLEGLVARHSGKDLGIQALNGLEDGELGRLLGNDPLVLAAAQISYRHIAFLDREIRQIEKAVEPRVKLTDGYERLLNVPGIGRILTMTIMLETGPIARFPGPGNYASYCRAVKTEHTSNDRKKGEGNGKSGNRYLAWAYVEAANFAIRYSPELRAWYQRKAARTKRVVALKALANKLAKACYFILRDGVEFDVKRLVG

SEQ ID NO: 224961 - protein, 421 aa, unidentified
MTHLPEAEFAACIGIDWADATHDVCLHAVGSDTREFSRLEHTPEAIDAWARAVQQRFAGRPVAVCLELNKGPLVYALRQDAFLILFPGNPLTLAKDRDAFTPSHAKDDPTDAELQLELLLKHRDKRKPLKPPSPAMRALEPLVDQRRRLVGDNVRLTNRLTSALKNYFPHVLQWFHDKDTTIFCDFLTQWPTLKAAQLARRSTRERFFRAHHVRYADVIDQRIQAIKSATPLITDEGVIAPTALLVQALVSQLRVTLQAIDAFDDAIAQHAQSHPDFPLFNSLPGAGAVVAPRLLAAFGEPRERDTSADELPQYAGIAPVTERRGNKSWVHWRLQCPTFLRQTFVEWAAESIRHSFWARAYDQQPRNKGTSHQAAVRALAFKGIRILFRCWQNRTPYDESVYLNALQRRGSPLIHNLARGA

SEQ ID NO: 224962 - protein, 319 aa, unidentified
MATEPNQAHNQITFVGVDISKETLDVSAGGNHRTFKNSPAGFRDLLKWVRKSQAETFQIICEATGGYERSLVQALHVENVPVSVVQPARVRSLARSLGAFAKTDKIDAALLVRFGEITTPKAFTAPDRATKALTELVDFRQQILDQISVLKNQQEHLTPGPLARSSNRILRAYQAEIKLLEKTIDELMKANQGLWENFQRLVQVKGVGRYTALGVLAYFPEIGKLSRKQAAALAGLAPYNKDSGNRKGHRSIHGGRTKLRGALYMAALTAAHKNPVLSQFYTKLKANGKPSKAALTAVMRKLIVLLNHLIKHPEFSLAS

SEQ ID NO: 224963 - protein, 454 aa, unidentified
MAKNKKRRSSVQLPVINPNAAAVDISSTEMYVCVPMDRDAEPIRKFGAFTPDLHALADWLGHCGVKSVAMEATGVYWIPLFQILETRGFEVCLVNARHVKNVPGRKTDVVDCQWLQYLHAVGLLRASFRPADDICILRSLLRHRDNLIEMASCHIQHMQKALDQMNLHLHHVISDITGVTGLAILDAILSGERSPVVLAELRDYRIKASPDIIAKALVGDYRTEHLFTLRQSLEAYRHYRRLIEDCDAEIHRQLDSFDSKIDPSQHPIPPSTSSHRKPADNEFRFDLREELYRILGFDLSQVPGFQAGTIYAIFAELGSDLSKFPTVRHFVSWLGLCPDNRVSGGKILSVRTRKVKNRIALALRRAASSLLRSSSPLGDFFRRMRAKLGPPKAITATAHKLARILFHLLTTHQPYDSNVLLRDAEKQRKRVEAKLRARARALGFQLVPIPEAVS

SEQ ID NO: 224964 - protein, 437 aa, unidentified
MLSIFKSIITIMINSTDFAATIGLDWADKKHDLWLRPTDGCKAEHLRLEQTPEALHEWVAKMRQRFANRKIALAIETSRGPVISALMAYDFIVLFPVNPKGLKSYRDAFAVSGAKDDRTDAQLLEEFVRLHPEKLRALEPDTELTRKLAGLVQNRRRLVDERTRLVNQIHATLKTYYPMAETLLEGQMNTPMAADFLVRWPDLEAVQKAKPELIRSFFYQHNSRSAKKTEERLAAVQKAKALTTDAAIIMPARQLVLALAGMLRPLHQAIGRLDQEIAQAMDQHPDAPIFRSFPGAGPALAPRLLVAFGTNRDRFESSTDVAEFYGIAPVVVQSGNSKTVHFRYRCPKFGRQTFHENASCALKKEPWAKCYYDQQKEANKAKHHQACRALAYKLVRIYFACWKQRQRYEPKRYLLALEKHASPLHRKLQNLTAAHCE

SEQ ID NO: 224965 - protein, 348 aa, unidentified
MAYFVGLDVSVKETSVCVVDDSGKAISEQKVLTEPDNIITLLTSIGETYARIGIEAGPLSQWLVNALIAADLPVICVETRHMKALLTAQQINKTDRNDARGIAQMMRVGLFKPVHVKTLVAQEQRMLLTCRKLVQRKLLDLESDLRGTLRNFGLKVGAVSGGRYDARVRELVEGFPGLAAIVEPLLTVRRVMRQQFAVLHKMLLDTVRDDPVCRRLMTAPGVGAVVALTYRATIDQPQRFVHSRAVGAHVGLTPKRYQSGEIDYDGGVSKCGDALLRTMLYEAAQTMLTRAKKWSWLKEWGVRVAQRRGIRRAIVAVARRLAVVLHRMWVDGADFRWSKDSATVLNAA

SEQ ID NO: 224966 - protein, 335 aa, unidentified
MEFEFFIGIDVSKNKLDFAVQYGDRFLFHQEIANEPQAINTFIKYLGKLSGFSLNKVIFCMEHTGIYNNHLLTCLYKKKAHICLEAATQIKNSLGNIRGKNDKIDAIRIAGYAYDKRDKLRLWVPKREIVQQLAHLAATRLRLITIKKQLKVPLKEHAAFSSGKVARQSLQVCSHSLKAIDQDIDRADKAIEELISADTELRRLFGLVTSVSGIGKVTAVQIIVATNEFKDINNPKSFACYCGVAPFKDDSGKVVKKARVSHMANKKVKTLLHLSAIVAIQYNADLKLFYDRKVNQEKKNKMSVINAVRNKLILRIFACVNQNRPYEKNYLKLVA

SEQ ID NO: 224967 - protein, 450 aa, unidentified
MSNATGVTRGDRRRNARREALRGLVPTTSAIVGIDLGEDSQMIVVTDHDSRVLARRQVTAKAAGLGRWLDWAAGQAADAGFTSVTVACEPTGSRWLHLQDLTAARGLANVCVQPLATHRAREEEDYTRDKSDYKDAVLIARLAGELRCYAPEVCAGQWADLRHLGRRRAELITRESRAVLQCRDLLSLAWPVVLRAAAQPFNSTTWAAALAVVLERCDGDPTRLRRLGLARFTAAVRRELPRWDGVKVRHRIVRAVFTALTDTDGAVTRHRRGALQRAGWAIEDLRAARAGLRTVQAAMGEVLDALKVTDLLATIPGLTLSGAAAILAETGDPTRFPHARSMVKHAGLNPTENTSATFTGRTRTSKRGRPGLRLAAWRGAWGAIRHNPVLAARYTHLTTREDNRLTAGQAHVACAAALLRQIHAVLATGQPWQGAIAAGEQHPHTAPVAA

SEQ ID NO: 224968 - protein, 427 aa, unidentified
MGTERTSIERFRQLKKEIRGSEEYLIVGIDVAKDKHHAFFGTATGKTLLRRLVFENNKVGFEKLLTHVEAIRVQHALSKVVIGFEPTGNYHKPLGAYLIKCGLMVVLVSGVAVKRNRELLDGRWDKHDTKCAANIADLISQGKCLYYESPSAAISNLRDLLSLRKRLKKEEHSLKMRIRNGLIAKYFPELDRYYDRCESENLAIVRWCLDPRTIANMEVKRFSQIVTSKERGRAQAKRLAAIWNVAGDSIGCLTGEASEFEAKVLVEKLKQVRQLILETEKLIAAVSRRFAEYNYLLTIPGFGPYVSSRVIATVSNPYRFEKENQVIKMAGYDLSADRSGKNSDKAIPVISKKGNADLRYALYQAALVASTRNRKFIVYYTNTLRGREREKGIKTKMRVKLAAKLLAIAWTLMKKKEPFNPDYLNLK

SEQ ID NO: 224969 - protein, 340 aa, unidentified
MNEITTVGLDLAKNVFQVHGVDAEGTTVLRKQLRRAQVLAFFSRLPRCLVGMEACATAHYWARELRTLGHEVRLMPAQYVKAYVKRNKNDAADAEAICEAVARPTMRFVPAKTAEQQAAVLLHRGRERLVRQRTMLVNALRGHLAEFGVIAPQGLRNVGRLIAIIRDEKDARLPGLARQVLQVLAVQIEQLEAAIAALEKQLMGWHKSNPVSQRLATIPGIGPIIATAIAAMVAEPSGFRSGREFAAWLGLVPRQNSTGGKNRLGGISKRGNQYLRRLLINGASANLLRSKATNADPWVIGLRRRRPSLVVAVALANKTARIAWAVMHRQENYQRMATAA

SEQ ID NO: 224970 - protein, 315 aa, unidentified
MASFLGIDVSSHSLDALVRPQGIKIHVSNDPAGFDELQRSLGGRSIKRVLLEATGGYERDVMHFLQDAGYKVIRVNPRRARAFAESLGVKAKTDAIDAEVLAHYAEVIPDHPTLRISPQRALLRELLQQRDRLVQQRDDDLRRLKQAQSTVVSDFLKANLQHFKSQIKLVEQAISLQTEVLEDERVAQLIQVKGIGLVTAGKLVTLLPELGRVESREIASLVGVAPFNHDSGKFVGKRSISGGRCEARRSLYMSCLVAMKYNPALKARYEALRERGKVAKVAIVACMRVFLVRLNAMLRSGKPWLDLVLPQPKRV

SEQ ID NO: 224971 - protein, 458 aa, unidentified
MEEPQEVPADEEHERVWERVAAVDIAKASGVVCTRVPDEDRPGRRKSHVWTVQAMPKAVIELGDYLRARQIQVVTLESTSDYWRIWFVILEAAGLRVQLVNARAVKNAPGRAKTDKKDAVWLAKLTEKGLLQPSFVPPYEIRRLRELTRLRTDLVHDKSRYWARLEKLLERALIKISAVLSTLDTDTARAMIEALIAGERNPRVLADLAIGKARAKRAELTLALEGRWDDHHSIQARILLDNISALNQQIDQLTAQVSELISQIPAAWGVDADGTTGPDAGASPDSPVLSAVAQLDAITGCGIIAAQAVIAEIGLDMTVFGTPGRLVSWAKRCPQTRQSGTKTSAGKAGKGNPWLNGILGEIAASASRTNTFLGERYRRLARRRGKRKALTAIARSILVIIFHLLSDRSTRYHDLGPDFYDTQIHRDRKIRNHLRQLRALGVSTDDITTLLGKDPAAA

SEQ ID NO: 224972 - protein, 408 aa, unidentified
MLRMADAARSVTGGVDTHALAHLAAVVDQVGRVLGSEEFPASAQGHTAALAWMRSFGELVKVGVEGTGSYGAGLARCLAAQGVEVVEVIRPNRQARRRRGKSDPADAVAAALAALNGEASGAPKAHDGAVESLRALRVARRGAVKASTQAANQLRDLIVTAPEELRAKLKPLSSAQRLALAARFRPGDLEDPHEAVKAAMAAIARRYQQLQAEIERLDAALESLVSRAAPPPFLAKQGVGLQVATTLLTTIGDNPERLASEASFAALRGASPLDASSGKQRRHRLNSGGDRQANSALWRIVFVRMAHDPRTKTYLARRTAEGKTTKEIMRCLKRYVAREVYKALVATHKTPARRPDSESVRRPRFAAAPEDRVSLVDRHALVTHGLRPCAQAQLLPGRSESPSSSDLT

SEQ ID NO: 224973 - protein, 424 aa, unidentified
MAGVMIGIDPHKGSHTAFVIDGREKPLGQLRVRASCEQAEALLGWAGRWRQRTWAIEGARGLGQLLAQQLLAAGERVLDVPPKLTARVRLLESGQINKTDENDARAVAIAALRARQLPQLTVEDQTIVMRVWARRYHDLGRLRTQAVCRLHTVLCELVPGGVRKQLRTSQASAVVDSITAESPVAQAKLELAHDLVADLQRLDAQRREVKRRVSRAVAAAPTSITEVYGVGPIVAACVLGYVRDIRRFPSRDRFASYNGTAPIEVSSGDRKIYRLSRRGNRQLNHAIHIAAVSQISHRGSEGHAYYQRKRAEGMTSKCALRALKRKISDTLYERMLNDTHRRHQDPGGQSGNDAAASVAGSHPDRPALRRSHSRAATNSKTARTSSPTTELRPAPDRRRTSRSATGVQVEPRPRPPRGHGQERP

SEQ ID NO: 224974 - protein, 363 aa, unidentified
MNQVLHTGSIIVGVDVHKYGHTAAALDCFGQEIGNLNFSNDLLSDFCSWMLSLSKKENIIVALEDANGYGVFIVKALTEAKFTFRYVPAILTERDRKRSTHHDKSDTKDAKRVAKVILTKYEETLPARESISTKKEVDTAVNFDLLLSERRDIVNWKSILKNQLHALLHQCFGDHYKDGYSKTFSKKACLAYTKELKRKIKKDPNNFLAQSTIRRIERLILLTEQSAVIDKRIENISKDVFDVKTLTENIHGCGISTAATIISQVYTIKRFSTKAKFAKYAGIAPTEKSSGQRGRLYTSPFGNRILNRAIHRIALSQISGNGDEKGKLYYKKKLAEGKTKLWALRCLKRQLSNRVYQVLKHAN

SEQ ID NO: 224975 - protein, 324 aa, unidentified
MQHEPLIDVALPVAGIDVAKKQLDLFIDVADQRLRVANDDAGVARLVATLVEHRVRLVVVEATGRYHRRVAAALLQAGVSVAVVNPQQDRAFAKAAGKREKTDRIDAGVLARFGRAMDPRPAVETPESQTILSDLVCRRRGLVQMRVAEANRAHDRLPRLAAAQSRKLLRLIEQQVEDLDREIAKLVEADDGRGGKAKVVDSVPGIGPDTANQLVVDLPELGELNRQEIAKLAGLAPLNRDSGRYRGQRKIGGGRAEVRTCLYMAAFNARRHCDRFRDYFDGLIARGKLYQVAMAACMRKLLVTLNQMVKTNTHWNPNLHGAVA

SEQ ID NO: 224976 - protein, 359 aa, unidentified
MGVMEGRERRIVGGVDTHKDLHVAAVVDEQDQVIETRCFATTRQGYRQMLTWMRSFGELQRIGIESTGSYGAGLLRFMQQAKVPVLEVTTPDRQDRRRRGKNDDLDAQNAAHAAFAGQRTVTPRSRDGMIESLRVLMACRKTAVSARRVALQMIHNTIVCAPDDLRDQLRSLTRMQLVRTLAAWRPDLTAYRDLDSAYRISLKSLARRYLELHDEIADLDTMITAIVDELAPNLVARNSIGHIGAAQLLLTAGDNPERLQSEASFASLCGVSPVPASSGKIVRHRLNRGGDRAANSALHIIAIGRLRTDQRTRDYIARRMAEGHSKLDAIRALKRYLAREVFTLITQRRREINATRIAA

SEQ ID NO: 224977 - protein, 419 aa, unidentified
MEDVVEYCAGLDVHRDTVVATVRYPVGGRRSSTTKTFGTDTAELVALGDWLVSQSVTRVGLESTGVYWKPVFYQLEDRLEQVWLLNAQHLKNVPGRKTDVADSAWIAQLVEHGLVRPSFVPPPQIRQLRDFSRHRRVLCEERTRMVQRLEKVLQDAGIKLTSVASTVLSKSGRAMLEAMLAGQTDPVALAELAKGRMRSKIPQLVDALHGNFRLDHHGVLVAQILAQVDFLDRQLADIDEHITALVADLEPIIERVQTIPGVARKCAIGMIAEIGVDMTVFPTAAHLASWAGICPGNNASGGKARSGHTRRGPIALKTVLTEAAQAAGRTKNTYLGARYHAIRGRRGTFKAVGAIRHDILIAYWHIVSTDTNAEDAQVGYRELGADWITSRHSREYQIAKLARQMEKLGATVTVTLPTI

SEQ ID NO: 224978 - protein, 320 aa, unidentified
MMAQNDLVVVGIDVSKDKVDACIRALALQQTFPSSAQGHRQLVAWLRKHPVNKAVMEASGGYERGWARVLREAGIEVRIVDPKRVRSFAQSAGRLAKNDAIDAQMIAWFAETFSQAPGQVHDAAHEELVALVKARIALVDLKTRLEVQHQHAAPASVQKARARVLKSLVGEIAKLEAIIAATIKATPCLAERAEIIESVPGLAETTSANLVAGMPELGQVSNEIAAALIGIAPYDDDSGNRRGERHIKGGRRWVRNALYMPCVGAATLNNPVLKAYYDRLIAKGKKPKVALVACMRKLIVILNTMIARGQKWDPSRYALN

SEQ ID NO: 224979 - protein, 341 aa, unidentified
MQKFIRIGVDLGKNYFQAHGLPVEGGAVVNRKIRRSKMHEFFVGIAPCRIGMEACGSAHFWARELVAMGHEVVLMPPSYTKPYVKRGKNDAVDAEAICEAMSRPGMRFVPIKSAEQQGTLMLHKTRELLIKQRTMSVNALRSHLTEFGLVVAKGIGHIDELLALAENDTTIPAAARAAVKVLTEVIDGLSQEIDELETKIAEAHAQSETSRLLVGVPGVGKLVASAITAAAPDPTIFKSGRDFAAWLGLTPRQNSSGGKQTLGGITKQGDRHLRKLLVLSATSLLRCVGKRSGALAEWIKALLAKKPARLVTVALANKLARMMWAIMSTGKAFRTELFAKA

SEQ ID NO: 224980 - protein, 416 aa, unidentified
MTFKVVRFICGGMDVHKNLIVATIGTTDRQTLITEYIQQSFSTFYSDLIRLKEWFISHDCYDVCMESTGKYWIPIYNVLETELNICLTHPKYVKAIKGKKTDKRDSKWICDLYKCDLVKHSFIPKKEIREMREIARYRCKLVYMRSSERNRYQNCLAVSNISLASAVSDPFGKTATNIMKELMQSEVIEDDKILKLIHKNCKDKDKILDSLHGYHIESDQRFKMDTVMNHIEYLDKQIQACEAELIKRAYPLRDYFQHITHVKGISALSAILIVSEIGTDMNQFESDKQLVNWAGLSPANNESANKKKSVRISKAGQYLKPLLVQCALSSIKDKNSYFGIKYCRIKKRRGHKKAIIAIARMMLVCIYHMILTGEEFNPCDYESLTNPKPKKEPIMTVESALQFLKDSNFDFSSIQL

SEQ ID NO: 224981 - protein, 424 aa, unidentified
MIKDKCGRPPITAKGKETVFIMISIGIDVSKLKSTFCILNEYGEVLQTAREISHTETDLNELIRQVKSFGGKDDVRVIMEATGAYSKPVLYSLIEEGIFVAEINPLAMKKYRSNINFRGVKNDPIDALAIASYGIDKWHRLKEYQKADKEYAAMKALSRQYLSYMKPHVSLTQNLDHLIDQVMPGIKDEFDGYDPATGKDRLTDFLEEFVHYDCIRSLGPKRFDERFKRWAKKKGYRPRQGKSGKIYSLAKEGIPTLAYDPISRLLVKQAAQALRSMNHVLNEILSQLRSLAKQRPEYPIIRAMSGVGDVLAPLLIAEVGDPRRYHSGSALIACVGIDVPPYESGQFKASERGITRKGSKQLRKLGYLMVKNLRKIKPVKDTSVYDYYLKKKSESKKDKQAIVAAMNKFFRIYYARAMEAYKTE

SEQ ID NO: 224982 - protein, 362 aa, unidentified
MEQISRIGMDTSKHVFQVHGVDGSEQPVLTRKLKRDAMVAFFGTLAPTVVAIEACGAAHHWARTLGAMGHTVKLIAPQLAKPYVKRGKNDAADAAALCEAMSRPTMRFVPTKTADQQAALMLASARERLVRARTQLANTIRGHAAEFGLAANTGLAHVAPLLARIAADTSGPACMPALARALFADLACEFAQIDARVAAADARLRAWHRASEASQRLAKVPGIGPVTASLLVMKVADPKAFKTGRDFAAWLGLTPRDHSTAGKVRAGGITRAGDEGLRSLLVVGATSVIRQVRITADRPKAVPPAPSQPAPGASWLERLLARKAPKLAAVAQANKTARIAWRLLASGADYNPTHGQPKPLAA

SEQ ID NO: 224983 - protein, 371 aa, unidentified
MEGNSTTKFIGMDVHSKTITVAIADEGRKGEIRHYGTIENTTAAIDKVIKSLTSTGAELRFIYEAGPCGFALYRYLTGNGFKCVVTSPAMIPKRKTVRIKNDRRDALTLARLYRAGELTGIYVPDPEDEAIRDLARARNDARIAERKAKQRVISFLLRHSFVYPGKKAWTKTYFVWLSKVSLEHPAQKIALQEYIDAVQECTGRVKRLSEQIGLAVEEWRMAPTVKALQSLRGVSLITAAIAVAELGDLSRFRHPKELMAYFGLVPSEHSSGESIKRGSITKTGNSHARRVLVESAWTYKHHARVTLPLIKRQQDLPKSICQISWKAQLRLCARYRMMIAHKKPAQVVAVAIARELAAFMWAIAKELEVEA

SEQ ID NO: 224984 - protein, 418 aa, unidentified
MKPWNELTHFAALDWADDHHDLVVVDAKGQIVLELTFSHTAEGWQQAQQAMAPWADLPVAIETSAGPAVDQLLQRNFVVYPVMPKAAARYRERKRPSGSKDDRHDAWSLADALRTDGQAWRALSPLDPLTVQLRALCRDEIALIEQRTALVNQLLAALKEYYPAVLQAFEDWTAPYTWAFVLAFPTPEALAQAGKRKWEKFLHTHKLWRPQTASERLKIFDQAQSFKGTPGITAAKSLLVQSLARLLQTLEQQLGLYRARIQELFDQHPDHDLFGSLPGAGPKLAPRLLAELAGSDWQQINQVQARAGTAPVTYESGKIKRVKIRRACTLPLRATLHLWADLSRRYSTWAAAYYQAHRDKGQTHACALRCLAHRWLEIVGAMCRTHTAYNAEHHLRQIQNHGSWVLALVTKTATKPGE

SEQ ID NO: 224985 - protein, 375 aa, unidentified
MKNKVRFLGLDVHAETIAVAVAEPDGSVSSLGTIANRAESIRKLVKKLGPAEQVKACYEAGPTGYVLYWQLAELGVQCDVIAPTLMPRKPGDRVKTDRRDAERLARSFRSGDLTAVWVPDAGSEALRDLVRAREAAKQDQLRARHRLSKFLLRSGQRPATGLKAWTQLYMAWVRQLRFQQVAQESTRLDYLHEVEHMAERVLRLEQAIAAAVKLASPELQEVVKDLQALRGIAQISAVTIAAELGNITRFASARQLMGYSGAVPREDSSGKRMQRGSITKTGNAHLRRIAVEAAWSYRLPPGVGPGLRKRQEGVPGEITEMAWKAQHRLHKRYSRLAAAGKDQRKIITAVGRELLGFIWAIGVKAETAAKLRKAA

SEQ ID NO: 224986 - protein, 317 aa, unidentified
MTKTTAQFVGIDVSKQRLDVGFYPAGRHWEEQYDEAGILRLTKQLSEQPVELIVVEATGGLQIPLVASLAAASLPVVVVNPRQVRDFAKALGQLAKTDRIDALVLARFAEAVRPELRPVRDELSQHLAALMARRRQLIEMLVAEKNRLHSALKSLRQPIKTHIAWLQRQLKQIDSDLDSAIRASAHWRTQEDIIRSVPGAGQGLARTLIIDLPELGQLNRRQISALVGLAPYNKDSGNVRGRRAIWGGRAHVRAALYMAALSASRCNPVIRPFYQRLRQQGKPFKVAITACMRKLLVTINTMVKNQTPWQVVATDQA

SEQ ID NO: 224987 - protein, 360 aa, unidentified
MASDDPGSVSIELKEPAVTTFVGMDLHRAQITYNALNTDSGEVRTGRICPANRGTVRAFLTAFTGGETVVAVEAMTGWRFIAEECVRAGVDVCLAEPAETRQRQERKRRAKTDKLDARLLRELLVEGRLPESWIPPEHILDLRAKVRLRKTLVSQRTQWLQRVHAVLFHHGVPVQPGRLARLEARSVHEQLADLQLPAVAEQQIAVALRMVEHLNDEVHALDLELERFARRQPGCRALMGHYGIGPLVATAIVAELGDARRFSSSKQAVRCAGLDVTVYESDVRRRGGHLSRQGSPLLRWAVFEAAQCAARPSSPDHAYYVQVKERLGANRAALTIARKLLRRAHHTLRELGEDAMAPAT

SEQ ID NO: 224988 - protein, 377 aa, unidentified
MKKELYLGLDVHKDCIITAVAEEGRKGEVRDTGVISNDLHALEKWVGRLRKAHGRDVILRACYEAGPCGFGIARRLKQLGVECEVVAPSLTPKRAGERVKTDRRDARKLARLLRAGELTPVYIPEATDEAIRDLCRARTDAVDDRRRSRHRLKGFLLRHGYRYQGKSSWSAAHERYLRELVLPHPAMKVILEEYLQGIAAAGERIARCEVGMRALLEQWRLAPAVRALMALKGFQTVAAMIVVSELGEVDRFAHPRQVMAYLGLVPTENTSNDKRRQGRITKCGNAHARWLLVECAQHYATPPKVSQHLSRRQQGQPAQVRAISWRAQNRLHSRYTRLLGRRLQRNKAMVAIARELCGFIWELLHTQSCYHVRATSV

SEQ ID NO: 224989 - protein, 383 aa, unidentified
MLIIGCDYHPSFQQIAFVDTDTGKLQERRLEHREEAEKFYRGLGVQGMKVRVGMEASGHARWFERLLGELNFEVWIGDATEIARKRERKQKTDRQDAQHILRLLLKDDFPRIWVASWENRDLRQLLWHRHRMVQARTRIMNQLHAVALNEGLRCKKRLWREHGREQLESFRLAPWASRRRQDLLELLDRLNPTITELSQAIEQEAEKFPEARWLMTHPGVGPLTALAFVLIIGRADRFQCGKQIASYLGLVPLEDSSGNQRRLGHITKQGNSLLRFLLVEAAQVTARSIPEWRSKYCHLTMRRGRKIAKVAMARRLAVRMYWMMRKGWDYERLTKFGSQSKSGDKADEQWPRWFDCVPGATPVGHRRSGKWFLSTWLRRWHTD

SEQ ID NO: 224990 - protein, 366 aa, unidentified
MKEVTTYVGIDAHKKDLFVAMLIGTATTPVTWQLANETAAVRRMVRKLERDAPGPVHVFYEAGPCGYALQRQVATDRIVCDVIAPALMPRKPGEWVKTNRRDARKLAELGRAGLLTVVQPPTPAEEAVRDLARARDDAREDLQRCRHRLGKLLLRRGLHYAGRNWTQAHRRWVDGLTWTHVAERAVVEDYQLAIDHTEARLLELDARLAELATQAPYREPVGWLRCFRGIDTLTAMLILAELHDFRRFGSARALMAFLGLVPGEDSSGEKHRRGRITKMGNALVRRILVEASWHYQHRPGIGRALAGRRQGQPPRVIAIADKAQQRLCRRFRRMLAEHKPAPKVAVAVARELAGFLWAALQPPAVA

SEQ ID NO: 224991 - protein, 370 aa, unidentified
MTFFIGVDLHKTQFTVHVRTEDKIETLDEIKQYPTTESGYELFLERLKTFKEIGANVKIGVESTGNTRFFKNQVEKVGAEVTVINTLKFKVINESTKKTDKHDASTISEFLSKDMLPESYLCGKETENIRRLLKSRERLVRSIVGQKNEVHALLVSLGISDELRSLQSKKGRQKILDTLESNNDYVLEAQSVKLMIQIIDQMSESVKVIEKQLTEITKNDEMVNRLLTIRGCGKITAWTIRAYTEDITRFASAKKYAAFCGLVPWVQDSNETIHHGKITKRGPQELRTSFVQLVLGIRRCKDTSSWRMMQRYEYMKKNKGSGKSIIATARKMAEIVWAMLSDKQDFDSSKMMGKYKPMNLVDQALAVINQ

SEQ ID NO: 224992 - protein, 333 aa, unidentified
MNKITLIGIDTAKQVFHGVGVDTHGHYVWRKQLSRRRLLSSLAQLPPCEVVLEACGASHHWARSIKALGHGVRLIAPQHVKPYRRGQKNDYRDAEAIISAALSPGMHFVGVKRVEQQAEQALHRVRSRLMSHRNAAANALRGLLGEYGVVYGHGFKPLREGARCFAETEEAHTLGLVELVNDVLEEIGVLQERMDHYEHLIEQRVQSDEISRRLREELNGVGKLSASALRVKVADVRDFGGGRHFAAYLGLAPGHSGTGGKVRIGHIKRGHDRYLRQLLIHGARSALCHLGDKQDTQSRWMRSLLERRGFNIASVALAHKNARQAWAIMAREQ

SEQ ID NO: 224993 - protein, 355 aa, unidentified
MKGKKTSTLERFFEESAGHKVWIGVDVHKRSYSVAVCRDDSAIISWKTAADNAALIRQLSGHGIEIKALVYESGPTGFGLARACRDAGIPTIVAAPSRVIRPVSPTAKTDSLDCRKLAHLAAKDMIRSIAVPSEEEEALRALQRRRHQLADSQRKVRQRIKGFLLFHGIEEPDGLEGWAIRAIQALTQMPLNEMLREVLDDYLEELRHVRHRILALERKLAEYTVTLHQRRLACLQSVPGVGRIVACSFLSELFRPERFQRGEEVAAYLGLAPFVRHSGEKSPAGRLRPTGHTRLRSLLVEAAWIWKGKDPGVQAYYGRMLCNTGLAQKAITAVARKLAIILWRLACETRVYRPA

SEQ ID NO: 224994 - protein, 343 aa, unidentified
MQMITTIGLDIAKSVFQVHGVDAAGQVVVRRQLKRRYVLAFFQRLPPCLIGIEACASSHYWSRELRALGHTVRLMPPAYVKPYVKRQKNDATDAEAICEAVTRANMRFVPTKTPEQQSCLMLHRTRHLFIRQQTAVINAIRAHLAEFGIVAPVGRKGVTELLHVVADPSDGRVPEVARACLAALGTQLLGLKEQIVEFDRLIMAWYRSNETSKRLHYIPGVGPLLATALAASVADPQTFRSGRNFSAWIGLVPKQHSSGGKDRLGSISKQGDRYLRSLFVAGALSVIRYAKIHGTKHRPWLTALLARRPTKVAAIALANKLARMAWAMMARGERYRQPVALAA

SEQ ID NO: 224995 - protein, 370 aa, unidentified
MRQSRTLDIGMDVHKESIAVAYVSKDHDAEVVYLGTIGTRQCDIDQLVRKLQSKAKHLVFVYEAGPCGSWLYRYLTKKGYACWVVAPSLIPKKAGDRVKTDRRDAVQLARLMRSGDLTPVYVPTVEDEAIRDLSRAREDIIGDLQAAKFRLKAFLLRQDIRYTGRATWGPAHLRWLSEVVCPTPAQQIVFQEYVRAVTEHTERLQRLEQELHDHVQTWRLQPVVEALQALRGVQFTVAVTLVAELGDLTRFQNPRQLMKYLGLIPSEYSSGERRRQGPITKAGNTHARRALVEGAWAYRYPAKVSRHIQLRLEQLPKPIQDISWKAQVRLCTRVRRLLARGKHANQVVVAIARELAGFLWAIAKQVPVTP

SEQ ID NO: 224996 - protein, 480 aa, unidentified
MAAKKDARTDKGTGAAAVHGVDGAEVAEDRVQVIERAAAIDVAKGSGMVCTRVPGSRPDRRRQTVWRVEATYAQVIALMDHLRCEGIQRLVLESTSDYWRIFYYLAEAAGLEVWLVSARDARHLPGRGKSDRLDCVWQCKLNERGMLRRSFVPPQAVRDLRALTRTRARLAQDQARHQARVEKILEDALLKISVVISDLFGTSGRRFLDALVAGERSPQALAALGDYRLKATRQELAEALTGQFRDVHALEIKTHLAILDVINEQIGRLDEAIEAQLALVPRTAPACTSCGEIGGGHAPGCCGEGEVLLSLAGRLDEITGVGIINARVLIAELGTDPSQFPTPGHAAGWARLTPRTRQSGETAKPGRTGKGNRYLRGALGQSAMTAARTDTRLGAMYRRIARKRGKQKAIVAVSRVICEIAWILICDPGARYHELGPDYYSPRSPARQTRDKIREIERLNPGKRVILAPIDPGPEAGAAA

SEQ ID NO: 224997 - protein, 370 aa, unidentified
MKETITSFVGLDVHKESIAIAVAEAGRQAPRFIGTVIPSLRSLQSALRKINSASRTLVVYEAGPCGYGLARRLNAQGYSCEVVSPAHIARSPIEQRVKTDRRDALLLARESRAGNLIAVVVPDERDEAIRDLSRTREDVLAARLRAHQQMKALLLRHGRTCPGRIAFSAAHERTLSSIRLSHPAQEIAFVEYRNAIKDAHERLERVTEALRLQSNQWRMNPLVRALMCLRGFDFIAAITFVAEIGDPRRFARPTALMAYLGLVPSEFSSGQSRHQGSITKAGNKHARRILIESAWAYCHSPRVSRDLEVRQQGQPKAVRDISWRAQLRLTKRFRHLRMARHLPQNKVCVAIARELCGFIWDIARQVRPLP

SEQ ID NO: 224998 - protein, 346 aa, unidentified
MSHKTAATVALTIGIDTGKNTLHLIGLDDKGAIVLREKVARGRITARLANVPRCLIGIEAGMATHYVARELSALGHDVKQVPPAYAKPFRQGHKNDFRDAHAIAEAVQRPSTRCVPVKTDDQLDLQALHRVRSRLVGQRTAVINQIRGFLLEHGIAVRQGLRFLRQQLPDILAKRSDVLSPRMIRIMEDLSGDWRRLDERIEHVTEEIEVLAHGSEGCRQLMTVPGIGPIIASAMVAAIGNGAAFAKGRDFAAWLGLVPKQMSTGDRTILGRISKRGNRYLRTMIMQGARVILLRPANWAKHSFGPWLTAAANRLHHNVLATALANKLARIAWTVLMQARSYEARV

SEQ ID NO: 224999 - protein, 372 aa, unidentified
MTQSNILFIGMDVHKESIVVSLADDDRSEVRRYGSIGGRLEDFKKMLRKLVSTGKELFFCYEAGPCGYELYRYITSQGHQCIVVAPSLIPKKAGDKVKTDKRDADNLTRLLRSGDLTSVYVPNAEDEAIRDLSRAREDAVLGLKSAKQRLKSFLLRHGIRFNGSANWSEKHLRWLAEDVNMSYPAQKVVFQEYVNTVTEANARVKRLEQEILTHTKQWRLYPIVQSLMALRGVRMVVAVTMMAELGDLTRFDNPKQLMSFLWLTPSEHSTGDKKKKGAITKTGNQHARRVLVEAGWSYRFPAKVSKEMQKRQEQLPLPIRDIAWKAQLRLTKRFRTMANNGKLKNVIVVAMARELAAFMWAIAKEVPILPRD

SEQ ID NO: 225000 - protein, 350 aa, unidentified
MKISAIGIDIAKNVFQLHGVDEGGAPVLRRQLRRAQLVEFFAKLAPCLVGMEACGGSHFWARKLRALGHEVRLIAPQLVKPYVRGQKNDANDARAICEALQRPDMRFVAVKSVQQQALCHLHTSRSRLMKQRIAQTNSIRAVLAEHGLVLPQGMKALRQGVPELLDDASNELLGSTRVLLQDEMALLAQLQQRIDTLDGQIKAQAQANPVCQRLQQLPGVGPQTASALVAQIDRAQQFENSRQLPAAVGVVPRQHSSGGKSVLLGITKRGNEYLRWLFIHGARSVIKAQQRKPVEQQDPWIHKMLQTKHANVVAVALAARTMRRAWALLRYDSHYHPGYRGAGRDLVAAA

SEQ ID NO: 225001 - protein, 338 aa, unidentified
MGLHCAIDLHGNNGYYGIVDETGKRIFKQRIPNSLSAALTALEPYKKQLKEVAVESTYNWYWLVDGLQADGYKTRLANPAAMQQYSGLKNTDDETDAFFIAELSRLDILPVGYIYPKEDRPVRDLLRRRLLLVRHRTAHILSFQNLIARERGEQISSNNIQKLWPKEVEQFFDDNRLVLMGQTNIETIRFLTKQIRKIEKVVLNAVKLRPQYEKLLTVPGIGKILGLTIMLETGDINRFKKVGNYSSFCRCVKSLRTSNDKKKGENNRKNGNRYLCWAYIEAANFIRRYCPEAKKWHQRKTARSKQVVATKALASKICKACYFIMRDQKDFDVKLIFG

SEQ ID NO: 225002 - protein, 318 aa, unidentified
MTSYIGIDVGKKSLHIYLPIADKSIEITNNQQGLAKLLSCCVEYYQHLSDIIIAFEPTGGYERELKEFLKLNKVNFVTVHPNKVRSYVKAKGWLAKTDLIDSKLLSEYATVFSLLVKQDYNCKSQEDLHCFIQRREQLIAFKNQEIARLENHYNKVVIKSIKSHINQLDKQLIQVQKSIEELCNNDLAIKDKVSKLTSIPGVGIVAATTAICEIPQLGNIEFSQLTALVGIAPYARESGGYKGKRSIFAGRVNLRKVLYMAAVASLRCNKKLKEFYDRLLANHKPAKVALVAVMRKLLGFMHAVVKNNSFWNNNYVTP

SEQ ID NO: 225003 - protein, 351 aa, unidentified
MNILAMDIAKSKTVVCYYDSESGRHKYGKVKTSPQQIHDLVAEYSPDRVVFEICSSAGWLHDIVTALGTEVQVANTNTQAWRWKNVKNKNDKKDALKLAQLSAMNQLPTVHMPKPNVRQKRALIQYRQTLVARVVQIKNNIRSILDKQGYSMAAGKSGWTNKSIEQLNQMALPIERCGVHDLWRGQLYVELTMLSSTQDALAHVTSKLDKLAESDSQVNLLQTVDGVGTRLAEAIVAFLDEPERFKSSKHIGSYAGLTPRQYQSGSTNRQGRISGQGNKLLRALLVEVSWIGLRYNRWIRETYQRLLRGSASRKKIAITAVARKLLVRCWSMLRDGQPWRDMGVKTERQAA

SEQ ID NO: 225004 - protein, 344 aa, unidentified
MTEITRIAIDTSKSVFTIHAVDARDRPVLRRNLRRQDIAGFFSKLPPVEVAIEACGASHHWGRTLQAMGHKVRLIPAQYVKPFVKRGKNDRNDAEAISEAAARPGMGSVPIKSAAQQAGAMLLSVRELLVRQRTQLINALRGHASELGLVRPIGNKGLAQLRADLATDATLPAPAVEALTMLGGEIDRIEARLAVADAKLLATHKATPSSQMLAEMPGVGPMVAINMVQRVDYTQFKSGRHFAAWLGLTPRDHSTGGKQRLGGITRAGNEGLRQLLVLGATAVIRHAKPGRVSAWLLALLERKPRKLVAVALANKMARIIWAMMTRGEACRPKPDPRVMPPVQD

SEQ ID NO: 225005 - protein, 453 aa, unidentified
MARKAEKERTKDGLKLKIVNPNAAGIDIAYGEMQVCVPEDRDGENNRCFGSFTCDYEGIASWLKACGITTVAMESTGSYWVGLYFFLEEKGFDVLLANAKDVKNVSGKKTDEADAEWIMLMHSYGLLKPSFHPDAAARNIRELARHRDNMLRSAGKEIQHMQKSLVLMNIKVDTVISDILGKSGKAIIEAILEGNHDPKSLAQLADRRCKASRETIEKSLEGTWDAVHLFELKQSYDLYKYIHTQIADCEAEMDRMLSDYTDGCGTDMTGYKATEKRVAKKNAISFDAEKHAFSMWGVNIMEMPGMSLGGLSVLMGELGSGFVEKFPSAKSFCRWCNLVPNNKISGGKLLSSKVPKQKNRVGQVFRLCANSVKGVKTGLGVYFRRQKSKGGHLQAIVATANKMARIFYTMVVSKKPFDETKVGLDEKTLLQRKISIAQRSLEKLNLRLSVAQG

SEQ ID NO: 225006 - protein, 343 aa, unidentified
MNEVTTIGLDLAKNVFQVHGVDASGRAVVRRQLRRGQVLPFFEKQAACLVGIEACATSHHWAREIAKFGHEVRLMPARYVKPYVKRNKNDAADAEAICEAVTRPTMRFVEVKTEEQQSVLMLHRTRQLFVRQRTTLINAIRAHMAEFGIVAGIGRNGVERLLRLIDGGMDKRLPPAAEECLRALQTQLVLVKRQILEADRRILAWHRSNELSRRLEAIPGVGPLIATALVASIPDPHAFGSARDVSAWIGLVPKQNSTGGKERLGGISKAGNRYLRSLLVVGALSVIRRAKQVGYTRRPWLAELLARRPVKVAAIALANKIARIAWALMVRGTRYREPVLQAA

SEQ ID NO: 225007 - protein, 438 aa, unidentified
MRKRLEIAFPNAAGVDVGASSHFVAVPADRAEEAVRQFEVYTADLQALGDWLHECGVDTVAMESTGVYWIALYEVLERRGFKVHLVNTRHVKNVPGRKSDVLDCQWLQQLMSFGLLSGAYRPADEVCVLRAVTRHRDALLRAQAREIQRMQKALVQMNLQLTEVLSDVMGATGQAIIRAIVAGERDPLRLARLRDHRVRADEAQIAKALHGNWREEHLFALEQSLALFDAYQVQLSGCDAKLQSLLGRMARHSSTPSDKPRAKSLAKNAPRFDLRTALYQWCGVDLTRIDGLEVTTVLKVLAEIGTDLSRFASVKHFCSWMTLCPGTKISGGKRLSGRTTPSINRAKLALKMAASNLIRSRSAMGAYYRRLCARMDKPRAITATAHKLARLIYLMLTRGQEYVDRGEAYYEERHKQRVIASLRRKAASLGMQLTPAAA

SEQ ID NO: 225008 - protein, 481 aa, unidentified
MKKRTIFQQQSQELMQIYEEAGNSKKVLVVAMDYAKKEHTVMFCNGNGDILRKPFGVWNNPEGIDYLLEQVKRNCNYHKIRTKHVFFGGEDCGSYTENFIQSLRERGYLVAGVNAHDAKKQRENIQASTDRLDLLGIARMLIGRRGNCAASQSGVYRNLRTLVRHRRKIVTLSTEERNRMHCLVDRLFPGFLQERHSGLMPFHEPSLRMMERRFSADQIKRRKQATLVDILARAGAQKPEQKAKQLQAYAGTVLQPPREYIATLQTSLTQHVALYRCLLGNITSLEREIAIWLAQTQGAFLMSVKGIGLVLAAGVTAEIGNPVTQKPVGNLTSYSGIIPRVTQSGGSDSSGHTGSVAKRCNRILKDYLVQSASHLGLHGVDELMADHKRREANGQHANFGIARRYLRMILHMMRFSHIYLPPELRIDAAFEARGRYYQMIWPYLLDKWKKYHAQEIAFAPENPLGRWRDIVQSIYKITLKI

SEQ ID NO: 225009 - protein, 374 aa, unidentified
MVVAPALIYFSLERVLLMDVVYNRCCGLDVHKKSITACAITPKGKEIETFGTMTHELFQLVDWIKSKRCTHVAMESTGVYWKPIYNLLELEEMQPMVVNAAHIKAVPGRKTDVKDAEWIAKLLRHGLLQHSYIPNREQRELRELVRYRRSLIEERAREISRIQKVLEGAYIKLSSVATDIMGVSGRAMIEAIINGINDPQTLSSLAKRGLKKKKDDLERALVGSVGPHQKMMLKTQLSHIDFMDQQIELLSEEVQQRMQPYEEDIELLDSIPGIGRSHAEQLLAEIGIGIDISNQFPSAPHLCSWAGMVPGNNESAGKKNPEKREKVIKNCEPHLLKQHIRQLGQKTPTYLPNTNVWRQELVKNAQQLRLDIPY

SEQ ID NO: 225010 - protein, 428 aa, unidentified
MSAKDYNSQVVKRQRIRSTTLVVGVDVGKAFNAVGFMNKQGKILSSCAKLYNNREGFEQFVKMTEAIKTKYRLKDVLIGMEPTGHYWRKLAYFAKDQGYEVRFIRTTALKHHREIDESSSAKSDERDALTIANITREGKYIDTVIEDGVVRQLRTLSKVRERLLRYSVGAKNALHAALDDYFPELHEIFWSMGTRSLWAILERCPFPDDVVLLKISLLRDLIAKISRKKAGADQKARALYQAAQKSIGLKRVGDADRFRVKICLEEVKRTVLMLKDIDRQMKKVLKEMPSAPYLLSIPGVGPLSAAVFLGELGNPAYFHNARQIVKYAGYDPQERDSGSWVSRKFISKKGRWLMRKYLFFMSMRVVVLSKYFQNYYQRKLETKNRVGQQPKRKEILCAVAIKLIKVIFALLRDKRKFDDGVRVIAAHA

SEQ ID NO: 225011 - protein, 374 aa, unidentified
MMKTTRFVGLDVHGQTIAAAMGEGYGKARSLGQFPNRPEAVRKFIEQIGGSAGLKVCYEAGPTGYALYWQLTKMGVDCEVVAPSLIPRKPGDKIKTDRRDAEKLAECLQSGTLTRVWVPDTVHEALRDLVRARAAAKSDESRAKHRLVKYLLRNGLRHPDDCRSWTHPWWRWVQGIKFDHETQQVTLADLVAEVLHQRERLARLDLAIDRAIESAPPEKKAVIDAVQALRGVAKLTAVTIVTEDGKIERFRKPTELMGYTGLVPSEYSSGGREAKGRITRTGNAHLRHVLGEAAWHARHRPWLNVRLRKTLPTLPAGVSEIAWKAQERLHRKFTKLTFHRKPPAKVATAVAREFVGFIWAIGRLAERSAASASA

SEQ ID NO: 225012 - protein, 353 aa, unidentified
MITLGVDAHKRVHVALALDEAGRELGQWRGPNSTAGWQALGQWVLAFGGDRQWGIEGAWGYGRNLAQHLVASGEAVYEVNARWTAAGRRGARKPGKTDRLDARAVALLVRQEASTLPRVHPEDDTAILDLLTSEREATLAEATRLRNQIHALLTQTDPDNRRHLPTLKSRAALDVLEAYDPSVDNPLQVQRAAAVRRLAARLRLALLQIEELAGQIKDLAARRFSPLTRVCGINLITAGTLAGVLGPGRRFATDAQLAAYAGVAPLEASSAGLVRHRLNRGGNRRLNAILYRIALTQAHHSSEARAYLDRRVAEGKTRREAIRALKRFIIRAIWRLWQECRSVSNTSLEVRAA

SEQ ID NO: 225013 - protein, 334 aa, unidentified
MSDSTTWVGMDVHKENIVTVSISGDSGTVMTRWETRNTAKGKERLAGRIAGLGKARCVYEAGPCGYDLRRFPDGKGIPCDVIAPPLIPTRPGDRIKTDRRDAEKLARMHRMGELTAISVPTPAQEALRDLVRAREDANEDLVRSRHRLQKFLLRQGRRFEGKSWTREHWRWVRALTFDDANAGTVLAEYVLAVDQQLERVARLDARIEEEAQNPGIAPAVARLKTLRGVRTLTAMTIHSELIDLSRFASPRDLMSFIGLVPSEYSSGGNQRRGSLTRAGNAHLRRVLVEAAWRFRHPPHRTDETIRKRREGQPPDVIETARKAEVGCTANSPAW

SEQ ID NO: 225014 - protein, 312 aa, unidentified
MKGYNNFIGIDIGKFNFVAAVHGSKVVASYENSSSGIGQFLNEFKPHLKNALCVLEPTGGYEIGVVLALSNHQIDIHRAHTRKVKNFIRSFGNEAKTDKLDALLLAKYGFERNPSLELFSPPSEQASNLYELVQRRNDLKTMLVAEKNRLKSPRTERIRDSIQDVIHLLTTQIDGITNEINQLIKEDTVLSKRKKILKTIPGIGDIISNELLVLLPELGQLTRRQIASLVGVAPISKDSGRLKGYRRTGHGRKGIKPLLFLAAMAARNSNSHLKGFYESLILRGKCKMVALTALMRKIIIIANARLKNVLET

SEQ ID NO: 225015 - protein, 372 aa, unidentified
MNYNTVYVGMDVHKESFSLCAYTIEAEKAFHYQRTEADYKKVLNYLEFLRTIYGGDANFICGYEAGCLGYTLYHQLTANNVKCIILAPTTMLEQRSKKRIKTDKRDAEIIAKCLAQHNYSPVHIPTAKDEETKEFLRMRDDHKLALKKVKQQILAFCLRHNYRYDGNSHWTAAHLKWLKALIPEALYKEILDEYLLTYQTLSDKLERLDKRIEELATQDEYKEAVKKLCCFIGVKTHTALSVLVEVGDFKRFASAQHFASYLGLVPGENSSGDDQNRLGITKAGNRHVRLLLTEASQCYARGQVGFKSKELKARQSGNTPAVIAYADKANERLRRRYYKMVLNKCKKHNVVKTAIARELACFIWGMMTYNIA

SEQ ID NO: 225016 - protein, 310 aa, unidentified
MSKRKYAGIDVDKNNLEVAFDPEQPKKTFSNDKEGFKALIKQLREWAVDQVVMEATGGYENPFAVALTRSNIAVSVVNPRHVRSFAKALGYLAKTDTIDAGVILEFAEAIKPGPRPIKDKQSQQLTDLVTRQEQLVRMLTSEKNRKHTANKPVRKDIEVHIKWLQRRIKDLDIKLRKCIEDSPIWRVKDDLLQSVPGVGPKTSAKLIAALPELGRLNRREIAALVGVAPFNRDSGSFRGRRTIWGGRAPVRCALYMAVLSATKHNPVIRAFYQRLVEAGKANKLALTACMRKLIIILNTMMKNQTKWQVN

SEQ ID NO: 225017 - protein, 360 aa, unidentified
MDTSHDTSLSFKNQNFFIGIDTHTSQWTLNIISMNMVLKKRLSIDPYPSVLLNYMQRHYPDGNYYAVYEAGFGGFWAARKLNNLGVKCIVVHPSDVPSSHKERLNKNDHVDSRKLARSLSNGELIPIYVPEKIAEEYRHLNRHRLKTIKDQTRLKNRIKSVLHQFGITIPIAYQERRWSGAFINWLLTIKFDTEYAQFAYDDLVDQYIHTRDRITKQLKKMRIMAKEQAPFNTLIPLLLTVPGIGFITAMTLATEIIDMNRFKTLEHVASYVGLIPSIQSTDDTEIKSGITPRRNKYLRTMLVEAAWTAVRKDPALTMKFNQLSRRMNRNKAIVRIAKILLNRIRYVWKNQKPYVLSVVN

SEQ ID NO: 225018 - protein, 402 aa, unidentified
MNAVGIDVSKGKSMVAIMRPFGEIVSTPFEIKHTASDIHSLVELINSVEGESRIVMEHTGRYYEVLAHQLSEANLFVSAINPKLIKDFDNDSLRKVKSDKADAVKIARYALDKWQNLKQYNVMDELRNQLKTMNRQFGFYMKHKTAMKNNLIGILDQTYPGVNTYFDSPARSDGSQKWVDFASTYWHVDCVRKMSLNAFIDHYQNWCKRKKYNFSQSKAEEIYGKAKELVPVLSKDAITKLIIKQAVDQLNSASTTVESLRTLMNETASKLPEYPVVMAMKGVGTSLGPQLMAEIGNVSRFTHKSAITAFAGVDPGVNESGTYEQKSVPTSKRGSADLRKTLFQVMDVLIKTHPQDDPVYQFLDKKRAQGKPYYVYMTAGANKFLRIYYGRVKEYLSSLPES

SEQ ID NO: 225019 - protein, 384 aa, unidentified
MPQTDDLSRSLIPFDQGSTLVVVLELSQSGWLVAGVVPGLARRPLKKLAPEPGLLLQTVERWRTEAHRAGCEITRMVLAFEAGRDGFWLARWLRARGIETYVIHSTSVAVSREHRRAKTDRLDTEMLIRVFLGWLRGEPHHCRMVAIPTLEEEDARRPSRERETLVGERTRIINRMKSALARLGVRDFKPELRKAPQRLEALRTPEGVPIPPNLLAEMRREMARLATIREQIRAIEQARLDRLAQAPASGPEAMVRLLMRIVGVGVETADMLVQEVLSRQLRDRRAVARYAGLTGSPHESGAKRREKGLAKAGNSRLRRGILQLAWRFSRFQKDSALAQWYRLRVEGGKRKLTMIVALARKLLIALWRMVTTGEIPAGVVLRPE

SEQ ID NO: 225020 - protein, 406 aa, unidentified
MNAVGIDVSKEKSTVVILRPFGEVVAAPYDVSHTDSELDRLAKVIKKLPGETRVVMEATGVYYEPVARRLHEHGIFVSVVNPVLISDYGDNTLRKAKTDRKDAIKIASYALSAWLDLVEYKPEEDRRRTLKSLNRQVKKVIKVNTMLKNNLISLTDTAFPGINKLFTSQERPSDGHLKWVDFVAKFSHRDTVAKLSLNAFKKKYKSWCEKNKYHYQDSKAEEIHAHARKCVAGVSAEETFCLMVTKAAEFVNAACENENALKNEMDRLSSTLPEYEVVMDMYGVGKSTGPQLMAEIGDTRRFRNRRAITAFFGYDTEPDDSGQHISKSRPITKKGSPSLRRTLFIIMKTLVTKKPVDNPVYAFLDKKRSEGKHYYSYMTAASAKFLRIYYAKVNEVLNKKETSMCT

SEQ ID NO: 225021 - protein, 371 aa, unidentified
MNHVTSIGLDVHARSVTAVALDSITGEVRSQKFGYSPAEIAGWILQLDSPKAVYESGVTGFHLVRELREMGVDCIVGAVSKMHKPASDRRKKNDRNDAEFLARQLMAHNIVEVFVPDVETEGARNLSRALEDVRDDLTRAKHRLTHLLIRWGYVWNEFNEDGKRRGSWTRAHWEWIRGIELPDAAARESLDYYISEVRHIESQKKAIEKRVAQCASRPRWRDRVEALRCMKGIETVTAFALTVEAGVFSRFDSARAFASWLGLVPSEHSSGERTSRGGITKAGNSHLRKLLVEASWHYTRATKERKRSLYDESVPASISNHAAVGVKRLVERRRHLSCELRKRPVVANVATARELACWIWALGRMSEGALA

SEQ ID NO: 225022 - protein, 413 aa, unidentified
MDVLVDVCAALDVHKDQVTACVRRWARSGRKRHSEVRTFSTMLADLRELRAWLEAEGVTVVGMEATGVYWMPVWYELEDAERFELKLLNPAHVKAVSGRKTDVRDAVWLARLVECEMVDSSFVPPREIRELRDVTRYRRRVLEERGRELQRLQKLLEDAQVKLDSVVSDINGVSARLILEALCDGERDPDVLADLAKRKLRAKIPQLREAVPGRFNTHHALLVRELLAHIDYLTDLESRLDARVDELIAPFSWARDLLVTIPGIKGRNAESIIAEIGVDMSRFPSPAHLASWAGMCPGNNESAGKHRSGKARHGDPWLQSALVEAGWSASRTHNTSMRARFYRIAKRRGYERAVYAVGHHLLVVIWWMLTERVPYREMGDDYQQRPDNPDRRRRHLIRQLEQLGLEVVVQPAA

SEQ ID NO: 225023 - protein, 362 aa, unidentified
MTTIAPEIVLGQVQVAGGVDTHADTHTAAVVDTAGRKLGDRQFDATAAGYRQLLAWLRSFGTLLVVGIEGTGAYGAGLARHLRLEGVALLEIDRPDRKLRRLAGKSDPLDAEAAARAALARARTGTPKDRSGQVEALRNLRVARSSAVAQRADCQRQIKSLIVTAVEPLRAQLRGLKSARLIDTCAGLRPDPARIGEPEQAAKTALRTLARRHTALTEEIDELDKLIGPLVTAINPDLMTQTGVGADVAGQLLVTAGQNADRLHSEPAFAMLCGVAPIPASSGKTHRHRLNRGGDRQANAALYRVVLCRTRWDPRTRAYVERRTKEGLSKKDIIRCLKRMIARELYYVLRPTQPAENLASAA

SEQ ID NO: 225024 - protein, 312 aa, unidentified
MASIICGVDTGSRTLDARIGQDGPWRQFARTEAGIAELIAFCNDHHVDLVVMEATGGYERLAFGLLWAGGMAAAIVNPRSVRRFAEAMGRLEKTDRIDCGMIAWYAETKRIEATAPASDTQQRLTALVVRLRQLTELQTMQKNQRRLVTEAEVQATFTAVLQTVALQIRALQARIAEMIEADPLWAAFNEAFREIKGVAGRTVARLLADLPEIGTLSGKAVAKLNGVAPIARDSGQKNGRRPVRGGRESIRTILYMVAQVVRRHDADFKAFYETLKARGKPHKVIRIALARKLLVRLNAKARDVRRRHPQAA

SEQ ID NO: 225025 - protein, 340 aa, unidentified
MPLYGGIDLHANNSVVVLLDEQDQVIYQQRVSNHLPTIVERLAPYHADLKGVVVESTYNWYWLVDGLMEAGYRVHLANPAAMQQYSGLKYTDDHSDARWLAHMLRLGVLPEGYIYPKAERAVRDVLRKRAHLVAQHTANVLSVQNILARNTGSRFGIKQIHKFSKDDLQGLLPEAEQVLAVTSTLAVLEGLHQQITRLEKAVTKRLKHSPAYAQLLTVGGIGEILAQTIVLETGNIGRFPSVGAYASYCRCVRSTKLSNGKRKGQGNVKNGNPYLEWAYMEAAQFAIRFNPRVQRFYQRKLAKSHLMLARKSVAHKLARACYYIMRDLVPFDVHKAFGCG

SEQ ID NO: 225026 - protein, 454 aa, unidentified
MGKPRVVPDEDHEVVYERVAAVDVAKASGVVCLRAPDPARPGRFASRIWDEVPAMRAAIEAVGRELLAHRVQMVTLESTSDYWRIWYYVLESIGLAVQLVSPSQAKNLKGRPKTDRLDAMWLARLTQWGMLRPSFVPPAAIRRVRDFTRARTDLVAERTRCLQRLEKLLEDAMIKVTSVAKDGMKAKSVVAMVAALAEGERDPRALADLAKGPLRGKRAQLAEALDGMFDSHHGVIARALLDQAAFLDQQITAMEDQATAALAAVPQSWGVDPDGQTGPRAGITPGSPVLAAARRLAEIPGISVWLAIVIIAEIGLNMAAFPTPAHLVSWMGLCRSAAQSGTRTGKGKPKKGNSYARAAAGQAAIGAARTATFLGERYARIARRRGKAIAQPAVARSIMIIVWHLLNDPAARYHDLGPDWHASRINRDKKIRTRIQGLKALGITVAITENEQAA

SEQ ID NO: 225027 - protein, 343 aa, unidentified
MEHYAGIDVSLELSSVCVVDASGRIVREAKVASEPEALIAWFRGLGFEVVRVGLEAGPLSQWLYAAMRDAGLAVELLETRHVRDAFKAMPVKTDRNDARGIAQLMRLGWFRPVHCKSLPAQETRVLLTARKLLQEKHHDVEMSLRGVLRGFGLKVGRTTPRTFGGRVRELVTGHPTLTAVAEALLAARDVLGEQLRGLEKRLRDQARQDERARLLMTAPGIGVIVALTFAAAVDDPGRFRSSKSVGAHFGLTPRKYQSGETDVTGRISKIGDASVRTALYEAANVILTRPVRGSELKSWAARLAKRAGMRKAKVALARKLAVVLHRMLKDGTPFAASRAAAAA

SEQ ID NO: 225028 - protein, 318 aa, unidentified
MTPLVFVGLDVAKATLDVALRPSAEQWSVPNDEAGVAALLERLRPQSPALVVCEATGGFERAAIAMLAAAGLPVVVANPRQIRDFARATGQLAKTDQIDAAILALFAERVRPVPRPLPSEAAQLLDALLTRRRQLVEMLVAEKNRLGFAPRPLHKGIQQHIRWLERQLDDVTTDLADQIERSPVWRAKDDLLQSVPGVGPIVSVVLLAELPELGTLTHKQIATLAGVAPLARDSGTLRGKRSVWGGRAGVRTALYLAALCGRRWNPQLRRFYERLLAAGKPKKVALIACARKLLTILNAMLRDTARWRAPELAIQHSC

SEQ ID NO: 225029 - protein, 347 aa, unidentified
MSFIGVDLHQNSFTVCRRATDGAESFETLTLSAADLERFCLSLDADDELAVEATGNSAWFRDCVRPCVGRVVVVNPSQFKVIRKSVKKTDRNDAAALALFLAKDMLPETRARTQGENELASLTQTRDLLVKQRTRLLNKIHALHVRKGLKLRKESLGSKRALASIDLALFSACEVIEIEVLREQALSLTASLARLDREIEGVASTFKGYAGLTSIKGVGPRSAAVLLSTIGNVHDFESADKLAAYFGIVPRVSQSNETDNRGRITKRGNKLARTTLVQCSLIAMRYSSYLKTYYDRIRQRRGTGKAIIATARKLLAIIYETLKNGWVFDDFTQFSRRDPLIPAGQTS

SEQ ID NO: 225030 - protein, 308 aa, unidentified
MTTMYTGLDIAKHNLQLHLAGRIHDLANTAAGHRQLCKLLAAQPGAQVICEATGGYEREVVAALHAAQVPVSVLNPARVRNFARAQGQRAKTDDLDAAVLTAYGQALQPKPTAPRTEPEQQLTALVRRRAQIVDLLVAQRLQASQLTLPTLRRQAQRLMRRLEQDVAEIEAQLKELRSRVATLQVRAEKLEAIMGVGTVTALGVLAELPELGTLNRQQAAALAGLAPHPRDSGQWQGRRSIGGGRSQVRRALYMAALVASRSNRQLKIFYQRLRAAGKPAKVALTAVMRKLVVLMNQILKNPNFVLQN

SEQ ID NO: 225031 - protein, 346 aa, unidentified
MRITYERVAGIDVHKKTVVVTRLRVTEEQQVEWETHTFGTTTPELLQAYDWLQEWECQQVALESTGDYWKPVYNLLEEDFEVWVVNAQHVKRVPGRKTDASDAEWLAELLAYGLLQPSFIPPKPQRALRELTRYRTRLIQERSRLVNRVQKLLEGANIKLASVATDLQGVSARAILAELAAGNTDAEALAELARGRLRNKIPELERALTGKVEPHHRFLLSQQLEHIDFLDEQVAEIEAEIERQLEAMSPLSEASETAEEATATPPTPAGSPISWSTAVSLLDTIPGINRQAAQIILAEIGVDMSVFPTAGHLCRWAGVAPGNNESGGKHYSGRTTKGNRVLKWEY

SEQ ID NO: 225032 - protein, 416 aa, unidentified
MKIVRPICCGMDVHKNIIVATIGITNKKTRITEYIQETFSTLNSDLLNLKQWLINHKCFDACMESTGKYWIPIFNILEDEINIYLTHPKYVKAIKGKKTDKKDSKWICDLFKHDLIKFSFIPPKEIRALREISRYRYKLVGMRSSERNRYQNCMTVSNIGIGSVFSDPFGKSAQAIMKEVLESDIIEDEKILKCIHRSCKNKDKILDSIKHCNIETDQRFKMNESMTHMEELQVHINNCEIEIMKRAAPMFDQFMHITQLPGISTLSAILIISEIGVDMKQFESDKQLTCWAGLAPANNESANKKKSVRISKAGQYLKPLLVQCALGAIKDKEGYFGIKYSRIKKRRGHKKAIIAIARMMLVSIYHMILTGETFNPSDYESFRNPKPPIKQQDLTEESAIEFLKKSGFDVSKLTKP

SEQ ID NO: 225033 - protein, 278 aa, unidentified
MEERTRGEVVRVGVDLAKQVIQVHAVDVSGRVVAARAVRRDRFIEWCAQLPAGCVVAMESCSGAHHWARRLAALGVQARIIAAHHVTPYRLEGRRAKNDANDAAAICEAASRPSMRFVPVKASGQQAVLGIHRLREGFKQERTACINRMRGLLAEFGVVLPQSPERLRCELAQVLEDATNELPGLARLALQQAQEHWRQLDAHIGWCDARIAQHVREDERVRAATQLCGVGPVTASAVVASVGDLRQFRSAAQFASWLGLVPSQNSSGGKATPTCARC

SEQ ID NO: 225034 - protein, 505 aa, unidentified
MERLCKGRRPGRAELNSPWKISMKPKQQEKNKKAICRPTQNNWHAMNRKQRREWTRKLQSEDLSLEVVHPDAAGIDIGNESHYVAVPPTRDSQSVRRFGCTTSELKEMAVWLKQCAIRTIALQSTGVYWIAVYDILEEAGFEVYLVNARETKNLPGRKSDVQESQWLMKLHTYGLLRNSFRPSQAIRTMRTYWRQRNDLVRAAGRHIQRMQKALTQMNIQLANVLSDVSGMTGQAIVKAILAGERDPYELAALRNWRVKASEEEIARSLEGNWQEDLLFVLQQEQDGYEFCQRQMAECDQRLQQYLQQLEDRSHGAGLPEEKRKERLRKKKKGNAPQFDLRAELFRMTGTDLTQIDGIDVTTTMTILSEAGWDMSKWKTEHHFVSWLRLCPDNKISGDKIIGKGRWPTNNRVTNALRMAASTLRLSNTYLGAQFRRLRTKLGAPVAIKAMAAKLARLVYRMLRYGMSFIDRGAEFYDAQHRELQINYLKRKAANLGFQIIEAPAA

SEQ ID NO: 225035 - protein, 342 aa, unidentified
MQTVTTIGLDIAKSVFQVHGVDAEGKVVIRRQLKRRYVLAFFQKLPPCLIGIEACASSHHWSRELQALGHTVRLMPPAYVKPYVKRQKNDATDAEAICEAVTRANMRFVSTKTPEQQSGLVLHRARHLFIRQQTAVINAIRAHLAEFGIIAPVGRRGVEELLNVVADPNDKRVPEIARACLLAFGAQLRRLKEQILEFDRMIRAWHRSSETSRRLDDCPGVGPALATALVATVADPKSFRSGRNFSAWIGLVPKQHSSGGKNRLGSISKQGDRYLRGLFVAGALAVIRYAKIHGTKHRPWLTALLARRPTKVAAIALANKIARMAWAMMAKGERYKEPIALA

SEQ ID NO: 225036 - protein, 308 aa, unidentified
MTTIHTGLDIAKQNLQLHLAGRIHDLPNTAAGHRRLLKLLATQPGAHVVCEATGGYERDVVRALQQAGITLSVVNPARVRHFARAQGQRAKTDQIDAAVLSAYGQAMQPKPTLPRTEQEEQLTELIRRRVQLLEVLVSQRQQVERLTLPALRRAAQKLVGHLEGNLAQIETQLQALRTQATMLDQRAQKLEAITGVGTLTALGVLAELPELGTLNRGQAAALAGLAPHPRDSGQWHGRRSIGGGRAPVRRALYMAALVAARSNRTLKAFYQRLRLAGKPAKVALTAVMRKLIVLMNHILKHPHFVLQN

SEQ ID NO: 225037 - protein, 323 aa, unidentified
MNDKDGINNEPRSFVGLDVSKAWIDAHSLPDAQIRRFENNDSGLEQCLAWVRTQPDCLCVAEATGGFETAVAGLLASAAIPIAVVNAKHVRDFAKAFGILAKTDRVDARVLALFAQKRRPPLRPLPDEAQRQFINLVDRRRQLVAMRAQEQTRLGLAKGLSRESLKAHIEWLSSAIADLDRELTVTVRSSELWLVKSKLLASVPGVGKVTLCTLLARLPELGQLDRAAIAALAGVAPFNCDSGQHRGRRRIWGGRADVRCALYMAVITAIRCNPVIKAFYQRLLNAGKPKKLAITACMRKLLTILNCMLRTNTTWNPVLLSHI

SEQ ID NO: 225038 - protein, 395 aa, unidentified
MPRPLRERISEMRVMIEGQSHFQPFGLSCWGFVDLNKGVGSMTASYDYHIGVDYHKSYSHLVVQDSSGKTLRSGRVKNDRQSLGGFLERYRENSHAVIEATRNWMVMYDWLDDICDDVVLAHPLKVKAIADAKIKTDKIDATVLAHLLRADLVPEAWAPSEKSRELRVALRERMFYVRLRTMTKNRIVTVFDRYPEQTAQLKKLGDLFGKAGRIQLAEVNVSDIDRIQIDRGLAFIGDINERIKQSETTIRAMTKANANVKLLKTIPGIGEFFARLIDAEIDDVSRFRNAKKFAAYAGLVPSTYSSGGKTYHGKIIKQGNKWLRWAFVEAVAPAIASDAQLRAQYEQLKIRGTNKARVAIARKLLTIAFQILRDQRAYEPRGTTTEGASTISRLS

SEQ ID NO: 225039 - protein, 316 aa, unidentified
MEKKSVWIGIDVSKDTLDIAQGSMGRQWQVEYAASELRELVEMLRQESVKGVVVEATGGWEKRLVSALRAASIPVMVMNPRLVRNFAKAAGRLAKTDRIDAGLLALFGERMEPEERQAATPADEARRSLFDRRRQLTDMLTQERNRLWLAPKPLRKEIKHHVDWLRKQLKDLDQRIEKSMEADPAWKAKDECLRETKGVGPNLSLGLLGVLPELGRLNRRQIASLVGVAPFNCDSGKHRGQRRIFGGRRSVRNALYMATLSAIRCNQVIHAYYQHLVANGKKFKVAIVACMRKLLVHLNTRMRQHLALQEPVNAIN

SEQ ID NO: 225040 - protein, 382 aa, unidentified
MGLVEGNAYIGLLVEESNTLLDWGNMVERETEAKSSGSGVTNPYHRTEHCDKIHAYRCDKEVGVIGIDVSKDHLITSRGRVRRYENKKEGYEEILKMKPCTIVLEPTGVYAIKPSQYFKERGVRVLQVSPNVLSREKEFRGKKTDFYDAEKLENMVDKAKEYDYNPLKELVTLYLFLKDIETKYKNKLKRALFLVSDNDKVSKDRLEKLAKGDFTREELYQLEYTPIVLEEIKILAKNLLEIQERLKEVRRMIEGQVPQDHVLLTIPGVGKLAAGIIIGIVGDVKRFPKPESFVAYCGLDPVVERSGKAVISRGISKRGNKYLRSLFYFLAMRSYSRNPTLLKFYETHKDRLKGRKLYVALARKLARVVWSVWYNNRPYEPK

SEQ ID NO: 225041 - protein, 358 aa, unidentified
MDATTYGVDIAKNVFQLHWVEAESGQIRRRKLSRAKFADFFAQRQPGRIAMEACAGAHHWGRTFAAQGHQVELLPANWVKSFVIGNKDDAADAEAIWEAASRPRIRRVPVKTVDQQALQAAHRVRSQWMCTRTAIINNLRGLLYEFGVTLPQGKQSGLKALALHRADIDAQVPALMSRLLDLELTMVHKLNETIEAIEHELEAVQKSLPVTQQLREVRGIGLLTATALTATLGDGSGWRNARQFACCMGLTPSHTGTGGKVRMGAISKKGDPYIRTLLVGCANSLLNAGKIDPWIEQLLLRRPRNVVVVAIANKLARTAWALVAHGRRYDPAWRSQAPQPSSRARGAGQEPALMMANG

SEQ ID NO: 225042 - protein, 375 aa, unidentified
MKIIGCDYHPSFQQIAMVDTETGEVSERRLYHGNGEAQRFYESLSGAVRVGVESSGNMLWFERLLTRLKQELWIGDAAAIHWQNPRKQQLTDKRDAQHLLDLLLENRFPRIWVPSMEERDLRQLLKHRHTLVQMRTRVKNQLQHIALNQGLQKKSQLWSQEGQEWLKKLELDPWTQRRRDDLLQMLEDLDRQVKQMNREAEKAAAARKDAQLLMSHPGVGPILALATVLTLGDVSRFQCGRQVASYIGLVPTEMSSGQHRWLGSITKQGNSFMRFLLVQAGLSAARGDAELGRVYKRLAQKKHHGIAKVAVARKLLVRLYWMLRTQKQYPEVVRMQGSPSHPVAEAKADRLSGRPASRPEPKDQKQKQKNRKKQK

SEQ ID NO: 225043 - protein, 350 aa, unidentified
METAYDGRQVVGMDLHRRRSVLVRMTEDGRRLGTARITNSAAELRKAIAAAGTNPRVVLEAAYGWYWAADVLQAAGAEVHLAHPLGVKAFTYRRVKNDEKDAADLADLLRMGRLPEAWIAPAEIRELRELTRYRLKLVQRRASYKDQVHAVLAKLGIPVTCTGIFGVWGNTWLDGLPLPQPYQGKVASLRTLIAGLGTEIALLDAVIADLLDCHDGYHALQALPGIGPVLAAVIVAEIGDIRRFAGPAKLCCWAGLTPRHRESDTKITRGHITKQGSPVLRWAVVEAIQRQPAASPRRGVKDRIIARRGKEAKNIAKTAAARHLLTAVFYAMRDGHARSLAAHAAAPDAA

SEQ ID NO: 225044 - protein, 338 aa, unidentified
MKEYKLISIDLAKNVFQICAFSGFNKIAFNQRIHRGKVLAKLRNIPSTTIVMEACYSSNYWGREIQKLGHTVKLIPPFKVKPFLIGNKNDANDAVAIAEASLRPRSRFVSVKTLAQQDTQTLLRVREQLQKIRIMTSNQIHGFLSEYGVFCAKGHKSLMTTLAEALAPESNLLSPIAIEAIRMQSDYYSELKAKEDEITKRLIMLCEGNPIYRYLKTIPGIGPIVAATLISSVGDPRYFRNAREFSAWIGLTPLQHASGETSRMGKISKRGDQHLRKMLIHGARSIVNWVKHKEDKLSLWIKSLEKRMCPNKVTIAVANKLARIAWAVMTYQVEYHAK

SEQ ID NO: 225045 - protein, 344 aa, unidentified
MLHLGLDLSRRRIDVCVLDDAGELVTTTSCPPDVDGLRVLAERFAGVGVRAVVESMTGARFVHDTLEAHGWWVEIADAQKVKAIAPLAAKTDQIDARVLAELSWRDLIPAIWLPDTQIRSMRELGRFRLHLVKHRTALKNRIHATLITHGRWIPLSDLFGTAGRQALAELELPQAWAQTTAVTLEVIDHLDTQIGECVQLMRPAAQQHPDTALLATLPGVGDILGFTIASEIGDVTRFPTATKLVGYTGLCPRVHQSGDTDRRGPLTKHGPRWLRWAYVEAAIWAARHPAYQPRHQRLTQRLGPHRGPKVARIDTARRLATASWWMLTKREPFTPPAPTLPLAA

SEQ ID NO: 225046 - protein, 338 aa, unidentified
MAILYVGIDLAKSVFAVHGVNEAGKAELVRPSVARAKLLELIAGLPPCVIGMEACSGAHHWARLFTAHGHTVRLMAPKFVAPYRLSGRRGKNDAADAAAICEAVQRPNMRFVPAKSIEQQTRLMVHRARQGFVEQRTATINRIRGLLSELGIVLPLKAGTVRREAAARLEELPGQANLVVGDLLSEVHRLDERIEHYDRQIAEQPRQDERARQLMRLTGVGATTATALVAMIGNGHDFKNGRQLSAWLGLVPGQYSSGGKTRLGRITKTGDAYLRSLLVLGARALLNAAHSKTDSVSRWAVALQERAGYWKAVVAIAAKNARMAWAVLSRGERFVMPG

SEQ ID NO: 225047 - protein, 397 aa, unidentified
MSSEVPSRFIGLDAHKHYLVAIGVNADLERVFGPQRIALSSLEDWVEKRLTQDDAVAIEMSTNAYELYDTLISHVHSVTLVHPPHVALITRAQVKTDRKAAEILAQLHAAGLLPGIWVPPVEIRELRALIAYRKRMVGLSTQAKNRLHSILHRNRILPPEGEPFTSDKMDWWRSLSISEMEQFRVQSSLDTLAFAQLQLANILEKLADIASQDDRVPILIQLPGIGMVIALTILAAIGDIIRFPSAKQLVGYAGLGAKVHDSGVTRKTGGVTKSGRRDLRGAMIQAARIAAQHNPQWRAELERLRKRMIYQKAVVAIARKLLVVVWHVLTKGEADRHADPKRVATKMMMHAYTLKEQRRSNGQSAPEYVHQQLDRLGIPLQSFRMNGRTIVLQPADS

SEQ ID NO: 225048 - protein, 324 aa, unidentified
MNKNTEIFGIDISKDVFDVYSHQTGHQSFNNDAQGFKSFLKVITKEALVVMEATGYYHYLFAQFLHKKKVQVSVVNPLSVKRFIQMKLAKVKTDKSDAKAICEYGQMNEVPLYTALTDVQAECLQLFRLLDNYLKKRTQTKNKKHGEEVLGIPSKYVYGSLKRDLKHLDKEIKGIESRLLELVKQDQQHQLTLLKSIPGMGIKTALFLIVSTDGFSKFETASQLCSYVGITPTIRESGSSVRGRSRISKVGNKKLRNLLFLCAFSACKHNKACREIYERIVNKGKSKKLALIAVANKLLKQAFAIAKSGRPYDEKVVSNKVCKV

SEQ ID NO: 225049 - protein, 409 aa, unidentified
MRRIRKKRSASHIVGCAPKCAEPHAETPEGVLSAANQRRQTVEEFISSFVGLDVHKDSIAIAVAEDGREAPRFVGTVGHEIKQLLKALHSVGKPESQLVVYEAGPCGYGLVRQLRSRGYGCEVVAASKLSRRPGDRIKTDRRDALTLARLARSGDLVRVAVPDERDEAIRDLSRAREDALRARLKARQQLKALLLRHGRRYTGRSSWNPTHERFLSTISFSQPAQDIAFAEYRLAVREGHDRVERLTEALRTQTEQWRMKGLVAALSSLRGIDFIAAVTLVAEIGDFRRFSHPTELMGFLGLVPSEYSTGDTQRQGDITKTGNSHARRVLVEAAWNYRFQARLSRLMHIRQERQPKAIRDIAWRAQLRLCHRFRRLRSRKLHQNKICVAIARELAGFIWAIAQQVTVAA

SEQ ID NO: 225050 - protein, 348 aa, unidentified
MLIIGCDYHPGFQQIAFLDTETGECGERRLTHREEAEQFYSTLKARSVRVGMEASGHARWFERLLKGLQFELWIGDAAEIRTKRVRKQKTDRQDAQLLLRLIMEDRFPRVWVPDAANRDLRQLLWHRHRLVQMRTRVMNQLHVVALNEGLRRKKALWRPAGRNELESLKLAPWASRRRQDLLDLLDQLTPKIQNLTRQLEQEVESRPVTRRLMTHPGVGPLTALAYELVIGTPERFHCGKHIASYVGLVPTEESSGDRRRLGHISKQGNVLLRFLLVEAAQVTVRSHPEWRSTFFHLAMRRGRKIAKVAMARKLAVHLYWMWRQDLDYGQMNKLGSHAGEPGNRHGVQ

SEQ ID NO: 225051 - protein, 412 aa, unidentified
MISVGIDVSKGKSTVCILKPYGEIVSKPFNITHTQKDLSELSSMLFRLNDEVKIVMEATGIYHLPVLTYLQEKGFFVSVINPYLMKSYRNESLRKAKTDKIDSRIIANYGIDHWFKMKEFQTSGEIYEELKLLGQQYRHYMKLHLLSLAELTHLLDLTMPGIKNLLASWNETNRKDKRSDFVERFWHYDVITSMSEQEFTEEYILWAKEKKYVPSQEKAKVIYTLAQESIPTLPSETSSVKMLVTEAVRVLKEVDATLGLILSRMQEIAKTLPEYSVVREMGGVGNTLAPKLIAEIGDVRRFRNGKALVAFAGIDPPPYESGQFVGCNRKISKRGSASLRKVGYETMRSLKMRSRPEDPVYRYVVKKESEGKSKKSAKIAGLNKFLRIYYARVTELYKNLSLIHISEPTRRS

SEQ ID NO: 225052 - protein, 415 aa, unidentified
MALKIVYKICCGIDVHKTFVVACIASTNDKGITSYESHRFSTYTSGLKTLLQWLLDRNCKDVCMESTGKYWIPVYNILESDCSIVLAHPKYVKAIRGKKTDKKDAKWIADLFKHDLVSGSFMPPADIRQLRDLMRYRFKLTCFKSSEKNRLQNCLTVSNIQLGNVVSDTFGKSAQAILDKILENPEDTSFDLEPLVFKSLKKKLPELRDAIDGYITPEQAGKLKIIKAHYESLESRKAELEELILALAAPYQQELAILQTAPGISSDFTAIGIISEIGTNMEAFPSAKHLCSWAGLTPTNNESAGKKKSVRVSKAGCYIKPLLVQCANAVVKSSKHPEMRNRYLRLKKRRGHKKAIIAIARMLLTALYHMLKNGENYNAELYQKSDLLPVDREITVEQALMIARNQGYKIKSATA

SEQ ID NO: 225053 - protein, 359 aa, unidentified
MKIVGCDFHPSWQQIAVFDRETGEISEQKLTNNDGQAESFYRGLEAPALVGVEACGNSQWFVDLLERLGHQVWIGDAAQIRASYVRRQKTDRRDAGHILRLLMENRFPRLWVPTAEQRDLRQLLIHRHKLVEIRTRVKNGLQHLALNRGLQKKSSLWSVRGRAYLEELPLAGWTARRREDLLKLLAELDKHVGELDEAVTRAAEEHPQARLLMTQPGVGPITALAFVLTIGDVSRFRHSGQVASYVGLIPREHSSGGKQRLGAISKQGNRFMRQLLVEAAQTANRLDEGFRKQYAARCHHKPKGVAKVATARKLAVRLYWMLRQNIGYPEIARIESSPRVPLAETKKAEGLVGRSRIQH

SEQ ID NO: 225054 - protein, 407 aa, unidentified
MDSLKTVFGIDVSSRKSNVCIMVNGQKVNDYAISNDMVGFNQLLDDLKQVTNPQIIFEATGVYSRRLQAFLDMHELRYVMMNPLEAKRKTKDDLHQNKTDKLDAMYLAKMQSEHPQRLAYVQSEEYQELMANNRIYEQASHDLITNKNRLHKAIQLTFPEIEHLMANPRGKNYWSIVLKFPHPNIVLETKEADIIDFLKSLSGIGEKRANDLAQRLIRLAKLACPAVKKSSAHIRGLEMAINNILSAEETCQTALKEMAKLAPKRDLEILKSIPGIAENTALRIISELGDIRRFNNPNQLNAFVGVDPQVYESGNLTAHLSISKRGTAIGRKVLYLSINQIQSAKKAGNPCHIADYYEKRKRSSETASHKKAAIASIHKLLRTIFALITNDQLYSYDIAKHNQRLLS

SEQ ID NO: 225055 - protein, 373 aa, unidentified
MNHHSGAYVGIDTSKLRNAVAVAEEGRGGEVRYLGEIDTTEAATRKLVTKLAAKYRQLTFCYEAGPTGYGLYRLIRKLGHDCIVAAPSLIPKKPGERVKTNRRDAVGLAKVLRAGELTAVWVPDERHEAMRDLSRAREAARKDLKGKRQQVSSFMLRLGRHFPGKKTWGPAHMNWLMLQKLEHREQRIALEELLGAVRQESERVERLEQAIRDAVPEWSLAEVVTALQAMRGIDLVSAVTVLAEIGDLSRFQNPRELMGYLGLVPSESSTGDTVNRGGITKAGNGRARRILVESAWSYRYPPRVSREKQMKVAAAPRAVREIAWKAQMRLCGRFRSLTRKGKRPTIVATAIARELAAFIWAINREVMAHATAS

SEQ ID NO: 225056 - protein, 338 aa, unidentified
MNKLSIIGIDLAKNVIQLHGNDANGHTRFTRKLKRKEVLAFMVKQPKSLVAMEACGGAHYWARMLQEQGHEVKMIHPRYVKPFVQVHKNDARDALAIAEAAARPAMPTVAIKSVEQQDIQAIHRVRERLVKEKTAISNELRGLLGEYGIVMAQGHKSIRESVLTILENAENGMSMKGREIINDLREQWLDRESRISEYDKALKIIAKDNVICQRLQSMPGIGPVNATLLYSYVGDHDHFASGRHLSASLGLVPRQHASGGKENLLGISKRGNKHVRKQLVHGARAAYKVLIKDDNKSRLGLWVKRMEGKHPNKIIVALANKMARIVWALMKNETTYQA

SEQ ID NO: 225057 - protein, 424 aa, unidentified
MKVTFQTCCGVDVHKSFLVATIIKTSSGIEPSYQKRRFSTFNNSILEFKKWLLENECLYVCMESTGKYWIPVFNLLEDEINVTIANPKWVKAVKGNKDDTKDSKWIGDLFRLGLVRGSYIPCKKIRILREFTRYRYKLVSCRSSEKNRYQNALTVCNVALDSVVSDIFGKSSTSIIDYLLEQSGTSIDHEVIASKLLKRLKAKEDAVIESIEGYQMTDSQKYRMHLVRAHMDYITAAINDVDSEIESLIASDPDYENAVELLCTIPGVKYDSAITIISEIGIDMSQFCSSKRLCCWAGLTPGSNESAGKKKSVRITRAGVYLKPALVQCAHAAVKSDKSPYYKKKYESLVKRRGKKRAIIAIARMILTAIFQMLTTGETWNPCDLYKIDMPEALLEKQKQKAIKQAQKLLIREGLLPPTEPIAS

SEQ ID NO: 225058 - protein, 403 aa, unidentified
MNNVAGIDVSKGKSMVSVLRPFGEVVAKPFSIGHTGSELKELADYLKSLDGETRVVMEHTGRYYEPVARFLHEEGVFVSAVNPKLIKDYGNNTLRKVKTDKADARKIARYGLDNWAELRQHTPMDTIRMQLKTLNRQQSLYTKTKTMMKNNLIALLDQTYPGVNALFDSPVREDGSQKWVDFATAFWHVDCVRNMSLTAFAERYRKWCKRHGYNFSQSKAVEVHAGAQDLIAMLPRDALTKTMVRQAIDALNAISASMERLKAEMQALAAQLPEYPVVMAMHGVGDSLGPQLMAELGDVTRFTHRNAITAFAGVDPGADQSGTHEAKSTRVSKSGPPELRRALFLVMDCLLKTQPQDDPVYRFMDKKRAEGKPYLVYMTAGANKFLRIYYGRVKEYLASLEEN

SEQ ID NO: 225059 - protein, 412 aa, unidentified
MEIVYPTCAGGDVHKREVKVCLITRDASGQRTKEVRTYRTMTQDLLALRDWLQDQGCPIVAIESTGVYWKPVFNLLEGDLEVLLVNPSHIKHVPGRKTDVKDCEWLAERLEHGLLKGSFIPPQAIRDLRDLTRYRRKLVEMRASEVNRLQKVLEDANIKLASVVSDVMGVSGRAMLAALLAGERDPKQLAELAKGRLRQKKEELVAALEGRFRPHHARLLAQMLAHIDFLEESIAECEAQIDEMCRPFAEDIERLDTETGVDRRAAQDLVAKIGVDMSAFPSYKHLCSWAKICPGNNESGGKRKSGRIGKGNKWVRAILTECVHAAGRTKETYLSAQYARFARRKGKKHAAVVVAHSLLEGAYFILRDKVPYRELGPHHFDEINQAHAIRYHIRRLESLGLQVQIQQLPLAA

SEQ ID NO: 225060 - protein, 436 aa, unidentified
MIPAVVTHCAGIDIGKRALAVCLMVGPADAEPKVEVREFSTFTADLEAMKDWLKQAGCTHAVMESTGPYWKPVFNILEGSLVVCLANAEDVKGRKGHKTDRVDAQWLAHLLRHDMIRASFVPPRPIRELRDLTRRRKQLLSDATSERNRVQKTLEDANVKLGSVLSDVFGVSGQCMLEALLEGRGSAQELAEMARHKARHKIPQIIESLAGHRFSEHHRFMIRMSLEHLRMLERQILALDEEVLKRIDSLGLDRLLNLLQTIPGLGHDSAVAILAEVGPDVNQFPTAKQLSSWAGVCPGNKKSAGKDFRGHTTRGNRWLRSTLTECAWAVSRSKKSPLRDKFWRWAVAGKKKAVIAVAHGLLLQVYQVMQTQQPLAQAAAPPLDEKRRQRIVRHHLRCLGRLGISTGPKRIYVDGGAPRRGRPPRNARNSPSPGRS

SEQ ID NO: 225061 - protein, 356 aa, unidentified
MSRDIKYIGMDVHKEATVIAVLNGSGKLVMESIVETKASSILQFIHGLRGELHVTWEEGTWAAWLYDLLQPQAAQVLVCDPRRNALLKEGNKSDKIDARKLADLLRTGMLRPVYHGEHGLRTLRELGRSYQTLSQDLNRVMNRIKALYRGWSIPCAGTQVYAPRYREEWLQKIEHAGVRRRAELLYQQLDGLQALRRTLRPELLAESRKHKASKLLRQIPCIGPIRAARLLALMQTPHRFRSKRQLWTYCGLGIETRDSAQYRFVRGQLQRAKKPQQIRGLNRNHNHEMKEIFKGAATRASCGVGPLRDFYVALLAKGMRPEMARLTLARKIAAIALTLWKKEERFDAEQLKLQAA

SEQ ID NO: 225062 - protein, 414 aa, unidentified
MKEGVTLNQTLFVGIDVAKQTNHIYCLNLDRDKLLSINIPNTQDGVNHIEAHLLKLLEKHKLTKVIIILESTGVYSAHIATYLSASKYLSLFETKVYIINPKISRNYRRSFADMDKTDPKDAYVLADIARVGRCDELTPFKGGQRLALERLTRHRLHIAEKLSNEKVYALNNVFLKFSNFETLFSDNFGATAVDLLLEYKSIDDIINSSLEDLADFVAKSSKNRFDNSVDVAIKIKKAARASFRLDKVAYDPINFSLASSINVIRCYQNEIKTIDAAIINQVAGFNHDHYQVLLSIPAIGKVFAAGILAEIADINQFDSHSALAKYAGITWRKNQSGKYTADDTPMTKTGNRYLRYFLIEAANMARIHIPEYRDFYHKKFKEVTTHQHKRALALTARKLIRLIYGLLSTNRLYK

SEQ ID NO: 225063 - protein, 355 aa, unidentified
MDSAKYIGLDVHKESISIAVLNAAGKIVMEGVIETNATLIVQFLRGLRGELHVTFEEGTSAAWLYDLIQPHVTEVVVCNPRQNALLNAGNKSDRIDSRKLADLLRGNQLKSVYHGEHGVRTLKELVRSYLTISKDVARVMTRVKALYRSWAIPCTGKQVYAPGHRAEWLAKIREPGVHRRAEFYYQQLDVLRSLRQQVRRELLAESQKHPKWKLLCQIPSMGPIRAAVLIGIVQTPHRFRTKRQLWAFSGFGIETHSSGDYRSVDGQLRRTNRPVSVRGLNTNHNHDLKNLFKAAAIVAAHKPGPFQEFYAALLAKGIHPEMARLTLARKIAAITLHLWKKGARFDAQYLKPQAA

SEQ ID NO: 225064 - protein, 310 aa, unidentified
MAAYVGIDVAKATLVLCLQPEGRTWTRPNTPAGQAQVVAELRAVQPERIALEATGGYERAIWQQLHAAWLVVVRLQPRRVKALARALGRQAKTDPLDAALLAEAARILVVPVAIVPDAATEALRALVDLRRQLVSQRDDNRRRLKQNPAAVAQQVLGRVNAGLQREIRQLDGEMRVQLAVTTSPDLATAPGAGPVLRATLAARLPELGHLDRRQIAALVGIAPYNADSGAHQGKRHIRGGRADLRRVLYMATLASIRAHSVLATTYQRLLARGKLKKVAIVACMRKFLTMLNAMARDHTTWAPPTLSVAT

SEQ ID NO: 225065 - protein, 325 aa, unidentified
MKSQNLVCGVDVSKDTLDLYYNDESGKEHYLKVSNDTKGHDLLIGKLGITRTYLMESSGPYYLRLAFKLKTMNGDVRVENPIVVKRFIQMHMERNKSDKKDAKWLYVYAKSRETNEWAVPPKEQLYCTQIMGSIDLYSRQLVMISNQLHSLNQGPVQMKDVIKSLNKTKAHIEREVKKLEMQLHSLLQAWESERLKNISSIPGLGRRAVALLIVYTDGFKKVQNHRQLIALAGLAPREYTSGSSVRGRKGICKMGNGHLRSVLYMCSLSAIKHNQACKDLYDRLKAKGKRSKVALIAVCNKLLKQAFAIATKGTTYQPNYKSSLT

SEQ ID NO: 225066 - protein, 367 aa, unidentified
MEKIGVVGGRGQEGLPAKRPPDGTPVWMAMDISRSKAVYCLRWDGSEQRRLSTPLGIAHVRALLEHYRGCQVHVAYEACGFGYELAWWLQEQGIARMVIAPSRVERVPGLQVKTDRVDVGKLARKLEKGDLKAIYIPSRTVHEQRQIGRTYAQCLKERKRAQVRIRSLMQEQGRLGPLPAAGWKVYSAWLGAQNLPQSVRLCVQAHEQLRALADQQAQRMKAELYKLARGAEYRPLVKALSAQSGVGWQSAIRLVLELGDIDRFRTTDALPHYLGLTPSQYSSGELDHRGHILKCGPGFLRALLLQCAWSAIRQGHDTELQERFANLAPRIGRKRAIIAVARKLAIKLRGRWRTHLMASKPASAVAA

SEQ ID NO: 225067 - protein, 430 aa, unidentified
MKSNTQNAKIEAITEKTLVLGIDVGSEMHYARAFDYRGIEYSKKPFKFSNTEVGFVTFKEWILDLKERHEKDKVVPGMEPTGHYWFNLGKFLQDNEMKPVLVNPHHVKKSKELDDNNPTKNDRKDPKVIAGLVREGRYMIPYLPEGVYADLRTASNIRFQLQAELTRIQNRISRWFNIYFPEYKTVYGKPDAKSGMLILKAAPLPEDILTLGIDGVNQIWRDAKLRAVGKARAKTLIEAAEHSVGSKEGAVSARMEIRMLLEDYESRNTRLQEVMVLIEELVRKIPMAEKLLEIKGVGIRTVSGFLAEVGDISRFNNPKELQKLAGLALVENSSGKHKGETTISRRGRKRLRYLLFEVAMSLVSKNQEFRELHNYYTTRRLNPLKKMQSLMAIAAKLIRVFYAMLTKGVDYDPKKMVSDIKRPAVYLQAA

SEQ ID NO: 225068 - protein, 355 aa, unidentified
MNNCTIIGIDLGDKKHAVVGLDDKANIVLKRWIPNTKADLEALFRRNRRAVFGMETGTHCRWVSALCGQCGCEVYVGNAHHLRSIFGNSHKNDMRDAEEIARLLHGDKRHFHPVQLRDAEHQNLVQLVKMREIVVSQRTKSANAIRGMAKANGIRLPDSDADSLHKKLAAVVDTLPESLQTLLGPQVGLLEKLCAAIEEYDRAIRDYRNAHFRKECNLLETIPGVGPVNAAAFVAFTGDVTRFRHARDVGPYYGLTAGRDQSSSKDEPKKITKEGNGFVRHLLVNAANLIMQGRGRNTELRQFGLRVWGNRGKVAKRKAKVALARKLAVTMAAMLRSGAPYNGIMEENENGQSNA

SEQ ID NO: 225069 - protein, 358 aa, unidentified
MATTFSDHATLFKSLRLPHSATHLLNYVDKHFTGKRIAFVYEAGPTGFGLHDQLVARNHTCLVVAPSMVPTAPGKRVKTNRLDSRNLSLRLRGGEPNGIHVPGRCYRELRHLVQLRDTQVRQLTATKCRIKALLLYEGIEFPDCNGRWNAPAIDGLYRLSCSSEVRFKLDHLIGTLYFHFHSAATVQKRIRQFCKNEPELHQSITLLTTLPGLGWISAAHAVARLGDWRELKNVRQIAGFLGLVSSEHSTGEKENRGPITRSGDSRLRNKLIQCAWVAIHKDPELRSFYRSVYQRQPKKVAARKAIVAVARKLTTRMCVVLKEQRPYIIRPEISVAPLTAEETVGPRERLDAAQNEQL

SEQ ID NO: 225070 - protein, 321 aa, unidentified
MAMPVVPIEAGVDVAKDELMIQTAPGTKPFSIPNTPKSIKTWLKSMPKGSALALEATSSYHMELAEQAYAADLNVYVIDGLRLSRYRDSLGVRAKTDANDATLLARFLNRERASLKAWVPPPPGHRQIQMLLRRRAKLVEIRGILRMSWSGEKLFASELEIIEQALKQLERLFEMRLRAAVKEAGLLDQLRRIQQVPGVGFLTAVGLVMSFMRGEFSNSDAFVAYLGMDVITAQSGKWVGRGRLSKRGDSEVRRLLHNAAMSGSRTETWKQFYAYHLARGKKTTQALVILSRRLARLAYGLMKSQTDWNPQVYAGGGKTAN

SEQ ID NO: 225071 - protein, 318 aa, unidentified
MLIHYIDIAKRNFVIAVSSLSKTKTETNNPKGIAHTIEYLKKHKVALVVTESTGGLEIPAAKAIRRAGIAVIIANPRQTHQFAQSQPLTKTDAKDAKMPAFFTQMMTQKEDWQTMPYQPPTEAEEVLEALVNRRNQSADMRTAEKNRLHQVHETQVGSVKQLIAHFDRLIDELDKQIDNHTHTHFDGKAQVAEQIKGIGSITTATLMAMLPELGRLSHKRIASLVGIAPHPRESGETKFKSRCFGGRSAVRKALYMATVAATRFEPLIRDFYQRLLSKGKPYKVAVTACMRKLLTISNARMRDYFAENDTAENGIRTA

SEQ ID NO: 225072 - protein, 366 aa, unidentified
MKKISTVQAFKSEIFKEQKLTIGLDLGDRWSFYCVLDETGEIILQQKLPTTPEGMRRTFEKLPRSRMVLETGTHSPWVSRLLTELGYEVIVAHAQKVQLITKSSRKDDRHDARTLARLARIDPQLLGPVRHRSVQAQIHLTVIRARAELVSARTALVNAARGLVKSYGERLPKCGTYQVSGKLAEGLSAELREVLVPLLGGIESLNERIQEYDKRIEQIAKEVYPEVYLLKQVKGVGTQIALTYVLTIDDPYRFPKSREVGCFLGLRPGRRNSGKSEPQKRISKEGDRYLRTMMVQGAHYILGPFGEDSDLRRWGRKLAERGGKNAKKRAVVAVARKLAILLHRLWVSGEVYEPLRNSQRAMGVAA

SEQ ID NO: 225073 - protein, 384 aa, unidentified
MGNERTFVGLDVHARSVTGHALDAVTGEVWQRKLCPDPGEVLRWVSGLPGPVKVGYEAGPTGYGLYRCLNDHGVLCVVAAPSKLHRPHGDRVKTDARDAELLAHLLKLGEIVEVNVPSVEQEAARDLVRAREDARADLMRTRHRVSKMLLRQGIVYSGGDAWTKVHDSWLRGQRFDQQSRQLAYDSAYEAMVLTVDRRDRLDRAIDEMAANSSYTPVVRRLGCLRGISTLTGFALAVEIGDWQRFTGATIGAFVGLVPTESSSGQSRSQGLHQDRQHPRSPAAGRGRLAPRQALPGARQNDAGSVGTRPAGGPGPRPRRQPPTAPTLAEVQRPQEASRGRRRRHRPRARWLGLVARPARIAKASKTSSPPSPSAWLPREERPTI

SEQ ID NO: 225074 - protein, 379 aa, unidentified
MVSASTPASLAETASATLFVALELSRSTWRVALHAPLTNKVSQHRLDGGDADGLLALITRKRSQAEEKLGRPVRVVCCFEAGYDGFWLHRWLYARGIENRVLDAASLLVNRRARRAKTDRLDAAGLLRTLMALERGEAQVCRVVRVPTPEQEDARRRSRERARLVVERGQHTSRIKGLLMTQGIRDFEPTRRDWRARFEALRTPDGLPLAPCLRAELLRECRRLWLVMEMIAEVEAEQKAVAEAEDGPAARLAQLRGIGLTFATVLGNEVFFRVFRNRREVGGYLGLAPSPWQSGAVRRDQGIAKAGNSRARRTAIELAWLWLRHQPESALTRWFHERVGSSKGRMRRILLVAMARKLIVSLWRYVTVGIVPEGAVLKV

SEQ ID NO: 225075 - protein, 482 aa, unidentified
MKKKTIFSAQSQELLRLFEEAGNSSKIMCVPMDYAKKDHVVMFCNGYGDIVRKPFSVKNSPEGISYLIEQVSRSCRHRRIKHKHVFFGGEDVNSYAENFVNALRCKGWLVAGVNAHDAKEQRASIQASTDRLDLMGIASMLLNRRANCSPAQSGIYRNLRTLTRHRRKLVAMSTEVRNQIHTVVDRLFPGFLDEKKSGIVAFTNSSLYLMENRFSARQIRRRKREKLIEILRRYGTSEPERTAVQLQEHAKTVLITPDEYIGTLQLSLAQHVRHFRCLRDNIEQMEKQIALYLTQTQGSLLTTTRGIGIVLAAGVTAEIGDPFQQKPVNNLVSYAGIIPRVKQTGGPDGRTYTGKVAKRCNRILKDYVTRSAFHLGFHGAEDLMADYKRRDAAGQHADFGIGRRYLRMAMCLMRTSQVYLPKRLRNKQVKPQERANYYLMFWPKLVEKWYKLDALEAAFAHDRPLGRWRNMVQELYAIKLTL

SEQ ID NO: 225076 - protein, 346 aa, unidentified
MEQVITVGLDIAKSVFQVHGVNEAGAVVIAKRLRRSQVIPFFRRLAPCLIGMEACASSHHWARELGALGHEVRIMPAGYVKPYVKRSKNDAADAAAICEAVTRPTMRFVAVKSREQQSLLMLHRSRSLLIRQRTMLVNAIRAHLAELGIVAPVGLRGLRALLVVISDPEDERLPPLARCCLESLAAALMSVEQEIASAERQILVWHRSNEASRRLASIPGIGPIIATALIASVADPSIFRSGREMAAWIGLVPRQNSTGGKERLGRISKQGDKYLRWLLVAGAMAVIRHGRKTSFAARPWLADLAQRKPAKVAAVALAMPRLRRYRTDEGAAGRATRVPALEKEVP

SEQ ID NO: 225077 - protein, 336 aa, unidentified
MRYIGVDLHTTQITVCYLKAEADFEIRKYQLIEMDKFVNTLEAGDQIAVEATGNTRWFSEQVREKVRRVVVVNPRQFEVVKNSCKKTDKNDALNLARFLRADLLPEVRAKREAAMRVQSLVQTRTKLVRLKTSLINKIHALYVANGWKLKKTSLASEKGLETVLLSEWSAMERIELEIIIEQIRALKVSIKKLDTAIEAESGKLNGFASLVSMSGIGSLSAGILLSVIGEIKDFATADKLASYFGIVPRVSNSNETVNHGRITKRGNKTGRTTLVQCSLAAIKKSEYLKNYYEQVKARRGHGKAKIALARKYLGIIYNTLTNNWVFADFNNFELAE

SEQ ID NO: 225078 - protein, 329 aa, unidentified
MNLIGVDVDSVNLVCLRRCNGKTYPIKSFSNNATGHRKFIHWATQRGLTARVCMEATGVYSIPFALALHSADRIEVSVVNPKAIKKFADASLQRGKTDALDAACIADYLERMPFKPWQPPAEEILELQHISRRIIQLNTELTRERNRHKAALRMGSIGRVVAHDTLVNIRHLQRRIAAMEAEVLNLIASIPELQDDMDLLISVNGIAQKTASKLIAELHTLPQDMSASQWVAYAGLDPRPYESGTSTHKPRRITKAGNRYLREALYFPALVASRCDKNVAAYYQKLITNGKKPLQAIVAIMRKLLLAIWGMLHHRTKWDGQKFYRVTEN

SEQ ID NO: 225079 - protein, 321 aa, unidentified
MSRVHGFLGIDSSLKQNVACLRINDRTYRSAFDNDQNGHAALIAWAMKFAPQGPTIGVEATGNYHKDLAWAIRSQGLTCLVLNPRQVRDLAKGLGVCKTDKTDAEVISRVLEVPKISCQAQRSKVHDELRDISREIQSLTELKSDLQRRLKGPCRSNAAKQADAALIAVCKAQIARLEREWMRIVKTTDVLHESYKLQLGIPCIGPKTARVAVSEFPEQLSGFSVKEACSYGGLVPWLDESGERKRPAHIRGGNARLRQALFMPALTASSKDTQCKDLYARLRAKGSTHKRALTAVMHKLLRRSASVLRRHTAWRPEVDIC

SEQ ID NO: 225080 - protein, 357 aa, unidentified
MAMLAEVVDGVIGVDTHRDFNQVEIARSSGAVIASRRFTNDSTGHAEALAWIFAHAPGSRLVVSIEGTRSYGVGLARAAATAGLAVIEAEQPTRTHRRGKDKSDRIDAHLAVLYALGLDANKLPTPRSDGDREALRILLCARQELTTTTTGQTNRLRALLRDGDDTDHQLARARLTDTVLASLARRRLPAHASRQQAVRHGEIRRLALALRDAGRALATNRTELAAIVHDLVPGLLSQPGIGPVSAAQAIVSFSHVGRCRSDAAFAKLAGTSPIEASSGQTTRHRLNRGGDRALNKALHVIATTRMRDDPATQAYLARRRKQGKSDREIRRCLKRYIARQLFRTHTAAMTPTTAAST

SEQ ID NO: 225081 - protein, 400 aa, unidentified
MKASCIAVDVSKGSSHIQGYIDSDTSFSNVQKIDHDRSGFNEVLTLKSKLDRQTGQPSVVVFEATGVYHRGLESFLKENGIQYIIVNPLQSAKFRKQELRTKKTDKRDCKNIAKVYFANDFRQAAPEDEAYYTLRQLSREYENLLNHLRKAKVSFNEGLEIVYPGFEKVFPELYTESSFEILKKYSHPKQLGRKNVHSLTTFLMKHNEHRELWCEKKAEELLRYTQECVSGCREEDVNVDILLGQIKQVEYYIDLCDATLQKMIGLAKQLPDFRLIQSIPGIGENLAARLLAEIGDIRRFKGPKQLVAYAGIDPIIYQSGKNDGLHLHISKKGNKRLRCLLYLAVMCSLRVKTQETSIRDFYQKKTHQSNPMRPKAASIACANKLLRIIYGLCKTGCAYK

SEQ ID NO: 225082 - protein, 409 aa, unidentified
MEVLYERCAGLDVHKDVVVACMRVQRGGRPERELRRFSTMTKGLLELSEWLSSQQCTHVAMEATGVYWKPVWHVLEGSFELVLANAMHIRNVPGRKTDVNDATWIADLMAHGLIRASFVPPAPVQAMRDLTRTRKQLVREVAQHIQRIQKTLEDANVKLDSVLSDVVGMTGRAILDAIVEGKKDPEQLAALANVRVKAPPEQLREALRGRVTDHHRFLLKLHLGQIDALESAVREVEARMGKALEPFRAQVNLLLTIPGVKRTTAETIAAEIGFDMKRFPTAGHLVSWAGLCPRMDESAGKRRSTRTRPSAQWLKPILVQAAWAAGRKKGTYTQAQFQRLRARCGGKKAAVAVAASLLTAAFHMLRDGTAYQDLGGTYFDTRDKAKVTKRLLRRLKDLGVHVVPAPIAN

SEQ ID NO: 225083 - protein, 427 aa, unidentified
MSYRIAAVDVHKKMLAVVVTDVAGEGEYEFERRKFGATPGELHVLAQWLDQQEVEEVVMESTAQYWKPVWGMLERFWKPVRQQREGASQMCGTLHLCQAKSNHGPRGRKNDFLDGERMVKRLVAQELVLSFVPDPEQRLWRTVTRRKHQLTRAKVVYKNQLESLLEQAHLKLSSFVSDLLGLSARRMLKALAEGETDPAALAALADCRLRATPEQLRDALGACTELNGTFRRLLQMALDELQLIETHIEKLEREAMDLMKEHQDVVQRVAEVPGFGPDSALQMIAEVGPKAATFRTAKKLSSWVGVCPGNEESAGESHSTRSPKGNRHMRRLLNQAAQSAVKVKGSIFELTFSRLLPRLGYQQAIWAIAHRLCRVLWVILHEGVRYEERGPAVSAKSKRTRAARMVRELKKLGYRIEGGPLPAVTRA

SEQ ID NO: 225084 - protein, 398 aa, unidentified
MQRIGPDTWVGVDAGKEFHWARALDASGEVLLSRKVQNDEGSLLELVEEVLSLAAGGRVVWAIDQPGGGAALLLALLWEREQRVLYVPGLVVDRARDAYRGESKTDERDAHVIADQARMRADFSELAPQEGTLAELRLLLARRRDLVVDQTRAVTRLREALLALFPALERVLDLNTKGALVLLTRYQSPAKIRRTGHKRLATHLKGRGVKGADELARKALAAAKTQSVELPGQEVASRIVAEIAGEVLTLKERLPALDKEVASRFFDRPEAQILASLPGIGPVLGAEFLVSVGDLSAFESADQLAAYAGLVPAARDSGKRVGNNRRMRGGNKVLKRVFFLSAFSSLRSSPHSRAFYDRKRGEGKRHTQALIALARRRVNVLWAMLRDGKTFESPPLRA

SEQ ID NO: 225085 - protein, 339 aa, unidentified
MELYAGLDLHSRNTYIGIMDKAFNRVFKKRVPNHLEHILQTLAPFRDQIKGFVVESTFNWYWLVDGLMDAGYSSAHLANPSAIKQYEGLKYSDDQHDAFFLAQLLILGILPQGYIYPKKDRPVRDLARKRMFLVQHKTAHILSLQSLIARCCAMKVRANDMRHLTVKELEMWLEEEHLVLSAQANLDSINFLKQKIQGLEKAIIQKVKLNKEFKYLLTVPGIGNILAMTIMLEVGDIKRFPKVGNFTSYCRCAPSRRFSDGKSKGSGNRKNGNRYLSWAFTEAVHLGRRHNERFRRYYNRKVAQANTSLATKALGNKLARICYYIMRDRVPFREELFCH

SEQ ID NO: 225086 - protein, 346 aa, unidentified
MEYVALDVHKNYTWARVENSQGARLYESRLAHGHGTIKNFVNRWSGRSPVAVETVGNWYWVVDEIEAGGGTPQLVNARLAKLMMGNVNKSDKLDCQGMNRLQRTGTLPTVWIPSSSVRDGRELARTRMVLSRQRTQLKNRIHATLGKYGYTVKGASDAFGKKGREIIEELLLKLPPHTQQALRLILDELDHVTDNLKAIEGHMIEIFSPCPQTQWLKSLPGVADIVAVVIWTEIGTIERFNRAEQLASYCGLVSRESSSGGKIRLGPVRRDVNVYLKWAFVEAANSALLNAGRCGYGHISRLYERIKPRRGHGKAKVAVARHLAEASFWMLKKGEPYREPMPSTQR

SEQ ID NO: 225087 - protein, 406 aa, unidentified
MQVVYGCCCGIDVHKKMIVACLNQDGKQELRQFGTMTNDLRKLCDWLTANKCEMIAMESTAAYWKPLYNLFELAELNAMVVNAAHMKALPGRKTDVKDAEWISDLLRHGLLKASFIPDREQRELREISRYRKSLVEERARELNRLQKMLEGANIKLDSVVKNVNGKSSRRLLDQIIAGNSLSEGEVSALLHGSMRKKLDQIIMAIDGIVTPLQRRLLAQVIDHIDDMTRRIADLDTLIPDYMKQYEQAIAAIDALPGIARRSAETILAEIGMDMSRFPSAAHLCSWAGLCPGNNESAGKRYSGRITKGNQMLKTTMIECAKAARNTPDSFFRAQYQRISVRRGKNRATVAVAHSMLIAIYHVLHDGVPFVDLGSDFYAKFNREKKIAACLKKLQDLGWNPTAPVPA

SEQ ID NO: 225088 - protein, 425 aa, unidentified
MDEVDEQELHVERVAALDLGKTVLEACVRVPHESRPGRRMQELRGFATTTSALLAMADWFRCWGVTRVVMESTSDYWKGAYYLLEAEGFECWLVNAREVKNVPGRAKTDKADAVWLAKVAERGMCRASLVHPKPIRELCNLTRYRRSLIRDRTREMQRVEKLLEDAQIKITSVVSDVFGVSGRAILHALIDGQRDPAVLAGLAVGRLRPKTAQLREALRGFFTDHHATILAMMLDNIDRLSAQITALDTTIGDAVDPFAHQVAQLGEITGAGRTAAQELIAELGVDMTRFPSDAHLVSWAKFCPQTRESAGKTKNKGRAKGSPWLAATLGNIAASACRTDTFLGARHRRIAKRRGTQKAIVATGNAVLVIAYHLLADPAVRYHDLGADHYDTRINKHRRARNLATQLQALTGQKITIRDGKAIIA

SEQ ID NO: 225089 - protein, 386 aa, unidentified
MIKKTTQQDFIGTSSVLYLAFELSNKKWKLGFSTGLGQQPRIRTIEAGDFGSLNAEIELARKRFKLPEKFRVLSCYEAGRDGFWLHRNLVAQGIRNCIVDSASIEVNRRKRRAKADKLDANTLVRMLIRYDYGEHRIWSVVCVPSAEEEDRRQLNRELATMEKERTRTSNRIRGLLATQGIRIKGKLDLSDSQLGRIRMWNKQPLPPGLKDRIRREWDRLVFLTQQILALTGERRKVLREEDPTEAAPDIEKIRQLQKLRSMGPVGSWVLVREFFGWRHFKNRRQVGSLAGLTPTPYQSGDTNTDQGISKAGIVPVRRIAIELAWGWLRYQPGSKLTRWYNERFARAGKKARKVGIVAVARRLLIELWRYLETGVIPEGAELKTAL

SEQ ID NO: 225090 - protein, 384 aa, unidentified
MQTVAERPEAPTAIRTDLGAIFVSLELSRSTWLITSLSPGGGEKMSKHVVRGGDVTGLLERFAQLREKTRARTGKVFSFVVIQEAGLDGFWIDRVLQNEGIESHVVDPASIATSRRRRRAKTDRIDGEALVRALLAYKRGEPRVCVMVKAPTPEEEDRRRLCRERKVLIAERIRHVNRVKGLLFSQGISGYEPLRRDRRERLVTLQTGDGRLLPDHLKAQVCRELDRLELLLEQIKAVEAERDVLLAAQQAPAAMLLDIKGIGPEFAAILWSEGLFRHFDNRRQVASYAGLAPTPWQSGSVDREQGVSKAGNPRLRTTLIQLAWLWLRHQPQSALALWFEERVVRNGGRLKKVTIVALARKLLVALWKYVTAGVVIEGAVMKAA

SEQ ID NO: 225091 - protein, 343 aa, unidentified
MDTVTTIGVDIAKSVFQLHGVDARGEVVIRRKLRRRSVLPFFRKLSPCLIGIEACATAHHWSRELSALGHEVRLMPPAYVKPYLKRHKNDAADAEAICEAVTRRNMRFVPTKTMEQQSCLMLHRTRHLFIRQQTSTINAIRAHLAEFGIVAPVGRKGVMELLEMVGNPDDARLPELARSCVAALGVELRMLKTQILEFDRKIVAWHRSNEMSKRLDEIPGVGPALATALVGSIANPKAFKSARDFAAWIGLVPKQNSSGGKERLGSISKRGDRYLRSLLVTGALAVIRYAKIHGTKHRPWLTALLARRPTKVAAIALANKIARMAWAMMTKGERYREPVALAR

SEQ ID NO: 225092 - protein, 349 aa, unidentified
MKFVGIDIHKRYSVCAAQDEQGRKLGVARVEGNTASGFAQFFQGLGDESKAVIEACWNWGKIHDLLVGLPGVVEVQLANPLKTRLIASAQIKTDRIDASALASLLRGNLIARAHVPTKAVRQRKETLRQRLYWVRLRTRIRNRVHALLDRQPKVVLPQCSDLFGVRGLGHLRKLSLPEPDLTLLREDLALMELLNHQIKEQEKCIAADNAQDPATALIQSMPGLGPILASVIAAEIDGIERFADSAHLCSFAGLVPTTHASGGQVYHGGLLWACNKWLRWAVIEGAWVAISCSPYFGGIYRLHRARGKKANVAIAIVARRMCQILCCLLKEHRPYQENPPKPSSPAAPT

SEQ ID NO: 225093 - protein, 328 aa, unidentified
MFYLGMDVAKAKLDCCLLLDEASSKRKTKVVNNTQSGIVDLLAWVAKQNVSPEELHIVMEATGIYHEQAAMALADAGVMVSIINPAQVKDFGRGLAVRTKTDGVDSVVLARYGALLKPKAWVPPPQEARVLQALLVRREAIAQDLQRERNRQEKADATDTPALIHKSLEEGIGFLVKQLAQLQKDIDAHIDKHSNLQKDRALLQSIPAIGPQVGSNILSVMHNHDFGSAEQLAAYLGLVPVERQSGSSVLGRARMSKAGPARIRAVLYMAAVVGTRYNPHVKAVYERLLARGKSKMSSLGAAMRKLVHLCFGVLKTQQPYQHDYLKNA

SEQ ID NO: 225094 - protein, 507 aa, unidentified
MAQQDTSKSVPRAGQIRPAKQMPIVHPHAAGIDLGNKAHFVCVPADSVPPGQSPVRQFGVFNPDLDQMVDMLKQCRVETVAMESTGVMWIPVFQKLEAAGLEVLLVNTKGLKHVPGRKSDMLDCQWIQLTHSYGLLSGSFRPADIICRLRTLMRQRENLVQGASSETQHMQKAMQEMGVHLHVVVSDVTGDTGLRIIDAILEGQRDPEELVKLRDWRVRKSTVAEMKAALQGDWREELLFVLGQSRRVYTFFQEQLAILDAKIIALLAEIPEAPPPPAESWLAPGSDSSGAPEQSAGGERPVSGSADHVSVPAQGKGQSPGRKKGKFKPNGAGNPLPKDVSPQLAKIYGTDLTLIPGLGILGVLIILSEIGADLKGRWRDGDAFAAWMGLCPGSKISGGKVLSSRTPHVVNRAAVLLRLAALAIGRTETCLGLFYRRIKARHGAPKATTATARKLAVLIYHLVTTGQEYQERDLKQYDERARKNRIIRLSRQAKELGFDLVPIEQPA

SEQ ID NO: 225095 - protein, 333 aa, unidentified
MNTAGIDVSHKSLVLSVSKAGKLGKARAFCNDPTGHKALLKALRGAQVERVCLEATGTYHLDLALLLDAEGVALMVLNPKAAKRFAEALLTRTKTDGVDAGVLAQYAERMPFTPWQRPDDAVLALRAVARQIEALKKTRTGARNRRHAMGQSVLTPAAVLDSIERLIGECDAHIDALRAWAHEHIAAHPALEARWRLLLSAKGIGEASAIELLGELLVLPADMAAKQWVAMAGMDPREVSSGSSVNKPARLSKAGNRHLRQALYMPALSAARNDPHIRAFYRHLIEQRGLKKIQAICAVMRKLLHGIHAMFKTGQPFDSARLCPPRPAPAGAG

SEQ ID NO: 225096 - protein, 393 aa, unidentified
MVREAHAVPGRVTRPGAGGMGPCIMIARVGVGLTRVNVDGSPHGSRSSKTVSELGAPSMRSTENPNSRLGVASPHSQGRDMERSLFVGIDVAKDHLDVHAVPTDAAFRVTHDAAGLATLCERLVAWAPTLIVLEATGGHEVTVVAALASAGLPVAVINPRQIRDYARATGQLAKTDALDARILAKFAAAVRPEVRPLPEPQTRALDEAVTRRRQLIEMLGAEENRQRLVRDRRVQGQIEAHITWLKRAIKELDRELQATIRASPLWRDAEAVLRSTPGVGPVMTTTLLAELPELGQLSRHKIAALVGVAPLNRDSGQFRGRRMISGGRASVRRVLYMATLSAIRRNPVIKTFYDRLCANGHPKKVACIAAMRKLLTILNAMLRDGRRWHAQIA

SEQ ID NO: 225097 - protein, 387 aa, unidentified
MTQVDDLSRSFVAFDQNTSLTVVVEMSESSWLVAGMVPGVDRQPLKKLEPDPDALLRLLERWRAEAVKTGRTIERIVLAYEAGRDGFWLARWLQARGIEVSVIHSTSVAVSREHRRAKTDRLDTAMLMRVFVGWLRGERGHCGMVAIPTAEEEDAKRPSRERESLVGERTRITNRMKSALARLGIRGFKPQLRKAPERLAALRTPEGSAIPPNTLDEIRRDMARLAVVREQIKEIEQARLERLEQAPDEGPNAMVRLLARIIGVGVETADMLVREVLSRNLRDRRAVARYAGLTGSPDESGSKRREKGLAKAGNARVRRGLIQLAWRFLMFQKDSALACWYRARTEGPKGARKTTMIVALARKLLIALWRMVTTGVVPEGVVLRQGA

SEQ ID NO: 225098 - protein, 413 aa, unidentified
MSLNHDTAWARPTGGIDWARDDHAVAVVGPDGMARERFAVEHTAAGLRGLLGRLRAAGVNEVGIERPDGPVVDALLGAGLTVFVIPPGQLKNLRGRYGSAGNKDDRFDAYVLADTVRTDRARLRPLVCDSPATVTLRATCRARKDLVAHRVALANQLRAHLQLVLPGAVGLFKQIDSPISLAFLTRFSHQQAADWLSPRRFDAWLRANRYSGKKTGTVLHARLTAAPRGVGGAHGQARAHITLALVAALRALAEQIRALEAQIAEQLALHPDAPIFTSLPKAGQVRAARLLSEIGDCRARFPTADSLACLAGAAPSTRQSGKVKIVSFRWGADKQLRDAVCDFAGDSRNANPWAAQLYNAAIARGHDHPHAVRILARAWLDIIWRCWKDHVPYDPANHRALQRLLAEQQPATA

SEQ ID NO: 225099 - protein, 385 aa, unidentified
MTIQIQAPRFIPRDYDVFGGLDVDKKSMSVVFTDHAGSQRALRMAHQVTPLVNYVRKHFAGQRVAFAYEAGPTGFGLHDELVRRAYTCVVVAPSKVPRAPGERVKTNRLDSRKLAESLRGGQLHSIHVPSGVYRNLRHLVQMRDTHVRQLTSSKLRIKSLLLYEGIPFPEPSEKWTARAMRELQTLPCSETVRFKLDDLLDTLHFHFQAAARATKQIRQYCLDDPELQQSIDLLLSLPGIGWIVGSHLVARLGNPREIKNGRQIAGFLGIVSSEHSTGDKQNRGEITRSGDSRLRNKLIQSAWTAIKRDPELRAFYRRIYQRHPKKVAARKAIVAVARKLTNRIYVVLKEQRPYVIRPDSSIAPLTVAETVGPRERLDAAQNDQS

SEQ ID NO: 225100 - protein, 409 aa, unidentified
MEVVHARCCGLDVHKDTVVACLLVPGSGGRPQAEVRTFGTMTDELLALGDWLAEAGCTHVAMESTGVYWKPIWNLLEGQFALLLANAQHIKRVPGRKTDVQDAEWIADLLRHGLLQASFVPDQAQRELRELTRYRLALVRERSREVQRVQKTLEGANIKLGSVASDILGKSGREILAGLAAGRADAAALADLAQGQLRKKLPELERALVGRFGAHQRFLVARQLAHLDELDGLIAEVSAEIAERVRPFEDAVTRLDGIPGVGRVTAEVLVAEIGTDMTRFPTDAHLASWAALCPGHHESAGKRTSGKTRKGNRALRTALVEAAKAARRTRGTYLGAQYQRLAARRGPNKAAVAVAHSILIIAYHLLKDGGTYDDLGADFFDRRDQDALERRLVRRLEALGNKVTVEKVA

SEQ ID NO: 225101 - protein, 339 aa, unidentified
MQSTTIAVDLAKSVFQIAVSRHPEKVSESHRLSRSQFVRFFAERQPALVVLEACGMAHHWARELGALGHQVRLLPPHEVRSYVHRSKTDRGDAAALLEAHRNERIRSVPVKSLTQQTLAGLHRLRSAWMADRTARINLVRGLLRELGLTIPVGARHVVVQALAQLDKLPEPLRPALSGACAEIREFEARIAAVEKQLRALAQRTPVVERLQTIPGVGLLTATALVALVGDVERFPTSRHFASYLGLTPREHSSGLRRHLGAISKAGDAYLRTLLVHGARSALLAARRHEQPDRLRRWALQVHGLRGHNRTAVALANKLARIVWAVWRHDTHFESRPVSA

SEQ ID NO: 225102 - protein, 450 aa, unidentified
MSPLALDVVTKTDKTPVLGRMLSKYVGRKTSSIENDITKARNHSRQRGNIMRVVFGIDVSKASSEVAILVNGEKVHGYTIPNDAIGFNRLLGDLKTVHDPEIVFEATGVYSRRLQAFFEDNSYAYTRLNPLESKKQLDSLRVRKTDKIDAEKLAASQFILNRKPSYVQEALYQELRDLSRFYQNLTEDIVCAKNRLHKVLQVTFPELENILSAPTGEQYWNLVMTFPCNSFVLESDDATLTAIIRQSTAKRISEKRVTYLVDKLTKLANQSYCAVKKTSPVIEEVKYYAGELLRLSEHRQGVLEEMVTLAQSLPEYEILLSIPGIAETTATSIIGELGDIRRFHSANQINAFIGIDLRHYESGNFLAKEHITKRGNPYARKILFKCIHNIASASHTNPCHIADFYEKRKRQSQVTSTKPHTIASIHRLIRTMYYLITHNKLYDYTSTQNR

SEQ ID NO: 225103 - protein, 415 aa, unidentified
MNSATDLEYAAFVGIDWADRKHDVCLQAAGSSQREFSELAHRPESIVQWVRELRARFAGRAVAVCLELSKGPLVYALQQYDLLVLYPVNPTTLSKYREAFCLSHAKDDPTDAELALEVLVTHRDKVSALYPQSAPMRTLQRLVEQRRALVDDTVRITNRLTDALKQYFPQVLEWFKDKNTIVFCDFLKRWPTLKQAQRARKTRLRAFFHEHNLRYPNIIEQRIQAIVSATALTADAGVITANRLLVEVLVEQLRAVLQAVARFEHEIAQLAPTLPDYALFSVLPGAGPVYAARLLAAFGEQRQRYSSAAAVQMYVGIAPVTERSGKKCWVHWRLQCPTFLRQTFVEWSAQSIMHSFWARAFYEQQRAKGSSHQAALRALAFKWIRILYRCWQARTPYDEAAYLSTLKRRGSPLVA

SEQ ID NO: 225104 - protein, 354 aa, unidentified
MKRARKELQPGDRVFVGIDIHKKKWHVTARTAEFELFSGSIPGCWKALQRILYRYKGHQIYTVYEAGYFGFWLHDHLVEYGAECIVTPPSLIPQEYGNKVKTDRRDSRKLAHFLAKGMLKRVWVPTENERYHRQVTRRRRQLVGDRIRTQSRIKAELKLYGIELPEPDGKWTKIYLGNLGRIRFNNRFMQESFKCLLEQYHFLDGQIVKQTKLLRELSKTELYRERVELLMTIPGIGMIAAMELLLELQNVRRFQRADQLAAYVGLTPSQYTSADKVRMGRITRVGKNSLRATLVQASWALIRKDGVMQEKYDRLKVRSGGKRAIVAVARTLLIRMRRMLLDNEPYVIGLIAAN

SEQ ID NO: 225105 - protein, 337 aa, unidentified
MSYLGIDLHSNSLTVCYRTQQGTEGIKTFALRDLDAFCKTLRKRDRVAVEATGNTRWFVKQISKRVKEVIVVDPNKFEVITKSVNKTDKHDARTLAYFLSKDMLPKARQKDEQTAQLHSLAETRDKLVKQRTALVNKIHNVLNSHGLKWKKETLTSEKGLKSITAMEWEPIVRVELEVLADQIRSLNKNIKTLDQQMIDRGRKLKGHKNLASIKGIGEKSATVLLSVIGNVKDFESEHKLAAYFGIVPRVSNSNETVHHGRITKRGSKLGRTTLVQCTLIAKRYSPYLRRFYERLKLRRGSGKAIIATARKFLVIIYQTLVNDWIFEDFPNFVIAES

SEQ ID NO: 225106 - protein, 353 aa, unidentified
METITRVGVDLAKNVMQIHAVDGMEHVVVRKAVRREHFLSWFANLQPCLVAMEACSAAHYWARRLRALGHQIRLLPPQFVAPYRKGGAQTKNDAQDAEAVCEAAGRPNMRFVPVKSPAQQSVLVLHRMRTGFVEERTALVNRLRGLLGEFGVFLPQGINQLRKHLVEHIEDGNNELNGQARQALMRGWAQWQTLDDEISWLDRQIGDHAKHDSQAQRCMELCGVGTVTASAAVATIVDAAQFKNGRQMAAWLGLVPKQNSSGGKQRLGRITRQGNDYLRSLLFQGARSAVLTAPRRNDRLSRWIVQLQARVGYSRTLVAVANKHARVLWAVLARGERFDPSHAPARHGGAASA

SEQ ID NO: 225107 - protein, 369 aa, unidentified
MSNRSTLSSSLPVVIAVDPHKASWTAAAVDASLRTLATIRVPVSRTGYRDLRRFARRWPQAGWGIEGAAGLGAPLAARLREDDVVAVDVPAKLAARVRMLSTGHARKSDEADAVSVGIAALNAGGLHRVEVDEAISALRAVVEHRDDLVKHRTQTVNRLHVLLVRLIPAGAPTNLSADVAAGLLRRVRPRNPIQATLRALAVELVAEIRHLDRRISTAGEQITTAVAATGSTLTGLYGIGPLLAGKILARVGAVTRFRSPAAFASYNGTAPIEVSSGDVVRHRLSRAGDRQLNHAMHIMAITQLAGDTTGRAYYQRKRADGKSHKEALRCLKRRLSDVVYRQLVLDATAVMAASLGGQQGAALESSAAG

SEQ ID NO: 225108 - protein, 346 aa, unidentified
MLYTAFDVHKRYTWARVERPDGTVVREKRIAHEPGAFRQFLAGSEPGSPVAVEAIGNWYWVGDEVEAAGCTLQLVHAYKAKLMLGRVNKTDKLDAQGLVRLQRAGTLPVVWIPPRALRDMRELPRARMVLVAQRTRLKNRIHATFSKYGIPLPQVADLFGKRGRQGLQARVGELPSHTGFVVSRLLAQVESLDREIAAFEQRTGALFEVDDTIRLLLTLPGVGFILAVVIGTEIGDVSRFGRAEQLAAYAGTVPRVHESGGHRHYGPVRSDVNHYLKWAFVEAANGVCRNRRKHPQRHTSRLYDRVAKRKGYQKAIVAVARHLAEAAYWMLTKGEAYRESGSSKGA

SEQ ID NO: 225109 - protein, 390 aa, unidentified
MLRKNIVQTLDAATSWKVFGLDLAKHDLAVVAIPADGSEVQYVKRYSHADFLEFTAQIPSATMVFEPGNGANHFALRLQAQGHTPKTVSGASVKSWITLHMSGQKTDLNDAYALARLSEDPDLKTVRIKSVDQNRLQSLQAMRKQLVEQRTKTIASIKGIFQCWGILFKKDSRSLKKFKEAANNNKELLGEEVVEAMILQIDRIADLDKDIKHVEELLKKVTMQDPRAQPMLDIPCVGLQTVSRLSAIMGDIKDFETPRSFVAFIGLVPKNMISGNKTTTPSGYEQVGQGKVNRRGDKMARSLIIQCASSMYMNFHKDNFPECALKDWIQKQKDAHKPYGKIMVSLAAKLLRIIYAVLKHGEAFSYEKTGISRSALAALKAAQPAEVGNA

SEQ ID NO: 225110 - protein, 320 aa, unidentified
MTIIAFDISKAELVGVRVNHRAAVKESYTIPNTAESIATFLDAVARYPRLTVASEATAEYHRPLAQACLTRKIPFRLVNPIVTKQLTRVTIRKQKTDLSDAVLIAKAALQGAGNLITKESLDPAKAILRTAVKLGQISGTLLRMERHLCDVVPESTAASEALGLLRDYADTAREALCRVGINRIDPRVIELLTSLPGVGFTLAPVFVSELMPIERFPTQKGLVAYAGLDPRVKQSGVSMKRNTHLTKRGSPMLRRAAYIAASIAQRHDPELKAYYAKKRAEGKRYREATIANARHILARVAAVWRRGTPYVRREISTATT

SEQ ID NO: 225111 - protein, 342 aa, unidentified
MKIVMIGIDLGKNLCSVAGLDEIGAVVLRRRMKRESVLLFTAQLEQCTVAMEACCGAHHLGRQIAGQGHTVRLMSAEYVRPYVKAQKNDERDAEAIAEAATRPTMRFVEIKSEAQLEVQSLHRVRGRLVAERTAVINQLRALLLERGITVPQGRRKVERLLPEILGDERNGLGPRLRRLIADMREEWRGIDRRISDFDHELTERARAEETTRRLMRIPGIGVLTATALVAAVGNARTFTRGRDLAAWLGLVPRQATTGGKPKLLGISKRGNAYLRTLLIHGARTALPGLAKSETPLGRWLKGLLERVHRNVAIVALANKLSRIAWAVLAHDRQYVTIQVAGD

SEQ ID NO: 225112 - protein, 415 aa, unidentified
MALKIVYKICCGIDVHKTFVVACIASTDSNGVTTYECHRFSTYTSGLKNLLQWLLKHNCKDICMESTGKYWIPVYNILENDCTIVLAHPKYVKAIRGKKTDKKDAKWIADLFKHDLVAGSFMPPADIRQLRDLMRYRFKLTCFQSSEKNRLQNCLTVSNIQLGNVVSDTFGKSAQAILDKLLENPADTSFDLEPLVYKSLKKKLPELRDAIDGYITPEQAGKLKVIKAHYENLESRKAELEELILALAAPYQQELAILQTAPGIRSDFTAIGIISEIGTNMEAFPSAKHLCSWAGLTPTNNESAGKKKSVRVSKAGCYIKPLLVQCANAVVASKKHPEIRNRYLRLKKRRGHKKAIIAIARMLLTALYHMLKNGENYNAELYRKSDLPPANWEITVEQAIIIARNQGYKIKSATA

SEQ ID NO: 225113 - protein, 388 aa, unidentified
MSKPFDLSKSLAVLDPDSTLIVVIEMSQSSWLVAARAPGLARDPLKKLPPDPEQLFKLIDRWREESRKVGRVVRRVCVAFEAGRDGFWLARLLRQHDIEAYVIHPTSIPVKRDHRRAKTDRLDTELLMRAFLGWLRGEADHCSMAAIPTLAEEDAKRPTRERESRVNARSRLVNRMKGALARLGIRGFNPKLRKAAEKLEELRTGAGEPLPPNTLAELRRDMAQLRFVADQIKQIEKAREARLEKAPREGAHPMVLMLASIKGVGLETAEMLVAEVLSRKLRDRRAVARYGGLTGSPDESGSRSREKGLARSGNARVRRGMIQLAWRFLMFQKESALAKWFEARTANGPRGVRKTMIVALARKLLIDLWRFVEDGTVPVGVELFDSRA

SEQ ID NO: 225114 - protein, 347 aa, unidentified
MKYVSTIGLDLAKHVFQVHGADIAGSPLFNRKLRRGEVLRFFEKLPSCLVGMEACGGAHYWAREIANLGHDVRLIPPAYVKPFVKRGKTDAADAEAISEAVIRKTMRFVPIKTAEQQADAMVLKTRALLVQQRTQSVNALRAHLAELGIIAAGGLPSVAALMTIVREGEDSRLPAAARFALMAVADQIDTLADQIFKLERAIVTEAKRDEDMRRLTTIPGVGAITAATIKALVPDPGGFKSARHFAAWVGLTPRPHSSGGKERLGGISKMGNPELRVLLVLGATAVLRIARNDDRARPWLKALLARRPFKVAAVALANKMARIIWALLNKGGIYHRPDPLSIAAVAR

SEQ ID NO: 225115 - protein, 314 aa, unidentified
MDTTNEINVGIDTSKTQLDIYIRPLDEFFSVDNNTRGIKEAVKRLKAVRPVRIVIEATGRLELPFVVAAQKAKLPVTVANPMHIRRFAGAIGQLAKTDKLDARIIAHFGAALEPEPTELKPEKVRLVSDLLARRSQLLEMSTMEKNRLSILPKPLHTSLTRHIKHLQTEVKRIEKQLDKLIDQTPMWQEKRDLLMSVNGVGKILTYTLLSDLPELGQLNRRKIAALVGVAPMNRDSGNYTGKRRIRGGRARVRTVLFMAIMSAVQSNPKLKRKYAQLKAAGKTPKVALIACMRKLLTILNVMMKTGTHWNPDLA

SEQ ID NO: 225116 - protein, 430 aa, unidentified
MKSNTQNAKIEAITEKTLVLGIDVGSETHYARAFDYRGIEYSKKPFKFSNTEAGFVTFKEWILDLKERHGKDKVVPGMEPTGHYWFNLGKFLQDNEMKPVLVNPHHVKKSKELDDNNPTKNDRKDPKVIAGLVREGRYMIPYLPDGVYADLRTASNIRFQLQAELTRIQNRISRWFNIYFPEYKTVYGKPDAKSGMLILKAAPLPEDILTLGIDGVNEIWRDAKLRAVGKARAKTLIEAAEHSVGSKEGVVSARMEIRMLLDDYESRNMRLQEVMVLMEELVKEIPMAEKLLEIKGVGIRTVSGFLAEVGDISRFNNPKELQKLAGLALVENSSGKHKGETTISRRGRKRLRYLLFEVAMSLVAKNPEFRELHNYYTTRKRNPLKKMQSLMAIAAKLIRVFYAMLTKGVDYDPKKMVSDIKRPAVYLQAA

SEQ ID NO: 225117 - protein, 366 aa, unidentified
MKKISTVAKRGNEIFKEPKLTIGLDLGDRTSHYCILDEAGKVILEHSLPTTPKGIHQVFSRIPRSRIAMETGTHSPWVSRQLSELGHEVIVAHARKVRLIGESSRKDDRLDAQTLARLARIDPGLLGPVRHRSAKAQIHLTVIRARAALVSTRTALVNAARGLTKSYGERLRKCGTGQMNREIAKGLSQELRDALEPLLQEIESLNERIAEYDRRIEQIAKEVHPEVALLQQVKGVGTLIALTYVLTLDDPHRFRRSRDAGCFLGLRPGRRNSGMSEPQMHISKEGDGYLRTLMVQGAHYILGPFGQDSDLRRWGLKLAERGGKNAKKRAVVAVARKLAVLLHKLWVSGEVYEPLRNNHKVVSAVA

SEQ ID NO: 225118 - protein, 371 aa, unidentified
MESIVYVGMDVHKDSYSICCYKAKEDKFYYEKKVKAETKRVIKYLESVKEIFGEETIFFCGYEAGPTGYGLYRDLEKEGYACVVMAPTSLKKSANQKVKNDRVDARYLAKTLFTKDYSAVNVTTEEEEAIKEFCQMRLSIQTELKESKQKLLSFLLRQGKKYEESGYWTIKHKNWLAKLEFENQLLKEIFNEYMISVNANEQRLKTIENRLKEIAKEKVVKEKVDKLVCFSGIETLTAVTIVSTVGDFNRFSSAYHFSKYLGLTCKEDSSGGRERRLGITKSGSKNLRRLLVESAKSIKKTNLKGKKSRRLLERQQGKDPLVVAYADKCRYRIRHKIAHLELRGKSANVATTAAARELACFIWGMMTNNIA

SEQ ID NO: 225119 - protein, 371 aa, unidentified
MSHVTSIGLDVHARSVSAAAFNLYTGEVVERRFGPEAGPIAEWVLSFESPRAVYESGPTGFALCRELRALGVDCVVGAVSKMQRPAADKRVKNDRRDAAFLARLLATNNVVAVPVPDAGVEAARDLSRALDDARENVQRARQRLSKFLLRRGYVFDERDSLGRRRCAWTAAWWSWVAKIKMPEPAAKAALDHYIEDVRHEESSKLKLEKLVAAEAARPRWAAVVAALRRIKGVDTVTAFCLAAEAGSFSRFRSAPAYAAWVGLVPSEHSSGEKVARGGITKTGNSATRRALVEAAWHFASCSPSPKPPKSGSEAVPADIERRCAKCTARLAARHRALREAGKRPCVANVAVARELACWVWEVGCRAEGTLR

SEQ ID NO: 225120 - protein, 336 aa, unidentified
MWYLGIDLHRLTVVIAGVNDSGEAMNAITIRCEDTDAIRQAVQKLGTFRAVIEASGTYRWLYDLLRPYGSVVLAHPLRLRAMIQRRSKTDKLDAQLLANLLRINQIPLAYIPPEPYQQLRDLTRTRARLVQEQARAKIKLHAVLARQNRQAPYRKPFGKRGLAWFGKQDFGPIENLVRDELVLRLEHYRKQLAILEERMTDLRAAFPQVETLMELYGIGLYSALLIVGELGEVERFHSAKQVAAYAGLTARVNQSGGHCYRGSITRQGSPWLRWILVEAAMKVVREDAALKNFYTRVRKRSSAKIARVAAARKLAEICWKRLRRWQRENVPSAAPA

SEQ ID NO: 225121 - protein, 326 aa, unidentified
MVNVVGIDVSKDSLDVVLVKDGRKQHKVFRNGKVGHRRIQNWLVSREAGQVHACLEATGQYGERISAYLYQCGHQVSVVNPARIKRYGESKLHRNKTDKADAALIAEFCQKEQPNLWRPLPEPVQHLRSLVRRLDDLQNNFQQERNRLLAGERNPWVLADLQAHLDDLQARIIAVRQAIQQHIDQNPDLKSQQDLLTSIPGIGQLTAARLLAEIGDITAFESAPQLAAYAGLNPMGSRSGSSVLKKTRISKQGRAFLRKLLYMPALVARKHNPVIHQFCLRLSQRKLPEMAIVAAAMRKLLHIVFGVLKNQLPFDPDFGKQFDFST

SEQ ID NO: 225122 - protein, 430 aa, unidentified
MKSNTQNAKIEAITEKTLILGIDVGSETHYARAFDYRGIEYSRKPFKFSNTEEGFVTFKEWILDLKDRHEKDKVVPGMEPTGHYWFNLGKFLQDNEMKPVLVNPHHVKKSKELDDNNPTKNDRKDPKVIAGLVREGRYMIPYLPDGVYADLRTASNIRFQLQAELTRIQNRISRWFNIYFPEYKTVYGKPDAKSGILILKAAPLPEDILTLGIDGVNQIWRDAKLRAVGKARAKTLIEAAGHSVGSKEGAVSARMEIRMLLEDYESRNTRLQEVMVLIEELVKGIPMAEKLLEIKGVGIRTVSGFLAEVGDISRFNNPKELQKLAGLALVENSSGKHKGGTTISRRGRKRLRYLLFEAAMSFVAKNPEFRELHNYYTTRRRNPLKKMQSLMAVATKLIRVFYAMLTKGVDYDPKKMVSDIRRPEAYLQAA

SEQ ID NO: 225123 - protein, 342 aa, unidentified
MKLHVLGIDLGKMVFHLVGLDSTGKVVIRKRCSRRQLLIFTANLEVQLIGMEACSGSHFLGRALREQGHQVRLMPAQYVKPYVQSNKSDYLDAEAIAEAVQRPRMRFVPIKTEEQLDLQALHRVRERWVMRRTAVVNQIRSLLLERGLTLPKGRSHVEELLPRILEDAELKLSGSFRVLLAQLGVELGQLGQRIQEMDAAIEQRAREDESCQRLTTIPGIGPVTATALVAAIGNGAAFRKGRDLAAWVGMVPRECSTGGKQKLLGISKRGNVYLRRLFVQGARSVLQYHHKQAPALASWLKQLLARRHQNVVIVALANKLVRTAWAVLCTHQPYRATAATSF

SEQ ID NO: 225124 - protein, 417 aa, unidentified
MTEYAALVAIDWADQQHAVCLLDPSTGEREPAIVKHTPAALQEWALGLRQRFAGQPIAVCLEQSRGPLIYALLQYDFFVLYPINPATLAKYRQAFSTARGKDDPTDADYLLDLLEHHRGRLRPWHPDDEKTRTLRLLVEQRRRLINDRTRISNRLTALLKGYFPQVLDWFEDIRTRLVCDFLERWPQLSLLQQARPATVDKFLRAHHSTSNSTNQRRLTEIKTALPLTRDEAVMTSSVLNVKVLVAQMQTVIAAIAEYDRHLEALCQTHDDYHLFAALPGAGPVHAARLTAALGSDRSRWQSADELLRFSGIAPIIERSGKQFRIRWRYFCPKFFRQTFHEFAAQSIQDSFWARAYYFSQRAKGKEHHAAVRALAFKWIRIIWKCWHTRTPYNEVIYLESLRKKGSSLLKFAVDYQQ

SEQ ID NO: 225125 - protein, 324 aa, unidentified
MKMTQKDYSLVIGIDVSKAKLDIAWGPNGPLETIENIDQEIARLLIKKIEDPVNTLIVMEATGGYESGLVEMLHKSNLSLAVVNPRRVRDFAKGIGLDAKTDLIDAKVIAHYGEVVKPKEHVAKTDSEKKLEALVTRRRQLLDLTNQESNRLKQTRDKEIQKLIRQTIKTLEKQTQTVDRLIAEAVAADQQNARKIEILQSVKGVGAVTVSTFLAELPELGTLNRGQIAKLVGVAPMNNDSGNWSGKRKTIGGRSSVRRVLYMATLTATRFNPKIRAFYIRLLAKGKPKKLALVAAMRKLLTILNTLIKKDELWIDPRTSQATQ

SEQ ID NO: 225126 - protein, 424 aa, unidentified
MNDTQNKKIAQVTDKSLVVGVDVGSDTHYARAILARGYEVSKKPFSFNNTHEGMEKFVTWIYGLAVENKLTKIFVAIEPTGHYWFNLADYLKKYDVKLVMVAPQHVKHSKEMDDNTQRKDDRKDPLVIAKLVPEGRYIEPYIPEDVYAELRVAFNRRCDLVEALNRNINRMIRWFDIYFPEYRNVYGKADAVSGMLVLMRAPLPTDIQALGVDGVCQIWREAKLRAAGINRAKKLVEAAQSSVGLKGGEAVRRELWQLMEEYELLKKQLTDTMQIIEDLLQQIPGADRLLRVPGAGVITVAGFLSEVGDISRFTDPKQIQKLAGLAVVENSSGKRKGLPGISRRGRKRLRWVLFQLARTTVKSNKEMKAYHQYYTTRKENPLKKMQSLIVIAGKMIKIFFGMLKNGKEYDPEIVMKDFKQTAAA

SEQ ID NO: 225127 - protein, 446 aa, unidentified
MSKGAKKSKKGHVSMPLVNLNAAGIDIGDSLHVVAVPSDRDPVNVRRFGAFTEDLENIANWLEECRIDTVAMESTGVYWKNLFAVLIQRGIDVYLVNAKHTRNITGKKDDESDAEWIQKLHSCGLLKSCFLPDDRTETLRTLVRHRRSLTQDSSRYVLRMQKALELMNIKIHTIISDLTGKTGTAIVKAIIGGERNPQNFLPLIDGRIKAKPEAILKSLQGHWREEHLFLLKQCYNLYQHMQSQIELCEREIEKVLQLMANMEDKQPPPQSEGKKPKTKNQPRFNTVSYLKGIHKIDVTQIFGISEISALEILSETGSDLSKWATENRFVSWLNLCPNNKITGGKLISSQLLKKKPNAAAQAFRMAANSLKQSRHWLGDYFRRMRSKGGQKYAIVATARKLAIIYYKMVRFKQPFTPFNLDKYREKYRLARIKYLEKALHQLKHAA

SEQ ID NO: 225128 - protein, 419 aa, unidentified
MSFKILKFNCCGLDVHKTWIYACIGITDSNNRTEYKQARFSSFTKGLNELCDWLAKYNCKDVCMESTGKYWIPVFNILEQHNLWVTLSHPKYTKPMKGNKTDRKDAKWICDLYMCGMVKPSFIPPADIRELRDLVRYRFKLTCMITGEKNRAQNCLTVSNLKLDDVFSDVFGKSSRSITEQILKHPGETFDVTPFVHGRCKTPIEEIQAAVDGAISKEQAVKLRQCLDHIDELNKHISEIEQEILRLSDKYEIALNLIRTVPGFNKNPLTAIQVLSEIGGDMSVFPTAKHLVSWAGCCPRNDQSNQKIKSTRISRAGSYFKPILVQVANALIKSKKHPEFTTRYKRIKARRGHKKAIIAICRMILTAIWHILSDLEPYTPEGFLESRPVKEEKVLSTSQALNLLKQRGYIIKDEPLAVS

SEQ ID NO: 225129 - protein, 343 aa, unidentified
MTEVITIGVDLAKNVFQVHGVDAAGGVVFRRQLRRGQMLPFFKKQRPCLVGMEACATSHHWGREIEALGHQVRLMPPRYVKPYVKRNKNDMADAEAICEAVTRPTMRFVEIKTIDQQSVLMLHRTRHLFVRQRTTLINALRAHLAELGIVAGVGRNGLDRLLKVIEDSEDDRVPSAARDCLLALRDQLEMVKDQILDADRRILAWHRASELSRRLDDIPGVGPLIATALVASIPDPHAFKSGRDLAAWIGLVPRQNSTGGKERLGHISKAGNRYLRMLLVVGALSVIRRAKQVGYTRRPWLTKLLERRSTKIAAIALANKNARTAWAMMAHGTCYQEPVSQAV

SEQ ID NO: 225130 - protein, 400 aa, unidentified
MHLTANISVPQKNFIAIDLHSDNAVICVRRNALNKAGELVGKNIWCGRVSIRDGLDNFIKALLPYCQDFDHVAVVESTYNWYCLADVFEERGWLLRIADPSTVSQANLKASDDRTDAQYLAERLRVGSLKHYLPLSYSSRALRDLCRYRMAMVQDCASLKIKLINLYRNQLSINLRVADLLDRWRNHMQSNYRFDPDILEEFKDPNIRLRVAFEVSRIAMLEEMIEECNAEIQKQCKDQELVKLCKTIPGCGPVLSAVICTEIGTMQRFKSAGDFVSYCRLCSTSKLSNGKSKGLGNAKNGNAYLSWAFTEVAQYASRNPVIREILQRLLRKYGGLRVKAIRTLAAKIARVTFNMLKNKQRFNAAKCFGIELTKSIKKKLPHKPLREDAAVVLPAVAGQA

SEQ ID NO: 225131 - protein, 448 aa, unidentified
MKSRRKRYVGLDIHKDVVEYCILDAAGKKLDGGRIVCEQTVLVNFAKNVLAKNDILAMEATTNTWSVVDILEPYVTKIVIGNPLKTRAIAEAKIKTDKVDAMILAQLLRCDFLPSVWIPDKKTRVLRRLSSFRKSLVQEATSMKNRIKGLLNHLLIKYDVAWTQAGLDDLKTLELPAHERIIMESLVAMLEKFKVEIEKVEVEIRRLAYEEENVRLLMTLPGVDYNTATAVLAAFGDISRFKDADRAASYLGLVPGTRKSSNTCYHGPITKAGSSLARAMLCEATQHLNRHNGPLGVFVRRIIGKKGWCTGMVAGARKLAVLAYHILKNKEPYRYADASRASQKLGRLRARVTGKKKAPRRFSLDEELMANRPQGDDITVRYVPPLSDVYESEALPRAKSYSELPPGEQRVLKEMGLVDHIRANEKVQMIVRPKKKSEATIEETSSTG

SEQ ID NO: 225132 - protein, 309 aa, unidentified
MEHYAGIDVSLECSSVCVVDGSGKIVRETKVESEPAALIGWLGSLGFRLGRIGLEAGPLSQWLYMAMKQAGLAVELLETRHVRDAFKAMPVKSDRNDARGIAQLMRLGWFRPVHCKSMAAQEVRAILTARKLVQSKLLDVENSLRGILRGFGLKVGKTTRKNFAKRIKELVKGHPNLKTIGEALLSVRAVLLGEFHTFEKRVRAMSCLNANARLLMSTPGVGQIVALTYASAIDDPARFRSSKRAGPLFGLTPKKYQSGETDRSGRISKIGDASVRAALYEAAHIMLTKPIKGCSRLKSWAMRIAGAPA

SEQ ID NO: 225133 - protein, 398 aa, unidentified
MLSIGIDVSKGKSTVCGMKPGGEIVYTPFEVQHTREGMSELVSLLRGSGEEVRVVLESTGSYHCPVVAALLENGIFVSVVNSLRMKRFCSQSIRRVKTDQIDAMQIALYGLAYWQELQPTRLPENTYRELQLLARQYYQMTSLLIKAKVDFNALCDQVLPGMQELMNDHAGRHKLSDFVLRYRHTTHILEMGETRFRKDYCKWAEKKGYRNRERMAALIFATAQNGIPVLPNAPSTQIVITEAIRVLHTVEASRDAILTQMQALAKTLPEYSLVREMPCIGDTLAPRLIAEIGDVRRFHSKRALIAYAGIDAPPYQSGKFSANNRHISKRGNRYLRKTGYEVMQSYVMHKPANDPIFTFIEKKRSEGKSGKLAMVAGLNKFLRVYYGKVTELYRSLPQ

SEQ ID NO: 225134 - protein, 346 aa, unidentified
MQHTTIAVDLAKSVFEVAVSQRPGRVAKRQRLTRGQFARFVRESEPATFVMEACGTAHFWGREAQARGHRVVLLPPHAVRPYVLRNKTDGADAKALLEAVRNEAIRPVPVKSVDQHVLGALHRLRSTWMATRTARLNTVRGLLRELGFAIPVGARQVVPHVWALVSDAESTLPEALRPVLAETAREIGELETRIRKVEHQLEGFASQSALVARLRTIPGVGLLTATALVAFVGDVQRFPSGRHLASYLGLTPRESSSGLQRRLGRISKRGDPYLRMLLIHGARSILCHAKKAKGQPDRLRAWGLERERARGHNKAAVALANKLARIAWAVWRNERAYRTATEESDS

SEQ ID NO: 225135 - protein, 461 aa, unidentified
MAESRPPRPRRPRRTSPSVLERINPDAAGIDCGATTHVVAVPPDRDNEPVQSFRTFTTDLQRLADWLVACRITSVALESTGVFWIPIYEILEARGLSVHLVNARHVRNLPGRKSDVSDAEWLRDLHSVGLLRASFRPTAAIVTLRTYMRHRHTLVELAAMHVQRMQKALVQMNLQLPFVISDITGQTGLQIIRAIVAGERDPAQLARFRHGRCRATPAEITAALTGHYRPELLFALQQNLELYDACERQIAECDRVIEAHVRTLTANITPPGPLPAARAARQRIEPAFDVRAVLHHLTGGVDLTQIDGIGASTALKLIAEIGTDMRRWPSAQHFTSWLTLAPKNKISGGKLLSSHTQPSANRAASAFRLAAASLGRTQTALGAFYRRMAARTGKPQAITATARKLAVLVYHVLKGDFVYRDPGADGYDAQQRARQLRQLRQRATRLGFALVSHETGEVLGG

SEQ ID NO: 225136 - protein, 348 aa, unidentified
MTLVGCDLHSRKQQVAVLDTTTGEVLEQELVHEGDAVERFYCALRPPVTIGIETTGYTQWFHALMHRLGHTVLVGEAAKIRAMVVRKTKTDRRDARHLLDLLKHDRFPTVWIPDPATRDLRALLAHRVRLVRMRTMVKNGLQAIALNQRLALRSALWTQRGLAQLHALSLPPHATRRRDDNLELLAWLTTRIDELDDRISATADADPRARLLLTHPGVGPLTALTTVLVLGPIARFPDSKHVVSYVGLAPAINASADKHHLGKITKQGSALLRWVLAQAAPLAARADNDLRRRYFAILHRRGRPKAKVALARKLLVRLYVMLRDRVDYEEFLRRGRASQPSPRMAPVM

SEQ ID NO: 225137 - protein, 421 aa, unidentified
MESENTDYAAWIGLDWGSQKHAICLKPANSEAVEHYTLEQKPQALHGWFMNLIARFGGRKVAIAIEQTRGAVIHFLLCLACVHIFTIHPKSLKNYRDAIHPSGAKDDPTDAELLLQFLTLHQHRLKPWFPDKPEVRLLVRLVEFRRKMVGKRVRLTNELTQVLKEYFPAALDCAGDLDKVMACDFVAKWPTLEKLQESQPETIRAFYQGHGSRRHNVIEGRLKQIRSALPLTTDAPVIEPSVFLVQSIAPQLHSVIDAIAQFDQRIKEVFGKHPDAQIFSSFPGAGSALAPRLLAAMGSDRSRFGSSLEVAQYSGIAPVTERSGKKIWVHRRFACAHFVKQSFHEFAAQSILYCDWARCYYDQKKREGKSHHSAIRALAYRWIRIIYRCWKDRIPYDEDKYVKSLRQRKPAWLQSLPLSES

SEQ ID NO: 225138 - protein, 413 aa, unidentified
MIVGIDVGSEKHYFRAFNWRGIELTRKPVAFSNSMEGFNSFYNTIVELMQKSELEEALVGIEPTGHYWFDLGQFMGEKSIKFVMVNPHHVHKTKELDDNSPSKNDRKDPRVIAGLVRDGRYFYSYMPTGVYAELRNASNRRFVLVEEQTRAKNRLQKWIAVYFPEYKGIYTHIDAKGGLLVLKQAPTPEEIVKLGEEGIIKIWKDAKLRRNGNKKALKILNAAMRSIGLRTGLTEARMEIQDLIEDYELQTKRLERVNDLIKELCQQIRYADKLLEIKGIGITTVAGFIAEVGDITRFDSTKELQKLAGLELVADSSGKHNGKTKISKRGRKRLRYLLFEAAISVVGKNEEFKEIHRYYTTREKNPLKKMQSLIAVACKLIRVFHVILTKGVSYDASKMLEGIRHPGEQLKAA

SEQ ID NO: 225139 - protein, 359 aa, unidentified
MKEDSVFFIGLDTSKSKISVAVADGARNGEVRFFGDISSEPASVTSMVNRLSKRGGKLHFCYEAGPTGYGLYRQIIELGHDCVVVARSLVPRRAGDRVKTNRRDAVSLARLHRAGELTSVWVPDEGHEAIRDLVRAREAANDALKQARQQLQSFLLRHGRIYTGRKPWTRAHVRWLACQGFDHPAHQILLAEYCQAIEDAGVRLDRLTKLVAETAASWSMAPVVAAYQAMRGVAFMTAVTFVVEIGDVRRFDNPRQLLAYLGLVPSESSTGERVKRGGITKAGNTRARRVLIEGAWTYRFPARVSPTIQARLEGLPRTVREIAWKGQIRLCARYRKLGRVPIKGFRFSQDDDSMSLEGD

SEQ ID NO: 225140 - protein, 396 aa, unidentified
MRVVFGIDVSKASSEVAILVNGEKVHGYTIPNDAIGFNRLFGELKTVHQPEIVFEATGVYSRRLQAFFEDNSYAYTRLNPLESKKQLDSLRVRKTDKIGAEKLAMSQFILNRKASYVQEALYLELRDLSRFYRNLTENIVCAKNRLHKVLQITFPELENTTGEQYWNLVMTFPCNSFVLELDDAALRAIIRQSTSKRISEKRVTYLVDKLTKLANQSYCAVKKTSPMMEEVKYYAGELLRLSEHRQSVLEEMVTLAQPLPEYEILLSIPGIAETTATSIIGELGDIRRFHSANQINAFIGIDLRHYESGNFLAKEHITKRGNPYARKILFKCIHNIASASHTNPCHIADFYEKRKRQSQVTSTKPHTIASIHRLIRTMYYLITHNKLYDYTSTQNR

SEQ ID NO: 225141 - protein, 419 aa, unidentified
MPFKILKLNCCGLDVHKTWIYACIGITDSKRRTEYRQARFSSFSKGLKELCDWLAKYNCNDVCMESTGKYWIPVFNVLEKNNIWVTLSNPKYTKPQKGNKTDRKDARWICDLYMCGMVQPSFIPPADIRQLRDLVRYRFKLTCMITSEKNRAHNCLTVSNFKLDEVFSDIFGKSSRSITEQILQHPGESFDVAPFVDRRCKTPVEEIQAAVDGAISPEQAVKLRQCLNHIDELGKHKAEIEREIFRLSDKYEDALTLIRTIPGFDKNPMTAIQVLSEIGGDMSVFPTAKNLVSWAGCCPRNDQSNQKIKSTRISRAGSYFKPVLVQVANALIKSKKHPEITTRYRRIKARRGHKKAIIAICRMLLTAIWHILTDLKPYTPEGFLKQHPLKESKVLTTSQALNLLKQRGYIIKDEAVSAT

SEQ ID NO: 225142 - protein, 401 aa, unidentified
MNPVCGIDISKEELVATILGDNFKETRKFGVHTDELYKLKQWLKENHTTQTIMESTGIYWIPIYASLEASDFKIVLANPRQVKGLPKRKTDVRDSEWLAHLLRSGLVKPSYVADADLRALRSLTRLRAILVQDQAGYKNKVHKVLQLSNIRLDSEITDIFGKSGRIIIEAIATGESLDKALERCPKSVQKNAQSIKASIMGKLSQADLFALKLCMGMVDEFDVKVAEVDSQIVKYVDDEVIGLLCSVPGVGFVSAAVVVAELGDVSRFADEKAVCSFCGITPSIRQSGKRRWNGPITKFGSKWLRRNLIQCALAAIKVRGDSKFKAFYLQVRARRGHGVAIVALARKMLGVMYHLLVKKVAFFEEGLAPKRKWKAILERDLSVGFEEAMSLLVNAGYVNGS

SEQ ID NO: 225143 - protein, 429 aa, unidentified
MQNESIPDARGPVFCGVDTHADSHWLCVLDWRGRRVLSRRFPADAAGYEALAGAIAAAGEPACVAMEGTSSYGAGLTRHLASLGMPVREALSPARMQRRRPGQGKCDEADAERAARAAMSGSRLGTPKSQDGWVDGVRCMLAARSGAVKARTSAINTARSLLTTAPEGLRSRFRGMGGPRLMEELPSVRAEGALGAALGALADLWAAARDAALDMERAIEASLEENCPALLAMYGCGPVSAAKLAVAAGDNPGRLRSEASFAAICGACPIPASSGKTVRHRLNRGGDRQANSALHEIARQRVMRDPETAEYAERARARGKSDREVMRCLKRYVAREAYRALMRPHEVRRPEDASGLVAARRAARVSQVRAASILGTSEKYISMLERGQRELKPIRKAYEAWVEAGLPLDWDRQAFEAERKMDSKKHLAK

SEQ ID NO: 225144 - protein, 316 aa, unidentified
MQAYLGIDVAKRKFDVVLLAGERQRHKVFDNDESGFAALLRWLGDQAGSLHACMEATGGFGDDLALFLHEHQIMVSIVNPLRIKAFGQSEMVRTKTDKVDAGVIARFCRSQSPEPWHPASPRMRELRALVRRCAALKEMRVQELQRRTQGTSSSSVASSVDRTIEWLESEIAAINRTVTDLIRNDEALHRSFELLTSIPGLAAQSAAVLLAEIPDFRAFSHNKQITAFVGLSPQEHQSGSSVRGRARISKIGNARVRAILYMCALSARHHNPILKDFADRLKESGKAPKVVLVAVARKLLVLAYGVMKTQRPFESA

SEQ ID NO: 225145 - protein, 347 aa, unidentified
MLHLGLDLSRKRLDVCVLDERGEQLAVTVAPPDGDGLRELVRRMAAYGGPVHAVIESMTGARFVHDTLELAGWDVDIADAQKVKGLAPLACKTDKIDAWVLAELSRRDLVPAIWLPDPAVRGERERARFRLHLVRHRVMLKNRIHASLMSFGKPCPVSDLFGRQGRATLAGLDLPEPWTENITTALRLIDDLGEEIGGIERELRTQGAHHPYVSLLQSVPGVAWILGYTIASEIGDISRFASPKQLVGYTGLCPRVIQSGEKDWRGPLAKNGPKYLRWALIEAAVHAAQHPIYSEHYQRTKSRLGRQRGAKVARVEVARKLTEAIWHMLQTGSFFSPARSHYVSGRA

SEQ ID NO: 225146 - protein, 412 aa, unidentified
MEVVHSHCAGLDVHKKTVTSALQVPEPSKGWYQETRTFDTMTADLLQLSDWLMQHGVTHVAMESTGEYWKPVFNILEHNFEVILVNAQHIKAVPGRKTDVNDAEWIADLLKHGLLRASFIPPEGQRELRALTRERSNFVRGRSTLVNRIQKVLEGANIKLSSVASNVVGVTGRAILEALIQEGVSPTEMAELAKGKLRKKREQLVKALTGYVKPHHRFMLTELLCQIDALDETIAHFDAEIQRYCAPFEEAVELLDTIPGVAQQTAQVIVSEIGIDMNRFPTANHLAAWAGVAPGNNESAGKRRSGRTRKGNTPLTTALIQAAHGVQHTRGTYLAAQYHRLAGRRGAKRAAVAVAHSILVIAYYLIKRKEPYREMGADYFDKRRPEASAKRLIKRLENLGYRIAVEKTPVAA

SEQ ID NO: 225147 - protein, 453 aa, unidentified
MRQPSSLPQIKPHAAGVDIGAHSHFVAVPPGSDPQGQHVREFEAFTGDLYGLAAWLAACGVTTVAMESTGVYWIPLFQILEEREIQVKLVDPRRMKHVPGRKTDVLDCQWLQQLHSFGLLEGAFRPTGDIVLLRGFLRQRAMLLRCCAQHIQHIHKSLEQMNVKLHLVVSNIVGVTGLRIIRAILAGEREPEKLAALRDHRCKNDVATIARALHGHYRSDLLFGLGQAVELFDIYQGKVAECDREIEAVLASFRDVSKGRTLPPARRKGSGYRNAPAFDARAALFRISGIDLTRVEGIDTSIALTVISEIGLDMCRWPSEKHFASWLGLCPGSKVSGGKVLSSRTKLCANRAATAFRLAAHGLHNSHSALGAFFRRKKAQLGTPKAVTATAHKIARLVYRLLRYGEEYVEVGEEEYERRHRARTLRNLERRARSLGFVLQPEPRGLNLASLPA

SEQ ID NO: 225148 - protein, 344 aa, unidentified
MTDQQHTVGIDLAKNSFYIVVVDKSCRVVEKKKRTRSQLVSYIAQRPESTIAMEACASSHYWARTLTQLGHNVVLLPAQHVKGYSRGQKNDYNDAQAIAEACHHGAIRPVLPKTVDEQDDSTFARIRQQLVHDRTRLANHIRGILAEYGIVLPVGLHILKRSLPEILEDADNQLTYRMRLLLSRQRERLMALDEEVDWYDEQLKQSVEKDSACQRMLAIPGVGDIVAHALKQWMGNGQQFSKGRDASAALGLVPRQHSTGGKARLMGISKRGDARVRSAVIHGARAVVSRASKKDDPLSRWIQRLVEHRGFNRAVVAYANKMVRFAWVCVAKKERFLIRHAAAA

SEQ ID NO: 225149 - protein, 344 aa, unidentified
MSQVITIGLDIAKNVFHAHGVDERGAMVFSRKLTRGKLLDFFASQPRCTVALEACGGAHHWARELQAMGHHVRLIPPAYVKPFVKRNKNDAIDAEAICEAAQRPGMRFVAVKSDAQQAAGLVFRTRDLVVRQRTQLINAIRGHLAEYGWVAPRGMAHMTMLADLLEDEAMASTLPAVARPMFKLMVDLLGELDKQISVLDREIARRAKEDEAARRLMTIPGIGPIAATAIIALAPPIETFGKGRDFAAWLGLAPRQHSTGGKQRLGSISKMGERTIRRLLIIGGSSMVRSACRHGAPAGSWLERMLARKPRMLVSVALANKMARMAWALLTKKEDYRAPAAVAA

SEQ ID NO: 225150 - protein, 357 aa, unidentified
MHEDKDIILVADYHAENIEFRWFNQATGEERTGKFPTSQAGILHLVGQATQELEPGGQVVGILESTTGWARVEVLIGSRAKFVLANVLQMPLPPKARRRKTDKIDTGRLLREYQHGSLPQSFRPAAWWRRVRRLVDFRQDLVERQTAIKNWIGSLLHHETWQNRKNLWSDCGLRRLRAMRLPAEDRMLVDLKLDQLEQLEQELVQVEAQMRQIYDAWPEAQWVDEVRGIGMVTSVSLLAHIGPIGRFPTAEDLISYAGLAPGMWQSDGTCHHGRIGGGGTDSHLRYLLIEATMWLRQIPRYRPTYERVVKKRGKKIARIVLARLLLRSLHKMLSAKVRFNAMPRPTVKETATAGCSK

SEQ ID NO: 225151 - protein, 321 aa, unidentified
METTTAYVGIDVAKEKLDIAVHSSDQQWTFSNSDAGIGRALSYLQKLNPALIVVEATGGIEMPLVAALAVARLPVVVVNPRQVRDFARATGRLAKTDTLDASTLAHFAAAIRPPLRPLPDAHTQEITAVLTRRRQLVEMLTAEGNRLGAARSKAVRRRISAHITWLEKELANVDDDLDSSIRNSPVWREKDNLLQSVPGVGPVLSTTLLAHLPELGSLNRRQIAALVGVAPFNRDSGNFRGKRAVWGGRSAIRAALYMATLVATRYNPIIRAFYHRLCAAGKPKKVSLTACMRKLLTILNAMLKHRTPWHYAGIQTFAPCS

SEQ ID NO: 225152 - protein, 392 aa, unidentified
MYIVGIDIGKNHHEASIVSPEGKQIGRSLRFATTHKGADSLMSFIFKNIGNSPCVFGMEATGHYWYPIYSFLKAKGYTIYVINPIQSDSLRKMYIRQTKNDSIDSFLIAEVIRFGQFGTTSMADENILAMRQLCRYRDSVISSRTEIKLRIGTIMEQIFPEYEKQFSSLWVSTSMGILEKYLTPENIENTPIDELFEIIKDKSHNRLTRAKAISIKEAAADTFGIKIAQDAFSFQLKQLIDRMNFLDKQIEALDIEIMKYYEQFDCYLHTIPGIGIIGAATILAEIGDISRFKNSSSLIAFAGIDPTVRQSGEFNSTHNHMSKRGSPYLRHAIFLAATTCSFHNSPLNAYYKKKRDQGKHHLTATGAVARKLTTVIYAVLRDSKPYEPKKFC

SEQ ID NO: 225153 - protein, 392 aa, unidentified
MVVSVGVDVSKDKHDCFITNSDGEVLFNVFTIANNLDGFNDLCQKIASVMEDVTKVKVGLEATGHYSYNLLGYLIDKGLPTYVINPLHTNLYRKSLSLRQTKTDKVDARTIASMLMSDVNLKSYSDTSYHNEELKSLTRYRFDKVKERAKLKTSVSRLVCILFPELEKLVPTLHMASVYALLSEFPSAKHVATAHLTRLTNLLSKSSKGRYGKDTAITFRDSARASIGSNMPAKSLELKHTIKLIQELDSEIDEIENEIKIIMDEINSPILSIPGINYRMGAMIIAEIGDFNRFDSPDKILAYAGFSPSTYQSGQLDGAYAHMEKRGSRYLRYALYNATKYVCHWDPTFAAYLAKKRAEGKHYNVAISHAVKKLVRVIYHLEKTKQQYIKAA

SEQ ID NO: 225154 - protein, 382 aa, unidentified
MKKDSIAKLQVTKSQIRRMAAKQRLTVGLDLGDRSSRYCILNEAGEKASEDQLPTTKAGLDGLFGKMAPCRIALEVGTHSPWVSRQLAAMGHEVIVANPRKVLLITQSVKKNDRMDAEQLARLARVDPQLLAPIRHRGVEAQGDLAVIRARAELVDCRTALINTARGLAKPMGERLKSCDADSVKESLAEGLSEATQNAIRPLLKSVEEITKQIGAYDKKIQEIGKRYPETKVLKQVHGVGTLIALTFILTLEDAERFARSREVGPYLGLTRKLRDSGESQPELGISKAGDMLMRRLLVQAAHCILRDGAPESDLKQWGMTKVQAGSGKKGSKRRKKKAAVAVARKLAVLLHKLWVTGEVYDPQYNRKAVEAAKGKEKTAAA

SEQ ID NO: 225155 - protein, 325 aa, unidentified
MEKLSGGMDIHREKLAGCIMDENGNITREHIFPFSKDAIERFLTGISSSELTIAIEACGMWRGAYRILTELGYKVKLANPKKTHDIACMKKTDKVDARILADLLRTDYLPEVWIPDERILRLRDLTRHKSNLTRLRTMVQLKIKSYLLRKGTKYGKLWNEKALSKIAEEDCDVGNLVNVYHCLINEEKEVMSRIGKTVRGMKEAALLMSMIGIGEYSSLMILAEIGDIKRFKSPKALVSYSGLCPGIYQSGSTERNVRNNAVNKWLKWIIYECSGRATMLDPMFQKCYYRVKKRKGFQTARRAVARKMITIIWHMLTNEEAYRAS

SEQ ID NO: 225156 - protein, 347 aa, unidentified
MRFYTQQHKHYCGIDLHARMMYLCVMDAAGAVLLSRNIECSPKAFLSAVRSFRDDLVVAVECMFTWYWLADLCAREGIGFVLGHALYMRAIHGGKAKNDRIDAHKIAALLRGGMIPQAYVYPPEMRATRDLLRRRNHLTHKRSELIAHIQNTVSQYNLPPLDQRIDKRCDRVGLLSHFPDPQVQNSIALDVALIDQYDALLPKLERHIRACAKQHDRKSFVLLRSIHGADLILPLVILYEIQDIGRFPRVQEFLSYCRLVKPARESAGKLQGHAGGKIGNAHLKWAFGELATTFLRANPPAQRLHERLKARHGKGKALSVLAAKLARAVYFMLKRGQVFDETKFYQD

SEQ ID NO: 225157 - protein, 416 aa, unidentified
MKSWQDLTHYAGFDWAKDHHAVVIVNSEGRIVADFEFEHSLEGWQSFAQKTSAWSNLAVAIETSQGAAVDQLLQREYTLYPVHPVAAQSYRERKAPSGTKTDHLDAWGLADALRGDGHGWKPLQPLDPLTQQLRLLCRDEVSLIEQRTALVNQLQQALAEYYPAALEAFDDWTDAFTWEFVLAFPTPRALVTAGKRRWEKFLHTHKLWRPETVEKRLKLFAQADQFKASDPIVRAKSQLAVSLCKLLCTLGQQLALYRKQIEALFQDHPDHDLFGSLPGAKKILAPRLLAAVGGDPGRYGSHEVLQSIAGTAPVSYQSGKLSKVHLRWACDKFMRHTVHLWADCFRKASAWGQTYYQQKRDEGMTHACALRCLGQRLLKILFRMISDRKPYDAELHARNQQKHGSWVLKLANKPAA

SEQ ID NO: 225158 - protein, 407 aa, unidentified
MEENRKRYIGVDVHKHYLIALGVDADLNVVLTARRVELSRLELWMKKNLTKQDEVVLEMTTNTWQLYDELIQYAGKVTVVHPPHVALITRSQVMNDKIAASILARLLAKGLLVGIWIPPQEIREARGLVAQRQKMVRLATQAKNRLHAVIQRHHLVPPAGNPFGASNKAWWQCLPLGKLEKVNLQSDLETLQFAEKQVKGMTEIMEEMAAEQKEIGRLLHLAGFGVVVAATVWAAIGDIRRFAEPKYLVGYAGLGARVHDSGMTSRSGKITKAGRRDLRTALIEAANVAANSHPHWKAELARLEPRLGRNKAIVAIARKLLICVWYVLQGKTDKYAEPEAVAQKMLKFAYTVGKANRPKGQTAAQFARIRMDALGLGSELTSIPWGSKKPIPLPPSKIKGRSDVPNK

SEQ ID NO: 225159 - protein, 387 aa, unidentified
MAQVNDLSRSLTAFDLISTLVVVVEMSKASWLVSGAVPGVERQPLKKLEPDATALLRLIERWRNEAVRAGRPISRIALAYEAGRDGFWLARWLIARGIEAHVIHSASVAVSRERKRAKTDRLDAAMLMRVFLGWLRGERGHCGMVAIPTMEEEDARRPSRERECLVNERSRITNRMKSALARLGVRGFKPHLRKAPERLAGLRTAEGTGLPANIIEEFRRDMARLALVREQINSIEKTRAERLKRAPDTGPHAMVRLLARVIGIGIETADMLVREILSRKLRDRRAVARYAGLTGSPDESGLKRREKGLPKAGNARVRRGLIQLAWRFLMFQKNSALAQWYRLQTTDHRGTTRKTMIVALARKLLVALWQLVTTGEVPEGVVLRPAV

SEQ ID NO: 225160 - protein, 341 aa, unidentified
MSNASTYIGVDLHKKTCFITVMNQAGKIKKQTEISTDTDKVAKFFSKHTDASVAVESTMNWIPFYENLESLGCSVVLSNPLQTKAIAAARIKNDKVDSKILADLLRTNLLPTAYIQPREIRDLKELVRQRVNYVEIRTRIKNKIHSVLFKNNLKHDFTCLYGKAGMIWLKELELRDIYRQEMNRYLTTLNLLDKQIAEMSDQIMATAKTDYDCKLLMTIPGVSYFTALVVKSEIGDINRFASAGKLCAYAGLIPSTYASAEKIRHGRISKRGSKWLRKALIDSVTSGSKHPSRLGFFYRKLKKSKGTGKAKVATARKLCTVIFAMLSDKQPFREFVPVKQR

SEQ ID NO: 225161 - protein, 341 aa, unidentified
MTVIIGIDPHKATHVAVAIDGEERPIARLEVVADRCQTDRLLAWAAAFGCERTWAVESADGLGKLLSQQLLAAGEHVVDVPPTLSARVRLLGSTKAAKNDDNDALSTAIAGLRHCELRVVRRDGHATVLRLLVGRYDDLVGLRTQAACRLHALLREVVAGGTGRRIKADRAAAVLRGVRSDDPVTAARKRLAGELLDDIRRLDRDLAAIKHQIGGAVAASGTSLVELHGVGPVVAALILAHVGDPARFPTPARFASYNGTAPIEASSGPRKRHRLNPRGNRKLNHAMHMIAVTQVRHDTPGRAYYDRKLAEGKTKKEALRALKRRISDAVWRQLRVDLNNT

SEQ ID NO: 225162 - protein, 348 aa, unidentified
MQHTPDITIGLDLGDKAHAICVLDATGAIIDKRMITNHVESLRRLAKKYPGARIAMEVGTHSPWVSRFFSGQGLEVLVANPRKLRAIYANDRKSDERDAEMIARIARVDPQLLYPVQHGSEQAQRDLLQVKLRDNLVRQRVDVISAVRFTLKSIGIRLPSPDTAYFAKRAREVLDDQPEVLILIEPSLCVLDEMTIRIRELDRAIEKLCKESYPETERLRAISGVGPITALVFILVIGDVKRFAKARDVGAFLGMVPKRDQSGALDKQLRISKAGDVYLRRLLVGSAQYILGPFGPDCDLRRHGLALAERGGRAAKKKAVVAIARKLSVIMLTLLQQESDYKAIREAA

SEQ ID NO: 225163 - protein, 412 aa, unidentified
MRVIIERCCGLDVHQETVVACLLIGAPGDRPTKEVRTFRTVTRDLEVLRDWLAAAGVTHVGMESTGVYWRPVYAVLEGHFDLIVGNARHIRNVPGRKTDVKDAEWIADLVRHGLIAKSFVPPRPLREMRELLRYRRKLTESQAAERNRLLKLLETANIKLASVMSDVFGVSGRAMLRALIEGRASVEAMADLARGQLRRKRSDLILALEGRMEEHHRFLLAAQLRRLEAIEQDIATLDLRITERLEPYRMPHALLMQIPGVDWLVAAVLIAEIGVDMSVFLSVHHLSAWAGVCPGSHESAGRQQSGRARKGNVHLRTMLVGAAISAARTKGSYLKDKFHRLKARRGAMRAALAIAHKILVSAYHMLAKGLPYRDLGEAYLDQIGQTRTVANLKRRLERLGYHVTLQRTTQAA

SEQ ID NO: 225164 - protein, 363 aa, unidentified
MSMLAEQYEFVIGGDPGRDTVDLAVVDSATGALRAHLADRADGAGYARMLAWADSHAPGRRVWALEGTGSFAAGLAVFLAEAGEDVVEIGGVKRQRGAKNDQIDAARAARQALAREHQTKVRAHGLREALRMIITTRQAILVSRTKAINELKGLIVAAPEQLRSDLRGCSLARQLDRIEAMRTQPEGAVEHRMAVLTLQSIAARVRFLSAQVDELDPELMTLLKQHPAGPALLAEPGVGPVVAAQLLVSWSHRGRVRSEAAFAALSGTAPLEASSGQRTRHRLNPGGDRDLNRALHTVAITRMRCHPETRAYHAKRTAQGKTHRDIRRCLIGGVSRCGPVRAGSCSRYVSGGRPRCLATRWPV

SEQ ID NO: 225165 - protein, 369 aa, unidentified
MVWMPHPETGIKLCHSGDVESTKPEEASMNEVTMIGVDLAKSVFQAHGATATGEPVFRKKLSRGQFLKFLSEHPPCVVAMEACASSHYWGREIMKLGHDVRLIPPIYVKPFVKRQKNDANDAEAIAEAAVRPTMRFVPVKSAEQQSRSMVFKTRDLFVRQRNAIINALRGHLMEYGIIAPPGRNFVKKLAEQIENPDSDLPSIVMELSRVHLDQLSVITDKVVAIERRLKEESKSDPETIRLQTAPGIGPVSAMAIKAFSPPLEGFKRGRDYAAWLGLVPVQKSTGGRQILGKTSKMGQRDIRRLLIIGAMSRVRWAIKNGPPKGSWLEQMLERKPRMLVAIALANKTARTIWAMMTKHEDYRDPIAAV

SEQ ID NO: 225166 - protein, 420 aa, unidentified
MAKRKEKQQRRSVVLEPDAAGIDIGAEEIYVAVPPDRDEESTRRFSSFTCDLHALADWLGRCRIQSVAMESTGVYWIPLFQILEERGFKVYLVNAHYLKSVPGRKSDVSDCQWIQYLHSVGLLRASFRPPEAICAIRTLWRHRGSLLEMAAEHILHMQKALSQMNLQLHHVLSDITGTSGQAILDAILSGQRDPVALAQLCHSRVKSPRDKVAQALVGDYRPEHLFTLKQSLEGYRYYQKLILELDQETARLMQALPSATEDPMPPRTKATAYHRQGNDPQFDLRSELYRIAGVDLTDIPGVSAATAQVILTEIGTDVSRFRNASAFASWLGLCPEKRVSGGKVLSCKTRQVKHRAATALRMGANSLCRAKGYFGEFFRRMRARLGTAQAITATAHKIARILYHVLSTKEPYARNRFPPL

SEQ ID NO: 225167 - protein, 417 aa, unidentified
MNSFCGIDWAEGHHDIAIVDGEGKLVAKKRISDDSAGFTALTEMLAAAGDSFDDAIPIAIETPRGLLVAALRATGRPVFAINPLAVARYRERHSVAGAKSDHADAMTLANILRVDSHLHRRMPADSELVQAIAVLARAQQDAVWRRSKASNELRSMLREYYPAFLDTFAGKSATNLAKPEARAVLAIAPTPAHAAKLIKTRVAAALRRAGRKRGIDGLAVNILEHLQAPQLRQPELVEKAMGRQALALLAMLDAACTGADELAQTAAEEFRKHPDYAVITSFPGLADLTGARVLAEIGDDRDRFADDRALKAYAGSAPITRASGKVTSITHRRIKNDRLAAVGWVWATYAYINPGPLETTTADAETTATATPPPCDTCSIKCSASCTTACKPAKPSTRSKPSDNHAPHPANRQRLDS

SEQ ID NO: 225168 - protein, 324 aa, unidentified
MQTQSIGVDVGKTELVASIRDSDGISAMPALFPNSSVGLKKFLVYLKINNISSDDPILFESTGPYHWRACRTLADEGYFIKVANPLHTKQIARLSIRKRKTDKVDSQNLAFLASQNYGYCFVETEAMAKRKALVRHYWKLRQSATDHLRHDRYMKEYRGINDESVSKFMIKRCEALKKIIVKEWSKGNDVKYLDSIPGITPFLAATILAELLPLERFKTIDQIVAFSGLDPSVKQTGGKAGHHGHISKRGSPTLREALFLAAFGSFQREPMKSIYVRYKGRGLHHNTILCILGRKILRIAVSLLKKRRVFDASKLSTIDDLTGT

SEQ ID NO: 225169 - protein, 462 aa, unidentified
MANEDQKGRPECSKAIDEGFPVLRGNVAGIDVGSEEHWVCAPARTGRGREVAVFAATTPGVEQLAAWLKDRDVTSVALESTGVYWIVPHEMLEAHSFDVVLVDSRWLGRVPGRKKTDRRDCEWIQRLHSCGLLRGAYRPVEQVCMLRTLVRDRGTLIAERADGVRRMQKTLDQMNVRVHRAVANVDGATGMAILRAIVAGERDPHQLATLRDPRCRKSEAQIAEQLTGHWRDDHLFSLRQALKMYDALSDTIAAYEREILRYLETMTSVDRRDDQAPPPTSPTKAQAIKSRGQDPLRHALYRMSGVDLTTIDAVGVETVSVVLSEYGPNLSQFPTEKQFVSHVGLAPHAPRSGGKVVKKKKKPGSASARVGAALRMAATSLRHSQTALGAYYRQVARRAGADVAVFATARKLAQHIYRVLRWGQPYVDEGAAAYDKRYQLARAKRLAATAKDLGYKLIPVEA

SEQ ID NO: 225170 - protein, 369 aa, unidentified
MEERIKFFVGLDVHADSIEVAVAEAGRQPGRRVGSIAHDVAKLLKVLKRYGDSQYVHVVYEAGPTGYGLQRALAKRGYRCQVIAPSLIPKRAGDRVKTDRRDGLRLAELSRAGELRAVWVPDPADEAIRDVARAREDAVKARMQARQQLKAFLLRHELRYPQRTSWTKTFYRWLATLSFQSDGAQTAFTEYWQAVTAADERVGRLSEALVRSIEDWRFEPVVKALLALRGIDHISAIGLVAEIGDLSRFAHPRQLMAYLGLVPSEHSSGERVVRGSITKTGNTHARRLLTEAAWSYRFRARIGYGAQRRAEGLPQVIRDWGWKAQLRLSGRFARLQARGVHTNKVCVAVARELAGFVWAIGRQAQLEQH

SEQ ID NO: 225171 - protein, 311 aa, unidentified
MKELFIGVDVAKDWLDVHHPLRGARRIGNTLTTAREFAASCAKQGAWIIFEASGGYDRVLREALEACGVRFSRVNPRQARDFARAMGVIGKTDRVDARMLAELGARLRPAPTQPVAAARRALQAQATRRRQLVEMRKQEATRLHQTADRHARADITSLIAVLDRRIAKVEAQMAALVQADPEARAIARRLQTAPGVGPIVAATLLAEMPELGQLDRRRIAALAGLAPIARESGKRIGPRSVSGGRPIVRTVLYLAALQASRRCTVFRDFRERLQRAGKPTKAALTATARKLLVTLNAMLATGTDYTVAAVD

SEQ ID NO: 225172 - protein, 422 aa, unidentified
MENTLAKKLKQVPEGYMIVGIDPHKKRHAAVAITQDFTTRDKFKFDNTREGLELLLRRVRTEMMKSGCRGAMFAIETGGHYWRNVAYFLDERGIPFRFINQYTLKRRREGKDLNRRKNDYRDSEVAAQLLCTGEFVESSLPHGIYAELRTAHNAYRRLVRERTRTMNLIKGLLDSLFPEFTLVFKDPCALTALSVLSTCSIPNLIARMTDDEFIATIEANHRGQRLMRMKLRTLRAVATTSIGVAAGVTSVASEIAFLIEKQKLIRGQIRIIESNMVKLVDQTEEGKFLLSIRGLNYIAVAGLLAELGCFRLYRSAKQMIKMAGSNPTESESGGKRGSHTPMSKQGRPVLRYCAWTSVIPMLRFNPDFRAWAKERRERPAHANPLNGREIVGAALNRLLRLAFALVKNRTLYQSPQLTVVTG

SEQ ID NO: 225173 - protein, 425 aa, unidentified
MNYKQNEKINQVKESTLVVGIDIGSTTQYARAFDWRGIELGKVFPFSNSREGFESFKAWMQHLQDKYKKLDAIVGIEPTGHYWFDLGAYLEDEGILLVMVNPYAVKQTKELDDNSQSKNDRKDPKVIAKLVTEGRYSAPYTPDGVYADLRIMVANRKRLIREMTQIKNRFARWFAIYFPEYTDVFGDYEAQSSMLLLKKVCTPEAIVELGAEKINQIWRDAKLRAVGMKRATTLCETAKRSIGLKKGSSAARYEMKLLLEDYEYKKAQLDAVMEEIEKLCRKIPESEQMLAIKGIGVITVAGFLAEVGDVRRFESPRQIQKLAGLSLRENSSGKHKGQTTISKRGRSKLRAVLFNAAIPLIAKNPEFKSLHEYYTTRANNPLKKKQSVIAISCKLIRVFYAILANGVTYDAQKMLSDIHRQPQAT

SEQ ID NO: 225174 - protein, 400 aa, unidentified
MISVGIDVSKGKSTVCILKPYGEIVSKPFNITHTHKDLSELSSMLFRLNDEVKIVMEATGIYHLPVLTYLQEKGFFVSVINPYLMKSYRNESLRKAKTDKIDSRIIANYGIDHWFKMKEFQTSGEIYKELKLLGQQYRHYMKLHLLSLAELTHLLDLTMPGIKNLLASWNETNRKDKRSDFVERFWHYDVITSMSEQEFTEEYILWAKEKKYVPSQEKAKVIYTLAQESIPTLPSETSSVKMLVTEAVRVLKEVDATLGLILSRMQEIAKTLPEYSVVREMGGVGNTLAPKLIAEIGDVRRFRNGKALVAFAGIDPPPYESGQFVGCNRKISKRGSASLRKVGYETMRSLKMRSRPEDPVYRYVVKKESEGKSKKSAKIAGLNKFLRIYYARVTELYKNI

SEQ ID NO: 225175 - protein, 337 aa, unidentified
MERQYVGIDLHRRRSVIVRKNAQGEVLSKVRIDNSPMALAEAVAAAGPEPEVVLEATFGWYWAADVLKELGARVHLAHPLGNAWGNRRVKNDERDANDLVDLLRLGRLAEAWIAPPEIRELREVVRYRLKLVRLRAGLKAQIHAVMGKHGVLPTHTDMFCIAGNAELDKLEFPDAYMARLDSLRDLIDVYDREITELDRRIPKMLVNHQGYRAIQAIPGVGTLLAAVFVAEIGDVTRFPSPDRLASWAGMTPKHRQSDTKVTRLGISKQGSRHVRWAAIEAVSRHHGGGKIKADYRRIAERRGRNVARVAAARKVLTLVYYGLRDGEIRCLAESREG

SEQ ID NO: 225176 - protein, 346 aa, unidentified
MMIIGCDFHPSWQQVSWMDTETGETGERKLVQASGDAERFYRQLPAPALIGMEATGNCHWLVDLLAELGHELWVGDAAQIRASCVRQQKTDRRDAEHIRILLQEGRFPRIWMPSSEVRDLRQLLLHRYKLVTIRARVKNELQHLCLNQGVQRKHKLWSQAGQKVLRELPLKPWAARRREDLLALLAMLDQQIDPLDRAVKEEAQRDKMALLLQTQPGVGAVTALAYVLTMGDVSRFQRGKQVASYLGLIPREHSSGGRQKLGAISKQGNRMLRMLLVEAAQTAVRLDPGLRKEYLHRCHQKPKAVAKVAAARKLAVRLYWMLRTEKPYPEVVRIESSPRVPLVGAS

SEQ ID NO: 225177 - protein, 387 aa, unidentified
MQKLHDNSKASPAAFMQDSTLIAVIELSLSSWLVAGLIPGVSREPLKKLEPNPEDLLKLLHGWRDEAIKAGRLITRIAVAYETGRDSFWLARWLQERGIDAHVIHANSVTVSREHRRAKTDRLDTAMLKRGFLGWLRGERGHCTVAIVPTMEEEDAKRPHREREGLVHEQTRVVNRMKSALIQFGVRNFNPKLRKASVKLETVRTPEGKSLPPNTIAALRRDMERLRIIKEQIKAIEQARLQQFAQKPEALANRMIYLLVRIYGLGLETADLLVHELLSRTLRDRKAVARYAGLTGSPDESGSKRREKGLSRSGNARVRKIMIQLAWRMVKFQPDSALVQWFKQRTENAKGSRKPMIVALARKLIIALWRYANDGVIPEGFRLHSAA

SEQ ID NO: 225178 - protein, 353 aa, unidentified
MEQFIGCDAHKKFSIFASIDEKGEYGPTFRVGHAREVFRAFLKDLPAGSKSALETSGCYYWMVDEMEQARHIPLLAHALTAKRRMEGRHKTNERDARGLAMLLRNGTLPVVWIPPAELRDQREMLRWRMCLSRMRTRVKNRIHGVLQRYNIDIAVSDLFGDGGRVKLLERVDELPPYSRLSLLDQLQMVDTVETEISECEQVLQEMLYPSAERDLLDSLPCVGKILSAVLALEIGDVRRFGGPDRLVSYAGLVPVARESADWKRKDRCPRDCNTYLKWAYVEAANLISMQRKRWPERHVVQLYERVKQSTKMHGKATLAVARHLAEASYWMLRKQEVYQEPNSKRQLLSSTHG

SEQ ID NO: 225179 - protein, 388 aa, unidentified
MIYVGIDIAKLNHFASAISSDGEELIKPFKFTNDNDGFQLLISKLNPLDKDSLIIGLESTAHYGDNLVRYLVAKNYKVCVLNPIKTSTMRKNNIRKTKTDKVDTYIICKTLMMQESLRFVTFYDLDLMDLKALGRFRQKTIKQRIRLKIQLTSYVDEIFPELQYFFKSGLHQKSVYALLKEAPTPEAIASMHMTHLAHLLKVNSHGRFDKEMAQQLRVLAQKSVGASDSSLSIQVTHTIQQIELLDSQLERVEAEMTEIIKFNDSVIMTIPGIRYINGGMILGEIGDIHRFSSPNKLLAYAGLDPSVYQSGNFQAKKTRMSKRGSKVLRYALVNAAHNVVKNNTTFKTYYDAKMAEGRTHYNALGHCAGKLVRIIWKMMTDNLEFNLD

SEQ ID NO: 225180 - protein, 414 aa, unidentified
MLKIVYHICCGMDVHKSFVVACIASTNEQGVTAYKSKRFSTFTGDLRRCAAWLSENNCKDVCMESTGKYWIPVYNILEPTCDIVLAHPKYVKAIRGKKTDKRDAKWIADIFKHDLVTGSFIPPADIRQLRDLFRYRWKLTNFTTGEKNRAQNCLTVSNFKLDDVFSDVFGKAASAITARILEKPTEKITDISGFRTKGMKATDEQVLAAVDGEMCEEQAEKLRIIRSHMDSLELCKLHLDSLILSVGEKYLPQLNLVMSAPGIQSFAAIGIISEIGVDMSVFPTSKHLCSWAGLTPQNNESAGKKKTTRISRAGAYIKPLLVQCALCAIRAKRFPEVRNRYLALKKRRGHKKAIIAIARMLLTAIYNMLKKNEPYIPELYRKADRPPAHREVSVADAIFILQRQGYLVTAPATT

SEQ ID NO: 225181 - protein, 350 aa, unidentified
MVVVGADVHKRTHTFVAVDQAGRKLGEKVVAATTVGHHKALVWARAEFGNELVWGIEDCRHLSARLERDLLSAGQQVVRVPPKLMAQTRASARTRGKSDPIDALAVARAVLREPDLPVASHDAISRELKLLIDRREDLVAQRTSAINRLLWRVHELDPERAPKPRSLDLAKHRELLRAWLATQPGLVAELARDELADISRLTEAINALAKRIAERVRVVSPALLALPGCAELTAAKLIGETAVVSRFKSESAFARHAGVAPIPVWSGNTTGRVRMTRSGNRQLNAALHRIAVTQVRLDGIGRAYYRKRRDAGASKTEALRCLKRRLARVVFHHLHTDHQTRNQPCQTAAA

SEQ ID NO: 225182 - protein, 338 aa, unidentified
MELYGGIDLHSNNSYLGIVDQECRIIYKERHRNELPLILSALAPYKSELKALAVESTYNWYWLVDGLMDAGYQVHLANPAAMKEYKGLKHKDDKKSALWLANLLRLRILPEGYIYPKEERPVRDLLRKRLHLVRHRTSHILSIKNIVTRNLGIAIKSDDIKALTEKDVERLISDECHRLAIMASLSTVHHLTGQVDQIEKTILGRVRLRDEFKGLLRVAGIGTILGLTIMLEVGNIRRFAEVGNYASYCRCVKSIRTSNDKKIREGNRKNGNKYLSWAYVEAAHMAKRYYPAIKRYHDKKAACTNDIVAIKAVAHKLARASYYVLRDQAVFDEKKLFG

SEQ ID NO: 225183 - protein, 422 aa, unidentified
MRCIALDVHRDFCEVALAECGQVRHGPRIETATASLELFAQSLAPDDQVVLEATGSAFAIARILRPHVARVVVANAQEVRAISHARVKSDRFDAATLARLLSADMLAEVWVCDERIGALRRRLARRAALGPAAHSSQERGPRGHLALPAGTSAGQRSVRQGGPALAGRPRPPRRRAGDRRGLSAPDRLPRHRDRVDRRQGRAVRARLARRAAVDDDPRHRRHHRRRARRGDRRHRALCLSRQLVAYLGLDPKVRQSGSEPARHGKISKRGDARARHVLVEAAWTATRTPGPLRAFGERIRTRRGKQIAAVAVARKIATIVWHMLSDGEDYSFARPSLTRGKLRRLERLADAPPGTLVDTRHQRRFRDRERELQQQAESSYRRLVGDWTAARKGAGATTGRASSRPSSRQAARQISEPQRSAL

SEQ ID NO: 225184 - protein, 361 aa, unidentified
MTSMTHDGPRITGGVDTHGLTHHAAVIDSIGRHLADREFEATIRGYRYLLDWMRSHGDLVAVGVEGTGAYGAELARVLTAAGVTVFDVDRPDRKTRRMKGKSDPIDAYAAAMAVLSGRAAGIPKSRDGVVEAVRVLRLARRSAVKARTQAMNQIRGLLVSAPAMLREQVAGLDRAALIRTLARLRPGEDLSRPLAATRGSLRRLARRLQALDTEITELDAEIGPLVKQAAPQLLELFGVGPETAGQLLASAGDNPERMRSQAAFAHLAGVAPIPASSGRTHRHRLNRGGDRAANNALHTIVLTRMRFDERTRAYVERRTKEGLNKKDIMRCLKRFVAREVYRALTTTPTERITQTNLAPAA

SEQ ID NO: 225185 - protein, 310 aa, unidentified
MDAIYVGIDVSQARLDVHVLPSGEAFAVARDGKGLEELIERLRAFSPQLIAVEATGGFETIVAAALAGAGLPLVVVNPAQIRHFAHALGKRAKTDPIDAAVIAHFVEAVKPELRALPDEAQRLLAELVGRRRQIIEMMVAERQREKRAANVRVRKSILRHIRVLEKELPEIDEDIGTLVRGSPVWREKEDLLVSFPGIGNTLARTLLAEVPELGELTRREIASLVGVAPFTRQSGRWKGKSMIAGGRGSARTALYLAALVASRHNPILKAFYMRLLAAGKPKMVALIAVARKILTTLNAMLRDKRKWQSA

SEQ ID NO: 225186 - protein, 315 aa, unidentified
MTTSTVYIGVDIAKKTLDVFHPNKTKKRQSQSVSHDRKGRGKLIKQLRAFPGTHVICEATGGYERTLVTALQDAQIPISVVNPRQVRDFAKSRGILAKTDKLDARVLAEYGQKNEPKPTPPKAPEQVQLEALVHRRQQLVGMKKMERCRLLQAHDMGIKKMIRSTIRSFETQIEKVEKEMAALVERTAPLQAIVKVFTEVKGIGFISAVSLVANLPELGKVNRGQIAALAGVAPLNCDSGKFKGKRSIWGGREEVRQTLYMVALVASRRNPQFKEFYDRLLSKGKAKKVALVAVMRKMLIFLNALMKTHQLQLSF

SEQ ID NO: 225187 - protein, 406 aa, unidentified
MKQIVSVGIDVSKGKSTVCAMIHPNTIIKESFEVLHTVKEMSMLADYIGSLDGEIRIVMESTGHYHLPVAQFLYQKGFFVCVENAYIIRQFSRIMLHGAKTDPLDAKKLAKYGLAYWSELKPYKFHPSCYTELSLLSKQYQTYIKLLIAAKQNVIHLMDEMLPGFKEALDTASSVQFSKVKYVDFAKEFYHVDMIKSMGKEIFRENYKQWCKEKGYRFQSEKADELFHLAEDGIPTLPTEFPSTRLCMEVATEQVSQLGYALEQILSQMQNLAKTLPEYQTIRQMGGMGEKLCVRFIADIGDVRRFHNGKALVAYAGIDAPPYQSGQYTGTKRRISKRGNSALRKTGYEVMKSLKSHPPKTDTRVYDFIIKKENEGKSKKQAKIAGLNKFLQIYYARVMEIYKNIV

SEQ ID NO: 225188 - protein, 350 aa, unidentified
MTKTLGPFASIGIDIGKEVFHLVGFDREGAVVLRRKIKRSALVREFEQLPPSVVGMEACLSAHFVSRTLRKLGHEPRIIPAIYVKPFVKGQKNDYNDAEAIAEAALRPNMRLVSEKTQDQLDLQALHRVRARLVSRRTATINQIRSFLIEQGITVRPRPRALRISLEPILRQRAEEMSPRMQALLAGLYEDWHCLDRRIDAVSDEIEAISKQDEDCRRLMSVPGIGPVISSAIVAAVGAGEAFSRGRDFGAWLGLVPRQFSTGGRTVLGGITKRGSRYLRMLFVQAARVIMMRKKLWPQLSFGAWLEQAATRMNRFKLAVAFANKLARIAWSVLRRNQAFDAHREAIPAI

SEQ ID NO: 225189 - protein, 454 aa, unidentified
MEGDMAKRKAVFELKFPNAAGIDIGSSSHFVAVPADRDDTPVREFPSFTVNLCGIADWLAACGIDTVAVESTGVYWIPLYELLESRGFTVYLVNARHVKNVPGRKSDVLDCQWLQQLMSYGLLTRAYRPTDDICALRAISRQREMLLSYQSRHVQHMQKALVQMNIQLGNVITDVVGDTGQKILRAIIAGERDGQVLARFRNSRIRASEDDIAKSLVGNWREEHLFALKQAMALYDAYAERLAECDQELGSMLARLGWYDADPGKPKRRSHAKNAPRVDVRTYLFRMCAVDLTRIDGIDTTTALKVVAEVGPDLSRFPTSKQFTSWLGLCPGTKITGGKRLSGKTKRTANRAARALKTAAASLLKSQSALGAYYRRMCARLDKSKAITAAAHKLARLIYAMLTKGSEYVDRGQDYFEERYRQRVLHHLKRRAESMGFKLEPVTVAENNFVHSVT

SEQ ID NO: 225190 - protein, 411 aa, unidentified
MKQTQPTQHEVREEADFLQPLSIGCGLDVHSKNIEGCIMAKGQKAALRSFGTITRELRELCAWIVDAKVEAVAIESTGIYWYGIYQLLTEAGIAVKLLNPARVKQIPGKKTDTADCKWLCKLLMNGLVQGSFIPQGPQRQLRELTRLRFKYVNLGSQTENRLLKILERANIKIRSVMSNITTKSGMAITRALAQGETDVEKLVALCKGKLRKKADRMRQALDGLLTDEDRLQLRLLIKDQEYYFSQIDEVERLTESIAKDHFAEPVEIVDSIYGVGSTSAISIIAEIGADMSQFETADKLASWSGLSPGNKESGGKRRNVRTIKGNRYIKPMLVQVAWTAVRAKTTYWSAQFYMLSKRMPAKKAIIAIARKMLKMIHHLLLSKKKYVELGAQGYWDQVKNFAQNRLKPGIA

SEQ ID NO: 225191 - protein, 387 aa, unidentified
MQASSVATPTVEHCGTVFVAIELSQKSWLVTLHSPGRDRISRHKLDGGDHAGLLALIDRERDRASRTAGGVPAVASCYEAGYDGFWLHRLLLAAGITNYVFDPSSIAVDQRARRVKTDRIDGERMLRTLMAYLRGEPRVVRIVRVPAAEQEDARRASRARGRLIKEQTAHTNRIKALLRLLGMAVGNPRRRDWLSWLAAQRDWQGQGVPPGMLSEIRHQHARLILVREQLDALAQTSAEADPAPAAVQMTERSELLLRLKCLGPAFATTLTSEVFYKDFRNRREVASYFGLTPSPWQSGGTDRDQGISKAGNPRARCAAIELSWLWLRHQPESALTRWFRSRTHNNASKRNKRIAIVALARKLMVALWRYLTTGLVPEGALLKAVKA

SEQ ID NO: 225192 - protein, 352 aa, unidentified
MIIIGVDFHPEFQQIASVDTDTGEFQEKRLGHREEAESFYRALAGKKVRVGMEASGHARWFERLLAELQFELWIGDAAEIRTKRVRKQKTDRQDARLILQLLLEDRFPQIWVPSWENRDLRQLLWHRHRMVQARTRIMNQLQAVALNEGLRCKKRLWRERGRQQLESFRLAPWASRRRRDLLELLDRLNPTIAELTQAIEQEAEKCPPAQRLRTHPGVGALTSLGFVLIIGEAERFSCGKQVASYLGLVPLEDSSGNRRRLGHITKQGSSILRFLLVEAAQVTVRSLPEWRRKYFHLAMRRGRKIAKVAMARKLAVGLYWMWRKGWNYEQLTKFGSHAGQPGNRHGVQSNTE

SEQ ID NO: 225193 - protein, 343 aa, unidentified
METFVGLDVSLGETSVCIRDKDGTRIFEGKVASEPAPIARLIRKRAPGVVRVGLESGPTSVWLTHALTAEGLPVVCLDARHAHAVLSVQINKSDLGDARGLAEMIRVGWFKAVQVKSLNAHERKALLIARHQLVDMRVRIDNQLRGILKTFGLVIGKCGRGQIGQRAQELSKGQPGIDGVVASMVAVRDSLLEQIIVCDRAIRRLAKKDDTARRLMTVPGVGPVVALAYISVIDDPKRFTHARDVGAYLGLTPKRYQSGEVDLAGRISKCGDGFARTCLYEAAGVLLTRAGRWSPLKAWGVRLMKRIGATKAKVAVARKLAVILHCIWTDGIEFWWTKEAATA

SEQ ID NO: 225194 - protein, 405 aa, unidentified
MSELGKGLVFAGVDTHKDTHTLCLLDHMGRAIGTFRFAADAKGYDALAGKIGGPATCVGVGVEGAGSYGAGLTRRLLELGYCVYEVMVPGRARRKPGRPKSDPADAEVAARQVLARANLSKPKDQSGWTEELRQLMIARDRLVQATSAMINAAKSLIVTAPEDLRRSLEGLSRKNLRSALSTLDPAAGGIILALGSLGKAWDLQDREADAIEERMKRVLEANAPALLAIYGCGTVSAAALAVAGGGNPERLKSEAEFASLCGVAPLLASSGKTERHRLNRGGDRRANRALYQIAVTRMSYDRRTKDYVGKRKRDGKSKKEAIRCLKRYIAREVFRALRNPLEIKGPSWKDLRPARQALGITLAEAGKALNVGFQRVSYAETGRLMNVRFLEEYDAWLKSQAKRES

SEQ ID NO: 225195 - protein, 355 aa, unidentified
MTSIKYIGMDVHMESISICVRNSVGKIVMECVIETKASTLLQFLDGLRGDLRVVFEEGTWATWLYDLMKPHATEVLVCNTRKNAVRKGSKGDRIDARKLSEQLYMNNVKSIYHGEHGLRMMKELARSYLTITKDLTRVMNRLKALYRSWGIPCAGNEVYAPRYRAEWLAKINEAGVRRRAEHYYQQLDVLRPLRQEVRRDLLVESRKHKIWKLLRLIPAIGPIRAAVLIAVMQTPQRFRTKRHLWTYSGLGLETYDSAEYRAVQGQLERSRKQATVRGLNKDYNHDLKDIFKGAAMKASTATGPLRDFYENLLAKGRKPTMARLTLARKIAAITLIVWKKEVRFDANYLKPQQAA

SEQ ID NO: 225196 - protein, 348 aa, unidentified
MTLVGCDLHSRKQQVAVLDTRTGELVEQELVHEGDAVERFYRALPPPVTIGIETTGYTQWFHALMHQLGHTVVVGEAAKIRAMVVRKTKTDRRDARHLLDLLQHDRFPAVWIPDPDTRDRRALIAHRVRLVRMRTVVKNGLQAIALNQRLALHSALWTQRGLTQLKALALPPHTTRRRDDSLALLAWLTTRIDQLDAHIATVASADPRVQLLLTHPGVGPLTALTTVLVLGPLARFPDSKHVVSYVGLAPAVNASADKQRLGKITKQGNALLRWVLGQAAPLAARADDELRRRYFSILHRRGRPKAKVALARKLLVRLYIMLRDQIDYEEFRRRGQAPRPHPLPVAVM

SEQ ID NO: 225197 - protein, 357 aa, unidentified
MRFYTKQHQFYCGIDLHARTMYVCILDHHGEILLHRNMPARPETFLKAIAPYRDDIVVAVECIFTWYWLADLCARESIPFVLGHALYMKAIHGGKAKNDKIDSHKIAVLLRGGMLPQAYVYPAAMRATRDLLRRRMHLMRKRAELLAHIQNTNSQYNLPEIGKKLAYKGNRDGVAARFLDPAVQKSVEVDLALIDHYDRLLRDVELTIVQTAKQHNAQALYRLQSVPGIGKILSLVLLYEIHDITRFPRVQDFVSYCRLVKCAKESAGKRYGTLGKKIGNAYLKWAFSEAAVLFLRNNPQGQKWLARLEKKHGQGKALTILAHKLARAVYYMLTRDTVFEMDRFLNGYGSRVGEPAA

SEQ ID NO: 225198 - protein, 420 aa, unidentified
MEAITAKTLIGGIDIAKKVHWARFVDYRGIPIGKAIRFENNKAGFEHIVAETERLRKAHGMDYVLLGMEPTGPYWKALAWRLKGLGLRVVTVNSHHTKQDKSLDDNSPTKNDKKDALVIARLVKDGRYFEPYLPEDVFGELRVSSNTRIALMKRMNGVKNRVMGILDEYFPEFTDVFRKPLKGKASMQILKSCPFPVHILELGVEGLLAEVKKAVKKTVGKKKVSALLEAARDSVGVGYGLESARMQMKMLIKELEFLQKQLEEAEARMKVLLEMTGYAELLLGIDGVGVVSAASFLGEIGDPLGFDSPRQISRMAGYNLVENSSGQSKSGTSISKRGRKQLRALLYRMAMVMVSKNSELKLLYHHLKTRRDNPLKGKQALVVVSKKIITIIYQILKTRKAYEPALVLGAVRKQQLGLAA

SEQ ID NO: 225199 - protein, 341 aa, unidentified
MESTRHIGIDLHRNCFTACIRLENGRNYLTEWKLEQLPKFVAKLRPSDEIAVEVTGNTRLFHDAVAPHVQRVVAVNASQFKVITHSVKKTDPNDARNLALYLAKDLLPEVRMKDKTRAQIASLTQTRDTMVKLRTALKNKINNIFSAHGINLSKESLASEKGLKTVLEMHFDVLVDVELKILVDQIRSLNKSIAELEETIGRESQKLEGHKNLTSIKGIGGLSAGILLSIIGDIRDFADEGKLAAYFGIVPQISNSNETQHSGRITKRGTKLGRTTLVQCALIAQRFSPYLKQFYEKKKSRGTGKAIIALARKFLGIIYRTLKNRWVFADFPNFVLAEETA

SEQ ID NO: 225200 - protein, 338 aa, unidentified
MQTVIRMGLDIAKNAFQVHGVNAQGKVVVRKQLSRGEVRRFFANVPACLVGIEACAGSHYWARELRALGYDARLMAGQFVAAYRKNGKNDANDAEAICEAVGRPNMRFVPVKSEEAQAVLTVHRARQLLVAERTALGNQIRGLLGEFGIVIAAGLAPLRHGLGRIGTGHRALPVLARETVGELHDRLRLLDARITQYDRKIEALARASEPARRLMRVEGIGPVTATALVASVGNARAFKNGRQFAAWLGLTPSQYSSGGKNRLGRITKRGNVDLRTLLIHGTRSLLRLTAKRRDRKSAWVEALKARSGANIAAVALAAKHARIIWALLAHGTEYQPAI

SEQ ID NO: 225201 - protein, 388 aa, unidentified
MEARTVNALPPAAADHAAIRCLLAIELSKKSWVVAINTPLADKISRHTLPGCDWTGLLELIRRVRTRVVRELGRPVEMISCYEAGYDGFWLHRLLEGQGVHSLVVDPASVQVDRRARRAKTDRIDVERLLRSLMAYLRGEPKVWSVVRVPSVAEEDDRRLHRERDRLIAERIQHVNRIKGLCAIHGIYDYQPMRPDRTRRLEQLRTGDGGALPPRHKAEIARELQRMELVLQMLKEIDAERNAIASARMSAHTNAKKIQDLVKLKAIGPEIATVLTGEVLYRPFNNRRELASYVGLTPSHFQSGSTCRDQGISKAGNPKARTTMIELAWLWLRHQPDSAFSVWFRERVGNLKGRIRRITIVAMARKLLIALWRYLETGVLPTGAVLKV

SEQ ID NO: 225202 - protein, 403 aa, unidentified
MTANDESGQVYGGVDTHEDSIHVAVISSLGHDLADQEFPTTPAGYRRALAFIASHGDPIAIGIEGTSSYGVGITAEAVAEGLLVVEVIRPERAERRRLGKSDPIDAYQAARAALGNHRIAPAKDAAALEGIRALHNARRSAMKARTGAMRQIHAQLITAPSVIREKYRDMPKEKRLTVLARMQVPANRTPVERAVLLVLKTLAQCCNELAREHVRLGAELDQLVTAANPGLRAAYGVGPDTAAQLLLTAGANPDRLRSESAFAALCGASPIPASSGKVTRHRLSRGGDRGANGALYRIALVRMSSDPRTKEYVARQRDAGFSSRDILRKLKRAIAREVFRLLTTPVTVPGVDDLRPLRQAKNITLTAAANQLGVWPTTISELERGIRRNDELAQTYRDWLAAA

SEQ ID NO: 225203 - protein, 342 aa, unidentified
MAVYYVGADVHTHNTELAVEHNKQIIKRFSVPTTIPTIRSVLQELGGRCHLTFEEGPMAGWLYRNLKSDVESITVCDPRRNKLIACDGDADDVIDSGKLAALLRGKFLRSVYHDHSSKRLELKQWVKLYHDFVKSATRNINKIRGCCRGEGIRIPGRAIKAGACRQQWLDGLENRVLAEQVSLLWQGYDTTASQCRAAKKQLERRIRGNSVLQKWSELAGIGIIRATTIYAYLDTPWRFRKRNCLWKYCGVGLEHSASGKDAKGRPRKGTLELAWRVNKMLKNAVMGAAISAVRQKDNEFAYYYERMLENGITPGNARHSVARKMVTVLWGIWKQQVREQKN

SEQ ID NO: 225204 - protein, 351 aa, unidentified
MIIIGVDYHPSVQQVAFVDTQTGETGERRLKHSDGEAEHFYRDLQRRQVEVRVGMEATGHARWFERLLAELKFELWIGDPAKIKAARVRKQKTDRQDAQLLLRLLVEARFPRIWVPSPENRDLRQLILHRHRLVQMRTRAMNQIQATAMNEGMRRKKTLWSKTGRKQLESLTLPPWSTRRRQDLMELVDRLDSAIGELTAAIEQEARQRPKVLRLMTHPGVGPITALAFVLVIGSPDRFACGKQIGSYLGLIPCEDSSADRQRLGHVTKQGSSLLRFLLVEAAQAAVRWDTDWRRRFVHLAMRRDRRIAKVAMARKLAVSLYWMWRKGYDYQQHLKFGSHAGEPGYVHGVK

SEQ ID NO: 225205 - protein, 349 aa, unidentified
MHYVGLDVHARRSSLCILDPVGKVVKRVEVRGSWPKLMEQVAAQVPRPFAVCFEASCGYGYLHERLSALARRVAVAHPGKLRLIFRSKRKNDRVDAEKQAKLLYLDQVPQVHVPSADVRAWRGLIELRRKLVGRRTTVKSQLRALLRGAGACDAPAGKALWSKKGLKWLGAVQLCEADALRRDLLLEELAQADERIRRVTAELGRRADAHPGVALLRTVPGVGPRTAEAFVAYVDDVRRFARTKQVGCYLGLVPCQDSSAGKDRLGHITGDGPASVRMLLCEAAWQAVRRSPTMRAFFERVTHGEPGRKKIALVAVAHKLARSMAAMLRTGEAWREDGREDGRGQNPEA

SEQ ID NO: 225206 - protein, 382 aa, unidentified
MKGNVCGLDVHKDNVFVCILKENGEKILQRVGILTPELDALRDMLVSHGVGEVCMESTSIYWMPVWRVLESDFHLWLVNPLAIKQLPGRKSDVKDAEWIATCLKKDLVRGSYVPEEVIQQLRQYNRRVFDINKETVFLHNKLDAALQRCNIRLSNYVSNVDTKAYREVVEDLSKGVTDPGTLLGHIHKRTKNKWGEDVLRSALTGVVSEVDTELIGMYREELELLRTQKAKCLSRMREICQKHFPKQMKDLQTMPGVREQSATQIIAEIGVDMRTFLTAAMLVGWAGFKPRNDESNKKLKSRSITHGNKYLKKLMVECAWGGTRTQGCFYSQFSYHQTQVRKKNAMKVRVAVARKQLVGIWHILSEGCTYKEYSEKKEEGKS

SEQ ID NO: 225207 - protein, 405 aa, unidentified
MLEAMVNSCAGLDVHRRQVVCTLIRGATRTTREYPTFDRELKEMAYWLSREEVKLAVMESTGIYWKAVYSCLERAGIEGRVVNARHVKQVPGRKTDVCDSEWLAELAQYGLLRSSFVPPVDLRQLRLLTRYRRKLSGMLSGEKNRLHKVLDDAGIRLGCVVTDIDGVSARAMVEAIIEGGSSPEQIAEKALGRLKVKKDVLQLALEGEISDRHRLVLQKMLGHVKWLQRQIAMIDGQIVAAMKPYQEEWKLLQTIPGLDVIAAAMLIAEIGVDMTRFGSKDRLCSWGGMCPGNHESAGKRKSGKIRKANPYVRTLLVEAANSARKTQSQFQGLYKGLVIRRGHKRAVVAVGHRILQIAYIVLSRKEPYKDPDIDYEALVVHRNAPRWLAALQKYGYLSSVKSQVK

SEQ ID NO: 225208 - protein, 338 aa, unidentified
MKHIGMDLHSTTTDVCVRNGRGKIVLRGQIATTKAELEKFICSIQGLKRVALEESQMADWVTRILKPHVDEVIRCQPQFNKLISESEDKCDKTDSESISELLYLNRLKRVHHPELVYRTLREAVRAYWIASRELTRAKNRVRAFFLFNGPRETGNTIYAVRNRSGNLAKLEKLGGNARLARLLYERMDHCRQLKAKHILILRESAQPVKDSVRLLMTMPAIGPISAYTLVAYLEDGRRLPNKRKLWRYTGLSLRRHQSGGIGTEGASHSGNRMMKQVAMSAAITIVARGESNALSALWEKDIRRQVDPKRARRNLARKMVVIAQHLLRSKQEYSDERV

SEQ ID NO: 225209 - protein, 436 aa, unidentified
MEAGILQAEGEGEVVVHAALELSRSGWLLAVQGPSDGRPSHHKIAAGDAKRVLHLMAQARCASARRLGHDHVRVASCYEAGYEGFWLHRVLVAAGVESFVVDPSSLRVDRRAKRRKTDRIDVETILRALIAWRHGARDECSMVVVPETAAEDERRLSRERGRMVQERTAHVNRIKGLLMTVGIYDVAPLAADWRARLAALVTGDGRPLPPRLAAEIGREIERLVVLQEQIAIVERERDGRQGEQRAGTQAAGQATDPTTPRGRIAQLQKLRAVGPETASVLQSEVFYRHFDNRRQVASYVGLDPSPWSSGTTMREQGISMVRQAHHEGRQPARPARPHRARLDVAPLAARERARHLVPQAGRRRQRPRPANHDRRPRPQAPHRRLALPRIRRRSDRRRRPRVNAGRSRQRPTRLSHRRGCWRSCLFQGRQTDRKTE

SEQ ID NO: 225210 - protein, 400 aa, unidentified
MGQPLWAGVDAGKSDHYCVVIDADGKRLLSRRVANDEAALLELINAITALADGGELTWAIDLNAGGAALLIALLIGAEQRLLYIPGRTVYHASGGYRGEGKTDAKDAAVIADQARMRRDLQPLRPEDDIAVEQRILTSRRTDLVTDRTRAINRLRAQLLEYFPALERAFDYSASKAALILLSGYQTPDGLRHAGAARLAAWLRKRKARNADAVAAAAIEAAKSQHTVIPGQQLAAAMVARLAEEVMTLDTEIGDTDAMIEERFRRHRHAEIILSMPGFGVILGAEFLAATGGDIAAFGNTDRLAAVAGLAPVPRDSGRISGNLKRPRRYNRRLLRACYLASHIAIRTDTASRIYYDRKRAEGKRHTQAVLALARRRLNVMWAMVRDHKPYQPTAPNGAAA

SEQ ID NO: 225211 - protein, 437 aa, unidentified
MSDKKPVELRVSVDVGYRRHSVAIGLPSGEVLEEFEISHRPEGFEQFFSRIEKHQKVRSCEVAVAMEGFNGCARPLDRMVRRRGYRLYNINNLKLARFKEIFPGAAKSDRIDARKGLELFQLSDHLPLAKEVLQEVKGTPQENEVLKRLTRRRRRLVDEGVRVISNLQTDLQAVCPGLLEITKNAGNQWFLNFLISAPSLPQLARLRPSTLLKIPAVGRKYASLIEDWQKRAHFSEEVKWVSEMIQEDAQRCLDLDEKIKSLKAKIKEVAKESKIAKILLSIPGFGTICTAELAGEIGTIERFLKEGSLALYLGMATLDNSSGKYQGSKQPKHVNTRAKAAMMIAIDRHRKYVPESQRYYEKKRSEGKKHNQAIRALGRHLSRIIYKMLTEEREYEMRPEKGNTKTKVRSRSCVKTQIRKPKISAKGKKNNIYQQST

SEQ ID NO: 225212 - protein, 454 aa, unidentified
MPHRPKKKVQTQPVVFQPDSAGVDIGATELFVAVPPDRAEESVRSFNTFTEDLYALADWLTACGIKSVAMESTGVYWIPVFQILETRGFEVCLVNARHVKNVPGRKSDVLDCQWLQYLHCVGLLRGSFRPPDQVCALRSYLRHRDMLVKTGARHVQHMQKSLTQMNLHLHHVVSDLTGVTGLAILDAILTGERDPQKLAALRDRRIKASEATIAKALVGDYRPEHLFTLQQALALYRVYQSQILDCDRAIERHFGSMESKTSQPTPAPVGRQRKKPERNQPQFDLRGHLHRILGVDLTALPGLSTINVHTLFAEIGGDLSKFPTAKHFSSWLGLCPDHRISGGRVLSAHTRTVKSRAAYALRMAAYSAGKSYSALGDYFRRMRARLGAPKAITATAHKLARIIYHLLKTGTAYDDTVFARNETRYQQRREHHLRQQARDFGFTLVPLPQSQEVS

SEQ ID NO: 225213 - protein, 346 aa, unidentified
MKFYTGQHQFYCGVDLHARTMFLCVLDGRGYPLLERNIKTDPELFLKNIAPYREDVVVAVECMFTWYWLSDLCSREKIPFVLGHALYMKAIHGGKAKNDRIDANKIAVLLRGGMFPVAYVYPPKMRSTRDLLRRRMFLNRKRSALITHIKCTFAQYNLPEPEQKISRVAHRNGIAEQIPDPGASRNVQLDLDVLSFYDTTLTKLEQELTVIAKDHDPDAYFRLRTVPGIGKILSLVILYEIHDINRFPSVQDFASYCRLVKPAKESGGKRLGSGGAKIGNVHLKWAFSEAAVLFLRKNEAAKLYRARLVKRHGKAKSLTIIAHKIARAVFFILKRRTVFQPEIFFA

SEQ ID NO: 225214 - protein, 369 aa, unidentified
MIYVGIDVAKDKHDCFITNSDGEVLFKAFTITNNLDGFNDLYQKIETVMKDITKVKVGLEATGHYSYNLLGYLIDKGLPTYVINPLHTNLYRKSLSLRQTKTDKVDARTIASILMSDVNLKSYSDISYHNEELKSLTRYRFDKVKERAKLKSSVSRLICILFPELEKLVPTLHMASVYALLSEFPGAKQVANAHLTRLTNLLSEASKGRYSKDTAITFRDAARTSIGSNMPAKSLELKHTIKLIKELDSEIDEIENEIKIIMDEINSPILSIPGINYRMGAMIIAEIGDFSRFDSPDKILAYAGFSPSTYQSGHLYGAYAHMEKRGSRYLRYALYNAAKYVCHWDPTFQLILLKNEQKASITMLPYHML

SEQ ID NO: 225215 - protein, 428 aa, unidentified
MSNQEIIRRRQYCQIVKEITGSDQHLVVGIDVAKEKHHAFMGTATGKSLFRKLIFENNIDGFSRLLKTAEEIKSQNDLSKIVYGLEPTGNYHKPLARHLIRCDCNVVLVTGQAVKNNRQLLDGRWDKNDTKDAANIADLVSRARCLYYDDPSPGIIELRSLLSLRRKLKREEHGLRMRIRNNLLAQYFPELDRFYSACESESLAIVRWCLNPDTTAAMEFGEFFQMVTRTRRGSAQMLRLRKIHQQAVESIGCPMGPAAEYEADLLVEKLRQVRQQVQKTNDLIEDFCLEFSEYSYLLTIPGFGPYISARVLASIGDPFRFENRKQLIKLAGYDLCANRSGKTSDKAIPVISKKGSGELRYALYQAANVAAAKVDLFRTYFTRLLRGRERERGIKTKMRVKLAVKMLVIAWTLMKKREVFDPAHLNIK

SEQ ID NO: 225216 - protein, 321 aa, unidentified
MAMLSFCGIDVSKDRLDVMVLPGRQSFAVRNDAAGWAELIARLRGLTIAAIGLEASGGYERGAIRTLLAAGLPACQVNPFKLRQFARASGVLAKNDPLDTRMIASFVAIMPTRPAQPRPPAIERLIEMLAVRRQLNAEKVAAENASRLLEYAMLQRLSRRRIARLAADIDRLDRRLVEITASDAALAHRYRLLASMPGVGLVLACTLIAQLPELGTMSRKQVAALVGVAPYAFESGKFKGRRCIWGGRAPVREVLYMAAMSASNWNPVFKAFHKRLKAAGKLPKVAIVAVMRKIITTLNAMVRDDVVWADHLHGRHIVPTA

SEQ ID NO: 225217 - protein, 359 aa, unidentified
MHATKFGVVVHSQRTIVGQYVALDVSLQKTAVCVLNVSGRVFIEADVPSEPAALIAFIQTHAPRAARVGLESGPTSPWLWHSLKAAGLPVVCMDARHAHAALSVRPSKSDRNDAHGLAEMVRMGWYREVQVKSLAAHERMALLGVRRRLVDMRVEIDGQIRGILKTFGLVVGSGNKGAFAQRARMLAQDHPVLSALIDKLIEVREVAVAKVAALDKEIRRFVRDDLTLRRFMTVPGVGPVTALAFRSTIDEPNRFKRARDVGPYLGLTPRRYQSGETDRQGGISKCGDRFTRTCLYEAASVLLTKVQRWSPLKAWGTRLARRIGSKKARVAIARKIAVILRCIWTDGTEFWWTKETATA

SEQ ID NO: 225218 - protein, 416 aa, unidentified
MDVVHPRCAGIDISKRDAKVCVRVPGSGRRKAAETVTTWGSVTNQVLALREHLIDAKVTLVVMEATGDYWKPFYYLLEDAGFEVMLVNARHAKNLPGRKTDVSDAAWLAQLGAHGLVRGSLVPPEPVRELRDLTRTRTAITRERTREVQRLEKLLEDAGIKLSSVATDFMGVSGRAMLEALIDGQRDPAQLAELAKRRLRSKIPALTEALTGRFRAHHAFLARIHLDLIDQHTQAIETVTARIEVVIEPFRAFRELITTIPGISIAVADVITAETGADMTRFPTAGHLASWAGTCPGSNESAGRVKSTKTRPGNPYLKGALGIVALSAAKNKNTYLGVKYRRIAARRGPSKALVAVEHAVLVAIWNMTRTGELYNDPGVDFYTRLHPERAKRRALDQLRAMGYDVTLNPLETAVVA

SEQ ID NO: 225219 - protein, 412 aa, unidentified
MQVVYSCCAGLDVHKANVVACVMITGSHGEVQSQTKTFGTFTGELLALSDWLRQQGVTHAAMESTGVYWKPVYNLLEGVFELLVVNAQHVKAVPGRKTDVKDAEWICDLLRHGLLRGSFIPAPAQRQLRELTRHRANLVQRRAQGVNELQKCLESTNIKLASVATDITGVSATEMLSALLAGQTDTESLAELARGRMKSKKPLLAKALEGKVQPHHRLILSQLLADIGWLEEQIQEVNVEISNRLKDHQQWLERLDEIPGVNLRIAEVIAAEVGTDVKPFPTAAHMASWAGLCPGNNQSGAKRHATHIRPGNRHLKSALIEAANAAGHKKHCYLRAKYRRLAGRKGKKRALVAVARTILQSTYYMISRGEGYKDLGENYYDMRDPLQLARRLSNRIEKLGFRVTMEPLAHAA

SEQ ID NO: 225220 - protein, 475 aa, unidentified
MGKGSGTTRGDRRRNARRERLRAILPRDGAVIGIDLAEDKQAIAVADHDVRVLARKTVKVKAFRLGEALDWAVAQARVKGFSHVAVACEPTGPQWLQVQRLCAERGLPLVCIQPLVSHIAREQQDFTRHKTDEADCVMIARLATELHCYIPEELDETWAHLRHLGRRRVQLITAATASVQRVRDFLSVAWPTVTETCARPLESVTWLAALQAVTSRCGGDPGRLAGMGEEAFTALVRSAMAGWGARRACARICVRVFAALTDTEGVVASCRRGLLRRVADELGDLQRTRAQLRAAEADMVSALDELGLSRLGDIPGLTATGAAAILAETGDPRRYDSSSSLVKHAGLAPADNASGALSGQAHISRRGRPALRLAVWRAVWPMLRFNPVMAAKYQALTRAADAAARAAGVHHGARTRPATAAAAAARARHATARVACAAALLRWIYSMIVHGTSWDPAVAASTACQHPPASQPEAA

SEQ ID NO: 225221 - protein, 464 aa, unidentified
MTAGKQLWRNRKEKKEWARRLQSEDPGLQVVHPHAAGIDVGNSIHYVAVRPDRDPEPVRRFECFTADLHRLADWLQSCGVKTVAMQSTGVYWIPLYEILEEHGLKVYLVNARHTKNLPGRKSDVQESQWLLKLHTYGLLNNSFQPVSEIRVLRTYWRQRGEHVRGAATCIQRMQKALTQMNVQLANVISDISGLTGQAIIRAIVAGERNPLKLAMLSDPRVHASHEEIAKSLEGNWRPELLFVLHQEVDMYDTYQKRIAECDQQLQKHLSSFTRSLPIQPPTQKLKTKKPAAKNAPRFDLSSELQRVTGVDLTRIDGIDVMVAQTLLSEVGLDMSRWITESHFASWLGLCPDNRISGDKVLSRGTRRVVNRAATALRQAANTLMRSRSYLGAQYRRLRTKLGAPKAITAMAHRLARLVYRMLKYGQTYVDKGTEYYEERFRQQQIQLLRKRAAKLGLQVAEIHA

SEQ ID NO: 225222 - protein, 338 aa, unidentified
MNIVFLGIDLAKNVFQLCWLNQAGKPVYTKRTGRKELLQTLANIPACLIGIEASTGAFYWQREFEKLGHKVKVISPQYVKPFVRGQKNDGNDAQAIAVALMQPTMQFVPPKSPEQQDIQALHRARQRIVNHRTATVCQIRGLLLDRGIPIGSAVSRARRAIPLILEDAENGLSSRMRRTIAELYDLFNDLERRIHFFDKEIETVFRQSEACQRIAKVKGIGPKTATAVVAAIGKGTEFKNGRHFAAWLGLVPRQHSSGDRQVLMNMTKKGDKHLRTLFIHGARAVVRVATNNNDGHMNQRVNQLKERRGFNKTTVAVANKNARIIWSMLRNETEYQVV

SEQ ID NO: 225223 - protein, 388 aa, unidentified
MQIITDRPQALTAIRTDLGAIFISLELSRSTWLITSLSPGGGEKMSKHTVRSGDVAGLWARFSQLKDKVQVRTGQVVPIIVIQEAGLDGFWIHRLLQDEGVESHVVDPASIATSRRRRRAKTDKIDGEALVRALLAYKRGEPRVCAMVRAPTPQEEDRRRICRERKTLTAERVEHVNRIKGLLFAQGISDYEPLRRKRRERLEALRTGDGRLLPEHLKAQIGRELDRLELTLQQIKSVETERDAMLSPSDEGTPAPGAMLKNLKGIGSEFAGVLWAEGLFRSFSNRRQVAAYAGLAPTPWRSGSVAHEQGVSKAGNPRLRTTMIQLAWLWVRHQPRSILTLWFHQRVQLNGGRVRKVLIVALARKLLIAFWKYVTAGVVLEGAETTAA

SEQ ID NO: 225224 - protein, 375 aa, unidentified
MKKRSSSDKVNVRPKTKSPKERSMNQIKYIGMDVHMAMTVIAVLNSKGKLIAESIIETKAFAILDYIKSQRGAIHVTFEEGTQATWLYDLIRPHVSRVIVCNPHAIKKLENKADKTDAKRLAELLRLDSLKAVYHGEHSTQSLKELVHSHSAIVHDKTRIKNRLKAIFRGRGISCPGDSVYSLKDRDYWRKLIDNEARRLRAERLWKQLDFLTLLSEEAEKDLIKEARKHTAIKILRSIPGIGPLRSAIILGIAVTPHRFRTVKQFWCYCGLAVRTHATGEYELVEGRVRRSRKQPLVCGLNRNYSRTLKEVFKGAVLSVSVGAWKDQYEAKVNKGIDPALVRLTLARKISSITLALWKKGERYDAKKLIFKHAA

SEQ ID NO: 225225 - protein, 343 aa, unidentified
MKLMRIGVDLAKNVFQIHGVDCHEQPIWRQCLPRDRWLQTVLEKIEPGCEIGMESCGGAHHWARQLQARGFRVRLIAPQFVKPYVKSNKNDANDAEAICEAMSRPSMRFVAVKTIEQQDIQATHRIRAGLIEQRTAKANQIRGLVAEYGLVAPKELLMLRRAIPCWLEETDNGLTVRFRRLLDGLWGDLRTLDERVGELDSEISAIAASEPTAVRLQQLRGVGPMIATALVAAIGDARQFANGRQLAASLGLTPRQHSSGGKDRLLGISKRGDAYLRTLMIHGARSALRTAKFKDDRLSQWAVRLAERSHPNVAAIALANKTARMAWAMLRNGTDYQPDRAAA

SEQ ID NO: 225226 - protein, 379 aa, unidentified
MTCKECGQVAKLTRTMQYVNNTELSSREETRCQFNGGKAVIKLGIDVHQDFYVVVEQVGGSNPKPPQRFQKDAFLRWAAKVKEKSGAEVHAVYEACGFGFGLQRKLSALGIECEVVCPQKLDEGNKRVKTDGLDAKALCLKLDRFVQGNRDALAIVRVPTEEEERSRAIHRQREQLVKARKQLEAQGRSLLVHHGLEPVQNWWKPRTFAALPVPQWMKELLQNSQPVLLGLQEKIAALTAQLQSAAAPDQPRGLGKMTSVVIDREVGDWNRFNNRRQIASYTGLCPGEYSSGNTRLQSCVTKHGNPRLRAALVELAWRLVRFQPNYKPVLKWRAILAKGALATGAARKKAIVAVARQLAVDLWRIKTGRLRPEELGLSN

SEQ ID NO: 225227 - protein, 328 aa, unidentified
MFYLGIDVAKAKLDCCLLLDPDKAKRKSKSVANTKAGLANLLEWLRTKKVSPNNLHVVMEGTGVYHEQAALVLVETGVTVSIVNPAQVKNFGRGLAVRTKTDGVDSFVLARYGALLNPAAWQPPTLEARVLRALLARREAVALDLQRELNRLEKANVTEIPIFIRQSIDDSIEFLRTQLAKLQQEIDDHIDHHPDLRRDMELLTSIPAVGPQTGSNLLAIVHSYRFDSAEQLAAYLGLVPVERQSGSSIQGRARLSKAGPARIRAVLYMAAVVATKYNPHVKAVYDRLLAKGKAKMAAIGAAMRKLVHLCFGVLKNRTHYQADYAKIS

SEQ ID NO: 225228 - protein, 341 aa, unidentified
MNTTLIAVDLAKDVFELACANQASRIVDRKRLNRKQFHRFCAQHPPVTVVMEACGTAHYWARELDTMGHTVRLLPAQYVRAYRRRSKTDRNDAAALVEAARNPEILPVPVKTVEQQCIQTLHRCRSQWLATRTARINALRGLLRELGHPLPLGARAAITGARACREVVPTVLQPAIDALLDEIATLETRMADIEAALARHARDSEPVQQLLSVPGIGLLTATALAASAGSPGYFRNGRHLAGWLGLTPKEYSSGSRRLLGSISKRGDGYVRMLLIHGARAVLNRAKQLHRAGQSLSRLQQWVVRLEQRVGHNKAAVALANKLARIAWAVWLRSTPYQATPI

SEQ ID NO: 225229 - protein, 417 aa, unidentified
MKSAPSVLPEEPPSGLTCGIDWARDDHAVAVVDARGRQVHRCVTEHSAAGLRALLGLLARHGVGEVAIERPDGPVVDALLEAGITVVVISPNQVKNLRGRYGSAGNKDDRFDAFVLADTLRTDRARLRPLVPDQPATVALRRACRARKDLVGHRVGVANQLREHLKRVFPGAVGLFRDLDSAISLAFLARFDCQDRADWLTPKRMAAWLASTGYCGRVDPAVLHARLTAAPRGTAGEHGAAEAHVTRALLAVLVTLAEQIKALTTQISEQLALHADQHIFTSLPRSGRVRAARLLAEIGDCRARFPTPESLACLAGVAPSTRQSGKIRAVGFRWACDKQLRDAVTDFAGDTRRASPWAARLYDDAIARGKDHPHAVRILARAWLFVIWHCWQDGTAYDPARHKALQRILAEQEPAAA

SEQ ID NO: 225230 - protein, 411 aa, unidentified
MEVLHPRCAGLDVHKDSVVACVRLAEGRRVVRHVETFATTTSDLERLSAWLAGHGVTHVAMEATGVYWKPVWAVLCEGDFTLVLANPHHVKAVPGRKTDVNDATWLADLLAHGLIRPSFVPPMAVQALRDLTRTRKQLAREKAAHVQRIDRLLQAANLKLGSVLSDIMGPSGRSVLDALARGESDAQTLAALISPRVRASRAQLVEALRGRFAPHQQLLLRLHLSQADAIDQAIAQIDQEVADRLELFRDTLTRLSQMPGVSSVSASVILSEIGFDMRRFPTPAHLVSWAGLCPKNDESAGKRRSTSLRHGAPWLKTLLVQAAWAAVRVKASYPQALFLRLRARRGPKKAIVAVAASMLTAIHVMLDRSLPYQDLGADHFERVHKNRRAARLTKKLHQLGFDVALTQRAAA

SEQ ID NO: 225231 - protein, 353 aa, unidentified
MTVYVGVDFHARQQTISYCDTTDGEVHQCELQHKGDQVREFYAQFQGEVIVGLEASGYSVWFEELMESMHHEVWLGNPAEIRRKAPRRQKNDRRDADLILDLMLKGDFPRLHRFSAESRLVLRQVRYRHKLVKVRTIAKNSLHAISLGAGCLQKRSLLSQPGQERLRGLALPPVLGQQREEWLQMVAQLDERIATLEATLEKTAASDEQIKLLRTHPGIGLLTGLVVRHTITPVARFSTTRKVVAYAGLDPVEDSSGSRTQLGSISKEGSRLLRFLLNEAGQTACRQDPDLKRFYQRLVHRRNRQKAKVAVARKLLVRSFIMLRDQIDYAEFVRRGVAARSARKTHRPSMPDL

SEQ ID NO: 225232 - protein, 370 aa, unidentified
MSQSSTLFIGMDVHKDTMAVAYVAQDQGAEVTSIGTIGTRQCDIDQLIRKMQSKATHLIFVYEAGPCGYWLYRYLGKKDYDCWVVAPSLIPKKAGDRVKTDRRDAIQLARLARSGDLTVVYVPQVQDEAIRDLTRAREDAISDCKDAKFRLKAFLLRHDIRYTGRANWGPAHLRWLSEVVCPTPTQQMVFQEDVRAVQEHTERLQRLEQALHEHVQAWRLYPVVEALQALRGVQCTVAVTLIAAMGDLTRFDTPRELMQFLGLTPSEYSSGAHRRQGAMTKAGNTHARRVLVEGAWAYRYPAKVSRHVQLRLETQPKIIQDISWKAQVRLCNRYRRLVARGKHANIVTVAIARELAGFMWAIAREVPIIP

SEQ ID NO: 225233 - protein, 344 aa, unidentified
MQVSVLGIDLGKNVCSIVGLDAFGAVVLRRRAKRETLIGFAAKLPPCIVAMEACCGAHHLGRLFANQGHDVRLMSPEYVRPYVKAQKNDDRDAEGIAEAATRPTMRFVELKAQDQLDMQTLHRSRDRLVGERTALINQLRAILLERGIVVPQGKRNLERHLAVLLDGEEAQGLSPRMRLLIADCCAQWRELDRRIAVFDAEFAAFTKENEDAKRLATIPGVGVMIASALISAIGRAEAFEHGRDLSAWLGLVPRQLTTGGKPRLFGISKRGNKYLRKLLIHGARAALPHLAERATALGRWAKGLLARVHQNVAVVALANKLARIAWAVLRRGETFTAKGAALTA

SEQ ID NO: 225234 - protein, 351 aa, unidentified
MPHKSTVRAVTAIGIDMGKNTLHMIGLDLRGAIVLREKVLRGRIASRLANLQPCLIGIEAGMATHYVARELAALGHDVKQVPPTYAKPFRQGHKNDFRDAHAVAEAVQRPTTRFVPAKTNEQLDLQALHRVRSRLVSERTAVINQIRGFLLERGIIVRQGLRFLRQQLPDILAKRTDVLSPRMVRIVADLAGDWRQLDERIETVTNEIETLAKSDDNCRRVMTVPGIGPIISSAMVAAIGSGAAFARGRDYSAWLGLVPKQMSTGDRTILGRISKRGNGYLRTLFMQAARVILLRPANWPKHGFGAWLIRAAQRLHPNVLAAALANKLARIAWTVLAQERSYEARVTKAAA

SEQ ID NO: 225235 - protein, 360 aa, unidentified
MKKVSKSSQQGKVAKPERSVGLDLGDRFIHYCVLNREGEVIEEGRMQSSESALRKHFAEESVMRIAMEAGTHSPWVSRLLKQWGHQVVVANPRKIRAITGSESKNDRNDAEQLARFAAFDPKLLCPIEHRSEQRQQDLNLIHARATLVRARTMIVNVVRGLVKSAGGRLPSCSTESFAERTRAAIPAALGEVTMPLVEQVGLLTAQIGLMDKQIDKLNKKYPEISLLRSTPGVGPLVAACYVLTLDSPDVLGDNRQAGAFLGLRPAQSQSGGSDPQRRITKTGNNYLRSLLVQSAQYILGRYGSDSALRRWGLKLASSGGKRGKKRAIVAVARKLAVILHSMWRNRIPFQAFPQSAAVLA

SEQ ID NO: 225236 - protein, 328 aa, unidentified
MQWTVAIGVDTHRDRHVAVAVDRLGRRLGSRELAVDEQGFTGLARFACSLGQPVFAIEGTGSYGASLARALLADGFAVFEAERPRRRRRPEKNDLIDAELAARRLLSSEPLPLPRVGGEREQLRLLLVERRSAQHARQQAANQLKAAIVTLEPGLRARLQQHKPASLARAPLLRTQRHAPLRRLAQRIAQLEQELTEIDRELDVLTRAHCPQLLDQPGVGPVCAAQILVSTATPTRIRSEPAFAALAGVSPIEASTGPRKRHRLNRNGDRQLNWALHMTALNRIRYHPETRAYYQRQLERGKTRREATRIVKRALARRLYHTLTAATT

SEQ ID NO: 225237 - protein, 368 aa, unidentified
MKKETITSDGISGESLVNYVNQVLNLGLDVHYRQVTVAMQEDGGRIKAAGKMGHADFLNWVPKKLEEGWEISSCYEAGASGYWLHRELVKLGVKNLVVVPKAMGQGGKKQKTDQRDAGELCDSLDRYLRGQEKALSVVAVPTEEQEEKRALIRYHRQIMADRGRCEARGKGLLCAQGIQVRGRWWRGDSWLELTSDPRLKDWMKEQLVGWRNKILSTDEEQSALRERIAALAPAILPKGVGAYSAAVLHYELRGFEHFKNRRQVGSITGLCPGVHLSDGRGKEGSINRCGIGIVRWTLVEMVWRLMIWQPQYPPVRRLAAGLVKSKRARKRLVVQAARRLAIDLWRLSTGQTTPEKLGLVMQSNATGN

SEQ ID NO: 225238 - protein, 401 aa, unidentified
MESPIVSIDVSNGNSHYMCFIKNNKRFGKVKKIDHDIEGFKRLLEDIQKLEAETNEKVCAVFEATGVYTKPLERFLSKNSIKTYMINPLESARKRKEEIHNKKTDKLDPISISKVYYDKEEMMELTKKDETHNWLRKKNRLYEDQLNHLRKYKVTFQNQLSICFPGYLDLFKDGYSDIPMTILKKYPHPDLLKNKKAETVARYLEKNTCHTHKVSLEYALKIIEFAKKTYPGCEKDDVEVEIFKILLDKVIETQRECEKTLNEMITVASTLEEYRYISSIDGIGPNLAARIIAEIGDIEEFKSREALVAYAGLDPHIYQSGDQDGKHLKISKKGNKYLRCLLFLAVGCSIRGAKDNPVNRFYQKKKQQSNPLNSKAAKTACTAKLLKIIYGICKNKTTYER

SEQ ID NO: 225239 - protein, 343 aa, unidentified
MGNDTRIAVDVAKAVFEVAISNRPGHVARRERLQRVEFLPFMAQQPAATVIMEACGSSHHWGRKLLALGHHVVLLPPHHVRPYVRGNKTDRTDAKGILEAGRNEDIQPVPVKTVAQQVLTSLHRLRSGWVSERTARINALRGLLRELGVFIPVGARQVVPAVWMLIEDADSDLPDPLRSILAEACQEIREIEARIKTVERQLEATAEQLPVVAMLFTIPGIGLLTATALVAFLGDIRRFPSGRHLASYLGLTPREFSSGLKRRLGRISKRGDGYLRTLLIHGARSTLLHARKQQPDRLREWAHNLEKTHVHNKAAVAVANKMARIVWAVWKHQTPYGSLPKAA

SEQ ID NO: 225240 - protein, 484 aa, unidentified
MHLQITNKLTLALDAFCFSFESAGALELPNEYSGLAREAAPILPSQSSGMHVPWDKLSQWRRMMNQLTDTEYSAYVGIDWAAAKHDICMQAADGGAREFACISSQPEGIEAWAQGLYRCFGGPIAVALELSKGPIVSALQKYDFFVLYPINPSTLAKYREAFTPSGAKDDPTDAELAVDLITRHPERFVPLKPQSVDMRKLIGLVEQRDKFVSDQGRLVNRLGHALKQYYPQVLEWFSEHNTVVFCDFLSQWPTLVQVKRARKASLERFFKSHHVNSAELIERRITAIKAAMPLTLDPAVIEPHGLQVEILVEQLRITIKALKRFDDEIAATAHKLPDYDLLFSPLPGAAKVLAPRLLAAFGEDRQRYPQADALQKYSGIAPVTKRSGKTTWVHWRWQCPSFVRQTFVDWSAQTINKSAWAGAYYRQQRAKGCSYQVAVRALAFKWIRILHRCWQDRIPYDESKYLEALRRKGSPLLKYLAETA

SEQ ID NO: 225241 - protein, 337 aa, unidentified
MQPTVPLFVGLDYSQHKVQVCALDPQGKVLGNRAVPDSAAAIDQAVRRLGAVQGAALEACTGAADLAEELADRFGWPMHLGHPGFVSRMKQSPDKSDFSDARVLADLERVGYLPRVWIAPKQLRELRTRVRDRQQLVAQRRNLKLAITALLREHRQRCEHQRWTAAWRAWVAQQAQLPEQARWVMTQRLRRLEWVVAEVHAVERRLEEVTKDDSTVRWLRAIKGLGPVTAWTVRAEVGRFDRFRTGKQRARFCGLSPCNRSSGDKAADAGLIRAADPERRRVFVEAAWVLIRCQPRGRQRAQRLRAQGKPRTVVTAAVANRFVRWLDHEGVRQQAVA

SEQ ID NO: 225242 - protein, 315 aa, unidentified
MESTEWVGIDVSKARLDVALGAQGELFEVANDPRGIAALIARLSRHTLARVVVEATGGLETALVAELGAAGMPVVVVNPRQVRDFARATGQLAKTDALDARLLARFAERVQPPLRALPTAEERELKAVVARRRDLVEMLTAERNRLSSAPKVLHREITGHIRWLEARLKQRDRDLDRQLRGSSLWQEKEDLLRGVPGVGPVLSATLLADLPELGRLDRREVAKLAGVAPLNHDSGRLRGLRTVWGGRAPVRAALYMATLSAVRFNPVLKVFYQRLRSAGKPPKLALTAAMRKLLVILNAMLKHHTPWSPPCPVAH

SEQ ID NO: 225243 - protein, 399 aa, unidentified
MEVLYTRAAGLDEHKKTVVACVITPEVRETRTFGTMTSDLLKLKEWLTECKVTHIAMESTGVYWKPVWNLLEDSFTLFLLNAHHIKNVPGRKTDVKDAEWIADLLRHGLVRASFVPDRDQRELRELTRYRRSLIEERTREVNRIQKVLEGANIKLSSVATDVVGVSGRAMLEAMVRGVEDTKALADMAKGTLRRKKASLEEALQGLIGRHQRRILKIQLEHLDFLDKEIAELDDDIAQRMSHLDEVIKNIDAIPGIDRRTAEETLTETGTDMKVFPSGAHLSSWIGLCPGNNESAGKRKTGKTRHGNPWLRSTLVRAARAAVRGKNYFSALYHRIVGRRGDKRAVVAVANSMAVTIHAMLSKGTVYQDLGPHYFDERDRERMIRRLEHRIEQLKADATV

SEQ ID NO: 225244 - protein, 423 aa, unidentified
MKNNTARKLKQVPKEYLVIGVDPHKKSHAAVAVTQDFTTHSKFKFNNSRKGFEMALERARAEMVRTSSRGVIFAIETGGHYWRNLAYFLDERGIPFQFINQFTLKRRREGKDLNRRKNDYRDSEVAAQLLYTGEFTDTKLQHGVYAELRAAYNAYRRLVKERTRITNLIKGLLDGIFPEFTQVFKDPCGLTALSVLSSCSVPNIIAQMIEERFVDAIRAKHQGRLMRRKLRALHYVARTSIGIEAGVWSVSSEISFLVEKLCLIKQQIHSIDKALAMLVDETEEGKYLLSIIGLNHVSVAGLLAELGSFRSYRSAKQLIKMAGSNPTESESGGKRSAHTPMSKKGRPVLRYCAWTAVIPMLRFNPDFRAWAKKLRERPVHANPLGGREVVGAALNKLLRLAFALVKKQSFYQVPQPEVAQVAI

SEQ ID NO: 225245 - protein, 343 aa, unidentified
MQTVTTIGLDIAKSVFQVHAVDAAGKVILRRQLKRRHVLAFFEKLPPCLIGIEACASSHHWSRELQALGHSVRLMPPAYVKPYVKRQKNDATDAEAICEAVTRANMRFVETKTADQQGGLVLHRTRHLCMRQQTSVINAIRAHLAEFGVVAPVGRNGVEELLRVVADPDDKRVPEVARVCLVALGAQLRRLKDQVLEFDRMITAWHRSNKMSIRLDECPGVGPVLATALVATVADPKSFRSGRNFSAWIGLVPKQHSSGGKDRLGSISKQGDRYLRSLFVIGALADIRYAKVHGTGHRPWLTALLARRPAKVAAIALANKIARMVWAMMAKCERYKEPVALAA

SEQ ID NO: 225246 - protein, 347 aa, unidentified
MHSVGIDLHRSRSHVAVIDDRGDVLLSRRIVNDPQTFLALLAEIDGECRVALEATYGWEWLADVLQDAGYELHLAHPLRTKAIASARVKTDAVDARTLAHLLRTDLLPEAYIAPRELRDLRDLLRHRVALTRMRAALKNRVGAILAKHGIPRPYSDMFGPGGTRFLGELELREAPRRRLDSMLALIGDFDREIAATTKEINQRAKADPYVEVLCQIRGVGRYIAMLVIAEVGDIARFHTARRLCAWAGMTPTVRSSDMRTRLGHISHQGSPALRWALVEAAQHAATGGGPLRQSYERIAKRRGTQVAKVAVARKILTLCFYGLRDGEIRCLAPRAPARTIRPTAVST

SEQ ID NO: 225247 - protein, 336 aa, unidentified
MVYVGVDLHRKRSHVVALDTAGAPLLNRRIETDPGEFLRVFGELGHEPLEVAFEATYGWGWFADLLADAGITAHMSHPLATKAIASARVKNDAIDARTLAHLLRTNLLPEAWIAPPQAREARRVVRMRTSLVRIRSRLKCQVHALLAEHGVPVAMWDLFGKAGRQLLADLRLPPISQGRVEASLRLIDAISAEVEVADREIRSIFRADPRLARLTAIPRVGAVTAAVVIAEVWDVHRFPSADRLCSWAGLTPSERSSDAHTRRGHISKQGSRWLRWVMVEVAARPDIDPHFRALYDRIAARRGRKVARVALARRVLTLCYYALRDEGGCRAFPLAE

SEQ ID NO: 225248 - protein, 384 aa, unidentified
MTKHNILFIGLDTHKTFTEVAYIEDKRGAKPTHLGKILSNKAAFKKLARQLQSKYPDATLHFVYEAGPCGYWIYRLLTSLHHCCYVIAPSLIPKKPGERIKTDKRDALKLAKLLKSEDLTPIYVPEPEDEAVRDLSRARETAMKDLKDAKYQLKALLLRNNINSKVKDNWSLQHLRWLAELVLPHPCQQIVLQEAVSTITERLKRLKRLDNELTHQVKNWRYYPVVKAVQALRGVRLLVATGVIAELGDLTRFDHPRKLMSYLGLVPSEHSSGGKRRLGAITKCGNSRARRLLVEGAHSYKHNANISKEMQLRQEGLSKEIIDIAWQAQLRLCRRYSRLMHKGKHRNVVVTAIAREMIAYIWAISREVVLPVVDVKLRLARMPA

SEQ ID NO: 225249 - protein, 412 aa, unidentified
MEVLYPRCCGLDVHKSSITACVLIAQSGKPVKHIRRFGCTTRELRELVLWLQEFGVEHVAMESTGVYWKPVWNVLESHFQIVLANAQHIKAVPGRKTDTKDCQWIAELLQHGLLRGSFIPPLVIRDLRDLTRARTSLSQEHSRIASRIQKVLEDANLKLASVASNTLGKSGRAMLAAIIGGEENPERLADLALGHLRAKLPQLQAALEGQVRDHHRFLLQSLLRQLYFIETEIELLDARLEQLGQEHGDLADALNRWITVPGVDRVAAWSFIAEMGADCSSFPSAAHLASWAGVCPGNNESAGKRISSKIRKGSPWLRRMACQSAWAAARTKNTYLSAQFKKLAARRGRKCAIIAVAHSILVIGYHLQRKRCVYTDLGGNYFDRLHADGLRRYLVKRLESLGHSVTLQPRIA

SEQ ID NO: 225250 - protein, 344 aa, unidentified
MSNVITIGLDLAKSVFQVCGLNRAGKVEFNRQVNRKQLMACLMAHPQALIAMEACGSAHYWGRRLEAADLSVKLIPAQHVKAFTRGNKNDANDALAIAEAASRPNLHPVSVKSLAQQDIQTLMRIRSRHQHARTDAVNQLRGLLSEYGIVIPQGIKQIGRRLPAILEDAENGLTAIAREGFYTLYQDYLSLSEQLATAEKTLERLAKTNPRCRMLMRFRGVGVMTSLALFSAVGDPASFKNGRQFSAWLGLTPKHEGTGGKVVMGAMSKRGSSYLRTLLIHGARTVSRWLDKYDDPFSQWAMAVIARRGKHKAIVAMANKNARLIWVALTKGIEFVPSYHLSPA

SEQ ID NO: 225251 - protein, 415 aa, unidentified
MEVLYGTCCGVDVHKKLLVVCLRSGRKSELRNFGTTTQELFDIANWLKSSDCEMVAMESTGSYWKPLYNILEVMEIPAMVVNAQHMKTVPGRKTDAKDAEWIADLLQHGLLKASYIPDKDQRELRELVRYRKSLIEDRGRELNRLQKMLEGANIKISGTIKDVNGKSGRNILNRIVNGEKIDGKIYDEMYTKGEISHSLKCTREQLIADLNGVLSVLQRKMMKELLRHLDELDNHIKHLDDDIDQFMTPDETTASKMIQDIPGIGNASAQAIISVIGTDMSRFPTDKHISKWAGLCPGNNESAHKRKSGKTAKGNKVLRTTLVNCAHSAVRVKDSFFSAQFARVSTHRGSKRAYVAVAHSMLIAIYHILSEGTVFKDLGSNYYNQFNKERKANSMLKKLKALGYDVTIATAAETA

SEQ ID NO: 225252 - protein, 392 aa, unidentified
MNRIVYIGMDVHTSNYTLCSLDPGYGVEKDNYFAEVQFTNNFVTNVVNYVSNLKKKLKDCEFVCGYEAGCLGYSTYKDLTKVGIKCVLMAPSTMAVQKGGKKVKNDRRDARVIAQCLAYQTYKEVYVLSEHDEAVRGYLRMRDSHNKALKRIKQQIIAFCTGHGLFSPTKSNWTVAHLKWLKDLKFNDPVEQEILNEYLSSLTFLSDKIKAMDVRIEVLASEKQYCENVKKLRCIKGIETNVALTLLAEIGDFNRFSKPTDFAAYLGLIPGEQSSGDKVRGTGITKAGNSTLRRKLTESAKGYWRGRIGIKSATFKKLEKELPKEVTEYALKANTRLQRKFFNMTHVKGKNMNVAASACAREMACFVWGLITNHYEKAPAVPKTDEELLDLN

SEQ ID NO: 225253 - protein, 331 aa, unidentified
MKYYTSTTEFNCGIDLHARQMYVCVMDRQGKKLVHTNIKGNDFEFFLGRINAYRHSLTVCCECMFGWYWLADACQQAGLSFVLAHALYLKAIHGGKNKNDRIDSEKLAHLLRSNLIPPAYVYPAEKRPLRALLRQRIGYVWRRTELLNRIQSHQLAHNRPSVRCTTRYNRDPWEKLILETETHPLRQLALQTDMAMVRHYDAQIRTLETKLVSLAKEQAPREFTLLLSVPGIGENLGLTLLHEIGDIQRFPTVKDFLSYCRLVKGTVASAGKIKGLGGARLGNPYLRWAFGSAEKRSIIQAARKAGSPYTDWARSVLLSAARRVASPAAKK

SEQ ID NO: 225254 - protein, 415 aa, unidentified
MKGTEDTRKIDRYIALDIHKEYVLAGGQNAKQEWVLPPRQISMAKFREWATANLREGDAVVIETTTNVWDIYDIVAPLVTRTAVAHAGAVRQIAEARVKTDKEDVKRLIRLLIADIVPEVWVPPVEVRELRGVISYRNRLVKMGTMVRNRLQSLLHRHNILLPKGKLLDASWWQEQKMSALEKIQIQQELVMLEELDRHKTEVDMELGRQCLREPWGKQAVRLLQLPGFGVVMTMIVLSAIGDIQRFESANQLVGYAGLGAGVHDSGKEHIEKRITKSGRKELRWALVEAAWQAIRISPYWKEQYETYLRRMRRPNQAIVVVARKLLVAVWHVLTKEETDLHASEEDLAYKMLVLSWDLDESVRMGLTYKQFAKYALMKLGVETDITRFVRRNVPRRIAPRDEVLARMEELGLSS

SEQ ID NO: 225255 - protein, 383 aa, unidentified
MEHAVVRETERSEGSRTTATDGRSLGPGPKEAVEKLDRRRSCDISPNSRQSRPPLRRTSSHLQERDARMSEFTVFVGVDVSKDSLDIAQYPSGRLHGTFPNSEVGFQQLLSKLPPPGQCLVVVEHTGGYQTDLVVFLVTAQHVVSAVNPATVRHYAKAVGVLAKTDRLDAAAIARFAHDVRPRPVEKLSEKQVELDLLVGRRRQLSELKTTETNRLSQARSDSVRRSVEAVVSLLTEQLKKIDCELSDLLKSDDEWKGKSDLLQSVPGVGPNTATTLIAEVPELGKLNRQEIASLVGVAPFNRDSGCYRGKRSIHGGRAQVRKVLYMAALVASRKNPVLKTFADRLRQSGKPPKVILTACMRKLLIILNAMVHTNTHWKPQNA

SEQ ID NO: 225256 - protein, 411 aa, unidentified
MRLFVGDDWAEDHHDVELMDAAGRVLARKRLPEGVAGMAGLHALVGEQLGESADGAEVAVGIETDRGPWVAALVAAGYTVFGVNPLQASRFRQRHGVSGAKSDRGDAHMLADMVRTDSHQFRAVAGDSADAEGLKVLARGHKTLIWEKARQVQRLRHQLLGYFPGALEAFDDLAAPDALELLGKAPDPARAARLTRAQVSAALKRAGRRNITDRATAILAALRGEQLAQPPALTAAYAATARSLIAVITTLNEQVKALQGQVEADFGRHPDAEVYRSQPGLGAILGARVLGEFGDDPHRYADGKARRNYAATSPLTRASGKKKIVAARFIRNDRLADALRLQAFAALTASPGARAFYDEHRDRGIEHNDALRRLANRLVGILHGCLKTRTLYDEATAWSHREKIPQSGIAG

SEQ ID NO: 225257 - protein, 321 aa, unidentified
METWVGIDISKDTFDAAWLSNGKKNHLKLENNVKGFKRLLTEVPTESRFAMEATGEYHLNCARYLFTRGNMVAVLNPFAVKKHMQSDLRRCKNDKSDAYSIAKFAAEKNSDCWTCPTDDEIKLKHLDAVVDGLQKQIRQSKNMLHSLTQVSLRDDLAVSIIKKTISSLEALMERARNKQLEMIESNKKEETALACSIPGIGLETSIKFFTHVGNINRFDSSRSLISWIGLTPRNAQSGTSIHKNGGISRMGCTRLRSQFYMCAVVAIKYNPDCRAFYHRLKELGKPSKVALIAVANKLLRQLYAVLTKKEAYVPNFCTKAS

SEQ ID NO: 225258 - protein, 322 aa, unidentified
MKKSNNYVGIDISKLTFDVAISSSEDKYKHFKFTNNYEGFMMFLEHLKVSESICVMEASGPYYLKLATFLSEQAIDVCVINPLVIRRFSQMRMSRAKTDKKDAMLIAEYGKTEKPDLWQPEAAYVLELKQMQAYLEQLNKNKTAFTVQKEAFNQNPIKSEILEKSINSVIETIDKEIKQIEKRMELIIKTHHQEMFDQLKSIPGMGSKTSLLLIVISGGFSKFNNHKQLASYVGISPRIFESGTSVKGRSKICKMGMSKVRAMLYVCAWSAKRCNKSCKELYDRLIEKGKSKKLALIAVVNKLLKQAFAIATKKEYYSVKIN

SEQ ID NO: 225259 - protein, 426 aa, unidentified
MEYGTIVYPICCGVDVHKKFFVATLIKTEGLLPRYQKRRFSTFNNQILVFKQWLMENNCRDVCMESTGKYWVPVYNLLEDSINVTIAHPKFVKAVKGDKDDGKDSKWIGNLFRLGLVPGSFIPPKEIRILREFTRYRTKLVYCKTSEKNRYQNVFTVCNVALDAVVSDMFGVSASSITDYIVNSETYDPEHCVSLLKRSLKKKASEVVKSIEGFQMTDAQKQRARMVKQHYDFLLEHIGQLEAAIDVLTQPYESAMSLLCTSPGYDHRSAITVISEIGTDMSVFGTSKRLCRWAGLTPGNNESAGKKKSVHIMKSGIYLKPVLVQMAHAAINSVKTPYYAVKYAALSKRRGKKRAIIAIARMLLTATFHMLSTGEVWNPSDLQKVDMPQELREKQLRHDLNRAVKLLVANGVVAPDVIQIPQQRTG

SEQ ID NO: 225260 - protein, 327 aa, unidentified
MAKRTTICAGIDTGKWKLDIALDGSSKQLQIGNTPEGYKTLLDWLRRHRVNRIGIEASGGYEQPVVAELRRKQFVVVVFQPAQVRAYAKFRLQRAKNDKIDAALIATCTAVVKTIHAPPDPRFLPFAEHLTMIEQIREDIRRLKNRIETCRDPRIRQNWKDEVARLSKQEKIEFKALVAAIRQHRDLAERLDLISSVDGIGPPTAVTILVRLPEIGRITREQAAALAGLAPYDDDSGDRAGTRHIAGGRDRLRGAVYTAALPAAFRWNPQIMALYKRLIAAGKGHKRALIACARKLLIFANTVVARGTPWNHQRPANASITAVPQGA

SEQ ID NO: 225261 - protein, 366 aa, unidentified
MGFYCGLDLGATHCQVCVINDAMEIQVERKVRNELSQITELLAQYDPAPQCVVESTFNWYWLVDGLMEAGYEICLAHALGVRLISGAKVKTDRRDAFALAKLLRAGLIPQAYIYPKATRPVRDLTRRRQRLVHLRGGEYVTIRRVLYQHGVLDHSRNKIKTLAEEEVTAYLEHPLVRVEARQSCERIELYSHQISELERRILATVKDNTPFRRLLDVPGLGEILTITVYYELGDVTRFKNVRQCSSYCRLVPGVAQSGARESRGRGSKQGNAYLKSAFTQAAVQAVQWYPRIERYFDRQLARHEGRIGELAATCLPAHWRARRILSLDKPPLLAVTQCVGCFSHHLEPVVFQSHASDLRSILGESP

SEQ ID NO: 225262 - protein, 370 aa, unidentified
MLSIGIDVSKGKSTVCGMKPGGEIVYTPFEVQHTREGMSELVSLLRGSGEEVRVVLESTGSYHCPVVAALLENGIFVSVVNSLRMKRFCSQSIRKVKTDRIDAMQIALYGLAYWQELQPTKLPENTYRELQLLARQYYQMTSLLIKAKVDFNALCDQVLPGMQELMSDHAGRHKLSDFVLRYCHTTLILEMGETRFRKDYCKWAEKKGYRNCERMAALIFATAQNGIPVLPNAPSTQIVITEAIRVLHTVEASRDAILTQMQALAKTLPEYSLVREMPCIGDTLAPRLIAEIGDVRRFHSKRALIAYAGIDAPPYQSGKFCANNRHISKRGNRYLRKTGYEVMQSYVMHKPANDPIFTFIEKKTRRGEEW

SEQ ID NO: 225263 - protein, 337 aa, unidentified
MEQAIMIGLDIAKNVFEVHGRNAAGEVVLRRTVKRASMEKTFGGLSPTLIGMEACGSAHHWARVLGKLGHEVRLMPPAYVKPFVKRNKSDAIDALACCKAVVDPDMRFVPVKTVDQQAALSLHRSRELLVRQRTQLANALRALLSEFGIVAGQGKAGLAQLIEQLRTGTLELPEDALFSATMLADQHPAVDAAAAELERRIKAQAKADKTAHMLQTAPTVGPITAHAVRAALPDPARFRCGRDFAAFLGLAPSNSGTGGKTRTGHITKKGDPTLRRLLVLGATSWVRRVSRCLDKASPWLRGMLARKPKKVVAVALAARTARTLWAMLTHNQPYRAA

SEQ ID NO: 225264 - protein, 355 aa, unidentified
MNDEKYIGLDVHQATIVVAVMDSTGKLVMESILETEAATILQFFAGLRGTLSVTFEEGTWSAWLYDLLNPHVDQLVVCNPRKNALLKDGNKSDRIDARKLAELLRGNQLKPVYHGETGVRMLRELSRSYLTIVKDLSRVMNRLKAVYRSWAIPCAGRDVYYTRHRAQWLAKIREAGVRRRAERLYEQLDMLRHLRQQARRELLAESRKHAITAKLRQIPYLGPIRSALAVALIQTPHRFRTKRQLWAYSGLALETRISAEYRLVEGQVRRSKKLPSIRGLNKDHNHDLKGLFKGAATMASVRPGPFQDFYQAALAKGIKPTMARLTLARKIAAITLTLWKKGENFDAEKLKSQAA

SEQ ID NO: 225265 - protein, 325 aa, unidentified
MIDGMLGIDVSKNTLDASMSSCNNRVRARSFANSSDGWRHLLDWLTSQKIQRVHACMESTGRYSLGIACALYEVGHIVSIVNPAQIRDFARTKLGRNKTDGVDAAHIREYCELFKPQPWAPPSEAHRRLGELQTIRSGIVAGLTEWKNRKSSGMVDAVAQSLADVTISHFTSQLGAVDEAIAQTIDNDSGLRRKRDLLLSVSGVGETLAGVVLAELPGPDVLRSSAEVVAYAGLNPRQHQSGTSIDRLTRISKIGNAALRAALYMPALSAMRYNRAIVALVARLKSRGRLKPKQIVVAAMRKLLVLCFGVLKTGKPFDPALAMGC

SEQ ID NO: 225266 - protein, 346 aa, unidentified
MPETEVDTFAGIDVSARELSVALCRGKGEDKPAMAKFSNHPSGHKALIAHLLRGGRRVRVCLEASGNYSLDLALTLQAHRQVEISVINPRRARRFAESLGQRSKTDPVDSRVLCEYAARMPWVAWQPPSSVALHLRAVARAIVDLGVIHTQQNNRAHASAASQALPVLVVKEMQRHQKYLEQRMSRLRREALRLIAGDSELDRRFRLMQTTTGIAETSALQILGELAVLPDMLDARQWVAFSGLDPRLFKSGKSVEKRPRISRGGSRHLRRALYMPALVALRRDPYLRRFYQNLLARGKARLQAVVAVMRKLLHALFAMFRTNQPYDGSKLCCAVDMAGNAIASCA

SEQ ID NO: 225267 - protein, 367 aa, unidentified
MRTNKMRDYIVKDKDVSVGLEDSKRSWKLCVRSERIIVHETSMPTEYSMLIGYLRGKYPGCRIRLIYEAGFGGFWLHDKLEEDGIGCIVTPPNKVTQEKNCRVKNDKIDARRLAKVLEEDDCKSCFVPDTELREDRQISRTLIGIQKDIIRVQGRIRQFFNFHHLEEDAFHGEQWKASAVKKLRSITLPSPLRFSLDILLKELELLLQCRRELKKQLLLLSRKDRYKKVFEYIESVPGIGWLTAIRCVLEWGEDLRRFGTGRLFSSFLGLTGSEFSTADDVRRGHITKEGKKFVRSWLIQCAWAGYKRDPVLLEKFQNVYKATRSTKKAVVAVARKMAVRIWHLVVYGEKYQIGLLDELQPPMLSKA

SEQ ID NO: 225268 - protein, 317 aa, unidentified
MKKTGVTDTIYIGVDVSKEKLDAYRPNTKKNETFLNQEADIEKFCKSFKKYKTPVMVVVEGTGGYEGLLVRMLTKHKVDVAIVNARQVRDFAKGIGMDAKTDPIDAYVIYRFAEVVKPSPKAMASDGEQKHSALVTRRSQVIDLITQESNRLKQCWDERSKQSIRKTLEFLRNEAKAIDKELEAMLALDEANKRKLEILDSVKGIGPVTQSMIVSKLPELGKLNRGQIAKLAGVAPINRDSGSKEGKRFISGGRSYVRRILYMATLSAIRSNTTIRAFYRQLKSRGKQSKVAIVACMRKLITILNMMLKTDQVWQTK

SEQ ID NO: 225269 - protein, 379 aa, unidentified
MPKKMRHVGLDVHAETIAVAVAESDGSVRELGTIRNRPEAVRKLIAKLGDVSQLRVCYEAGPTGYPLYWQLTALGVHCDVIAPSLMPRKAGDRVKTDRKDAAMLARCYRAGDLTAVWVPDAATEALRDLVRAREVAKQDQLRGRHRVSKFLLRHGRQRPDGMKAWTLKHAQWLAQQRFELPTLQVVFDEYRATLALLADRVARLERAIQAALPTLAPVQQALVGALATLRGVQQVTAATIVSELGTLRRFATARQLMGYTGLVPREHSSGSGVHRGAITKTGNAHLRRVLVEAAWAYRHRPTAASGTLRARQQGQPAPIIAIATQAQQRLCPRYRRFHEQGKPPLAVATMIARELLGFIWAIGHAIEPAPTPLGARMSA

SEQ ID NO: 225270 - protein, 444 aa, unidentified
MPTTDDQVETSQFAAWIGIDWADQEHAVCVVDAATGKSDTSTLAHDPGAIEDWAAELHNRFPGPIAVCLEQSKGALIYALMKYDFLVLFPINPKQLACYREALAPSGAKDDPVDARLLVEFVRRYPDRLRPWRPDDQTTRLIAILNEDRRDLIDLRTQLTNRLQSRLKLYFPLVLELFRGRTKLYAPVVCELVLRWAALAELQHADPEEIDAFFKLHHLHQKSIQKNLAKIVLAKPLSDDEAIVRSGRLQAQSLARQLVDLADAIARCEAEIEKLMETHPDAPLFRQLPGAGDALAPRLLAAFGTDRERIESASDLQTYSGIAPVTRRSGKSQFITRRWACPNFLRQTFHEFARCSIAKSVWAAAYYRLQRDRGKKHHAAVRALAFKWIRILYACWKNHTLYNEFHYMQQLQRKQAPLLAYVGTQHVHPLPARSTIPKTFTISP

SEQ ID NO: 225271 - protein, 388 aa, unidentified
MSATFGLVSYRAVGQSVSLPGCGSKEARTLSTQIRSAHLGSTVNEKGIAMTMIGIDPHKATHTAVAVDDDEQVIGEFTVDASNNQVEHLCGWADRFTKREWAVESANGLGYLIGRQLVAAGETVFDVPPVLASRVRLMGSGRSQKNDPNDARSIAIAAFRSGRLATVCPDDHVVVLRLLVKRHRDMARLRNKHCSRLHALLLELVAGGIGGKINTRNASGLLNRISVTDEATRYRTLVAREVVDDIAQLDEKLKTSKKRIAIAVTASGTSLTNIVGVGPIGAATIIGYTKDITRFPTRGHYATYNATAPIEASSGGNKRHRLNPRGNRILNHAIHIAAVTQLRHDTNGRIYFDKKIAEGKTPKEAIRALKRRISDAVYRRLIADSNNQ

SEQ ID NO: 225272 - protein, 422 aa, unidentified
MDQHSRAFVGIDTSKLRNAVAVAEEGRGGEVRYLGEIDTTEAATRKLVTKLAAKYRQLTFCYEAGPTGYGLYRLIRKLGHDCIVAAPSLIPKKPGDRVKTNRRDAVGLAKLSRAGELTAVWVPDERHEAMRDLSRAREAARKDLKGKRQQVSSFMLRLGRHDPGKKTWGPAHMNWLMVQKLEHREQRIALEELLGAVRQESERVERLEQAIRDAVPEWSLAEVVTALQAMRGIDLVAAVTVLAEIGDLSRFQNPRELMGYLGLVPSESSTGETVNRGGITKAGNGRARRILVEAAWSYRYPPRVSREKQMKVAAAPRAVREIAWKAQMRLCGRFRSLTRKGKRPTVVATAIARELAAFIWAIQANSSGAPSNINRAEVRAGPRQGELPSLLRGRSHDRRPTSDRDSPGRTNGNAVSNPRIRA

SEQ ID NO: 225273 - protein, 317 aa, unidentified
MVRDRIGNILIEGEAATLYDELYAHLRQYLGPSVIGLEASTSYYALYQQFLEHGYCVKVANTLQIRQLIAKNDRLDARRLSDMLRLGTFPTSYIPGKEIQHLRGLVNIRHSLMEEKVRCNLRIQALLDRNGAVMPSCKAFSKKWKYALMQYMGSGDISAELRYEYDHYIFLEKKNEQVDQEMIGYTKKYWKNEFMLIQSITGFGQVLSCYIIANIYPIERFPSSKKLRRYAGVVPTFHESGNYTSRGRIPKNSSRKLLRWALIEAANAIAKTNTKLGKYYRKKKKQKKNAGIAKVAVASSLVDIIYKVLTTKKPYMG

SEQ ID NO: 225274 - protein, 378 aa, unidentified
MKAARFTADEIERVAYLTSKGYLPVAVDVASRVFQVCYYDLGAKHIKNYQLSRVKFFEFIDDTQTPRKLIGIEACGSCNYLCRYIEEHNHKCHILLAQKVKAFLHLDKTDRIDALGILKALITPSMQHIPSRTQENQYLLNLITVREQLNKQFVQTVNAAHAFLYESGVVAGTASVASATKVTEALKALCNAETKKEHSEDDCSYSHLNCISESLLSNIESLQTKIKEINSHLLSYASNNEICSNLQTVPGIGKLSAVALYAAMGEPERFSSSRAFAAFIGVAPVTTGTGGKTTVLGIRKSGIQSIKKMLYMCAMVYLRQAMKNGTESSWLKLRLNQNRSKKIIICAIMNRLARIAYAIAKSGQPFDENKCNMIKKLR

SEQ ID NO: 225275 - protein, 341 aa, unidentified
MYYYAGIDVSLEYSSVCVVDANGKIVREGKVASEPETLIAWLRSAGLSLARIGLEAGPLSQWLYAGMREAGLAVELLETRHVHDAFKAMPVKSDRNDARGIAQLMRLGWFRPVHCKSQTAQETRALLTARKLVQSKLRDIEASLRGTLRGFGLKVGATTSRRFAARIKELVAGHPTLEVVAEALLAAHAVLLREFNGFERRVRTMARQDAKVRLLMSTPGVGTIVGLTFASAIDDPARFKSSKQVGAHFGMTPKKYQSGETDYTGRISKNGDKGVRTALFEAAHTILTKPVKGSALKSWAMRLAKRAGMKKAKVALARKLAVIMHRMLVDGTTFDFTAAAA

SEQ ID NO: 225276 - protein, 391 aa, unidentified
MQEVEDEPLFAERAAGIDIAKAEVVVTIRVPSDTRGGRRQQETREFRAVRKDLLALADWLRTWQVTKVGMEATGDYWKPVYFLLEREGLDCQLYHAAQVKALPGRPKTDKLDSVWLAKITERGSLPSSFVPPEEIRRLRTHTRYRRHLTQARTAEMARCEKLLEDAHLKLSSVITDIHGVSGRDMLTAIIAGERNPKVLAQMARTRMRGKIRQLEEALDCSFFTSEHAFVLATMLTNIDHLTAQIQVLSAKIEELCEPYLHQIAQLDAVPGIGIITAQDIIAEIGVDMTVFPTAGHLCSWARRCPQVTSSAGKRKGSNATGRGNPYIAGALGEAAVNAGRTQTFPGEKYRRLVKRMPKKKAQGALSRSLTRKMDLSWARGSAGGAGSLARR

SEQ ID NO: 225277 - protein, 341 aa, unidentified
MNHYVGIDVSLEASSLCVVDANGKIAREGKVASEPDALIAWLRGLKLEQTRIGLEAGPLSQWLFAAMRQAGFAVELLETRHVCTALKTMPVKSDRNDARGIAQLMRMGWFRPVHCKSIAAQETRALLTARKLLQGKLHDIEMSLRGILRGFGLKVGPATPVHFEERIRELVAGHPSLETIAEGLLAVRVALRREFDRFEKQVRATARGDRRARLLMSVPGVGAIVSLTFASAIDDPARFKSSKQVGAYFGLTPTKYQSGETDIDGRISKVGDAWVRAALYEGAHIILTKPLKGCTALKSWAMKIARRAGMKKAKVALARKLAVIMHRMLVDGTSFRNLAAV

SEQ ID NO: 225278 - protein, 316 aa, unidentified
MESSLIFVGIDVSKAQLDVAIRPTSEKDCFANDKVGIKALVKWLAKIPPTLIVLEATGGYERHVMRAVVSADLPAVVVNPRQVRDFAKATGQLAKTDSIDADVLAHFAQAVRPQLRPLPDPVTVELRALTARRRYLLATIGAEKNRLEMTSKTVRKSIHAHIRWLEQDLECTNRDLDRSIKQNPIWKENEDLLRSVKGIGPVTSRTLLAELPELGTLDRRQIAALAGVAPFNRDSGTLKGRRSIWGGRAPVRCALYMATLVATRRNPVIRAFYKRLKANGKLFKVALVACMRKLLTILNAMIKHKSRWSDSFLQTT

SEQ ID NO: 225279 - protein, 402 aa, unidentified
MVSVGIDVSKDTSTVCILKPNQEVIASPYEINHIETELAKLILRIKSFEGEVKIVMEATGAYHLPVLNRLKEEGLFVSVINPLVMKKYASIALRKGKTDKIDSTKIANYGLDNWFRLVDFEALNEAYEELRQLGRHYSHYIKMRIQSKLTLDNLLQRTMPGIKTLLRGKHSENPTKDKLSDFAEEYGHYDNITNKSEEEFVISYAGWAKRKGYHRSEDKAKKIYAMAKDGIPTLSSNNPSTKMLMSEAVKVLQEINKTLKVILTQMQELANTLPEYETVRSMNGVGSILAPRLIAEIGDIRRFNNGSSLIAYAGIDSPPYESGSFVGTKRNISKRGSSLLRKTGYEVMKCIKATKPVEDNAVYLFMLKKEAEGKAKNVAKIAGLNKFLRIYYARVKEVYLAQ

SEQ ID NO: 225280 - protein, 330 aa, unidentified
MSPRPQFAGIDVSKDSLHVHIAQHLMDNDGPFRVFSFDHKGLSLLKAWLLEHHVQHTVFEASGGYENTLRDFLLEHHLPCTRLQPERARAFAVGIGAIEKTDKLDARVLARMACVRTQHKEVLRSETQRELVTLMDFRLQLREDLTRLKTQRQKQTNAWIKETQDERIRDLEARRDALDKRIQTLVDGDQEMSALCELMCQLKGVSYVTAWSLLAYLPELGELNKRELAKLVGVAPMAKESGDFTGKRRCSRGRGKVKACLWMASLSVATHEEPFKQFYQRLKEKGKPPAVARVAVCRKLLTALNAIARDGEAYKPELLMPRSGSLEKVS

SEQ ID NO: 225281 - protein, 332 aa, unidentified
MKLFAEFKRKAEERTGQSYPIITIQEAGLDGFWLHRALRQEGIESHVVDPASIATPRRRRRAKTDRLDGETLLRALLAYKRGEPRVCAMVVAPSPEEEDRRRLCRERRTLIDERIVHVNRIKGLLFAQGISDYAPLRRDRRARLEGMRTGEGRTLPSHLKMQISRELDRLELLLEQIKAVELEQDALLAAAPKPAGGSAAPDPVTMLLALKGMGPNFAAVLWSEAFYRQFANRRQLAAYAGLAPTPWRSGAIEREQGVSKAGNPRLRTSMIQLAWLWRRHQRQSALARWFEAHSKRGRKSAIVALARKLLVALWKYVASGVAIEGAVMKSVA

SEQ ID NO: 225282 - protein, 323 aa, unidentified
MNHKVGKDNTVARFIGIDVSKQWLDVASLPERESRRFTNDSAGQEQLSTWLMSLAPELIVMEATGGFETRVATTLAAQGLALAVVNPRQVRDFARAFGILAKTDRIDASVLAAFAEKVHPPVRPLPDEDRRELIDLVDRRRQLVTMRAEEKTRLSQATASARQDIKEHIDWLDERLRRLDIDLTAKLRTSSLWKAKEEILISVPGVGRVTVFTLLARLPELGALNRRAIAALTGVAPFARDSGQHRGHRMIWGGRADVRSVLYMAAVSAARINPVIRSFYLRLKQAGKPSKVALTACMRKLLTILNTMLRNNQPWQAPSTHTI

SEQ ID NO: 225283 - protein, 348 aa, unidentified
MRFYTGQHRFYCGVDLHTRTLSLCVLDSVGGIAVEATLPPEPDQLLDVLAPFRDGLVVGCECLFAWYWLADWCATQSIPFVLGHALYLKAIHGGKTKTDTIDAQKLARLLRGGTFAQAYVYPKSMRATRDLLRRRTYFVRKRAELLAHLQMTFSQYNLTPPAQKLCYAANRAELNLEVFPDPSTRTMLRADLTVVSALDAQIKHLEAELVRTAKVHDPQAFHRLRTVPGIGPVLALILLYEVQDIKRFEDEGRFLSYSRLVSGVRESAGKFKGTGGRKIGNAHLKWAFSEATCLLIRNLPKAKSWLARKERKIGKKRALGALAARLARCVYHRWRKQEAFDVSKFLAS

SEQ ID NO: 225284 - protein, 433 aa, unidentified
MEQPTRFVGMDVHKDTIVVAVTATGEVGKATPYGRLPNTAAALETLVKRLRQAGGGPLKFCYEAGPCGYGVHRTLTRMGEDSMVVAPSMIPRKSGERQKNDKRDAASLAVLHRGGLLTAVWVPDAAHEAMRDLIRARLAAVRAVRAARQQLSAFLLRHERPYPSGRTAWTKAHRGWLAGQRFAQPAQQIVLEESIEAVRLAEQRRDRVEGYLRAQIPTWSMFRLVRNLCALRGLDTIAGAGLAAAIGDPSRFASAPDFMAYVGLVPAEHSSGPKRRIGAVTKAGDAHARTLLVEAAHSYRFPARIARHKLAAVDAVPEAVRAIAWKAQTRLCQRYRQMMAKGKPKQVAVTAIARELAGFVWAVACIVSDPPATSSAATPASEDVHPTGSHRSRTPRRPPLRGTAHRTGSPGQTRGAPSRREPGGMMAHHHSAG

SEQ ID NO: 225285 - protein, 414 aa, unidentified
MSESSFSMPAPAPLASVVGIDIGMESCMMCALTMEKRQVIKPSPFANKAEGFISLFERLERLGTVPDQILVGLEATSRYGESLYYALLKRGYRVCLLHPAQMHAFAQQRGLRAKTDQVDATTIARALLSGEARFGYVPTEQVATYRELVRLQQQLSDDVVRYKNEIHALLVVLFPEFTQVFADPTRPTALAFLKRYPSAQAVAQAEVGILSQVLHELSPKHYGRRTAEKLLDVAKKSISSGVAISARSTSLRILCDQLEHTLTNLEQLQQEIETLLDQDPKAKGVLSIPEFGVMTVAVLRAELGDLDRFARMDQIVAYVGLDLQVKQSGKWIGQTKLSKRGSGRVRRILYLAALRSIWLANSPFGAYYRRLVDRGMKKGMAVVAVMRKLLIVAAHLMLTEQVYEPSKVAALSVR

SEQ ID NO: 225286 - protein, 344 aa, unidentified
MEQAITIGLDIAKHVFHAHGADERGGALFSKRISRGKVLEFFAAKPPCVVALEACGGAHHWARQLTELGHEVRLIPPAYVKPFVKRQKNDAIDAEAICEAAQRPSMRFVAVKSEEQQAAGLVFRTRDLLVRQRTQLINAIRGHLTEYGWVAPKGPSHVAMLADLLEEEEMASSLPPAARSMFRVMLDLLDELDGKIAELDKEIARRAREDEVSRRLMTIPGIGPITATAIAALAPPAETFAKGRDFAAWLGLAPLQRSTGGKQKLGAISKMGERTLRRLLIIGSSAVVLHASKRGAPKGSWLEQMLARKPRMLVTVALANKMARIVWALLVKREDYRAPVAAMA

SEQ ID NO: 225287 - protein, 354 aa, unidentified
MTIIGVDFHPEFQQIASVDTDTGEFQEKRLAHCEEAEKFYRALAASGQKVRVGMEASGHGRWFERLLAELQIELWIGDAAEIRTKRVRKQKTDRQDAQLILRLLLEDRFPQIWVPSWENRDLRQLLWHRHRMVQARTRIMNQLQAVALNEGVRCKKRLWRERGRQQLESFRLAPWASRRRRDLLELLDRLNPTIAELSQAIEQEVEKCPPAQRLMTHPGVGPLTALAFVLIIGEADRFQCGKQVASYLGLVPLEDSSGNRRRLGHITKQGSSMLRFLLVEAAQVTARSLPEWRSKYLHLMMRRGRKTAKVAMARRLAVRLYWMMRQGWDYQQWNKFGSHAGQLGHRDGVQSNTE

SEQ ID NO: 225288 - protein, 359 aa, unidentified
MKKDSRKAKCMDKPAITVGLDVGDRFSRYCVLNEDGEVVEEGKIQTTEVALQRHFDKEPRQRIALECGTHSPWISRLLERLGHQVIVANARKIRAITASESKNDRNDAEKLAHFAYCDPFLLSPIRHRSPERQQDLNLIQVRSTLVRARTMVINSVRGLVKSAGGRLPKCSTADFAKQALPLISAELALVVAPLVEQIGTLTDQIRRLNKQIEDLSQRYVEIKLLRTAPGVGPVIAAAYVLTLDSPDTVANSRQAGAFLGLRPRQSQSGDSNPQHSISKTGNIYLRSLLVQSAHYILGRFGQDCELRRWGLKLAASGGKRGKKRAIVAVARKLAVILHAMWRSGHPFEPFLLPATTAVA

SEQ ID NO: 225289 - protein, 344 aa, unidentified
MSKHSIRAGDVAGLLVRLAQLKEKARGRTGRDFPIIAIQEAGLDGFWIHRVLQSEGIESHVVDAASILTSRRRRRAKTDGIDGETLVRTLLAYKRGEPRVCAMVKAPTPEEEDRRRICRERKTLVGERVEHVNRIKGLLFAQGVSDYEPLKRNRRARLEGLKTGDGRPLPAHLKAQISRELDRLELVLPQLKAVEAERDALLKPVSEGCPAPAAMLAQLKGMGPEFTAILWSEGLFRSFSNRRQLAAYAGLAPTPWQSGSVAHEQGVSKAGNPRLRTTMIQLAWLWLRHQPTSALSVWFQERVQSNGSKMRKTMIVALARKLLVALWRYSTSGVVIDGAVMKTI

SEQ ID NO: 225290 - protein, 403 aa, unidentified
MVERVWVGIDVGRHAHHAAAVDDAGVVLWSRRVPNDQAAIEAIMDRVSEIESVVWAIDMTAPESALLRGVLSSRGQHVRYVPGRVVHSMTGAFAGEGKTDARDAVVIAQTARLRGDLATIAIPDDVAIELDLLTGHRSDVVAERTRGINRLRGLLTRIFPGLERCFDYSTLTGLAFLTRFATPAAIAAVSDEEIYDHLRGHGVRRPTIPKMIAKARAAAAAQTVTLPGEATTARLVQQAATALIALTRQINELDKQITEVFRKHRHARILESVPGIGTRSGAELLAITGGDLTSFGSAAKLAAYAGLAPVPHDSGNRHGTLRRPQRYHRGLRKVFYMAALNSSQRDGPSREFYQRKRNEKRSHVHALIALARRLVDVVWALIRDGRLWTPQPVALSTTPPVAA

SEQ ID NO: 225291 - protein, 368 aa, unidentified
MEHDITAYVGLDVHKDSIAVAVAAPGRAAPRFVGTTGPRLAELTKALSHLGKPAQLHVAYEAGPCGYTLARELISRGYRCEVIAVAKTPRKPGERIKTDRRDALSLARYLRAGELTPVTIPDACDQALRDLSRAREDAVRARLKARQQLKAMLLRHGLRYEGKTSWTQAHERYLGQVSFEYPAQDIAYAEYRAAVRDANDRVERLTQALRKQTDGWRFAPVVNALMALQGIDFVTAATLVAELGDLTRFAHPKELMSYLGLVPSEYSTGESRSQGKITRAGNSHVRRVLIESAWSYRYSPRMSRDRVVRCEAQPKAVRDLAWQAQLRLCSRYRRLTARGLHQNKICVAIARELAAFVWDLARHVPLER

SEQ ID NO: 225292 - protein, 487 aa, unidentified
MHPRTTNKSTQTSDVRGFSFESAGALALDNEYSGFAVLPAHYIAFAERKRARPWTSIYHCGRYDVKPLATQQFTAYVGIDWADTKHDVCLQVPGNELREFDCIRHQLADIDQWAQSLHQRFGGPIAVALELAKGPSVYALQKYDFFVLFPINPLTLAKYREAFMPSRAKDDPTDAELALDLLMRHPERFTPLQPQSVQMRTLLSLTEHRRELVGDKTRFTNRLTNTLKQYYPHALDWFEQHDTLLFCDFLTRWPTFPQVKRARRASLEAFFYAHNGRRPNVISARLGAIKAAIPLTEDMGVIAPCRLQVLVLIEQLRTTLQAIDRFDREIAQLAPRLPDYCLFQDLPGAGPHLAPRLLAAFGEDRQRYQHADELQKYAGIAPVTERSGKKSWVHWRLRCPTFLRQTFVEWAGQTINKSFWAGAYYRQQRAKGSSYQATVRSLAFKWIRILHRCWQTRTPYDESAYLNALRKRGSPLLKHLELDAQSA

SEQ ID NO: 225293 - protein, 338 aa, unidentified
MEWTVAIGVDTHKDVHVAVALDRFGAQLDSQEVETTETGYRSLLSWALELGLPAFAVEGCGSYGAGLVRFLELTGVAVWECERPRRRERRRGKSDLIDAALAARRLLAGEGLSLPRGGGRREELRVLLLERRSAVQARTAALNQLSSLLVTAPDRVRDRLRALSGERLAAAAARLRPGTDLSCAAMRRLGRRVACLSEEIVETEQELAGLLAELAPDLLEECGVGPVSAAQLLVSSGNRERMTSEASFAALAGTSPIDASSGKQRRHRLNRGGDRQLNSALHVIALARIRHHGETAAYYQRLVARGRTAREARRCVKRALARHFYRRLREISTIALTT

SEQ ID NO: 225294 - protein, 369 aa, unidentified
MEKDTTYVALDDSKRKIVAGILRPTDTQPELRELANDPRQIRRLFERLTREGSVAACYEAGVSGYDLYRQITALDVGCAVIAPALTPRRPGQRIKTDRRDAAKLVRLFRAGELTAIHVPAEAEEAVRDLVRCRDDIRRDVLRWRHRVLKLLARHGRAYLAGKNWSHAHWRWIREQRFDLPPLQRAFEATMFALEQALARQAELDKEIEAIATTAPYREPVGWLRCCRGIDTLSAVILVAEVVDFQRFRRPRELMAYLGLVPSEYSSGETQRRGALTKAGNSHARRVLVEAAWHYRHRPTIGRALTNRTQGQPPEIVSHAWRAQQRLHRRYRHLVGHGKRTPIAVAAIARELVGFIWAAMTGHESRHQAA

SEQ ID NO: 225295 - protein, 460 aa, unidentified
MNRNRSKSKVDRTMPMVHPNAAAIDIGATMHMAAVRADRAPEPVRSFGTFTADLHRLVDWFTECGVETVVMESTSVYWIPIFELLDARGFAVFLVNARDAKHVPGRKTDVSDAQWLQRLHSFGLLRASFRPKGQIAELRAYVRQRERLLEYAASHIQHMQKALTEMNLQLHHVVADITGVTGLGIIRAILAGERDPEALACLRHYSCHSSAETIAKALTGSYRAEHLFALDQALALYDAYREKASACDVRIEAVLKELSTHRGRDHGSAPPVSRRRNRTDQANALAFDVRAALFVLLGRDITTIDGLGPYLSLKLIAECGDDLTSWPSAKHFTSWLGLAPSNKISGGKVLSSRTRRSGGRASALLRLAAVTVGRTDTALGAFYRRLSSRIGKAKAVTATARKIAVLFYNAVRHGMEYVDPGASSYETRYRTRVVNNLHRRAKAFGFVLQPLEPKASAAVS

SEQ ID NO: 225296 - protein, 345 aa, unidentified
MIIGCDFHPSWQQVCWLDTETGDTGEQKLVQATGDAERFYRQLPAPALIGMEATGNSHWLVDLLAELGHELWVGDAAQIRASYVRQQKTDQRDAAHIMKLLLEGRFPRIWMPSSAVRDLRQLLLHRYKLVIMRARVKNELQHLCLNKGVQKKRKLWSQAGQKLLRELPLKPWAARRRDDLLGLMAMLDRQIEPLDRAVTEQAQQDKMARLLQTQPGVGPITALAYVLTMGDVSRFPRGKQVASYLGLIPREHSSGGRQRLGAISKQGNRMLRMLLVEAAQIAVRYDPQFRKEYLHRCHQKPKAVAKVAAARKLAVRLYWMLRTQRPYPEIVRIESSPRVALVSEN

SEQ ID NO: 225297 - protein, 419 aa, unidentified
MNKLFVGMDISLDDVKVHILDQDGNDACSRFSVDNNPSGCNILVSRILDCCNKYNIQKVFIGLESTSVYGWHIQYYLADHASLKPFNPSVTTFNANTVKAFKKSLGDLPKNDWVDAFVIAEKLRFGRLPKSCPVDFRYLALKRLTRHRFHIVDSIVREKNYFLSNLFLKFSGLCQIKVFSNNFGTTATEIFNEFLTLDDIAARPLEDLIAFLVDKGRDHFNDPNATAKLLQDAVRKSYRINANVNDSLNFVIKSCLDNIQYLEKQKKASEKTIANEVKGFKNQFLCLTSVNGIGPTIAAGLISEIGGISRFDNDNALAKFSGIYWSEYQSADFKAEDTYLKRTGNEYLRYYFIQAADQLRKYCPEFSQYYARKFNESKTHKHKHALVLTARKAVRLVFALLREEKLYKPPAMKGDDCKY

SEQ ID NO: 225298 - protein, 419 aa, unidentified
MAFKILRKNCCGLDIHKTWIFACIGITDSNGRTEYKQARFSSFSNGLRDLADWLAKYSCSDVCMESTGKYWIPVFNILEKTCWVTLAHPKYTKPQKGNKTDRKDAKWICDLYMCGMVKPSFIPPPDIRQLRDLMRCRVKLTNMLTGEKNRAQNCLTVSNLKLDDVFSDVFGKSSRSIIQYILEHPGEQFDVTPFIHRRCKHPVEEIQAAVDGVVSREQAAKLKECLLHIDQLNAHRERIEAEILRLAEPYPYQLELIRTVPGFAAAPLTAVALISVIGVDMSVFPSAKHLASWAGCCPRNDQSNKKVKSTRISRAGCYLKPLLVQIANAVIKSDRHPECRERYRRIKARRGHKKAIIAVCRMLLTAIWNVLSKLEPYSAKGYLADKLTEHSVVISKAEGLALLRKRGYIFKDELAVESG

SEQ ID NO: 225299 - protein, 398 aa, unidentified
MTRVIIGVDPHKLSATIEVVDRHEKLLGSGRFRTDQAGYTAMRTYAKNWPDRLWAVEGSNGAGRPLAQRLLEAGEQVVDVPAKLAARVRLFDTGHNRKTDARDAHSIAIVAVRTTTLRVLRPDGELEALRMLCDRREELTRLRVQTVNRLQRLLAELIPGQAKKDLTALQAKAMLATVRPRDVAGKTRRRIAAEELADLVAVEAKMKKATAELKVLVGARGSRLMDLHGVGPVVAARTLADVGDIARFADRNRFASWTGTAPLEASSGEQNRHRLSRAGNRRMNHMIHIAAVTQLRVDTDGRAYYRRKRAAGKKPMEAMRCLKRRISDAVYRQLLTDAEPLGASPGGHCGATQESSAVDLPPHIDTSDQPLPGPANPTLQPAAPPRKSRTDHTLSPAS

SEQ ID NO: 225300 - protein, 340 aa, unidentified
MTITTVGIDLAKNVFAVHGVDQNGKTVLVKSRVTRAALPGLIAGLPPCVIGMEACSGAHYWARLFRQYGHEPRLMAAKFVPPYRMAGKSGKNDAADAQAICEAVRRPHMRFVPVKDESQQAMQCLHRTRQGFIEEKTATYNRLRGLISEFGVIALQSTDALRHMISVQKSSLPLQVQQCVDDLLEHVDRIEANITEYDRILSRMAKTDHRSQRLMELKGVGPTTACALVACIGNAHDFKNGRQLAAWLGLTPSQYSSGGKSKLGRITKAGDSYLRTLLVQGARSVLIGAEKRTDPFSRWVCSLVERRGYWRAVVAIAAKNARLCWASLHYGDDFRLYSAS

SEQ ID NO: 225301 - protein, 408 aa, unidentified
MKRYYIGVDWGDRLHQVYVGDDEGKKVREIKVPETVEGLAEIGRWLDEKRAEGIKLWAAIEKPAGRIVDFLLDHGVEVYPVNPKAVDRVRDRYRMSGSKSDAFDAYVLAEFLRTDQAHLRALRPSSEKAQELKMLCRDQNRMARHKTRLLNQLTTTLKEYYARPLEVFENIETELALDFLTRYPTPAHLGGLKRKEFNRFATQQHHLSKQRCEELWVKLHKPQLGVPAHVVRAKAQLVEVLIDQLRASIKAVKTYNHKVESFFVSSLAAQFAKTLPGGKSGTLVAAIWAELGDAAGRWESSGHLQAEAGAVPVTKASGKSHVVHFRFACNKHLRYSMYWFSFLSLNNSEWAKLYYRGQRDKGHSHPQALRALGAKWLKIIFVMWRDHKPYDEKYHLANIALQKMRQAA

SEQ ID NO: 225302 - protein, 412 aa, unidentified
MLDSSEVESTAADGVFIGLDWGNSHHQLCILDAAGRMVHQGKFAHDIAGARGLTERLHRHGPVQGIAIERSEGLLVETLQQQGHRLFCVSPKMSARARERYRLAPSKSDAFDAFVLADSLRHEHRHWRPLAAPSSLLAELRALTRDRERLIWNQRDVENQLRAVVLAFHPGVLHLFSSLDRDITLAFLRDYPTPAHAGRVGVARMAAFCARHGYSGRTRPELLVERLRANLLSASAGTTAGKAFTAALFVEQLELLNTQVRAITKRIRERLAEHPDAAIFLSFPGMGEVTAAIMLAEMGEDRARFPTAGVLLAETGTAPVTRSSGRSRTVKFRYAANKRMRHAIDWWAFVAVRENDWAHEAYWQARARGQLHNRAVRGIGARWTRILWRCWTDHTIYDPALHLKGRPASITA

SEQ ID NO: 225303 - protein, 347 aa, unidentified
MRFYTQQHLYYCGIDLHARSMYLCILDPQGEVVLHRNMPCAPELFLKAIAPYREDVAVAVECIFTWYWLADLCAKENIPFVLGHALYMKAIHGGKAKNDKIDAHKIAVLLRGGMLPMAYVYPPEMRATRDLLRRRMYLMRKRSELLAHIQNTNSQYNLPEIGKKIAYKANRQGVAERFDQPSVQRSIEIDLKLMDHYDKLLSEVELYIVRTAKEHDADAFLRLRSVPGIGKILALVILFEIHDINRFPTVQDFVSYARLVKCAKESAGKRHGSSGKKIGNVHLKWAFSEASVLFLRANPAGQRYVEKLTSKHGKAKALSILAHKLGRAVYYMLKREKAFDMSKFFSS

SEQ ID NO: 225304 - protein, 421 aa, unidentified
MKPQPSEAFAAFVGLDWADAKHDICLQASSSAHREFLCLDHCPEAIDAWAQSLRTRFNGQPLAVCLELHKGPIVSALRQYEFLVLFPVNPLTVAKYREAFTPSRAKDDPTDAELQVELLLKHRDKLTPLVPQSPTMRALAQLVEHRRRLVGDKVRLTNRLTSALKNYFPHALQWFQEKDTAIFCDFLSRWPTLKAVQLARRTTLESFFRAHHVRTADVITTRIEAIKNALALTTDEGVIAPHTLLVQALVAQLRVTLQAIADFDTAIAQRAQAHPDFPLFDALPGAGAVFAPRLLVAFGEQRERFPSAEELQKYAGIAPVTERSGKKSWVHWRWQCPTFLRQTFVEWAAESLRHSFWAQVYDQQQRDKGKSHQAAVRALAFKWIRILFRCWQDRTPYDESTYLQALHRRGSSLIQNLAKSS

SEQ ID NO: 225305 - protein, 312 aa, unidentified
MDAMVIGIDVSKDWLDVAVRPTGESFALKRTAAGIEDLVERLKDLSPALVAIEATGGFEAVVAAALAGAGLPVVVVNPAQVRAFAVALGKRAKTDPIDAAVIAHFAEATEPQLRQLPDERTRLLADLIARRRQIVEMLAAESQRARRISDHRLTRSITRLRKALEEELAELERLIADHMRRSTVWVEKEKLLASVPGVGKTIARTLIAELPELGSLDRRQIAALVGLAPWTRQSGQWRGKSFIGGGRKTVRSALFVGAMVAARYNPQLKQFRDKLVAAGKPNLLALVAVARKLITILNAILRDRRPWHPNPA

SEQ ID NO: 225306 - protein, 339 aa, unidentified
MDKLYGGIDLHANNSVVVVLDEADQVHYQKRLPNDLAAIIQQLAPFQPHLQGLVVESTYNWYWLVDGLMAAGYRVHLANPAAMQQYAGLKYTNDHSDARWLAHVLRLGLLPTGYIYPKEERAVRDLLRKRSQLVRQKTANLLSIQNLLTRNTGQALRSNQLKQLTPATVSTLVALPEHALALQVTVAVMQHLAEQITQVERAVHARVKLRPAFQSLLTVPGIGRTLALTIMLETGEIGRFPTVGQFASYCRCVGSTKLSNGKRKGQGNTKNGNKYLAWAFVEAAHFAMRYEPRIRQFYQRKQGKTNVFVALKAVAHKLARACYYIMRDAVPFDITRAFV

SEQ ID NO: 225307 - protein, 337 aa, unidentified
MEHFAGLDVSMEETHICVLDREGTLIREGKTRSSPAAIAAFLADGPPCEQVVFETGRMAPMLYHGLVEHGIRVVCIESRQAYQALKSLAGHKTDRNDARGLAHLARTGFHKPTHVKSLSAHAVRSLIAARKKLVGQRVTIDNQIRGLVVVFGVRLPRALSPAFKDAALKVSDGVPGLYAALSGLFAAREAMLGAIAAIDADMKRMARASKVCSRLMTVPGVGPITSLAFAAAIDDPSRFKRSRDVGAYLGLVPRRYQSGEIDYTGSISKRGDVRVRTLLYEAANVMLTRSAASLELKNWARAIGTRSTMRKASVALARRLAIIMHAMMRDETEFQAV

SEQ ID NO: 225308 - protein, 341 aa, unidentified
MAEYIGLDVSMKETAVSIRSEGKRIWRGKCASDPKIIAELVRKRAPAVERIVFETGPLSVWFWHALTAEGLPAICIDARHAAKALDMAPNKTDANDADGLAQLAEIGYFKPVRVKGFDSMLTRTLVAARVRLVRITVELSNQIRGLMKTFGLVVPAGRGSVFEKNVRDLLADEAALARIVLPLLESWRGLRQRATELSRQLIGEARHSKACQILMSIPGIGSITATSFMAAIEDPANFRKSRAVGAWLGLTTRRYQSGEVDYDGHISRRGDKHLRGLLYEAAVTVLTRSQADSGLREWGLKLRERIGFKRAAVAVARKLAVIMHTMLKSGELFDPAIGAAA

SEQ ID NO: 225309 - protein, 384 aa, unidentified
MDYRTEIDPTAASEHVTIAVAIELSDVRWLIGVQRGASERVSVHTVSSGDVDSVVRLIERERARVARGGRDADVQVCHEAGRDGFWVHRALVARGYTNHVIDPASIAVPRRQRQAKTDRLDVRGLVGVLRAWLGGDRLRCRMVRVPSVAEEDARRPHREREHLMRERVRHVNRIKALCALHGIKGVEPVRRDRRAQLAAIKTAAGTPLPAQAAAELTRELERLELVLRQLGELERARDAALRSPAPDDRGRAQAQRLMRLRGIAATAASVLGHEVFYRRFDNRRQVAGFVGLSGTPFASGRLNREQGISKAGNRRARAMMIELAWLWRQHQPDSALSRWFEARIAGAKGRLKRIAVVALARKLLVALWRYLETGVVPTGALMKP

SEQ ID NO: 225310 - protein, 362 aa, unidentified
MKEYIGVDLGKRKAVVVKKDRQGKVTGRATLAVTQAALENYFSKQDRKSQVVVEASGNWMFLYETIEKYTPQVMLAHPLKTRAIAEARIKTDTIDATTLAELLRLDGIPKAYIPPREVRDARELLRYRASVVALRTGLKNKIHAVLTKNAVECGWSNVLGKKSQQWLKTLPLRPCYRQELDGYVRLAEVMTSLIEEITETIERLVQESPQAQLLMTVPGISYYSALLILSEIGEVERFPSAKHLCSYAGLVPSIYSSGSKSFHGRITKQGSRWLRWICVEISVHAANGDASFQKLYRRVARRRGVATAKVAVARKLLTVVYAMLKNNEPFRGRNPRQRIIAKAWSKKRSEVSGHPPGVMVSA

SEQ ID NO: 225311 - protein, 358 aa, unidentified
MNRYFGCDAHKRYSMFVAMNDRGQTGPPVRVEHSREIFRRFLEALPPGSPIAIETVGNWYWMIEEMERAGHEPRLAHAGKAKLMMGQINKTDKLDARGLALLLRNGTLPSVWIPPGELRDQRELPRMRMSLVHMRTVLKNRIHATLAKYALDIAEVSDIFGVTGRKLLQARLEELPPYTRRSMETQLELLDQLEEHLRRCEEQIREVVQATPEMKLLLTIPGIGQILAVVMAWEIGEITRFPGPDHLASYAGTVPRVKSSGGKSFFGKVRPDVNRYLKWALIEAANVVQMKQGHWPNRHVVRLYQRVRERRGHAKAIVAVSRHLAEAAYWMLKRNEPYQEPQRPISSTQEKARRSHES

SEQ ID NO: 225312 - protein, 323 aa, unidentified
MSLSVVLGVDIAKQKFDVALLVDGKTKHKTCKNSVEGFETLTLWLERQGAGKIHVCMEATGSYGEDLAVYLHEAGHMVSVVNPARIKGFGQSELIRTKTDKMDAALIARFCLAMKPREWIPPLPEIRSLKALVRRVDSLIDMRTQEKNRISTAHESVTFLIKDHIIYLDQEIEKIGRQIADLIGKNPHLKERQELLNSIPSLGKATIPRLLAELDDLDKFNHVREIVAFIGLAPREKLSGSSIKGKPRLSKVGHARLRKALYMPALVSIQCNPVMIDFYNRLKDKGKNGKVIVCAIMRKLVHVIFAVLKSGKKYDPNFNQVLA

SEQ ID NO: 225313 - protein, 326 aa, unidentified
MNKSGKVISNERFLSTQEALDGFLDRFKDAKFVLESTGIWEFIYEGIEKRGFEVVLAHPLKVRAIAEARVKTDKVDAQTLAHLLRADLIPRSHVPPRDIRNLRQLVRQRAYLVRHTTSLKNRIHAELLRHGVRRPGDIKSAFTKGHVQWMRSLRIPTIESNLNCLEGIQSQIENLSSLLLDEFNSRKEAQLIATIPGVGYYGALLILAEIDDVHRFSHPNKLCAYAGLVPKVHQSASSVWHGRINKDGSKYLRWILTEAVHSHIRFCPESNLSRFYSRVAKRRNDQKAVVATAKKLLCTIYWMLKREERYHSQGSDLGEKAASSNA

SEQ ID NO: 225314 - protein, 315 aa, unidentified
MDERAGRIVGIDISKDRLDVHVLPEGEHFTLGRDEAGLKALTTRLAKQALQVVAMEATGGLEAPVAAELHAAGLPVRVVNPRQVRDVARGLGILAKTDAIDAAMIARFAEAAKLTGAPVPDAQAQHLGALVARRRQLIGMRTAERTRLQQTTDKRIRRSIERLLRSIEAELEGVDRDTDGAIKGSPLWCALAELLDEQPGLGNTTARVLVAELPELGRVSGKKITSLVGLAPYPRDSGLLRGKRAIWGGRASVRTALYMATLSAVRCDAVLKEFHQRLIARGKLPKVALVACMRKLLVHLNALVAKYYAKIEQTA

SEQ ID NO: 225315 - protein, 410 aa, unidentified
MVKENFIYVGIDLHKETHTAVMIDCYNQKLGEITFPNRPADFPKLVTKVKKCNTDAKEVVYGLENAYGYGRPLAVWLIDKGYFVKDVNTAISHRQAKHRGAMYRKSDSDDAEAIALATLNMLDKLPDACPNDAYWSLGQLVHRRDNIMKQRTRLVNQLHEQLCIAYPSYKQFFNDISRPTALYFWEHYPSRKYLKGKSVEDLRTELVPVSHNRCSTKNCEKILDAVASDKVKNNAYQDARDMVTLSIVSDLQHYDSQLAEVDKMLEQMYKMLGCTLTTIPGVNVITAVKILAEIGDIKRFSNANKLAQFAGIAPLHLSSSGKGKDLATKQGNRRLQATIYFLAIQMVQISSKGTPRNPVVRAYYEKRKAEGKTSQQALICISRRLISIIYGMLKSGTEYRMPVVENAGEK

SEQ ID NO: 225316 - protein, 428 aa, unidentified
MSEKDYNSQVVKRQRIRNTTLVVGVDVGNAFNAVGFMNKEGKVLGSCAKLYNSREGFEQFVKMTEELKRKYRLKDVLIGMEPTGHYWRKLAYFAREQGHEVRFIRTTALKHHREIDESSSAKSDQRDALTIANITREGKYIDTVIEDGSMRQLRTLAKTRERLLRYSVSAKNALHAALDDYFPELHKIFWSMGTRSLWAILERCPFPDDVGLMKVSFLQELIAKSARKKAGAAQKAKALYEAAQNSIGLKRVGGADRFRVKICLEEVKRTVLMLKDIDRQMKKVLNEIPSAPYLLSIPGVGPLSAAVFLGELGDPAYFRNARQIVKYAGYDPQESDSGSWVSRKFISKKGRWLMRKYLFFMSMRVVVLSKYFQDYYQRKLETKNRVGQQPKRKEILCAVAIKLIKVIFALLRDNRKFDDEVCAIAAHA

SEQ ID NO: 225317 - protein, 340 aa, unidentified
MTFVGCDLHTRMQQVAVLDTRTGEVSERQLAHDGSAIEEFYAALPGPVTIGIESTGYATWFHTLIQRLGHTLLVGDAAKIRAMVVRKTKTDRRDALHILDLLRHDRFPTIWVPDPATRDLRALLTHRMRLVRIRTMVKNGLHAIALNYRLARGSKLLRQAGLAQLHALPLPPHTAQRRDQSLELLAGLTAQIRELDEAITTAALAHPDAPRLITHPGVGALTALATIVVLGPVARFHDSKHVVSYVGLAPALNASADKYHLGHITKQGSPLLRFALGQAASHAARMDADLKRTYFTLVHRRGRPKAKVAVARKLLVRLFIMLRDQIDYDEFRRRGRLAPA

SEQ ID NO: 225318 - protein, 343 aa, unidentified
MDYFAGLDLSVKETSICIVDDAGKIVREVRVASEPEALLQVLTNNNYRFKRIGLEAGPLSQWLFSALAEAGLPVICVETRHMRAVLKAQINKTDRNDARGIAQMMRVGLYRPVHVKTLRSQKLRMLLIHRKLLQSKAIAIENDLRASLRNFGLKMGLVGTVRFEARIKELVENLPDLAALVEPLLIVRRVLREQLGILHRRVLAVVRDDEVCRRLMTIPGVGPVVALTYRVTVDVPARFRNSKSVGAVFGLTPAKDQSGERDRSGAISRCGDELMRVMLYEAAQIMLVRSAKWSWLKAWAMKIARHRGMKKAIVALARRLAVIMHRMWIDGTEFRWTREVAAA

SEQ ID NO: 225319 - protein, 323 aa, unidentified
MQDLESPDPSTDMTSYIGIDVSKNRLDIYAYPCGEISVVDNNKAGHKILNKWLRQFGRVFIVMEATGKYHRAVARACYANGHALSVVNPFRSHSFAQCMGQLAKTDKIDARMLAIYGQAARLEPMELAPKSLENLKELVAARRQIVARKTTLSHQMEECQLPFIRKRLKASLRQAERQVGEFDREIMAMIKDDPNLAERYAIITSVPGVGPVNAVTMIADMPELGACNDKEIAALVGVAPMVSQSGTIKGKGRIRGGRKMVRNALYMAAVSATRYNPTMKAFYGRLRDDGKLFKVAITAVMRKLIILVNALIGQNREWTSIAP

SEQ ID NO: 225320 - protein, 343 aa, unidentified
MKLMRFEVGLAKNVFQIHGVDRHEQPVWQQRLPRDRWLQTVLEKIEPGCEIGMERCGGAHYWAPQLQARGFRVRLIAPQFVKPYVQSNRNDTNDAEAICEAMSRRSMRFVTIKTIEQQDIQATHRIRAGLIEQRTAKANQIRGLIAEYDLVAPKELLMLRRAIPCWLEDADNSLTARFCRLLNGLWDDLRALDERVSELDGEISAIAASEPSAVRLQQLRGVGPMIATALVAAIGDTSQFANGRQLAASLRLTPKQHSSGGKDRLLGISKRGDAYLRTLMIHGARSVLRTAKSKDDRLSRWVVRLAERSHPNVAAIALANKTARMAWAMLRNGTDYQPDRTAA

SEQ ID NO: 225321 - protein, 315 aa, unidentified
MRNCIGVDISKRSFDVYVLETNKAFQMQNSSEGITRCAKLCHEILPELIVMEATGGYEMLLASHLQAEGFPVAIVNPRRIRDFAKALGQMAKTDKIDAKIIAKFAATLEPMPHEFIDDNSRKLKALISRRKQLLQMHTAEVNRREHALEKEIKQSIKAIITAIETQLQNVDKEIDDAIKEAPELKQKTEFLQSVPGIGKTTAHMLVAELPELGLLNRRQIAALVGVAPINRDSGVFRGKRMTGGGRKQVRTKLYMPTLVATQFNPVIKKYYRNLVDERGKCKMVALTAAMRKLLCIMNTMLKNSQYWQPNLAENA

SEQ ID NO: 225322 - protein, 352 aa, unidentified
MIVLGADSHKRSHTIAAVAAGTGELLGDQTVQVGRRGSGVLLQWARALDSERVWALEDCRHVSGSLERFLIERGERVLRIPTHLTAKARRSARQRGKSDHIDALAVARAALQERLGSFPAAHLDGPELDLRLLVDHRERLVRHRVELNNTLQWHLHDLWPELQLPGGALFSTKWSTRIGRRLARAEQTMRVRIARDELRRLRELTQAINQFERDITELVGQIAPQLLVEPGFGPLIAAKLVGEIAGAGRFATPAKLARVAGVAPIPASSGSTQRHRLDSGGNRQINAALHRVIVTRARCHAETRDYIARRRSEGKSTREAIRCLKRYLARHVWRLLQPPHPEQRKLPLSSNS

SEQ ID NO: 225323 - protein, 430 aa, unidentified
MKSNTQNAKIEAITEKTLVLGIDVGSEMHYARAFDYRGIEYSKKPFKFSNTEAGFATFKEWILALKERHEKDKVVPGMEPTGHYWFNLGKFLQDNEMKPVLVNPHHVKKTKELDDNNPTKNDRKDPKVIAGLVREGRYMIPYLPEGVYADLRTASNIRFQLQAELTRIQNRINRWFNIYFPEYKTVYGKPDAKSGMLILKAAPLPEDILTLGIDGVNQIWRDAKLRAVGKARAKTLIEAAEHSVGSKEGAVSARMEIRMLLEDYESRNTRLQEVMVLIEELVRKIPMAEKLLEIKGVGIRTVSGFLAEVGDISRFNNPKELQKLAGLALVENSSGKHKGETTISRRGRKRLRYLLFEVAMSLVSKNQEFRELHNYYTTRRLNPLKKMQSLMAIAAKLIRVFYAMLTKGVDYDPKKMVSDIKRPAVYLQAA

SEQ ID NO: 225324 - protein, 447 aa, unidentified
MKTLPIINPRAAGIDVGSEKLHVSIAGDVPVVFGTFTSEVYRLRDHLKTNAVTTVALEATGVYWLYLYTVLEAAGIEVVVVNGRHVRNLPGRKTDLADCQWLATLHAHGLLRGGFVPPAAIRQLQDYQRLRGDHIVGAASQVQKMQQALERMNIKFHDVISDLTGVSGLKVVQAILQGERNPAALVALCDGRIQEKKRPAMLESLRGTWAPEHVFALEQAHRVWSFYQGLLRECDQRIEDILKNLAGPELPAADATASKPASRAKQPGKNAPQINQLHELLVRLCGRDVTALPGIADYLLLQLVAETGPDLKAWPTEKHFVCWLGLSPGSKQSGKRRGNVKRQRNRAGRLFCTGARSLVQSVDKALGGFYRRLAARKGGLVAMKALARKLAGLYYRVLRYGLEYAEQGLQKYNARYEEGQRRLLVKLAAQQGFQLVASPRPLAEKMT

SEQ ID NO: 225325 - protein, 319 aa, unidentified
MKTVEFEQLISVGCGIDVHKDVLVATIRSNGKDFETRNFTGFTSSLIEVRDWFKERQVTHVAMESTGIYWKPVFNILEQDFEIILVNARHVKNIPGHKTDKKDSAWLSKLLVAGLLKGSFIPPNDIRELRDLVRYKKKKTQFIASETNRIIKVLEDCNIKLSSVVSDVKGVSATRIINAIIDGVEDVAQLVSHAHGKIKASKEDIKEALTGKITNHHRFMLKIIRETINENEKLITKVETQIDKSVIQYQVELELLQTIDGVGKDTAITIISEIGVDMDCFPNEHHLASWAGLSPGSNESAGKKKAPESSTETNISNQH

SEQ ID NO: 225326 - protein, 414 aa, unidentified
MNDPTVTPAPTGAVFAGVDWASADHAVCVVDAAGTVLWRHTVSHSRAGLSRMTTRLQELSVARVGIERPDGPVVEALLAAGLPVAVVPPRQVKNLRSRYTRAGKDDRFDAYVLADAMRTDGHRFTDLTRDTAETVGLRALVRARQDLVEIRVGLVNQLRHTLELAFPGAVGLFFDLHSPIARAFLRRFPTAAEAAVLDEAAMAAWLAGEGYCGRTPAAVFLDRLRTAPAGLTGAEAAAHRHVTLALLAGIDAIEDQAAELGRRIKEALALHPDAPVFTSLPRAGQVRAAALLAEIGDARGRYPDPQALAAAAGVCPFTDESGKHRAVGFRYKVDTKLRRAITDFADDSRHANPWAADIYNRARARGMRHPQAVRVLARAWTLVIWRCWQEAMPYNPDRHGGLNRYLSQSAAAAA

SEQ ID NO: 225327 - protein, 360 aa, unidentified
MGEITRVGVDLAKRVIQVHAVDESGRVIVAKQLQRDGFTAWCAQLPPGCLVAMEACSGSHHWGRRLRAMGMEVKLLAPHFVSPYRLSGKTGKNDAADAAAICEAASRPSMRFVPVKSVEQQSMMALHRLREGYKEERTACINRIRGLLAEFGLVFAQRPEVLRAALADVIEDASNELGAIARMALQRAHLHWIELECHIAWCDECIVRHARSDGQAKAAAQLCGIGPVTASALVATVDDFKQFKNGRQFSAWMGLVPRQSSSGGKAVLGEITKRGDVYLRTLLIQGAKSAVFTAHRRSDRLSRWIVQLRERVGWQKAAVALANKHARILWSILVNGQSFDPEHVPSKHLMRPPAALPAAG

SEQ ID NO: 225328 - protein, 343 aa, unidentified
MQAVTTIGLDIAKSVFQVHGVDAAGQVLIRRQLKRRAVLAFFQKLPACLVGIEACASSHYWSRELQALGHSVRLMPPAYVKPYVKRQKNDMADAEAICEAVARANMRFVPTKTPEQQSCLMLHRTRHLFIRQQTAVINSIRAHLAEFGIVAPVGRKGVTELLHIVADPSDKRVPEVARVCLAALGNQLLSLKEQIVEFDRMIMVWHRSNETSKRLHYIPGVGPMLATALVASVADPRTFRSGRNFSAWIGLVPKQHSSGGKDRLGSISKQGDRYLRSLFVAGALAVIRYAKIHGTKHRPWLTALLARRPTKVAAIALANKLARMAWAMMAKGERYRQPVALAA

SEQ ID NO: 225329 - protein, 337 aa, unidentified
MIITVLGIDLAKSVFQLHGNNQNGKAVFRKSLKRRELADHVANIPPCLIAMEACGSAHFWARRFLAMGHQVKLIAPQFVKPFVKSNKNDSADAEAIAEAAVRPNIYAVPVKEKWHLDIQTMLRARTRLVRNQTALTNEIRGILAEYGIVLNKGNAQIRKLVSSIIDDANNELTTVTRGTSLDLYDEFKDLEIRIESYDLRLKELSKENQTCQRLQEVPGIGILSALALVAATPKPSAYKNGRSYAAWMGLVPRHTGSGGRNVILGISKRGDSDLRSLMVHGARAAKIRMKGKTDRRSIWVSELENRRGANKATIALANKNARICWAIMNGATYKAAA

SEQ ID NO: 225330 - protein, 347 aa, unidentified
MRFYTQQHKFYCGIDLHTKNMFVCILDASGNVRVHQNIHTNPEAFLRIIAPFREDIVVAVECMFTWYWIADLCIQENISFVLGHALYMKAIHGGKAKNDKIDSLKIATLLRGGMIPQSYVYPARMRATRDLLRRRNHLMRKRAELFAHIQNTRSQYNLPDPLGCIAKPQNRDGIVERFDDPSVQKSMAVDLEMIEAYDHILTQLERDIIACAKEHDLRSYALLQTISGVGRILGLVLLYEIESIERFPSVQDFVSYCRLVKCIKESNGKKYGSSGKKIGNAHLKWAFSEAAVLFLKGNEPAKKYLQRLAHKHGKAKALSILAHKLGRAAYFMLKNKEAFNQKKFLGL

SEQ ID NO: 225331 - protein, 408 aa, unidentified
MEVVYSHVCGLDVHKKNIVACIITPDHKEIQTFTTMTEDLLAFIDWIKSHGITHVAMESTGSYWKPVYNLLEMEQIETLVVNARHIKHVPGRKTDVKDAEWIAGLLRHGLLHGSYIPSREQRELRELVRYRRSLIEERTREVQRIQKVLEGANIKLASVASDVLGKSGRLMLEAIIEGETDAVVLSELAQRRLKRKKAELQKALHGLIGPHQRLMLKTQLRHIDELDHLIEQLDAEIKERMTPFEEDLERLDTIPGIARRNAEQILAEIGTNMDQFPSAAHLCSWAGLAPGNNESAGKRKSGRTTKGNKKLRATLVEAARAAASTRNTYLSSLYHRIAARRGSNRAAVAVAHRILVICYHLIKYKHNYIELGPDYYEERKRDHVARQAVRKLEKLGYKVTLETPEQTA

SEQ ID NO: 225332 - protein, 367 aa, unidentified
MIVNEVAKNVEKIISIDTAKNSFQVLVVNQKTGKKKNTKVQRSKFVEYILKQGPCLIFMESCSASQHWARLFESFGFTVKLIAAQHVKAFLRNRRVKNDERDAEAIYKCGIQPDTKFVRIKTVEEQTVALLHTLRKAAVSQRVELSNRIRGILAEFGIVVARGRGSFNSEIEALFNECEKIHDVNLRVAISSLFEDYHRLEQREKELSEKIESLNKDNELVKIALTCPGVGPLTASAIVAEVGDASQFRNGREMAAWNGVVPSQHSTGGRSSLGGITKTGNRYLRTLLAQCACAVIQNASRHLEQGKDTHLDRFALRLKLNGKPVKKIMIAIANKIIRILWAMLTQRKTFENKAEETSDISAELQLA

SEQ ID NO: 225333 - protein, 411 aa, unidentified
MDKVYDKCCGIDVHKKLIVACFRKGNKQEVREFGATTRELLELSDWLKSGECEIVAMESTASYWKPLFNILESSDLNAIVVNAHHMKAVPGRKTDVKDAEWIADLLQHGLLQPSYIPDKSHRELRELVSYRKSLVGERGRELNRLQKMLEGANIKLSGTVRDINGKSARNILEFLITGESIDDAKYDEMYEKKIIAHNLKASKEQIIDDLNGVMTALQRRMMKELLVHLDELNVHIKNLNDEIDNYMKPEEKQAVAFIEEIPGIGHTSAQAIISVIGTDMSRFATDAHISSWAGLCPGDNESAKKRKSGKTRKGNSLLRSTLVICAHSCIRNKRSYFYAQYMRISAHRGRNRAYVAVAHSMLVAIYHVLKDGVVFNDLGADYYNQFNKERKINAYLKKLKALGWEGPIVAA

SEQ ID NO: 225334 - protein, 331 aa, unidentified
MKIREIIGIDMSKLDFHACIHTTQVFASFENSTKGFKALLKWVAKNSPHKPSQTLFVLEHTGRYSHNISYHFSANEIEFALVPGLEIKRSLGITRGKDDKIDAAKIALYGYRLRDEIKPTKLPGKQLDKLKRLLTLRDRMVRQRAGYKASLKEDRHVFCEEEAREIIEHQEDIIKVLSAKISRIEKQMGEIIKANKKLNKLFKLLTSIKGVGKVTARYTIVYTAAFTKFATWRKFASYCGVAPFPHRSGTSVKGRNKVSNLANKKIKSLLTMCVGSAIQSNPEMKAYYERRLKEGKSEMSTQNIIRNKLLARMFAVVKRGTPYVNTMKYAA

SEQ ID NO: 225335 - protein, 337 aa, unidentified
MKYCGIDLHSNNSVVIVSDEEDRIVLSKRLPNELGQIGAALEPHREDLAGVVIESTYNWYWLVDGLMDTGYQLHLAHPAAIKKYEGLKHSGDFADAAYLAHLLRLGLLAEGYIYPREERGVRDLARKRMQLVRYRTAQILSIEGILMRQTGARMKGEAVKRLTAEQVDAFAFAPNVALAVEANRAVSQTLSQQIEALEKRLKQEVILRPEYHLLKTVPGIGDVLATTIMLETGTISRFTQVGNFSSYCRCVDSLKESNGKRKGEGNTKNGNKYLAWAFVEAANFALRCCPQAKSFYDRKKSRSNRILALKALAHKLARACYHMLQDQKPFDVHLCFG

SEQ ID NO: 225336 - protein, 423 aa, unidentified
MEVLYPKCAGLDVHKDSVVACVRLASEQEVVRHLATFGTTTSALLDLGEWLSSYGVTHVAMEATGVYWKPVWHALSGSALPAELTEGEVREDAFHLVLVNAMHIKKVPGRKTDVSDAQWIAELIAHGLVHGSFVPPTPVQDLRALTRTRKQIVRERAQHVQRIQKTLEDANIKLSSVVTDITGKSARAILEAISKGETNPEKLATLVTTRIHASHQAVLEALRGNIRKPHQFLLRLHLDQIVALERAIDSIDTEVGERLEPFRKAAKILTTMPGVGDVVAQAILSEIGPDMQRFPSAAHLVSWAAMCPGQDESAGKHRSRRTRKGPVWLKTMLVQAAWSAIKPKATYLNALFHRVKRKGGAQKAIVAVASSMLRAMYYMLRNGVPYRDLGPQHFTTVDRDKTAKRLLKQLAQLGVEVELKQVA

SEQ ID NO: 225337 - protein, 348 aa, unidentified
MAMTIVEAGRTIVGGVDTHLDVHVAAALDPIGGVLGVESFDATPRGYKALLEWMGAFGTVLQVGVEGTGAYGAGLGRFLAKAGVEVIEVDRPNRQARRTKGKSDSADAVEAARAVLSGRAAGAPKSRDGAVEAIRTLLVAKRSARAARSRALAQMRQLSYTGPDQLRSRFKGLSISDLVAQAAALRPRASGDPVVYATKVSLAALGRRVLTLDDEMVGLDELLTDLVTKCAPQLLGLYGVGIDTAATLLVAAGDNPERLRSEAAWAHLCGVAPIEASSGKVTRHRLNRGGDRFANQALWRIVMTRLAGDPRTRAYLVRRTKEGRSKREVIRVLKRYVAREVFKYLPRG

SEQ ID NO: 225338 - protein, 340 aa, unidentified
MRLYTGIDLHSSNSYLAIIDENGKRVFKRKIPNDPEQILSALAPYKDAINGIVIESTYNWYCLADGLMTEGYKVHLANPTEIKQYKGLKYSDDQHDAFWLAEMLRLGILPEGYIYPKEDRPIRDLLRKRSHLVKLRTSLIISLQNIICRNNGFRLKTNDVKALNTDRVAPFLEQNEDLALAGKISKESIDFLTRQIKAVENVVEERMELREPYKKLLTMQGVGKTLGLTIMLETGPISRFAQVGNYCSYCRKVSTKWISNDKKKGKGNKKSGNKYLAWAFSEAAEIARRYYPEARAFYQRKMQKTNAMIAHQALAHKLARAAYYIMRDGVSFMPEKIFRS

SEQ ID NO: 225339 - protein, 321 aa, unidentified
MMLSFCGIDVSKDRLDVIVLPEEQCCSVSNDRTGWADLVERLRGRSIAGIGIEASGGYERGVTRALLAAGMPVRQVNPFKLRQFARASGVLAKSDPLDARMIASFVAIMPTRPAQRTPAGAAQVAEMLAVRRQLSAEKVAAENASRLLEDAMLRRLSRRRIGRLAGDIDLLDKRMVEIVANDPALAHRYRLLTSMPGVGSLLACTLIALLPELGCISRKQVAALVGVAPYAFESGTLKGRRCIWGGRANVRQVLYMAAMSASNWNPALKPFHDRLNAAGKKPKVTIVAVMRKMITTLNAIVRDDVLWADRHSGRPSVTTTR

SEQ ID NO: 225340 - protein, 321 aa, unidentified
MTYIGIDVSKDTFVVAYSPEKNSKTKTFKNTTKGIHEFIRTISKEEHHCVMEATGNYSALLVYLLSEAGITTSLENPLKVKNFARAMLSTVKTDETDARLIALYGEKMNPTPYKLRSDAILTLKQKRTVIRQLKKQLIATRNLKGSMEVLPFFDAKCKKSIEKTIAFLEKQVKDLEEDLSSLARSEYKKQMDLLTSVKGIGVTLAAALIMATGGFTYFDNAKQLTRHLGLSPTYQQSGTSVNFKGHINRNGDSSLRSQLYVAAFASLRCNTECKACYDRLRSNGKPGKVAVIAVANKLIRQAFAVVTQEKPYVDGYVSSKK

SEQ ID NO: 225341 - protein, 343 aa, unidentified
MSVVRIGLDLAKHVFEVHGVDARDQTVLRKTLRREGVAGFFAELPPCVVGMEASNGAHYWAQVLADLGHEVRLISPQFVTPYVKSNKNDRNDAEAICEAVGRPSMRFVPPKTPEQLTIQAVHRIRQRLVSDRTRLVNQIRGLLAEHGVVIARDINRLRHALGRIADGAETDLNDMIRDLACDIREELDELDQRIATYNRRIRVLFRSNEACQRIGQIEGIGPVTATALVAAVGDRSCFRNGRQFAAWLGLVPRQRSSGGKSRLFGISKRGDRYLRTLMIHGARAVLGKAHGKDDPRSQWIGRMRERRHPNVVAVALANKNARIVWAVLSRGEAYNQVKEAPMS

SEQ ID NO: 225342 - protein, 351 aa, unidentified
MNRIYIGVDFHARQQTICYLTTEGGELLFHELKHQNKAEVRAFYAQFSGQVIVGLEASGYSPWFERLLTELSCEVWIGDATEIRRRARWRHKNDRRDAELILDLMLHDEFPRLYLPPIQSREVLRMLRYRQKLIKIRTMGKNSLQALALQSGLAKGSHLFSKAGLQELRTAEMSPAMQWQRDQWLQLLDPLNQRLLETMQWLKLQSVDDSRIALVRTHPGIGLLTALCIVHSLAPVTRFRNTRKVAAYAGFDPLERSSAERQRFLGISKAGSRVLRYLLVEASHTAVKRDDELKRFYKRLVERRGRPKAKTAVARKLLIRAFIMLRDEIDYAEFQRRAVAARRARQSTSTP

SEQ ID NO: 225343 - protein, 407 aa, unidentified
MRLFVGDDWAEAHHDVEVMDGSGRRLAKARLPEGVAGMARLHAMIGGLVGDAADEAEVLVGIETDRGPWVRALVAAGYTVLAVNPLQAARFRDRLGVSGAKSDAGDAHVLADMARTHAHELRPVAGDSPAAEAVKVVARTHKTLIWERTRHTQRLRHALRDYFPAALDAFEDLDAADTLELLGKAPTPAQAARLSIAQISAALKRARRKNIAEKAAVVQAALRAEHLGQPEVVAAAYAASVGALIAVLTVLDTQVKALQGQVEAHFGRHPAAEIIASQPGLGSVLGARVLAEFGDDPHRYTTAKARKNYAGTSPITRASGKRKVALARFVHNDRLIDALMTQAFTALRNSPGARAYYDRQRARGANHNAALRQLANRLVGILHGCLKTDTHYDETTAWSHHTENVAA

SEQ ID NO: 225344 - protein, 350 aa, unidentified
MFIIGCDYHPGFQQIACVDTDTAELSEHRLAHREEAEAFYRVLKQRNLSARVGMESSGHSRWFERLLQELGFELWIGDPAEIRSKRVRKQKTDRQDAQLLLRLMLENRFPRIWVPDAGNRDLRQLLWHRHRLVQMRTRVMNQLHVVPLNEGLRRKKALWRPGGRKELESIALAPWASRRRQHLLDLFDQLTPKIQELTRALEEEVEKRPVTRLLMTHPGVGPLTALAYELVIGTPERFHCGKQLASYIGLVPTEESSGDRRRLGHISKQGNVLLRFLLVEAAQVTVRSQPEWRSKFFHLAMRRGRKIAKVAMARKLAVHLYWMWRQGLDYGQTQKLGSHAGEPGNRDGEQ

SEQ ID NO: 225345 - protein, 387 aa, unidentified
MPQPNDLSRSLVAVDQNSTIIAVIELSQSSWLVGGVLPGIERQLCKKLEPSPERLLAVLHRWRDEAVRAGRTITRIALAFEAGRDGFWLARWLERRGVEAHVIHPSSVPVSREHRRAKTDRLDTELLKRGFLGWLRGERGHCSMARVPTIAEEDAKRPNRERESLVGERTRIVNRIKSTLARLGIRNFKPTLRKAAERLASVHTPEGMPLPPNALAELQRDMARLGFVVSQIREIEDARQKRLEQQPETGAHAMVRLLARIVGVGVETADMLVHEVLSRPMRDRRAVARYAGLTGAPDESGGQRREQGLARAGNARVRRGMIQLAWRFLLFQKESALAHWYRARTADSRIGTRKTMIVALARKLIIALWRFVTTGEPIEGVVLRPAS

SEQ ID NO: 225346 - protein, 406 aa, unidentified
MIFVGIDIAKRSHVASAVDEDGGTVVESFKFNNTASGFAKLLKRLRKADATPENSLVGMEATGRYWVALFDFLISHGYEAAVINPIQTDAFRGVWTVRKVKTDALDAAMIADLVRYKRYEPSALGDEATEELRNLARYRLSLVERSTALKNRATAILDRTFPELAGLFSNAYCPTHRELLQHCATPDQVLGTDVGTLERILREASRGRCGRAKAERLKALAKESVGVGFGSKTLAFEARLLMEELDFVQDQVKEVERELARLLERTQGKWLVTIPGIDVPLVSVIAGEIGDPDGFDDPHRLMGYAGMDPTRSESGETVRSDGHMSKRGPGALRWAFMQAADCARKNDPYFGDYYDRKKGEDKKHHYVALSGVARKLMGVALAVMKEGRPYEPAPPRNHRPGHLKEA

SEQ ID NO: 225347 - protein, 382 aa, unidentified
MQASTVDTLTVGHIGTIFVAIELSQKTWLVTLHSPDRDRMSRHKLEGGDHAGLLALIEKVRSRAAEKLGSVPRVVSCYEAGYDGFWLHRLLEAAGIVNFVFDPASIAVEQRSRRTKTDRIDGELLLRTLMAYLRGEPRVVRIVRVPSVAQEDARRASRERDRLVKEQTAHTNRIKALLRLLGMAVGNPRRRDWLSWLARQRDWQGQPLPPHLLAEVTREHARLMLMRKQLAVLEKAQAAPAPAVPAQMAERKDLLQRLKALGPAFTAMLVNEVFHKDFRNRREVASYVGLAPSPWQSGGIDREQGISKAGNPRARLKAIELAWLWLRHQADSELSCWFHTRTATAGKRARRIAIVALARKLIVALWRYLATGLVPAGATMKA

SEQ ID NO: 225348 - protein, 330 aa, unidentified
MEKKDYVGIDVSKETLDLRLHSLKQQEVVDNKIAGFKKMYRWILKQVEPGTKLLFCFEHTGLYAVPLQLFLEEMGLEYVQVSGLQVKRSLGIQRGKNDRIDAQKLAEYAYLHRDTLRPYKLQSTYLIRLKYLLSLRSRLVRQRGGYAASANEYKKFLALGTADALLHSQKEMIKACDKQIVILENEIKQVIVSDQKIKDQYSLATSVKGIGMISAAYMIALTNCFTAFKTWRQFACYAGSAPFEHQSGKSIRGKTQISQYANKQMKAILTNAAKSAIQYCPELRQYYQRRIREGKGKKVVVNIIRNKLISRVFSVINRGIPYLELAKYAS

SEQ ID NO: 225349 - protein, 457 aa, unidentified
MTKRKSKAKSKSFKVPKLPHHLRHMNLNAAGIDIGSERHMVAVPEGRDTVSVREFGTFTTDLEALASWLKQCGVTTVAMESTGVYWIPLFELLERRGFEVKLVDARHVKNVSGRKSDVLDCQWIQQLHTYGLLAGAFRPPDEVCVLRSYLRQREMLTQSASMHIQHMQKALQQMNLLLHNVVSDITGVTGMKIIKAILAGERDPRVLARNRDERCHHTAAIIAKSLVGNYREEHLFALRQAVDLYETYQAKIADCNQAIIKQVEAQPDISDDEPPTPDKQVRARDRIRDGVDMRDLLFKKSGVDLFAIPGLAADTLLVLASEVGFDMTPWKTEKHFAAWLNLCPGTKISGGKVLNNKTKRNPNRAAQAFRMAAASLYRSQTALGAFYRRLKSRAGGKQAVTATAHKIARIYYAMLTHGTSYVELGQHAYEQRYKERRLDHLKVQAKSLGFQLVPCTT

SEQ ID NO: 225350 - protein, 319 aa, unidentified
MNFYNNTHPYYCGIDLHARVLYVCIIDQEGNTCVHQEIPADPDKLHQLLGSYIGNIVVGVECMHCWYWVSDFCEGIGVDFILGHALYMKAIHGGKAKNDRIDSFKIANLMRGGNFPLAYVYPKAMRATRDLLRRRTKIVRHGGDLKAHVANTTSQYNLPPNKVNLKNKDAREQLKTTFPDEVVQRNIDLDMAILDCYAKELSKIEWYIQQQAKQHKPVHFHLLKSVWGIGPILALTIIYEIGDINRFESVQKFASYARLVKCKAESAGKSYGTQGNKIGNAHLKWAFSEAAVLYLRGNKKAQGSEKGTDLFFLFTSLIK

SEQ ID NO: 225351 - protein, 320 aa, unidentified
MSASSVVVGIDVAKAHVDVSVLGAKLDAQRFDNQAEGHSALTAALKPLDVALVVMEATGGYETELTCALQAAGLPVAVVNPRQARDFAKAMGRLAKTDTVDARMLAEFAAVLLRREDLARFLRPLADAQQQWLAALVTRRRQLLAMRLSERQRLQITPKGLHPSIEAIVAAIQAQLDDIEGQMVGHVRTHFGELDRLLQSARGIGPVASATLIAELPELGRLNRREIAALVGIAPMANDSGSSKGRRRIQGGRFDVRRVLYMAALTASRRNPTIKAFYERLIAAGKLPKVALVACMRKLLTTLNAMVRTNQPWNNSLHGA

SEQ ID NO: 225352 - protein, 345 aa, unidentified
MEHFAGLDVSVKETSVCIVDDTGKIIREVKVASEPEALLAVLKNPAYHFKRIGLEAGPLSQWLYSALAEAELPVICVETRHMKAVLKAQINKTDRNDARGIAQMMRAGLYRPVHVKTLRSQKLRMLLTHRKLLQAKAIAVENDLRATLRNFGLKVGVVGTVKFEARIKQLVEDVRDLAVLVEPLLIVRRVLREQISVLHRRLLAIVRDDDVCRRLMTVPGVGPVVALTYRVTVDVPVRFRKSKSVGAVFGLTPSRHQSGESDRPGAISRCGDEMMRSMLYEAAQILLVRSTKWSWLKAWAMKIARHRGMKKAIVALARRLAVIMHRIWVNGTTFRWTREQAAAAT

SEQ ID NO: 225353 - protein, 341 aa, unidentified
MKNLFIGVDFSKEKVDVAIIFADGLTETAARVFNEFKTTVSGYKQLVKWVEQNSCGIDSSLWLFCGENTGDYSKGLCNFLYGKGYDMWLENAKNIKDASGLRRLKSDRADASMIAEYAMRNYDKSVMYEPLSESLAQLRELFLYRQMVVRHRCSFQVRRGEKRLTMEKSPIKTMISQSGRHIVSELNKEVEKIDKRIAELIKSDEELTEVFTIVTSVPGIGTQNAVCLMVYTDNFSRFNYDSRKIACYYGIAPFGKDSGTSVHSDPRVHYMANRQIKAMLTQAALTAVKFNPVMARYYIRLVERGKKKQVALNNVKNKLVHLVTAMVRNRQTFTPEYKISA

SEQ ID NO: 225354 - protein, 412 aa, unidentified
MEVVYAVCAGLDVHKDSVKACVRRSGPNKARSSEVQTFGTTTRELLRMTQWFTTCGCTHVAMESTGVYWKPVYNLVEGSFEVILVNAAHIKQVPGRKTDVKDCEWIAQLLEHGLLRASFIPPKPIRELRDLTRHRKTLIQERARTANRVQKILEGSNVKLASVASDVLGVSGRAILEALIGGERNSVALARLTRGRLRATRDKLEEALTGRFTEHHGFLLKQLLAQVDFLAARIAECDQRIEVLCRPLAEKIERLKQMAGVGQRAAEQLISELGVDMGQFPSHRYAASWTGICPGNHESAGKRKSGKTRKGNRWLRCLLVECAWAASRTKQSYFAAQFRHLARRRGPKKAAVAVGHSLLVAAYHILRDDVDYKDLGADHFDRLNHNRLTRYHVERLQNLGYQVNLESQPDAA

SEQ ID NO: 225355 - protein, 461 aa, unidentified
MSQRNSSNHRRRESKRPPIMEQIQPNAAGVDVHSDCHFVAVPEDRDEQSVRVFGAFTEDLVKLADWLSACGVTTVAMESTGVYWIPLYDYLEKRGFQVLLVDPRKLKSVPGRKSDVVDCQWLQQLHTYGLLAAAFRPDEQTCVLRAYMRQRGLLVEESSRHVLRMQKSFEQMNVKLEKVLSDITGVTGMQIIEAILAGERDPEKLAKFRDPRCQNDEATIAKALLGEWREEHLFTLRQAVDQYRMCCKLIEECDGRVEAHLQTYADVPQTNPAPAIVPRANKVRKGKTFLRFDAQPVLIQKTGVDLTRIDGIDNCTALKLISEIGTDMSRWKTEKHFTSWLALCPDNRDSNGRRKSSRTRPSANRAAAALRMAAQGLHHSKSAMGAYLRRMKASLGPAKAITATARKLAVIVYRVLKHGMRFVDRGQDWYEGQYRERVLKTLTRKAQQLGYVLTPIAPAKT

SEQ ID NO: 225356 - protein, 397 aa, unidentified
MAVAVGIDVAKEFHWAAAVDERGGELVSRRVDNEPAQIQALIDELERVRAECGPVTVGIDVVGGIASLLTATLAEAGFALVHVPGLAVNRARQGTTGGEHKSDPRDARVIADQVRTRSDLRAIEPTGELDVELRLLVGRRRELVTDQTRRIGRLRDLLASIHPGLERIVEPTQKASLWLLSRYVTPAEIRRAGRSRLLNHLLRGGRLPRPQLERLADAALAAAQAQRLALPGERLAADLVRELAREALAVRERLKTLDADLEQALGHHPDAALIRSLPGMGATLTAEFIAEAGGIGRFPTPDRLAAAAGLAPVLRQSGKVRYLQRARGGNKALKRVLYQSAFCSLSHPASRAFYARKRREGKRHHQAVIALARRRVDVLHALLRTRQPYRYREPRAA

SEQ ID NO: 225357 - protein, 377 aa, unidentified
MQSVKTLVGIDVSARKLTAAKATGGGGDEKEFDNDAGGHRLLIQWLGRGARVCLEATGVYHLQLCLALRAAGVELMVVNPRVAKDYAKSLGRRSKTDRVDAAVLLDFVERREFVAWEAPRPSVLELRELGRRITELVHARTDEKNRLHARKASKVSREVVADLRAHIAQLDKRVKQIEAAAVAVIDRDPDLREQFLLISKARGFGRRTAVLLLTELAVLDPTMTTRELVAHAGLDPRVYESGSSVHRRVRISKVGNARIRAILYMNALSAIRHDRGAGLFAARLIARGKTRMQALVAVMRKLLHGIWTVLQRRVPFDSRVLFAASLAQAESSDSAVAAAQPEAIENHPQGRSEAKELRQQLDSRSPQATSRSMEKIA

SEQ ID NO: 225358 - protein, 341 aa, unidentified
MDEVSIIGIDIAKNVFHLHGATNEGAVIFRKSLPRSRVLEYVARHDRCLVALEACASAHYWGREISSLGHKVRLIPPQYVKPFVKRQKNDAADAEAIAEAASRASMRFVAVKSADQQGQAMVLKTRDLFTTQRTQTINALRGHLAEYGVIAPKGPVHLSKLEAALDDTAHNLPDIVIALCRRFFQQILALTEQIDSLTCQIKAIAKEDDVARRLTTIPGVGPISAVALATLAPPSSTFSKGRDFSAWAGLTPKQHSTGGKARLGRTSKMGQRDIRRLLIIGAMSVIQAAERRGGAPEGSWLARMLARKPKMLVAVALANKMARTAWAIMTKGEGYRVPLAA

SEQ ID NO: 225359 - protein, 427 aa, unidentified
MPYRIAGIDVHKTMVAVAVADVEVEGDWQFERRRFGASPSQLLLLTAWLVERQVEEVVMESTAQYWRPVWDALERDWQPTQRTRVDAKPTSGALHLAQAQSNSGRHGRKRDFPDAERLVKRLSAHELTLSFVPDVTQHLWRTATRRKYQLTRNRVQLQNRLECLLEEAHIKLSSLVSDLLGSSARRMLRALASGETDPATIAALGSARLHATAEQLCDALGAATDLHPLYRRLLAMTLAELEVIETHMQQLDEELAALLRAHQDALQRLAAVPGLGVDSAQQIIAEVGPTAGTFSTAKRLASWVGACPGHDESAGINHSHRSPNGNRQMRRLLNQAAHAAVKTKGSIFELLYRRFVVRLGHAQAIGAIAHRLCRLVWKILHDGVTYEERGPFVTKARAQRRAAKMIRELRSLGYRVEPVLAPSSNRA

SEQ ID NO: 225360 - protein, 317 aa, unidentified
MRFYTKQHKFYCGIDLHARTMYLCILNQDGEILVHRNMPAGPDPFLKAIAPYREDLVVCVECIFTWYWLADLCAREELPFVLGHALSMKAIHGGKAKNDKIDSQKIAALLRGGMLPQAYVYPAQMRATRDLLRRRMHLAHKRAELLAHVQNTNSQYNLPAIGKKIAYKANREGVAERFADPAVQKSIEVDLALITYYDELLRDVELTILNTAKHHDANTLYLLQTVPGIGKILSLVLLYEIHDLARFPRVQDFVSYCRLVKCAKESAGKRHGTSGSKIGNAHLQWAFAEAAVLFLRDHPAAQKDLTRLENKHGKGKA

SEQ ID NO: 225361 - protein, 430 aa, unidentified
MMEEVDDAELVVERIAALDLGKAGLEACVRVPSPHRPGRRMQELRGYGTTTAQLLEMVAWLRQWGVQRAVMESTSTYWKGVYYLLEAEGFECWLVNAREVKNVPGRAKTDRADAIWLAKVAERGMCRPSLVHPAEIRRLRDLTRYRRALVQDRTREQQRIEKLLEDAQIKISSVLSELHGVTARAMMDALIAGQRDPRALAQLAKGRARKKTAQLEEALRGFFTDHHAAILRMMLDNTDRISAQIAALDARIEKEIGPFSARAARLAEIPGVDAVAAAELIAEIGVDMTRFPSDAHLVSWAKFCPQTHESAGKSKSKGRGRGNPWLAGTLGRIAFANSRADTFLGARYRRLARRRGKQKAIVATGNSVLTVVYYLLSDPMATFCDLGPGYYESRINVHRRARDLVTQLQALTGQHIVIRDGKAVITDAAA

SEQ ID NO: 225362 - protein, 401 aa, unidentified
MSYKGTRFPPYHDAVVINEQGRRVGATRVAHSVAGLEALVTFLRDASGTGGELACIVETPNGLLVSALLEAGLPVYPVNPGTVERKRAPSGAKTDAIDAYLLARTGRSDLADLRRLRPDSPLIRELKVLTRDQEMLIEEQTRLVNQLTACLKAYYPVALTFFCKLQQGVTLTFLTAFPTPEAAGAATPETILGTMSAAGRPIGAAQAQAIVATLRDPHLHADALLTRAKARLMLTLVAQLQVVLAAVAAYEREIGCLFAQHADHALFASLPRAGKRLAPRLLAEWGDDRTRYADAAAIQALGGTSPVPYASGKLIRAHKRYACCKPLRNALYQFAWQSTLKEAWASAYYQRKRRDGKSHAVAVRALANQWVRIIFAAWRSGEVYNADIFLAAQRAHARRAA

SEQ ID NO: 225363 - protein, 402 aa, unidentified
MTYDYVIGMDACKYFHHACVLDIDGTQVLSKRINQNEQSLRALFSAFSAHDHKVLVVVDQPNNIGRLTVAVAQDIGIDVRYLPGLAMRQLSRIHAGNAKTDIRDAYIIAHAAKNLPESLRSVDRVEEAFLQLKVLNGIDEDLARSYTRLINQIRSALVGCYPQFEQALRGQIIHRKWVLHLLARYGGPTKIKRLGKAKAAAFARRYKARNPEPVLDAIFAAISEQTVTIAGAHYAEMGVAMPAKDALLKLEHRQQIEKEVIELINDIPHTQFLLSMLGIGPKTAAQILMTAGDMFDFLSAGHLASYAGSSPRTNQSGTSIMSNSLNRAGNKKLKNALWQSSFASIRFHERSRQFYERKRREGKRHNAAVVALARRRLNVLYAMMRNHEHYHDPAPSQEDLAA

SEQ ID NO: 225364 - protein, 350 aa, unidentified
MIIIGCDYHPGFQQIAFVDTETGELQERRLQHREEAEKFYRELAAQGMKVRVGMEASGHARWFERLLAELNFELWIGDATEIARKRERKQKTDRQDAQHILRLLLKDDFPRIWVASWENRDLRQLLWHRHRLVQARTRIMNQLQAVALNEGLRCKKRLWRESGREQLEAFRLAPWASQRRRDLLELLDRLDPRIAQLTQAIEQEVEKWPDAQRLRTHPGVGSLTALAFVLIIGRADRFQCGKQIASYLGLVPLEKSSGNQRRLGHITKQGNALLRFLLVEAAQVTVRSLPEWRSKYFHLTMRRGRKIAKVAMARKLAVQMYWMMRKAWDYEQLKKFGSHAGQPGHRYGVQ

SEQ ID NO: 225365 - protein, 323 aa, unidentified
MSSVSPSTNIGIDVSKETLDIAVHESAVHWTNKHDFTEFSQLLKALKALHPIRIIIEASGGLENLLASYLGAHNLPVIVVNPRQVRDFARATGKLAKTDRIDAFVLASFGATLKPAVRQLKSAETQELEALVARRTQLVNMLTAERVRLQQAQQQRRQSIVADLKAHISWLEKRLHICEGDLSQLLRLSPIWRASDERLQSVPGIGPVTALVLIADLPELGQLPDKQIVALCGLAPHARDSGKWHGKRTTRGGRAQVRTALYMAALVATKHNLVIKTFYRRLLSAGKQKKLALTACMRKLLVILNAMFRNQTSWHSPRLVPGA

SEQ ID NO: 225366 - protein, 348 aa, unidentified
MKVTTLGIDVAKSIFRIHGVDVRGAAVLHRQLTRKQLLPFLARLEPCLAGMEACAGTHYWAREIEKLGHTAKLMSPHFVTPYRKSQKNDGNDAEAICEAVGRPSMRFVPIKRAPQQDIQALHRIRFQLIKWRTALANEIRGLLGEYGIVVAKGIAPLRRELPLILDDGPNQLSGIFREMLGEMAERLRLLDQRIRQYDAKVKGVFDQDKRCQRLAKVEGVGALVATALVAAVGDAREFRNGRELSAWLGLVPRQHSTGGRNVLLGISKRGDRYLRTLLIRGARSAVRLVERRRDPRGLAISRLKSRRGPNVAAVALANHNARVLWALLTRAEDYRPRAAQRIDVAQSG

SEQ ID NO: 225367 - protein, 343 aa, unidentified
MTVVTIGLDIAKSIFQVHGTDDVANTVLRRRLGRADLLPFFAKQPPCVIGMEACSSAHHWARELSRLGHLVRLIPPQYVKPYVKRNKTDAADAEAICEAVGRPNMRFVPIKTIEQQSILALHRVRALLVRQRTSAVNAMRGLLSEFGIVAAKGIRRVEELRQRMSRTEPALLPDEARQAIGVLFDHLDGLQERVDKVEARIMAWHKASEASQRLTSAPGVGPLTATAIVAAVGDGRQFKSARHFAAWLGLTPRIQASGGKEHIGRISKGGDRYLRTMLIHGARAVVGTAFRTDVRPKPWLSELLRRRPVNVAATAVAHKTARSLWAMLTRAEFYRPRAAVVAA

SEQ ID NO: 225368 - protein, 370 aa, unidentified
MKKVATLFIGLDVHKDSISVAHVPDDRRAEVTYVGRIGTRPADIDRLVQRLQEKAERLLVAYEAGPCGYVLYRRLTRRGITCLVVAPSLIPKKPGDRVKTYRRDAVQLARLLRSGDLKSVYVPSVEDEALRDLCRAREAAVVTLKAAKFRLKSFLLRLDLHYTGRADWNDAHLRYLAKVVCHTPAQQIVFQESLRAVDEQVERLKRLETELADHVPGWRLAPVVRALQALRGVQDTVAVTMLAEIGDLTRFDTPRQLAAFLGLVPSEDSTGDSRRQGPITKSGNGHARRALVEGAWAYQYPAKVSPHIRKRLEGLPQPIQDIAWKAQVRLCKRFRCLVAKGKHPNVVVTAIARELAAFMWAIAKEVPLTA

SEQ ID NO: 225369 - protein, 349 aa, unidentified
MSTVRDEYTNIVGVDTHARTNTYAILAAATGQVMDTATFPTSPPGLKRAIAWIDRRSEPGKTLVAIEGTNSYGSGLTRALRATALDICEVRPPRRTSRAGRGKSDDIDALAAARTVLGEQISALLDPRAEGNREALRILLNARDTMERQGTSDRLILTALLRTMDLGIDARKALSDDQILEVSRFRMHRSDDLQTRVGRAEAKRLATAINQFRVQLARNKEQLEEIVTLMAAGLLDLPGLGPITSAQVLVSYSHHGRVRSEAAFAALAGVNPIPASSGNKTRHRLNRHGDRQLNRALHTIARTRMMFDAATKEYVKRRTAEGKSNKEVRRCLKRFIARQLFRKLQTLLT

SEQ ID NO: 225370 - protein, 343 aa, unidentified
MKHYAGLDVSVEETSVCILDETGRICCEVKVTSHPEDLRRILQDPIWHFERIGLEAGQLSQWLFDALADAGLPVVCIETRHAKAFLKAQVNKSDRNDARGIAQMMRVNLFRPVHVKTLTSQKRRVLLTARKLLQEKAIAIENDIRGLLLNFGLKVGVVGAAKFEERIHELIRDMPDLAEIVERLLDARRRLREHFAALHRKLLDLARGDAVCRRLMTIPGVGPVVSLAFVATIDTPARFRKSKAVGPVLGLTPVRSQSGNTDRVGRISLCGDGMMRTLLFEAAQTMLRQTTRWSWLKAWAMRVAQRRGSRKAVVALARRLAVIMHRMWCDGTEFRWTREAPVA

SEQ ID NO: 225371 - protein, 346 aa, unidentified
MLHAGLDLSRRRVDVCLVSVEGEIVDEWASPPDADGLRGLAARAAMHGGPVRGVIESMNGARFVHDRLEEHGWEVLIADAQKVKGLAPLACKTDKIDARVLAALSARDLVPEIWLPDPSIRRERELARFRLHLVRHRTTLKNRIHAALIAFGHPCPVSDLFGHAGRELLDRLAIPDPWRRNIDVSLQLIDDLELQIARLTVELKRQGADHRYIPLLVSAPGFGWINAFTVASEIGDINRFASPAKLCGYTGLCPRVNQSGASDRRGPISKHGPKYLRWALFEAALNACKHPLYKERYQHTKRRLGHQRGPKVAQIELSRRLTEAIWHMLTRNQPFAPAGAPFRLAA

SEQ ID NO: 225372 - protein, 425 aa, unidentified
MPLQLYESEEIDLSSVVEIVYPTCCGIDVHKNFLVACIAKTDEHGQTTHLLRRFSTNTGDLCRLADWLTSHNCKDVCMESTGKYWIPVFNILEKTCNVCLTHPKHVKAIKGKKTDKKDAKWIAELFKCDLVRASFIPPFDIRQLRDLCRYHAKLTYMITSEKNRSQNCLTTCNFKLDAVFSDVFGKSASRILDNVIALGHSNFDVAPLLDRRCKASIEDVKAALDGEFSFAQSEKLKIIRKHMEHLESLKDGLESLIYSLSENYQPEIDLLLTVPGISSPLTAIRILAEIGADMSVFETAKKLCSWAGVTPQNNESAGKKKSTRISRAGAYLKPLLVQIALAVSSSAKHPEIRDKFLALKKRRGHKKAVIAISRRLLTAIWHILSKKEPYNAELYRKADKPPINRVLSPEQAFALLRSKGYQIAV

SEQ ID NO: 225373 - protein, 361 aa, unidentified
MLYLGIDQHRKQLTVCVRNEEGDVMLRRQVSTEWDRVRAFGAEIRKLAGPAGFVVIVEVCGFNDWLLKLLAEYDCRETFVVQPEKQSKKKTDRRDANALCEILWLNRQRLLDGKPVQGVRVVHLPSVQDAADRQLTELRKRVGQLRTRTINKLKHLLRKHNLEQESPTKGLETVKAKKWLATLALETMDRLEMDLALTQWKQWDEQIETLDAAIRKRQAKNAQAALLATIPGCGAYSSLALASRIGDIERFPRPASLANYWGLTPGCRNSGEATDRLGSITKQGSVTARFILGQLVLHVLRRDAAMRSWYGRIKKRRGSKIARVAVMRRLATIIWHMVKHQQPYVVGGPPREKLRVQAGSR

SEQ ID NO: 225374 - protein, 352 aa, unidentified
MRRPKGQVKGGEDLFVGIDLHKNRWHITIRTFDVELFSASIPGNWESLQRILARYAGHQLRAVYEAGYFGFRLHDRLVDHGTPCIVTPPSLVPQEYGNRVKTDRRDSSKLAHLLAKGMLKRVWVPSEEELYHRQVIRRRRQLVRDRVRAQSRIKAELSFYGIHLEEPRGRWTQIYFETLQRIKFGNRWMQESFNRLLEQYEFLSAQIDKQTQLLRELSETALYQERVEILQSIPGVGLISAMELLLELQDVSRFRRAEQLAAYVGLTPSQYSSADKVRMGRITGIGKNTLRAILVEASWKLITKDQVMREKYERIKIRSGGKRAIVAIARTLLLRMRRMLLDRQAYALPLAA

SEQ ID NO: 225375 - protein, 409 aa, unidentified
MEVVHERCCGLDVHKETVVACVVVPSAGKQPHKEIRTFNTMTADLLQLADWLTAQGVTHVALESTGVYWKAPWNILESSFTLLLVNAQHIKQVPGRKTDVRDCEWIADLLRHGLLRASFVPDLPQRELRELTRYRTTLIRERAAERNRIHKTLEGAGIKLGSVASDVLGSSGRLMLEALVEGTTDAATMADLAKGSLRTKLPQLERALTGKVGAHQRFLIAHQLAHLDGLDELIDQLSQEIAERLRPFQNKLERLDGITGVGLRSVEVFLAEIGTDVARFPSAAHLASWVGICPGNNESAGKRKSGKTGKGDVWLRTALTEAAQAASHTKDTYLASQYQHLAARRGKKKAIVAVAHSILRIVWHLLDHDCEYVDLGSRFLEERDRQQIERRLVRRLERFGYTVKLEPAA

SEQ ID NO: 225376 - protein, 429 aa, unidentified
MNNNRKRRINQVDKDTLIVGIDIAKNKHAARAQDFRGIEYGRVRYFANREYDFEKIKRWILNLAKKASKKDIIVGLEPTGHYWLPLFKYFTASGFKVVTVNPYHVKKSKELDDNNPTKCDKKDALVIAQLVKDGRYSNPNLPEGKYAELRVAINHRERLMKDLNGIQNRVIRWLDIYFPEFNNVFKDWEGKAALSTLKNLPLPEEINQKKVKEIVNIWREDGIKRGIGKKRAKKLKRCAQSSIGLQTGKEMAELEIKNLLKQYEQLSKQLENLEEKIEKILKEIPGAKEMLSIPGVGLMTVAGFLSECGNLDDYNHPKQIIKLAGLNLMEHSSGKHKGETKITKRGRPQLRSLLYRVSMPLVRHNDEFSQIHEYYKNRLQNPLEKKQSLIVICCKLIKILYTLGTREIEYDGKKMLNDIKRPKEYKKAV

SEQ ID NO: 225377 - protein, 341 aa, unidentified
MKYVGVDLHKQSITVCVMVKEGDQRKVEQRRTLKCAETASIRNFFEQLGGFRVVVEATSHYEWFLLLVEDLADRCVLAHPKKLRVIAESKHKSDKIDARILAEFLLLDMLPEAHRPTPRVRQHRVLVRHRQAVQSQITSVKCKLRHKAAFYNSDMAKLFTARGLEYLAKIAMSDADRFECEALGEQLLFLQKQLRAAEKQLASFAQTAPVAERESRAVLATMPTVGTVTVDVVLSETADVRRFRNAKKIVAYAGFDPGFRESAGRGKELHIAKDGSGLLRWALIETAWRLVRKSARWRRLFMKLQGSTGHKKKAIVGVARRVLCVMYAMLRDGKAYRPEAV

SEQ ID NO: 225378 - protein, 349 aa, unidentified
MDISEIGVDLSKTIFVLHGINERGGKEYRKKLSRERFFEEMSLFPPKGTVYMEACGGAHYVCWELEKRGVKARQIDTKAVKKYASHQKNDYRDAEAIAIAGSRESTNYVPTKSREQVDLQVQLRIRERLVKNQTALTNEIRGFLLEQGVVVEKSKKALQDYLSDYYYREERFSASFRQSMDSLIEELKILRSQLVKQDKRLAEYVKQSEVMKSLKSVPGIGPITALCLVAAYGDGQHFKNGRHMAAATGLVPRQFSTGGVTRLGKITKRGNQYLRTLLVHGGRALLRSVLLRKSQDKHSRWVLKLYETKGYNKTAVAIANKNARIAYRILRNPELRFCGESAHQEITAH

SEQ ID NO: 225379 - protein, 346 aa, unidentified
MTILDCTRPVTGGVDTHLDLNVAAALDSIGGLLGVAEFRTTRIGHGLLVDWLGGFGPVARVGVEGTGSYGAGLARFLRGAAIEVVEVDRPNRQARRRTGKSDPADAIEAARAALSGRAQGAGKTRDGNVEAIRALVVAKRSARSSKIKALNQIRHLGFTASDELRERLSGISRQHLGAAAARLRPRAGSDAITFATKTALSTLGRRVLALDEEKERLNVLLAELVGKTAPSLLELHGVGVDTAATLLVAAGDNPGRLRCEAAWAHLCGVAPIQASSGKVTRYRLNRGGDRQANSALWGIVITRLRSDPRTQMYMERRLKEGRSKPEIIRVLKRYVAREVYPHLPRG

SEQ ID NO: 225380 - protein, 400 aa, unidentified
MSLDRPFAETAAIRSELGAIFISLELSRSTWLVTSLSPGAGEKLSKREVKAGDVCALLARLAQLRHKALARTGTSHPIIVIQEAGLDGFWLHRVLQEEGCESHVVDPASIAAPRRRRRAKTDRIDGEALLRALLAFKRGEPRVCSMVRPPTPEAEDERRICRERAELVGERVRHVNRIKGLLFSQGVGDYEPLRRDRRKRLLELRTGDGRPLGPHLKAQIERELDRLELLLEQVKTVEDARDRLLARLAESRTQDPTAPAETQPSPVALLMSLKGVGPEFAASLWTEGLRRSFANRRQAGAYPGLTPTPWRSGKIEHEQGLSKTGNPRLRTKMLQLAWLWLQHQPKSALAQWFHRRLPGMTGKAARKRLIVALARKLFVALWKFTSAGVVIEGAVMKTSA

SEQ ID NO: 225381 - protein, 421 aa, unidentified
MPNIEIGVDSMVKENFIYVGIDLHKATHTAVMIDCYNQKLGEITFPNRPADCPKLVTKVKKCNTDAKEVVYGLENAYGYGRPLAVWLIDKGYFVKDVNTAISHRQAKHRGAMYRKSDSDDAEAIALATLNMLDKLPDACPNDAYWSLGQLVHRRDNIMKQRTRLVNQLHEQLCIAYPSYKQFFNDISRPTALYFWEHYPSRKYLKGKSVEDLRAELVPVSHNKCSTKTCEKILDAVASDKVKNNAYQDARDMVTLSIVSDLQHYDSQLAEVDKMLEQMYKMLGCTLTTIPGVNVITAVKILAEIGDIKRFSNANKLAQFAGIAPLHLSSSGKGKDVATKQGNRRLQATIYFLAIQMVQVSSKGTPRNPVVRAYYEKRKAEGKTSQQALICISRRLISIIYGMLKHGTEYRMPVVESAGENR

SEQ ID NO: 225382 - protein, 316 aa, unidentified
MTITSGGFVGIDVAKEKLDLAVLGEFRVSQISNDSVGIANLVSQMLERKPELIVVEATGGYQRAVVQGLFEAGLPVAVVNPLRVRQYARACGKMAKTDRIDALVLAEFGKQVQPRRFEAQSEAGRYLEALLVRRKQVEGMLKAEKNRLRTVHQALRTSIEAMIDHLKAEMRQLEAEVRKFMDEQECWKEKREILVSAPGIGVVTTATLLAELPELGKMDRKKIAALVGVAPMNFDSGKKHGYRKTKGGRADVRSVLYMATLVATRYNPLIKAQYEHLVVRGKLKKVALTACMRKFLTILNAMLRDLKPFRAAPVSK

SEQ ID NO: 225383 - protein, 428 aa, unidentified
MNEDELSRLKEFRQLKKRIQGSDTHLIVGIDVAKDRHHAFLGTATGRTLVKKLIFANTSVGFTELLARVEAVRAQSGLSEVVFGLEPTSNYHKPLGRYLISEGCHVVMVGGKAVKNNRELLDERWDKHDTKDAANIADLVSRGKCFYYDMPSREIEELRDLHSLRARLKKEEHSLSLRIRNNLLAKHFPELDAFYSACERETLAIVRWCLNPQKIAVMPFEEFFKRVAPNARGIAQKLRLQKIHRLAHESIGCPVGSAVQFQARLLAEKIKEVRGQISDVDHLIAQASAPFPSYEYLLSIPGFGPYVASKVLATIADPRRFDSAKQIIRTSGYDLCADRSGKRSDQAVPVISKKGNSQLRYALYQAAMIASSRHRFFMAYFARMLQGREREQGIRTKMRVKLAAKMLVIAWTLMKKGEPFNPEHLSVQ

SEQ ID NO: 225384 - protein, 401 aa, unidentified
MSTLFAGLDWASRTHAVCFIDERGAVCERLDIAHDAAGLQQLQRRLIHHGRPPVAIERPSGMVVDTLLEAGFTVVPIHPNAVKATRPRYRSHGAKSDASDAYLLADLLRTDGHRFKPLASQSDEIRALRALVRGRDDLVATRVQLANQLRSLLESFWPAAAAVFADVDSPIALAFIDRYPTPETASRLGSKRMAAFCAQHAYSGRRSPEDLLARMHQAPPAVCGELEMEAKGELARSLARTLGRLVEQIRLLSSRIEHHIASTDDGRILMSFPRAGRICAAQILAELGSVRERFGSDAQLAAEAGVAPVTYASGKSKAVTFRWACNHRLRAALTCLADNSRHANAWAASVYAKARARGCDHPHAVRILSRAWVRVIWRTWTDRKTYDPTQHRAAQALLQTA

SEQ ID NO: 225385 - protein, 472 aa, unidentified
MRYIGLDLAQTTSHKALVIDEGGQVITPVLSVKTSAISLAQLFERAREGAPADEPLIVVMEPTGMAWFPIAVFCQRQGVKVYLVNSQQVADLRRFYRKHAKSDRIDARVLARLPIVNPEKLHALQLIGARQMACQRGCKELDRLTNLMVAIQNRLRAIDRFAWPGLEQVLSENIAPLARWFRENWYDPGAVLAAGAAGLLADWQKNGPKSAEMPESDEWATALVQLADEVVALYGLEAAFLDYGYLQAEVSREQALLATLENEYQQLQLGTVRPLYRQLHPSRNLETLYGVGQDGAAVYFSFVGDPERFPDHASFRGWSGMIPRSSQSGGSEAKGLSISQAGPGLVKKFSFLGAETARQWDPQIAAIYYDQVANRGKHHTQAICTCATHLLDRIWTILKEDRAYELRDVDGTPVTTEQARQIIATRYTVPKEVRQRNNQRTRRARQEQLAEKNQKRESHPDWVRGESETPSR

SEQ ID NO: 225386 - protein, 373 aa, unidentified
MIGIDPHKGSHTAVAIDETETALGEFRVRSGTTQLERLLEWAARFPERTFAVEGAGGLGYLLAQQLVSAGERVLDVQPKLAARVRLLATGDTNKNDPNDARSVAIAALRSPAVRLVHPEDHAQVMKVWSKRQRNLSSARTQVVCRLHAVLCELTPGGVSGQLYASRTAKLLEELEPEGAAASARHALALDLLEDLRRIDAQISETRKRIAAVVTASKTTLTEIYGVGPIVTATVIGDVVDVSRFANRDHFASYNGTAPIEVSSGPRTIYRLSRRGNRRLNHAIHMAAVTQIRHRTSEGRAYYERKIAEGKTGKEALRSLKRRISDAIFARLQEDAHRAGRSVGVGSGGQKGNDSVASAAGSHPEHRLPNPPSP

SEQ ID NO: 225387 - protein, 445 aa, unidentified
MDVRCTHGAGLDVHKKTVMACRVTPDPTGEHADGVMELKACGAMTVDLLALSDWLAAAGITPVAIESTGEYWKPLYNILEGDFTVFLVNAAHVKQVPGRKTDKADARWLAKLMRYGLLRASFIPPVEQRDLRDLTRYRTKLVQEHSREVNRVQGVLERANIKLAAVATDIMGVSARAILAALVEGQADPATMAELAKRRMRSKIPLLEQALTGLVRDHHRQLLAMQLAHIACLDEPIEALSAEMTRRLAALRSDASSAESPGLIGEASSAATLAAGDTAMTFARAVTLLDTIPGVNQRGGELLVAEWGIDMGRFGTAARLAAWSGVAPGNDESAGKQRSGKTRQGNQALRTGLTQLAHAAARTKGTDLSALYHRLAARRGKKRAIIAVAHSIVVSAFHLLIRDEPYRELGGHYFDTRRQAHLVDQLTRRIERLGYRVTLEPVAAA

SEQ ID NO: 225388 - protein, 316 aa, unidentified
MNVIGFDISKDTIDVTLLRNSGQVDYIKIANACEGFEKLNDWIRSKRIRKISISMEATGIYYEEAADYFGAIYQVFVINPLKIKEYSKSQFSHTKTDKADSRLIAEYTKRHLDKLTPFKPSENPTLYKLISLLQQLKQQQNESQNRLHAAKDAFIRATHEAIILLLAKQIDQTAKRIDLMIQQQDSLNMHYKNLQTIPGIGKDTAAILLHHLTDKQFKTANQFVSFAGLSPRIEQSGTSVNKKGRLSRYGHRRLKRALFMPALVAYRIKAFPKLVQNLSQKPKMIVIVALMRKLAKIAYYIHKTQKPFEKMRYQIA

SEQ ID NO: 225389 - protein, 328 aa, unidentified
MFVGFVGFVGIDVSKNTLDAALLKAVGKPRHKVFANTAAGHVQLLSWLHENGVQAGHACLEATGTWADAIALALHEAGHQVSLVNPALIRAFGQSQLKRTKTDKADAQLIARFCQMHQPPAWTPPAPQLRELQALVRRLESLEEMHLMEDNRLSSGVSCQEVRADLEEHLADLQARIEKTRQHIKDHIDQHPDLKEKASLLESIPGIGATTAALLLAEVGDISHFDNARQVAAFAGLVPRIRESGSSVRSRARLSKVGSSRLRKSLYFPAITALRFNPLIKALGLRLSAQGKPKMLIIGAAMRKLLHLAYGVLKSKRPFDPTFCSSSP

SEQ ID NO: 225390 - protein, 331 aa, unidentified
MDQRNYVGIDVSARSLEVALVGAERRSATATFANTSTGHRQLIKWATKRGRLAQVCLEATGVYGLAVAFALHHHPKTEVMVVNPKVIKNYAGATMQRAKTDAVDAQLILDYGRRMPFARWQPPSDEVLQLQAITRRISQLKVELNREANRLDAEDYKVATTDLIERDIQVNLRPLNRRMVRLEKEAVALVLSVPHLSMLFQRLLSIPGIGETSALRLLAEWAVLPEGMKPPQWVAHAGLDPRPHESGQSVHRPRAITKAGNKYLRAALYMPALVAMRHQPNVKAFYDQLIAAGKKPLQAITAVMRKLLHAIWGVWKHDQDFEGQKFYKIAT

SEQ ID NO: 225391 - protein, 334 aa, unidentified
MMYVGLDVHRRVCYGTVTDGDGRVLKRGRFSSDPEGLREFMDGFEGAIIAMEAGYCWQPLYDGLLEAGHDVRLAHPQKVKAIAEAKVKTDKVDSETLAHLLRAGLLPESYVPPRDVRELRDLVRRRAFLVGMRTRLKNRIHAELAKRGIGLGVPLFTREGLELLRSLRLEAVDQLLPVMEALDMQISRISGSLRRMSGEDPRAQLLTTIPGVGYYVAMLLISEIGDISRFPSSEKLCSYAGLVPSVRRSGDTTRHGGITREGSRWMKWALIQAVHVHIRRESDLSRFYHRLAKRKTPQEAVVATSRKMLKVVYWMLLNNEPYHPEPYDPARPRV

SEQ ID NO: 225392 - protein, 337 aa, unidentified
MKLYCAIDLHSTNNVLVVIDADDKVLFQKRLSNDLQVVLAALAPFKAELHGVAVESTFNWYWLVDGLLENDYNVMLVNTVAVKQYSGLKHTDDESDAFWLAHLMRLGILPTGYIYPKDERAIRDLLRKRLQLVRHRVTHMLSAQNQIWRTTGCNIANKRIKNLNLSVPDLIDDRYIQMAINSNLTIINVLNQQIGKIEGTVKQHMALRPEFQSLLTMDGIGDILGMTIALETGDISRFEHVGNFASYCRCVDSQCLSNGKKKGANNQKNGNKYLAWAFVEAAHSIIRHNKVAHRFYQRKRAQKNGALATKALAHKLARAAYYMMRDRAPFQPERLFH

SEQ ID NO: 225393 - protein, 323 aa, unidentified
MAKHITICAGIDTGKRKLDVAVEGRREQLQVENTSEGHAVLLAWLRRHRVKRVGIEASGGYEQPVVAELRRKRFVVVVFQPAQVRAYAKFHLQRAKNDKIDAALIAACTAAVRKIHPAPDPRLQPFAEQLTMIDQIGEDIARLKNRIESCRNTQIKGLWEEDLARLAKREKVELKALIASICKHPDLAKRLDLINSIDGIGLPTAVAILVRMPEIGQITREQAAALAGLAPYDDDSGEQVGTRHIEGGRKRLRHALYAAALAASFRWNKQLITLYRRLIAAGKEHKRALVACARKMLVFANTIVARGTPWQDRPPENATLTAS

SEQ ID NO: 225394 - protein, 412 aa, unidentified
MQVVHPVCCGIDVHAKMLVACLILANGEKKKRTFSTMTAELLQLRDWLVAVQCTQVAIESTGVYWKPVFNILEDALTVILINPEHAHALRGRKTDVKDAEWLADLLRHGLLRPSFIPPPVIRELRELTRYRESVVREQSSVANRIQKLLESGNLKLGQVASDALGVSGRMILKALAKGESDPRKLAALARGKLKEKSLSLEQALQGRLTVNQRFVLGELLRRWEQLEAADARVTSEIDKYVQANPKLARARELLDSIPGIGPRVAEVVMAEIGIEMASVFADAAHLASWAGICPGNKATGGKRLSGRTRKGNTYLRSALVQAAWGASLKKHCYLSSQFQRLVKRLGRKKALVAVAHSLLVIIFHVLQNDQTYTELGGDYFDRRHVEQQRDYYVRRLQMLGLKVTLEELPQAA

SEQ ID NO: 225395 - protein, 408 aa, unidentified
MQVTFGIDVSKSNSTVCELIGESKNELTITNDRPGFIQLLHELAAFSKHPQIIFEATGVYSGRLQAFLEDYGYEYIVLNPLKAKKEMNMGLRHNKTDKTDAYHLALIQRLYRHPVNQSESQTYKQLNALSRFYDQLTSDLVIAKNRLHQALQSTFPEIENLFSIARGKNYWQIVARYPHCDLVRKDDKKQIINWLMKLKGIAFNHAQRTTDKLIELAHLAYPVVSCSDIEVQQAQYYARRLLNLSNQRQRIITKMVKLAKTLPNHDLENLESIPGFAQTTAVRVLAELGDLRRFSNPNKINAFIGIDPGRYQSGEMDSNLSITKHGNAVARKLLYRAIGQIDNAAKTNPCHIADYYESKKLSSQTKGFKKIAIASIHKLIRTIYALIINDQPYDYNVATHNQKDFSRN

SEQ ID NO: 225396 - protein, 354 aa, unidentified
MKYHTSTTQFNCGIDLHARQMYVCVLDRDGKKLVHTNIKNNDFAYFLKLVAPYRHDLTVCAECMFGWYWLADACADAGIHFVLAHALYLKAIHGGKNKNDRLDSEKIAHLLRTNFIPPGYVYPTEKRPLRALLRQRLLYVWNRTELLARIQSHQLAYNRPTHRQTLYNRESWSKQLLTAEPDPVRQLALQNDLALIGHYDTQLATLEKELLKLTKQTSSRDFTLLQTTPGIGDYLGLTILHEIGDIARFPTVKDFLSYCRLVKGTVASAGKIKGLRGAKLGNPYLRWAFGEAAVVAKRDPLVIGPLAQRLEARLNNKFKANTVLAIKLARAVYFMLKQKTVFDPERLVAALSKN

SEQ ID NO: 225397 - protein, 490 aa, unidentified
MAEIFRHAGGVYSERMAGRLDAGRLKVMGAIEACRTAAPGGHIYRCDGCGREHPLYRYHEHAGTESSVAAKETRREGQHLLSERDRQQRSGRMPNSPDTTALTGATHSTIFVAVEISLKSWIVGVHCPDASGGSVSIHTLAAADTAGLLDLVGSVRERVARELGARPRVMLTYEAGYEGFWLARDIERRGAEIDIFMNDPASLRVNRRAKKKKTDRIDARRMVRALKAWDQGDSEAMSWVRVPDVDQEDAKRLLRERDTLVSERTRLNNRIKGLLQLHGIFDLAPRKPEFLERLATARTGYGAPLPPRARAEIERAVAMLRLVESHIEMIEAEKKALLKAGRKAQDASDCDGTAMIAALTRIHGIGLNDATLLAGEVFYRDFHNRRELGSWAGLTSVPWASGDVDHDLGISKAGPSHVRKHMIQMAWRWLKLQPESAITKWFHAYVAKDAGGGRGRRARKRAIVGVARKLLIALWRYATQGLVPEGAIVA

SEQ ID NO: 225398 - protein, 359 aa, unidentified
MRSIALQRADVIVGVDTHKAEHVGFAIDGLGGDLGELQVLATPSGYTELLAWADNFGPVHAFGVEGTGSYGIGLAKFLRRHGRKVIECSRPPRAGERRGNGKSDAIDAEHAARQVLAGKATTTPKLADGAIEAVRLLKIARDSAVKIHSQSIITLKAVLVTATDGLRRDLEPLTDHRLVVACAELDATGDLGDPEVAMRHTLRSLARRWLEVHEEIKIHTAALKRLTRSVAPDLVDAFGIGFDTAAEMLVTAGDNNDRIRSEAALAKLCGVCPIPASSGQTSGRLRLNRGGNRQANAALYRVVIVRMRWHSPTIAYVTRRTAEGLSKKDIIRCLKRYVAREIFSLLPPVTTPREELLAA

SEQ ID NO: 225399 - protein, 320 aa, unidentified
MSKKKSKAFIGIDVSKNLLEVAAHESDYQFRCANKAKAFGELIVELLALRPALIVLEATGGLEIPVVAALHAAGLPVVVINPRQVRDFAKALGQLAKTDRLDARVLAHFAAAIKPPLRPIKSAAELELDALVGRRGQLVEMLTAEKNRLGSAATDTVRDEIKEHIDWLEERIAELEEQLKARLKNSTLWQGKDDVLQSVPGIGAVVSFSLIADLPELGTLNRQQISKLVGVAPLNNDSGQQRGTRHIYGGRARVRSMLYMAALTATRFNPVIKEFYERLLANKKLFKVAITACMRKLLAIINVMVRDSTLWKTKNDPVSA

SEQ ID NO: 225400 - protein, 416 aa, unidentified
MDSGCNSQMGGMQMNSVGIDISKGRSTVAVMRPFGEVVISPFEVRHTDSELSELARQLKSLNGETRVVMEATGNYHAPVAKLLHDAGLYVSVINAKLVHGYGNNDLRRIKTDRKDAVKLANYGLDRWLTLPRYVPEEDTRLLLKNCYRQYRQYSKVQTVLKNNLISLLDTVFPNVNRLFSSPARADGSEKWVDFVAEFWHCGCICERSKKAFVSKYQKWCKKHGYNFGEEKACAIYAEASGYIGVMPKSETTKLLVEQAVAQLRATSTALAALKQEMQTLASMLPEYPVVMDLFGVGPTLGPQLIAEIGDVRRFYSKKALVAYAGLDAPPNDSGDVTGRHKSMSKIGASSLRRTLFLVMSVYLQNAPLDEPVYQFMDRKRAEGKPYRVYMMASANKFLRIYYATVKAYLESLEPTA

SEQ ID NO: 225401 - protein, 384 aa, unidentified
MKELYYIGLDVHKDTVAIASIKSTSRAEATYHSTCGGSNAAVERALRKLAKQLGVKLQDLKVCYEAGPTGFVLGRRLIQLGVECVLCSPSKTERKPGEKIKTDKRDAQKLAKLFKNGDITPVRIPPELDEAVRDVCRARTDATDDLSRAKQRLGSFLLRLGFRYSGKSRWTPAHMRYLRELVMPSDPQRIVLEFYIETISLAERRALELKENLIELLKTWEWKPVVEALMGCKGFQEVAAITIISELGDLRRFDNPRKLMAFLGLVPSEHSSGGKRRQGAITKCGNSHARWMLIECSQHFRRAPKVSAALTTRQAGLTTAVKELSWRMQNRLNKRYVKLKMRGKNENKCIVAVARELVAFIWELQNKCSLEMPVESEVKNMIDN

SEQ ID NO: 225402 - protein, 366 aa, unidentified
MRLTGEPANRGGREPVTPWAENRVGAGAAVAFFMNPNSCRGQDPVRKAGSQKMRERSTVGIDVSKLRLDVGVVPGGEVLQFSNDVAGRASLIEWLKAKGVKAIGLEASGGYERDLIKALRQAGLPVRMVNPYRLRQYAKALGVLAKNDRIDARLIAQFVAELPTREPRHDPLTEQMAELVVARRQLSDDKVRLSNQLEHVRDPALRRMTTQRLRRIAADIVLLDKRLAEIVASNTELRTRDRLIQSICGAGPIYSYTLIALVPELADPTLDRRQLAALIGVAPYDDDSGRRNGKRAIWGGRAAVREVAYMAALSACIHNPVLRAHRQRLQANGTAPKQAIIAVARRMLGIVLALLRTGKEWDPKYA

SEQ ID NO: 225403 - protein, 426 aa, unidentified
MKKLDFLSTLFVGIDVSAKSNVVCALDFNANKLLEFTVSNNQPGAIELSLKICTLMSGSKYKAVVFALESTSFYGIHIANFLSSDEDLLVFNPFVYCLNPKMIANYRKSFIGLDKTDPKDAFIIADFARVGRITVAPWRGSQFLALQRLTRHRLHLVDCITREKTYMVSNIFLKFSELSILKEEAHPFTSNHTATAAAILTEMLSLEELVAMPMEDLVAFIGKVGKHRFADPEKVADLLRHAARDSYRLDKCLYEPLTISLASSFNCISAYQTEIKAIDRAIEKTIKGLNPTEYQCLVSIPGIGPVYASGILSEIGSITAFHSHDALAKYAGLVWKQNQSGDFRADDTRMSKAGNKYLRYYLIEAANSVKNHIPEYSDFYRKKFDEVKTHQHKRALALTSRKLIRLIFGLLANDQLYSAERVNQTS

SEQ ID NO: 225404 - protein, 365 aa, unidentified
MTKVRTWVGLDVHAAKVVACVVDAESGEMTVHHLPGETIRVVEFCVTLPAPVRAAYEAGPTGFGLARALIARGVGCVVAAPGKIERPAQDRVKTDVRDAERLVRLLMIDGLHPVRVPSGEEEALRDLVRAREDLRGDLMRARHRLGKLLLRHDVRYRGEGDNWTHRHRDWLSKVRLQEPGAQATLLDYLGAIDALIIRRDHVQATITELVPASPWAQDIARLRCLRGIETLTAVGLCSEIGDFHRFDRPSRLMSYLGLVPSELSTGDRRRQGQITRSGSQHARRLLVEAAWHYRRPPRLGTKLEHRQQGQPAAVIATAWKAQQRLHRLWRQFDRRSKRRTIAAVAVARHLAGFCWAITTHTDPTT

SEQ ID NO: 225405 - protein, 397 aa, unidentified
MYIVGIDIAKRKHEAAVIDGEGTVIIKPFSFTNNCSGYNRLLAMLTKAKLPLDEVSFAMEATGHYWLALFTRLQKEGFRVQVINPVQTNSIRSFYIRQAKTDPRDALLIAEVIRFGHFSESTLHPENIYELRELCRGRHAIVSMQADVKRKVVALLDQVFPEYETAFTNMFSDTSMAILQTCPTPKELSEMPLEELCHLIEVSSHKRFRMAKAQELQELARNSFGFAMAGDVFSTMIRLYAKHLDFLKQQVQEMDRKIAEIMDTLDTPITTITGIGPTLGAYILSEIGDISRFSSAAKLAAYAGIDPTMRQSGEYNGVRNRMSKRGSPYLRHAIWLAASSAVLHDPALKLYFQKKRDEGKPYMASVGHACRKMVSIIYAVMRDNKAYTPCIPNEISA

SEQ ID NO: 225406 - protein, 338 aa, unidentified
MAKITTVGLDLAKQVFHLVCCDGRGKVVGKRQLRRAQVLGYFANLAPCRVGMEACAGAHYWARELEQLGHAVKLLPPRFVKAFVRGNKNDFNDALAIAEAVVRPEVRGVAVKTVAQQDIQALHRLRSECVASRTALGNQLRGLLAEYGVVLPRGVGNLRRRLPGLLEDGENGLSAPFRRLLAQGYQRLCELDAHIAAYIAEVQRHSRQDAACQRLQTIPGFGPIVASVFHSLVGDGRAYRRGRDVSAALGLVPRQHSSGGKTVLLGISKRGDRYLRSLLIHGARSVVQQAAHKDDRLSRWINRLKAQRGHNKAVVALANKLARIGWAVLPRRSIYQPA

SEQ ID NO: 225407 - protein, 344 aa, unidentified
MDYYVGLDVSLRSVAVCVINADGKLIFDRSVACEIEDIVECLRDVPSTALHIGFEAGPMCQHLFRGLRAAGFDVVCMEARQVNAALSAMRNKTDKTDARGIAQVLRSGWFNPVYIKSREAHALRALLSSRKAIQKKCIDLANEVRGLFKIFGIRLPSRVEQGSFDERVRPLVEADPDLSHALLPLLDARAVLYTTYRELDRRVKQAASRDEACLRFMAIPGVGPIAALTFRAAVDDPSRFTSSRTVAAHFGLTPRRYQSGEKDNPGRISKAGDSDVRATLYSAANAMMMRSIARSEIKSWGLRLMRRKGRRRAVVAVARKLAVIMHRIWADGTEFRHEPLKGAA

SEQ ID NO: 225408 - protein, 340 aa, unidentified
MSTTTDHYLGIDVHKTDAYVAVMDEEGELVEEVRVANADLDEIAQKYEGSQAALEAGSNHFTIYDELEQYVDVTLANPAKADWLATQRQKSDRKDAKNLARYLRLNDVPESYVPPEKYRRYRALARGRKKFVDKRNDFKNEVNSLLDRNGITYDGSLWTDEGREFLDELTLGGPSQLLLEKWLEAIDEFTEKITEIQEKIEEVAVDVEEVDLLMTAPGIASYSGLMIHSEIGEVERFDRAAEVVSYAGLDPVIRESGDSRREGAISKEGNGNLRWILVQCANVAVHNVKDPYLSQFYWRLRNKRNKPHKVAIVATARKLLVALFNMLRKNEPYDPPEVSA

SEQ ID NO: 225409 - protein, 302 aa, unidentified
MEYFVGLDVSLRSCAMCVVDNKGKVYLERELPCEVEDVADCLAAFEHPIARVGFEAGAMSQHLFFGLQSKGFEVVCMEARQVSAALSAMRNKTDKTDAKGIAQILRTGWFSPVHMKSREAHGLRAILSTRKALLKKTMDLANEVRGLLKIFGVRLPRTVKHGSFDGLVRPMIEMDDVLAHALIPLLDARVVLFQHYLELDRRVKHAASQDEVCLRMMTVPGVGPIAALTFKAAVDDPSRFRRSRTVAAHFGLTPRRFQSGEHDNPGRISKAGDRDVRATLYAAANALLMRTMVGSQIKSWGI

SEQ ID NO: 225410 - protein, 346 aa, unidentified
MEKISIIGLDLAKQVFQVHAADAQGRCILRKQLKRREVLAFFAKLTPCVVAMEACGTAHYWAREMAKLGHEARLIPPAYVKAYVKRGKNDAIDAEAICEAASRPSMRFVPVKSVEGQALAMLHRSRDLSIKNRTMLVNALRGHLAEFGFIAAKGIGKLPDLIKIVSEAPKEALPDMVRATLSGFLDAIAGLNVHLAGIETQLRSWHKSDAKSQRLASASGIGLIGATALCALVPDPSLFKNGRHLAAWLGLTPRLDGTGGKTRLKRISKAGDGYLRRLLVLGATALLRSLANKTTPLALWMQGLLARRPRRLVTVALANKLARIAWALMAKAEAHKPLAAAQMANA

SEQ ID NO: 225411 - protein, 358 aa, unidentified
MSVQITTSPKVYIGLDIHKKTWTVSIQTDLFFHKTYSMPSKSCDLEQYVTNNFHNHDIYLVYEVGCCGFSVARYFLNLGWNVLVVNPADVKTGNKERYQKTDALDAKNLSNQLKSGTLKGINIPTEVEDQFTSLARHRTQVTKKLRTTKLHIKSLLLFHAIEVPVEYDNSNWSNGFIEWLEKVKFSTTCGDLALQGKIRMYKFVKSEYLEIANQMRAYCRKSHKGDYNLLKSIPGIGGYLASVIIAECGDLRRFNTEGQFASFVGIVPGIHNSGGSEKCLGITPRSRSQLRSYLIEAAWMAVRKDLEMQQYYRKHQGKNVKSIIVKVAHKMTRRILAVIKTQTPYKINKNIISEKSIV

SEQ ID NO: 225412 - protein, 470 aa, unidentified
MKKSTRTTPLVSKGISKTEPIPKHLEQINQWAAGIDIGATSHFVAVPEGCTTTPVREFKSFTPDLYALAKWLKECGIQTIAMESTGVYWIPVYELLEEKGFEVKLVDARRVKNVSGRKTDVLDCQWIQQLHTYGLLNGAFRPDNEICALRSYVRQRSMLIRSASRYIQQMQKALTQMNLQLHHVITDITGDTGMRIIRAIINGEREPALLANHRDPRCKSSKEDIEASLTGNYREEHLFTLRQSLELYDYFQEKIQACDSEIEKSLSGFSTNTLGKDFSVEKLKFNKKKVSKNAPAFNLRKELYRLAGVDLLAVPGINNISALQLLSEIGFDMTRWKNSKQFSSWLGLCPGNKVSGGKHLSGKTKPSNNKAAATLRMAASTLYRSQTSLGAYLRRLKSRIGPMKAITATAHKLAIIIYNMLRHGVDYIESGQAYYDEKYRERMIKNLKRKATEFGMSLIENQINFDPNIN

SEQ ID NO: 225413 - protein, 551 aa, unidentified
MGGPWRERLWRQKPMPLDRFARIELDSTAKADHTLVSIPGHERGSGFHPIPGIGSAIRYRFGNGFDPVGKFSLYESEPGRIHKSSESGEVMMKKRAASKRKESVQKNVDWKALEIVHPDAAGIDVGGSEHWVAISPDRDPEPVRRFGCFTADLREMARWLVEKGVRSVAMQSTGVYWMPVFEVLEQHGLEVYLVNARHTKNVPGRKTDVQECQWLLKLHAFGLLNNSFQPTDEIRVARTLWRQRGNLVADASSTIQRMQKVLIEMNVQLSNVLSDISGVSGMCMIGAILEGERDPEVLMALVQPGVKATPQDILKSLEGNWRKELLFVLRQQVELYRMYQEKIQDCDQQLREHLESFGSVVDLQAQPIGPKPKGKKGSKNAPQFDLRTELYRITGIDWAQVNGIDVLTAQTVIAECGADLSAFPSEKQYTSWLGLVPTNEQSGGKILRRRTRKVVNRAAAAFRNAATTLLRSESYLGAQYRRLRTRLGAPKAITAMARKLACLFYRLIKHGQQYVDKGNEYYETKYREQQIRALAKRAQKLGLELVIPKTA

SEQ ID NO: 225414 - protein, 419 aa, unidentified
MLEEDIVYHRVAGIDISKSDAKVCLRMIPEGRRRAHTETRVFHSTMADIRLLRQWLISENVQCVVMESTSAYWKPFWDGLTGSGFEMILANANAVKNLKGRKTDVADAAHLAKLASLDTVAPSFVPDRIVRDLRLVTRSRTKVMQRRTSMISSLEKLLEDTGIKLSDASSKLLTVSGRRILDAVCAGVSDPTQLAELSMLRKTTGQALIEALEGRIREVHLPLMSSLLTQIDMLTSELDTLDTVIEHHSQPFQDQIELLRTIPGIDTTLARCIIGEIGVDMSCFPTADHLASWAGVAPGSHESAGRTHSTKTKKGDKYLKAALSQAARSAANTSDTFLQARFRRIRTRRGEAKAYTAIARAIIVSIWHMLTRGETYHDHGGDYYTRTATTAQKARLQARAEAQLTRLGLTYTIHPQPDC

SEQ ID NO: 225415 - protein, 368 aa, unidentified
MKIMTGIDLHSNNALCGLMDESGQRLVHKQLPCDLPSILQLLDPYKDRIATVAIESTYNWYWLADGLRDHGYQVVLANPARMKPYDGLKHTDDVSDAYFLTELLRLNILPTGQLYDRKTRPVRDLLRRRLLLVHQRTSLILSFKSLNERTRGQRVALARVKALKPEEARALFTEPADQLLSGTEIELMGQLTQAITKIEAHVLSVASQWRTYQRLQELPGIGKILGLTIALETGDAQRFAGAGNFASYCRCVKSLRTSNGRKKGENNRKCGNTYLAWAFVEAAHFACRYDDQCRRFYDRKKQQTNPVIATKALACKLAKAAWHVMAEDVPYDSERVFGPGKKKDLEKSDLGETRCEPAKGSGQPSQQN

SEQ ID NO: 225416 - protein, 357 aa, unidentified
MGVADAGREPARYWGEIPHEVEYIRKLIKRLGKPEQLRVCYEAGPTGYELQRLFTSMGVECVVVAPSLIPKQPGNRVKTDRRDALRLAELLRAGELTPVWVPGEEDEALRDLVRAREDAKEDLLRAKHRMRKFLLRHGIDNPPGVRAWSPRYRTWLKGLKFSSSALQATFDEYRLSIEEIEGRIRRLESEIHEQAEKSVHAPVIKALQTFRGIKETAAVTMVAEVGKFSRFKKASQVMGYSGTVPSEYSSGAKTHRGKITKTGNNHLRRILIECAWSYRYQAAMSEAIKKRQEGQPASVQAIAWKAQVRLCKKYRRLVSKGKSGQVAVTAVARELLGFIWAAACEVEKQMTQRENAA

SEQ ID NO: 225417 - protein, 403 aa, unidentified
MEHGTIRFGSVDWGSEGHAACVVDAEGTAIDEFQVAHTGAGLTELCRRFRRAGVQRVAIERPDGPVVDALMDAGLEVVVVSSRAVKGLRTRYGLAGNKDDRSDAFMLADCLRTDGHRWASLQPDQPQTLALRAAVRTRKDLVATRIATANQLRAHLQLVFPGAVGLFADIDSAVSLDFLERFSTAAKAAWLSERRLAAWLAANAYSGRTGVGTLLQRLQGAPAGLHGAAAQAQAAVTLALVRVLRTLLTEIASLEAQIREQLALHPDGFIFQSLPRSGCIRAASLLAEIGDCRARFPSPESLAALAGAVPSTRSSGKLHVVTFRWSCDKKLRDAILDFAQDSMRANAWADRLYHQHRARGHTHPHASRVLARAWIYVIWRCWQDRVAYQPERHRALQALRVAA

SEQ ID NO: 225418 - protein, 363 aa, unidentified
MTDQKRFIGIDMSKRSFEVAIVSNDDPQILRKKYKTTQEDRQEFVFSLRKDDVVALETGNSSFVLAKLIQKQVGCTVHVLNAGKLHIIFRSLKKTDKEDALRIAKFIQRIPEEELPTVTIPSDEEMAMRSSATELIRVDRSRTQSINALHGLLWNNGITEFGRNDLKYKKNRDKVVQELPVEYRAQGIRLLKLIDVYEQCLGEIGEEQKEVLNNNREETTISISMPGIGPKTAFVILAYLGNMERFSNSRQVGYFSGYTPSIDMSGLQERYGSITKRGPKQVRRVMNQAAWAAIRSNDGILLRAFYDRVRSTKGKKKAIVAVARKMIEILYILHTRKELYQSPVVTDHSRVIAKLKRYGLIFE

SEQ ID NO: 225419 - protein, 353 aa, unidentified
MLIIGCDYHPSMQQIAWVDTKTGECGGRRLMHQAEAEEFYRALKGKQVRIGMEATGHSRWFERLLAELSFEVWIGDPAQIRAKQVRKQKNDRRDADHILKLMLKDDFPRIWAPTPENRDLRQLILHRHRLVGMRTRVMNQLQAVAMNEGIRCKKGLWTAKGRKQLESLSLLPWTSRPRQELLELLDQFDPNVEKLSQAIEQEAEQIPEVKLLMTHPGGGAITALAFVLVIGTPERFGCGKQVASYLGLIPCEDSSSERWRLGHITKQGNALLRFLLGQAAQSVARCEEPWQQQYAHLKMRRNKSIAKVAMARKLAVRLFWMWRKEWDYQQLRSSVRTWGSSPSPMVCSKSPRS

SEQ ID NO: 225420 - protein, 355 aa, unidentified
MSGEKYIGLDVHQATISVAVRDSQGNIIMESILETKASTILDFFAGLRGRLSVTFEEGTSAAWLYDLLKPRVAEVLVCNPRKIPLHKQGNKSDKIDARKLAERLRLHDLTPVYHGENGIRTLRELARSYLTVVKDLSRVMNRLKALYRSWAIPCAGRDVYYTRHRSEWLDKIPEAGTRRRAEHLYEQLDLLQHLRQQARRELLTESRKHAITAKLRKIPSLGPIRSALAVALIQTPHRFRSKRQLWTYSGLGLETRDSGEYHFVQGQPRRRKKQATIRGLNKDYNHDLKGLFKGAATRASVKPGPFQEFYQRSIAKGIKPTMVRLTLAHKIAAITLTLWKKGEDFDIHKLNSQAA

SEQ ID NO: 225421 - protein, 392 aa, unidentified
MIYIGIDVAKDKHDCFITNSDGKVLFKSFTISNNREGFETLFQRIQSVSDDLTKVKVGLEATGHYSYNLLGFLLDKGLTTFVINPLHTNLYRKSLSLRKTKTDKVDSRTIATMMMSDMNLKSYSDTSYHNEELKSLTRYRFDKVKERAKLKSSVSRLVCILFPELEKLVPTLHMASVYALLSEFPGADAIANAHLTRLSNLLSESSKGRYGKDTAVMFRDAARSSIGSHMPAKSLELKHTIKLIQELTVEIDEIEAAIKRIMDEEIQSPILTIPGISYRMGAMIIAEIGDFSRFDSADKILAYAGMSPSTYQSGQLDNCYSHMEKRGSRYFRYALYNATKYVCHWDKSFGAYLEKKRSEGKHYNVAISHAAKKLVRLIFAMEKSGKAYLPTA

SEQ ID NO: 225422 - protein, 432 aa, unidentified
MVQVLIGVDPHKLSVTIEVVDDRERFLGSGRFTTEQAGYAAMRTYVKAWPDRVWAVEGANGAGRPLAQRLLEAGEQVVDVPAKLAARVRLFDTGHNRKTDALDAHSIAIVAVRTEGLRVLKIDGELEALRMLADRREALTRRRVQTVDRLQALLAELLPGQAKKDITPLQARAMLAGVRPRDVAGKTRRRIAAEELAELVAVDAKIKKSTAELKAKVLARNSRLMDLRGVGPVVAARILADVGDVTRFADRNRFASWTGTAPLDASSGEQNRHRLSRAGNRRMNHMIHIAAVTQLRLNTDGRAYYRQKRAAGKKPMEAMRCLKRRISDAIYRQLVADTQRLPDAGPGGHCGATQESSAVDLPPHIDTSDKPLPGPAHPTLPGTRTRANPHAGSAPRPAHRRAGAVKVERPTGRTTLTATSAGAHSKEPKTRP

SEQ ID NO: 225423 - protein, 342 aa, unidentified
MDKVATIGLDIAKSVFQVHGVAADGEVLIRRRLTRARMLPFFAKLPRCLVGIEACNNSHYWARELIALGHDVRLMPAQYVKPYVKRGKNDAADAEAICEAVTRPTMRFVAVKSPEQQSLMMLHRVRLMLNRQRTQISNAIRAHISEFGVVAPVGRLGVDRLLAVVADSGDNRIPEDARLCLQMLAAQLEVVKQQILENDRRVLASARRTELGRRLMDIPGVGPLLASAFVASVADPAVFRTGRDLAAWIGLVPKQNSSGGKDRLGNITRAGNRYLRQMLVVGAMAVIRYAQRHGTRRPWLVQLLARRPTKVAAVALANKNARMAWALMTSGERYRESLAAAA

SEQ ID NO: 225424 - protein, 344 aa, unidentified
MEHFAGLDVSVNETSICIVDDAGRIVREVKVASEPEALLQVLKNPSYSFKRIGLEARPLSQWLYSALGDANLPVICVETRHMRAVLKAQINKTDRNDARGIAQMMRAGLYRPVHVKTLRSQKLRMLLTHRKLLQSKAIAIENDLRGTLRNFGLKVGIVGKLKFETRIRELVENLPDLAVLVEPLLVVCRVLREQIAVLHRRLLVIVRDDDVCRRLMTVPGVGPVVALTFRATLDVPARFRNSRAVGAALGLTPGKYQSGESDHTGGISRCGDEMMRVMLYEAAQVMLVRSTRWSWLKAWAMQVARRRGMKKAIVALARRLAVIMHRIWVDGTEFSWSRQEAAEA

SEQ ID NO: 225425 - protein, 412 aa, unidentified
MAMEALVERCAGLDVHQASVVCCVLVGPPGCRPRKLLRTFGTTTHELGKLRAWLAEHGVTHVGMESTGIYWKPVYAALEGSFDLTVGNAHHIKNVPGRKTDVKDAEWIARLLRHGLIGKSFVPPPAIRDLRELVRFGRALIETRTAERNRLLGLLEGAGVKLAGVASDVFGVSGTAMLKALAEGAAEPAAVADLARGRMRRKLEALAAALDGQVREHHRFLIAVQLRRLEAIARDLGELDARIEAHLEPFRAQHRLLMQIPGVDRVVAAGIIAEVGVDMDVFATAQRLAAWAGVAPGSHESAGRRKGAATRKGNVFLKATLFAAASAAVKTKGSYYRDKYHRLRARRGPVRALVAVAHKLLIAAFHMLRTGSPFRELGEDFLDRVSRKRSTTKLVRRLAALGYDVLLVPKAA

SEQ ID NO: 225426 - protein, 330 aa, unidentified
MQKVQHIIGADLSKKTIDLVCHLKETHLKIDNHLQGFKTLLKWISRQQINPSELIIVMEHTGLYSFCFEKFLHRHQISFTKVSALTIKHSIGLVRGKSDKIDASRIAAYGYEKKGKLSAEPPTSKELQRLQLLYATRERLVKQKVGLINAVKEYRNIGLLQNDPVLQCQQRLIKNYEKEIAKLEIQLDNVFKSNPSLQKNHLLLQSIKGVGKVLATATIIKTRNFTRFTNARKFACFCGTAPFEHTSGTSIKGRTRVSHLADKQMKKLLDLSAKTAIQHDKELREYYLTRTQNGKPKMSTINVVRNKILYRMFAVIKRQTPFIENYLQAA

SEQ ID NO: 225427 - protein, 423 aa, unidentified
MMKLKYPICCGLDVHKNVIVATIVITNRDGVSEYRQKSFSTINSDIQKFHNWLIENNCYHVCMESTGKYWIPIFNYLEKDIEVCLTHPKYVKAIKGKKTDKKDSKWIADLYKFDLVRCSFIPPKDFRQLRELARYRFKLVCMKSSEKNRIQNCMTVSNVGIASVLSDPFGKTATEIMSYLLEHTADSIDEKAVRKLIKKGAKAKSDEIIEAIRGCNIETDQAKKLELALGHLEYLDGMITQTEVELYVRIKPYYEFVEFVSTMPGMTELSSTIVLAETGVDMNIFDDAKHLCSWCGLSPSNNESAGKKKSVRIAKAGAYLKPMMVQCALAAIKNKKQPYFAIKYGRIKKRRGHKKAIIAIARMMMVCIYHMVSEKKPFTPADYEELMKPQNHVERVVLNENNVFAYLESLGYDSSKLVKRNDN

SEQ ID NO: 225428 - protein, 282 aa, unidentified
MEQVITIGLDLAKNVFQVHGIDAAGKVLVRRQLRRGDVLRFFGGLPRCLVGMEACATAHYWARELTKLGHTVRLMPPAYVKPYVKRGKTDVADAEAIAEAVTRPTMRFVAVKTADQQAALMLHKVRDLLVRQRTMLINALRGHLAEFGIIAARGPGGVTAAIISLHEAQDSLPELARVALHGLIDQLRIVRDEIARVEKRIVAWHRASNASRRLATIPGIGPITASAIAAAVPDATLFQSGRQFAAWLGLTPRLVTVALANKTARIAWAVLARNQSYVAPAM

SEQ ID NO: 225429 - protein, 325 aa, unidentified
MLFAGIDIAKDTFDIALLGDAQTHRGHFSNDKDGFAKVHRWLQRRVAASLHLCLEATSSYWMELALFLHEQGYTVSVVNPKRIKRHSEAMMQRNKTDREDAFTIADYCAKQRPSAWQPPSAAYRALRAMVRHLQALKQDRQRARNRRQSSIPHQDVEAAIVAHIAFLDAQIEALAQRIQDHIDNHPDLQRNQALLQTIPGIGETTAAVFLAEVPDVSLFAQAPQLAAFAGLTPGHRRSGTSVYSPGRLLKWGNAHLRRALFMPALSAHRWNPIIDTLRKRLKERGKNGMTIVVAVMRKLLHLCYGVLKTGKPFDPNHSVNVQHST

SEQ ID NO: 225430 - protein, 372 aa, unidentified
MSETPVSYQSFIGVDLHKNTVTLAAVDPRGETLARLTISTKSVGKIEAWLRALPRPSQLAVEAVGFVEWFIERFRPCVDRIDIADATELANRRGKRRKNDPNDALDAARRLARGECPLGYIADDELMQLRKLGRHWRQLSNVLARAKHCMKSMLLAANLRGPKFDGGSAQRWLLAHGRLLKPVQREAFAHFTQIIQLIELQRQPLRCAIIEACRSPRFAPITTLLQTVPGIGEIWSCVIAAEIGPFDRFPNADTLEFWAGMTADLKESAGRTQSGKITKAGSRTLRWALCNAALTMCHCDTTQEAIRQRLIRRTGGIKAKANVAMGRRLLRMLYAMVRDNKPYQGGPRRDRTSAANKARLTKHARKTRKEAA

SEQ ID NO: 225431 - protein, 432 aa, unidentified
MRPNAGGIDVGAREIFVAVPADRDTDSVRSFPTFTEDLHALADWLKGCRVDTVAMESTGVYWIPLFQILEARGIEVYLVNAQHVHHVPGRKSDVLDCQWLQYLHSVGMLKASFRPEHAVCEVRALMRHRDNLVQMACVHVQHMHKSLDQMNLQIHHVISDITGVTGLAIADAIVEGKTNPEELAQLRDYRIKASIETVTKSLVGDYRPEHIFTLKQSLVSYRHYQKLIADCDQEVQQRVQAFGAKPADPTAPADSSSTTTSSAPPFDLHSHLERIFGVDLTLIPGFQSLSIQTIFSEIGTDLSKFPTEGSFSSWLNLCPKDGTSAGRRIRAPKLKTKNRVATVFRLAALSLHHNKTYLGDYYRSQRARHGAVKAIKNTAHKLARIFYVLVTTRQPFDETVFAKLETRNQKHRLHKLQTLARQMGYSLVEQNA

SEQ ID NO: 225432 - protein, 520 aa, unidentified
MSRSKSSRRGAARAAFVLQKASGQLTPRVQAVGPEHFGILCFDCAKQRSRYFLADFYGRVVLEPSTLNHSRGDLQAAIDRVRQASAQHQLADLVVAIERTGEYHRPVQRAFRDAGFDTRLVHPFTSKQYRQPADPDNKTDDTDLAAIFRAATHGFGLCEPAWPPGYVTLQMLQRLRRDLVHKNSLLKCQILEALHAAMPGYAECFCPFWGSGVALPLARQATSAAAVLEAGLSGLREIASKEDIHCRKTTLAKVLAWAEQAPAGHPHSEQLRLVLCSLDDDRLGKSRQIKELERMLAGCIAATPYALLLAIPGLNVVSVADLAGELGPIELYRDANAITGRAALMPSRYQSDRVDCASGPLRRRGNRRLRAVLMQAADSLVKCNHYFQAQAEQWRRLGKGACWTRVKVAKRLSRLLYAMVAGKQIINHPCCRERHYALQKLLEFHGGHGTAPAQMRQDLEAVVGQLPAAHYREEAKSLREHLEALAKRRGVQPLAEIIPIVLARLGLAVVESPDEGAGLS

SEQ ID NO: 225433 - protein, 346 aa, unidentified
MTHSTTVGVDLAKNVIQVSVVSARGKELSNRSLTRKKFAEFLGKQKPSLVAFEACATCHYWARAAQRHGHEARIIPAKFVAPFRQGHKTDSNDALAVAEAARRPSIKEAPMKTVEQQGLQAIHRSRQLLIQECTALSNHLRGLLMEFGVVIPQGFASLLRAVPEILEDGDNELPDLYRPTLHRMYTRLLELREDIEAMTREVEVLVKQHPICSRLTALEGIGPIGALLLYATLGSGNAFSGGREFAAYLGLAPRQYSSGGKANIVGLSKKVGNCRLRSILILGARAYTYRLKQPKSAKDRWLKNAIDRNGHSRAAIALANKNVRTAWAMVTQGTEYQRRGQLKVAA

SEQ ID NO: 225434 - protein, 374 aa, unidentified
MAEFIMVGCDLHDKTMLLKLARGREAAEKVTVRNTPAGRRLLIEKLRERSQAAGGAQVIFAYEASGQGFGLYDELTAAGFACHVLAPTKMVRSTRQRQCKTDEKDADQILQLLRGHALAGNPLPSVWIPDAQTRDDREPVRARLDAAEKGVAIKSQIQGLLKRNRLDRPEHLKCAWTKKASGWLRMVTRDPAVGAGTRATLASLLRQWEFVQEEIERLDEALESLAGLPRYARAIRELIKLQGVGLLTALVFLTEVGDLGRFANRRQIGAYLGLVPRSYESGAADDRKGHITRQGPSRVRRALCQAVWSRIRQEGPDHAVYQRLVQRNPKHKKIAVVAAMRRLGIKMWHRAQAARGEATPCGASRRSVASAPAG

SEQ ID NO: 225435 - protein, 427 aa, unidentified
MKKRIKIDHLSTLCVGLDIGSRNNYITALDFDSNRLINMKPVPNAASGVESMEEMILAVLEANSQFKYLLIAMESTSFYGVHVANYLSTSDRLKPYGVKVFCLNPKEVANYKKSFTGLGKNDGLDSFIVADFIRVGRIAIEPWRGAQYLALQRLTRQRRHVTEAITREKNYVLNNVFLKFSEFALLDGEQSPLKNKFGATAEAILTEYKTTEDIANAPLEELVEFVAATGRGRFSDPNQVAELLQKAARDSYRLDKSLYEPITASIACSFNCIRAFEREKKALDKAIAQTVAGLNPTEYQILMSIPGIGPVYAAGILAEMGSVRCFKSNDALAKYSGIVWRDNQSGEFESDDTPMIKAGNRYLRYYLIQAAGSVATYCPEYAAFYEKKYAEVSKHQHKRALALTARKLIRLIFGLLDKNQLYSAAKG

SEQ ID NO: 225436 - protein, 317 aa, unidentified
MTNVTFPQLIQRGCGIDVHLKGVVATIDGVGIRKETRSFDTFTSCLTEMKEWLLANGITHVAMESTGVYWKPVMRVLEADIPNVWIVNARHIKNVPGHKTDKMDSEWICKLLLAGLLKPSYIPPKEQRQLRDLTRYRNKLIQAIAAEKNRMMRVLEDCNIKLSSVVANTSGVTATALIDMLCEGRKLTIEDIESVYHKKLSASPQELLEACTGFVEEHHVYMLQMIRKSIAQTQGLVDELSKRIKEILIKYDNVLELLKEIPGFNTKVVEDLVSEIGLDMSAFPSEKHLASWAGICPGNNESAGKKKAEELLTVTNK

SEQ ID NO: 225437 - protein, 400 aa, unidentified
MISVGIDVSKGKSTVCLLKPYGEIVCKPFEVQHTEKDLEDLANLLQKLDGEIKIVMEATGIYHLPILTFLLEKGFFASVINPLMMKRFSRDNRLRGAKNDRLDSVMIASYGIEKWYKLKKYEVNDRIYTELRLLGRQYYRFMQTHVKHVQELTHLLDYTAPGLKAMFNSWNEHSNRDKLSDFVERFWHFDLITSLSREEFVEQYLLWAKEKKYHQSRSKAEKVYDLASNGIPTLSSHTPSTQLMIQGAINVLRIVNNSLYHILSRMKELAKSLPEYATVRSMGGVGDSLAPRLIAEIGNVKRLRNGHSLVALAGIDPPPYESGQFVGTHRRISKRGSPILRKIGFEVMRMLKSHKEPEDNAVYNYILKKEAEGKNKKLSKIAGLNKFLRIYYARVMEVYQ

SEQ ID NO: 225438 - protein, 387 aa, unidentified
MTTHANDMSRSLAAFDQNTTLVMVVELSKKSWLIAGLIPGVERQPKKKMEPDAEDLLRLLGRWRDEAVKGGRPITRIAVAYEAGRDGFWLARWLESHGIETHVIHSTSVAVSREKRRAKTDRVDAEMLLRVFLGWLRGERGHCSMVAVPTIEAEDARRPGRERAALVAERTRIINRMKADMARLGVRAFKPQLRSAAKKLGSVRIPEGAAVPPNTMAELERDMARLAMLREQIAAIEKARLERIENAPDKGPHAMIRLLARVFGLGIETADMLVNEVMTRRLRDRRAVARYAGITGSPDESGERRREKGLAKTGNARVRRGMIQLAWRWLLFQKESALTLWFKARVDGARGLRKKMIVALARKLLIALWRMATIGEVPQGVVLRPTA

SEQ ID NO: 225439 - protein, 355 aa, unidentified
MNNCTIIGIDLGDKKHAVVGLDDKANIVLKRWIPNTKADLEALFRRNRRAVFGMETGTHCRWVSALCGQCGCEVYVGNAHHLRSIFGNSHKNDMRDAEEIARLLHGDKRHFHPVQLRDAEHQNLVQLVKMREIVVSQRTKSANAIRGMAKANGVRLPDSDADSLHKKLAAVVDTLPESLQTLLGPQVGLLEKLCAAIEEYDRAIRDYRNAHFRKECDLLETIPGVGPVNAAAFVAFTGDVTRFRHARDVGPYYGLTAGRDQSSSKDEPKKITKEGNGFVRHLLVNAANLIMQGRGRNTELRQFGLRVWGNRGKVAKRKAKVALARKLAVTMAAMLRSGAPYNGIMEENENGQSNA

SEQ ID NO: 225440 - protein, 352 aa, unidentified
MIVLGADMHKSSHTLAAVAAATGEMLDEKTAAVGARGFDAVLRWARALGPDRVWALEDCRHVSGSFERFLIARGERVVRVPTRLMANTRRSSRERGKSDRIDALAVARAALAEGIGTLPTAELAGPELDIRLLVDHRERLVRARVGLNNTLQWHLHDLWPELVLPGSSLFYGKWGPRIARRLARAEQTMRVRIARDELRRLRELTQAINTLASEIAELVGRVAPQLLDEPGFGPLTAAKLVGEIAGAGRFASDAKLARAAGLAPIPVSSGRTDRHRLDRGGNRQINAAIHRVAVTRARCHPETIEFIARKKTEGKTHREAIRCLKRHLARRIWQLLRAPHPPSETPPHPSTS

SEQ ID NO: 225441 - protein, 347 aa, unidentified
MSVTMIGLDTAKAVFQVHAVDGAGKAAMRRKLRRSELIPFFEQQEACTVVIEACGAAHHWARLLGGLGHEVRLIAPEAVKPFVKKGKKNDAADAAAICAAASRPEAKFVPVKSLEQQGTLALHSARSLLVKQQTMLANALRSLAAEFGLTVPQGIGRLDELRTLVEADETFPEPARQVFARLLEHCRATAEGIEALEAGIVAHARRDDTARRLATIPGVGPITASLIAATVGDIGAFESARHFAAWLGLVPRQRSTGGRTRLGRITKTGNREIRRLLVLGATSMVWRATRWDSKAGLWVRGVLARRPVRLVTVALANKLARIAWALMTRGEVYQAQGRAPAAAATAA

SEQ ID NO: 225442 - protein, 354 aa, unidentified
MKNGSSLEETIGLDLSDKTGLYVVVSAQGEVIREGKVILSRLGIERVFSARQPCRIALEVGTHSPWVSRVLAELGYEVLVANARQVGLIARGQKKTDRVDAETLARAARFDPALLKPIRHRGEQAQADLAMLRARKALLESRTRLIISARGMVKAVGGRLPTCSADYFATKVKDHLPQMLKPALEPMLTAIAQLTEQVRGMTRDLKKLAEERYSETALLSQVHGVGLICSLTYVLTLEEPSRFKRSRDVGAYLGLTARQHESGEQKPQLHITKAGDIYLRSVLVQSAQHILGPFGSDSDLRRWGLRLAGTGSKMRKNKAIIAVARKLCVLLHRLWLTGEVYEPLRQERLLTAAA

SEQ ID NO: 225443 - protein, 338 aa, unidentified
MKIKTNFAFILGIDISKKELDFCLTNHNKPVYQGKILNTAQGFKSLAKKLKSLNIDLHEILFCCENTGIYTSPLLLFAEKNNINLWVETPLAIKKSLGLTRGKSDQADAKRIAEYAYRHQDQYKPWVTPSKSIQDLQSLWKQRKSLTKVKIQIKQNLTEIKAMQGPSAYKKASQAYKSTLQGIQKDLKQIEKKLKETLAKNKDLAKLHDIITSVDGVGTTTAIYLMVLTKGFKSFNDPRKLACYAGIAPFPYSSGTSIRGREKISPFANKELKTLLHLCAVSVLKMNNRFTDFVKRKKEEGKHMMSIINSLRNKILHVICACVRKNQKYEKNYINLFA

SEQ ID NO: 225444 - protein, 411 aa, unidentified
MEVKFERCCGLDVHKRSITACCTCAEEGTIKKEVRSFGTVTDDLLDLSHWLASRQITHVAMESTGSFWKPVWNILEADFELILVNPLHIKAFNRDKTDVKDCEWLADLLRHGLLKASFVPNRGQRELRELTRYRTSLKEERAAEVNRLQKVLEGANIKLASVASDVMGKSGRQMLEALVAGDKPPTEIAQLAIGKLREKIPQLERALAGDFAPHQRFLIARQLAHIDFLDEALNQVSQEIGARLSPLELKAAVRLDPVPGIAMGVAEVVIAEVGADVERFPTAGHLTSWAGICPGNRQSAGKRRKAKTRKGNQALRTVLINAAHAASLKKGSYLQAQYLRLVPRLGKKKAIVALARRILEIVYHLLKNPDSIFQEKGAHYMQEETQERSKRHLLSRLQALGYVVTLEPSAA

SEQ ID NO: 225445 - protein, 331 aa, unidentified
MKKPVLIGIDVSALTFTVAEEIPDEAVRETEGENTPAGHREFCRRLGKARRPVRVCLEASGIYHLDLTLALAATPNVEVMVANPRASRDFARAQMGRSKTDRTDARSLLEFVRRMPFVAWVAPSPQTLALRAISRRIASLSVHSAQERSRRDAVDHCEALPDVLDQEIDAHLAFLKDSSKRLAAEALKIIAADPWLQKAFGHLVSVRGIAQTSAVALLGELAILPTDMSVRQWVAHAGIDPRHFKSGTSVDKPPRISKTGNRRIRAALYMPALVAIKCEPNVRAFYEKLIGRGKKPLQAIVAVMRKLLHAIWGMLHHDCDFEGEKSYRLST

SEQ ID NO: 225446 - protein, 424 aa, unidentified
MKLFVGIDVSSEKLDVCFLTDDNQLSILSEISVANDIEGASFIRETILEFNNSYHFDQIVIGMESTSMYSFHPSMFFHEDEKLKKLNTLVTIENPFRVKQFSRMFDENKTDRNDALRIADFLRIQRFTTSPIKEEKYMALQRLTRTRYQLIKQLIRTKQHFLENLTYKCNTLAREMRDESTSLFSATLISLMTEDFTLDELAELPLEAFCDLLQEKGKGRFKQPEKIAKAIQRAITMSYRLGALAQNQLMFLSVLVREIRALEKNIKELDKAIEQVIVVIPEYQCLTSIPGVGKVYAAGLIAEIGQIERFEDQTKLAKYAGLSWKVNQSGNYQSQNTPLTKQGNRYFRYYLVEAANSVKNYLPEYKAFYQSKYKEVPKHQHKRALVLTARKFTRLVDTLLRKHQLYTPPRSVIENKQSVIDANP

SEQ ID NO: 225447 - protein, 393 aa, unidentified
MRISVGTDVAKETHWVVALTETGEVLLDHAVDNDPAAIEALIAELGALPGECTIGLDVLGGIATLLSAMLLAAGQRVVHVPGLAVNRARQGTTGGETKSDPRDARVIAEQVRSRRDLRSIAVEEEPLAELQLLVGRRRDLVAEQTRRLARLHDLLSRIHPGLERALDLTSKSGLCLLTRYVTPAEIRHAGRARLVRHLRASGARHVEAIATAALEAAQRQQIALSGERVAAGLARELAREALAVRERLGEIDAELAQVLAVHPDSTLIRSLPGMGVILTAEFIAEVGIRDRFADADALAAAAGLAPVLRQSGKVRFLRRPLGGDKRLKRVFYQAAFCSLSCPASRAFYARKRREGKRHHQALLALARRRVNVLWAMLRDRRPYELQEPRCGAA

SEQ ID NO: 225448 - protein, 351 aa, unidentified
MPCKKDVAVIRAIGIDTGKNTLHMVGLDKKGAIVLREKVSRNRIAARLVNVPPCLIGIEAGMATHYMSRELLALGHQVKQVPPAYARPFRQGHKNDFRDAHAVAEAVQRTSTRCVPIKTDGQMDLQALHRVRSRLIGDRTAVINQIRGFLLEHGIPVRQGPRFLRQQLPQILATRTDVLSPRMVRIIGDIVDDWEYLDERIERVTDEIEGLARADVSCGQLMTVPGIGPIIASATVAAIGNGTAFAKGRDFAAWLGLVPKQMSTGDRTILGRITKRGNRYLRMLFVQGARAILLHPASWAKHGFGPWLTSAVRRLHRNVLVIALANKLARIALTVLVQGRSYETRVEPAAA

SEQ ID NO: 225449 - protein, 450 aa, unidentified
MVKSTNQTTQNPLGILNHHTAGIDVGSMLMMISYTDAGGQQKLVESTGYSQDLHHLAVTLKADGVTDVAMEGTGVYWMALYEVLESEGLRVTLTNPRHFKNVTAQKTDVKDCQWLHQLHAHGLLRSSHIAPELYRELKSYIHERNVLQTIKSDTLNRIHKILTQMNIKVQHVISDIEGVSGMKLLRGIASGITDPEKLLSLVNASRLKATLDELLQSLNGLHKKQYTIILQNHLDVFDFLKGKMKSYELLIEDVLKKMIPAGENGSMPEIKKKKSYVRKNEYSINLKAYLERILGVDVTSVDGLKEISVLEIISVTGIDMNKWRTQEHFTSWLNLSPRPKVSGGKLLGHEKRFTNNKATQAFRLAAQTMWQNKGPLGQLYKRLAVRKGSKKAIKAVARKLAVIFYKMVREKCSYDKSRLERNLEQQRARKLTMLIREASKYGYELQPVIL

SEQ ID NO: 225450 - protein, 336 aa, unidentified
MASDYQLFVGIDIAAQTATAAWTRLDRQVSQVVTIAQSAEGYQELNTLLLATGTVACEILVVMEATGTYWMQLAWALHQQGFAVSVINPMQAHHFAAALLKRAKTDAIDAQTLAQLALLLQPSPWTAPPAVYEELYQRLTERDALMQMQRQERNRLHALHKRFVLIPSVQQRIQQHLDLLQRQITSIERELEHVFCQDAEWAAAAERLRSVPGLGAVTVGWLLVSTLNFSLGHTPDQLASFAGLAPHPQQSGTSLHTHGQVAQGGHARLRTALYMAALTAIRLNPVLAAFYRRLRERGKPAKVALCAVARKLLHLAWALVTKHQMFDPHHESCAVA

SEQ ID NO: 225451 - protein, 403 aa, unidentified
MTSCSYFAGIDWASQAHAVCVVDSAGAVMLRLDIAHSREGIERLIRQLKSFKGLAAAIERPSGVLVDALMEAGLQVVPIHPNVLKASRSRYRGAGKTDPADAYMLADILRTDGHRFRALDPQTDEIRALRALVRTRDDLVAERVALANQLRSLLESFWPGAAEIFYEIDTPIALAFVSRYPTPQSASYLGEKRLAGFLAQHGYCGRRPVATLLERLRSAANGCAGELEAEAKGELARSLASILERLVAELAKLSARIEHTVANLADGQIVMSFPRSGRICAAQILSELGSVRERFPTEAQLAAEAGVAPVTYASGKHRSVTFRWACNHRLRRALTCFADQSRHGNAWAADVYQRARARGCDHPHAIRILARAWVRVLWRAWFTRTPYQPHLHRSAAAFVATTG

SEQ ID NO: 225452 - protein, 422 aa, unidentified
MMHEERRWFVGIDWASREHVVSLCDGEGKKIGQREFIHGGTGISGMIAWLLKASGGEPGEIHVAIETPHGPIVEALLERGFNVYCINPKQLDRFRDRFTVSGAKDDSLDSYVLADSLRTDMPLYRKLSVAEPLIVELREWSRIDEELKVERIRLANRLRDQLWRYYPQMLELGELDEDWMLDLWEATPTPQKAARASKAAIARVLKKHRIRRFDAAQVLSELRKPALSVAQGTIGAAPVHIRMAIERLRVVNRQLADAELQLDRLCKKLAEPVAADDGENVPGQRQEHRDATILDSLPGVGRVVLATMLAESPDALQRRDYHALRSLYGTAPVTRRSGKSCIVTRRRACNRRLRNAVFNWGAVAVQHDPISKAKYQALRARGHGHARALRSVVDRLLYVACTMLENGTLFDHSFAEAKKAAA

SEQ ID NO: 225453 - protein, 341 aa, unidentified
MKNLFIGVDFSKEKVDVAIIFADGLTETAPRVFNEFKTTVSGYKQLVKWVEQNSCGIDSSLWLFCGENTGDYSKGLCNFIYGKGYDMWLENAKSIKDASGLRRLKSDRADASMIAEYAMRNYDKSIMYEPLSESLAQLRELFLYRQMVVRHRCSFQVRRGEKRLTMEKSPIKTMISQSGRHIVSELNKEIEKIDKRIAELIKSDEELTEVFTIVTSVPGIGTQNAVCLMVYTDNFRRFNYDSRKIACYYGIAPFGKDSGTSVHSDPHVHYMANRQIKAMLTQAALAAVNFNPVMARYYMRLVERGKKKQVALNNVKNKLVHLITAMVRNRQLFSPEYKISA

SEQ ID NO: 225454 - protein, 432 aa, unidentified
MDNRLQVGIDFSQKRADFCLLFPDGRPLESHTAVDNSYLGYSLAKQLLLDALDSYSFDGVDVSGEATGYLWLPFFLQLAADPELELHDLKLYLLNPRWVKWFKKCFSQDHKTDERDPFYIAERTRTRRPDVTWSAYPNILALRFYTRLRFHLVRNLAREKCYFSTFLFLKASSYRRLKPFSDVFGVTSRLVLSQQPSLDELTELPVEDLAMQLHEMSGHHLRDPCKNARKLKQVSQESFPLDERLILPVQRILDLTLDHIRFLEGQVEQVNRWIATEIQAHPSIAQLATIPGVGPVFSSGIGAEIGDTQRFLQGYKWDKKHKRYRPRNLRNAEDAVAKIAGLWWPRSSSGDFEAEDRRMAKTGNRYLRYYLIQAANLMRKRIPEYTKFYDRKYHEASKHHHKRALVLTARKSVGLVVGLLHRNEPYRSLEHR

SEQ ID NO: 225455 - protein, 364 aa, unidentified
MKTYYIGADVHSNSTELAIEHKGSIVSRYSVPTTIPAIRNVLSSIDGEKHLTMEEGPMAGWLYRNLNNAVDEMIICDPRRNKLISSDGDADDRIDAGKLASLLRGGFLRAVYHNDDMNRVTLKEWVCLYYDRVRDAVRMINKIRARCRMNGISIPRAVIREPSKRKLWLSEIHNSALAAQLNMLWLNYDSVVKQVKISKRQLAILSRQHDIIKLWSELSGIGTIRAITLFAFLDTPWRFKKKNKLWKYCGVGLERSASGTDKKGKPKPAFLQLAWHVNKVLKYVVLGAALSAINQNKNVFSCYYERMLHEGIMPSNARHAVARKILTVMWGMWKQNSRFRENMVMPVSKSSAVSPARGKWTTLS

SEQ ID NO: 225456 - protein, 435 aa, unidentified
MQNNAVVPFVSSRTAVISCDVHRDEIFSSSNIPGWEETSRWQNRTPALSAGLELVRQAGQAAGFGRFVVVAEPTGVYHRLLFEVARRLGLETALVNTESVSKMRQIEFNDSGKTDRRDPRVIARVWAIRAIRDRVLPEPFARLRSWGKVYAEGEKMRAQAKAAIQTHLRGLFPDFPMKKDFLFGRSGRALEKLYGLNPWRIRGAGASRFGPKMKAAVPGLRRRSLERLWEAAGDSIQVGSRAEASVAQKQLDQLWRDLEWAERRCGEVGAELKRLYDQARELDPRLPDARPGVVSQLALARLVGELGPLSDFQGWRELQRYVGLNLRERQSGQYAGQIRITRKGRPLARRILNQIALPLVKRHRLFGAYYHAKKRTMKGAQAMTAVSRKLVKMLWGWYQAGQNFDSARVFACESQARRVNRWQPRPTKGCPAVPR

SEQ ID NO: 225457 - protein, 547 aa, unidentified
MDCCVGKFQVHTFTFPDYGVSKMYHVRRSGRKQPKARPRSKQSLQKPNGVISPRVQKVGGEHFAIVCVDPAKHRSEWMMADYFGNLLIECQTVEHQSVFFKVAVEMIRQAQQQHDIQDTIVVVERTGNYHLPPKRAFASAGFDTRVVHPFATKQYRMPANPGIKTDENDLYAQHRAAVAGFGLCELELEPPFRDLQLRARHRRNLVEKAASLACQIREHLHLGMPGYAGLFDRLFETPTALVIAARCDSPAKLIQLGRNRLSRYLSKSKVRHQLRTIDKVLAWAAQAADDPIQDGPMHHAIWTDLHELYQHIQRQIVALEQELAGDVVQTPYVRLMAIPGINVVSAAELAAEMGPISGYANANAITGRAGLFPSRYQSDQTDNDRGPLIRQANRRLRCVLMRIADNLACHCAYYRGQAEVDKARGVDKRASRVKIAKRFSRLALACVAGDEPMRHPCFQKPDSILDKLRRFHHAHQTPMDVLLTDLEAAVEQLPYNTCNHEAEIVADVLEQHTRRRRGAGLIGDVLPAVLARLNIRTTEANKNRDRS

SEQ ID NO: 225458 - protein, 436 aa, unidentified
MTLINFVAANQKYYAFNLLSVFIMVFWSVQYLLQHLLVQTQVSHQLLQPLILILQLPQTPQFRHARPGKFFLPVNGMDYFLPLRLTVRNVLTRRITMNIVFLGIDLAKNVFQLCGLNQAGKPVYTKRTGRKELLQTLANIPACLIGIEASTGAFYWQRELEKLGHKVKVISPQYVRPFVRGQKNDGNDAQAIAVALMQPTMQFVPPKSPEQQDIQALHRARQRIVNHRTATVCQIRGLLLDRGIPIGSAVSRARRAIPLILEDAENGLSSRMRRTIAELYDLFNDLGRRIHFFDKEIETVFRQSEACPRIAKVKGIGPKTATAVVAAIGKGTEFKNGRHFAAWLGLVPRQHSSGDRQVLMNMTKKGDKHLRTLFIHGARAVVRVATNNNDGHMNQWVNQLKERRGFNKTTVAVANKNARIIWLMLRNDTGYQVVCN

SEQ ID NO: 225459 - protein, 340 aa, unidentified
MGEYIGLDVSLKDTAICVRRDGKRVWRGKCASDPDVIASVLRTHAPEAQRIVFETGPLSIWFFHALTAEGLPAICIDARHAKAALDMAANKTDANDADGLAHLAEVGFFREVRVKGYDSMLVRTLVAARSKLVQMATELSNQIRGLMKTFGLIVPSAKGGSFEAEVRRLLSDGGGLARVILPLLEAWGAVRRRATELGRQLLAGARQSQACRRLMAIPGIGAITATAFVTAIEDPANFRSSRSVAAWFGLTTRRYQSGEVDYDGHISRRGDAHMRGLLFEAATVLLTRSRVDSDLRAWGLTLRERLGFKRAAVAVARKLAVVMHAMLKSGQSYRAKAAMA

SEQ ID NO: 225460 - protein, 429 aa, unidentified
MSYRIAGIDVHKKMLAVVVADVEVESEYTFERRKFSSTPEQLRSLSTWLLEQEVEEVVMESTAQYWKPVWGALERYWKPPCEKREGARRKSGTLHLAQALSNRGRQGRKRDFPDAERLVKRLVAGELTLSFVPDAEQRLWRTVSRKKYQLRCDRIRLQNQLESLLEEAHIKLSSLVSDLLGLSARRMLEAIAKGETDPTTLAALADQRLRATPEQLRDALGACTELNSVYRRLVKMALEELRLIDKHIGRLDQEMAGLLSKHQDAVQRLAEVPGLGVDSAQQIIAEVGPTAASFPSEKCLSSWVGACPGDDESAGVNHSHRSPKGNRHMRRLLNQSANAAARTKGSIFEVVYHRSVPRLGHNQAIGAIAHRQCRLIWLILHQGVRYEERGTEVSKRSKHLRTWKMLRQLRKLGYRIEPPNPQPSQAPAQ

SEQ ID NO: 225461 - protein, 408 aa, unidentified
MEQIQTKANMHFRPQMERAAGIDVHREKLAVCIYIRDQENKEQDYGTFTCDLEHVRDDLLKDHIQDVIMESTGIYWIALCTLLMAAGIRVTVVNPKFVKNMPKEKTDKKDARWLCKLLVNGLVRNSFIASEDQRAFRDLCRMRTKYSNHMSQTRNRIVKNLERRNIKLRSVVSNMNTVSAMAIVKAIAEGETDIEKLVSLCKTKLKKKSEQMRKALVGVITDHDRMMLKGLLADIDHYQKQVEKIEEQIHTHTDKINNGLIENLRQIKGIGEQSAQIILAEIGDNVKPFATADKLAAWTGVAPGNKESAGKKFYTGTRDGNVYLRTALIQVAWAAVRTKNSYWRALYYHLTKRMPMGKAIVAVARKLVKIIYKVIKGTKTYVEYGMDYFMQRLQQRIAQRHKHEAKTI

SEQ ID NO: 225462 - protein, 416 aa, unidentified
MTDERRWYAGVDWASQSHHVFLTDRDGRKLGEKVFRHGGEGLADMATWLMAASGADDPGLIHVAIEVPHGPVVETLIERRFGVHAINPKQMDRFRDRFTLAGAKDDSRDAETMASALRTDPRCFRRLAAGDPIVIELREWSRITEDLGAERIRLTNRMREQLRRYFPALLGLDSDLGAPWLLDLWEAAPTPGKAARIRETTVARILKRHRIRRFDAAHVLSVLREPAVTVADGTTRAAQAHIITLLARIRLLNRQIDDAHRQLDRLTAQLAQSGETEPGQLKQHDATILASLPGVGRIVLATLLAEAWDALQRRDHAALRSLTGVAPITKRSGKSRIVIRRQACHPRLANAMYHWARVAVQRDAVSRAKYTALRTRGKTHGRALRPVADRLLNVACAMLKAGASFHPSQAVGKTPC

SEQ ID NO: 225463 - protein, 404 aa, unidentified
MYYVGIDVAKEKHYVCILDDTREIAVKPFWIYSDILGLRKLVTILGELSLNNDDFIIGVESTGAFSENLYEYITDADYKVILLNSYQTAKFRDFSTGRKVKNDSIDAYVIAELLSTGKYKESFISNDDYQSLKVLGRLKASLMDKIKTIKREISTVMATVNPEINKVFPNIFTKTAIAIIKAYPTAVDISKSTPQKMTKIFRHIKGNNFNDEKAKFLIELSKSSIYGGRAQKARALMIRTNIKILELLCQEKDKIEAQINSLLYNKIEIIDSSIEQIKSIPGVSDKTISAVLGECGDIKRFPSVKSFIGYLGLYPTQYQSGNSMKVGRLAKRGIPIAKHALYMAAVASVIHNEQLRKIFRDKVSAGKSKKEALIIISKKLAAIIYSVFKYNKPYEPKRVFIPRR

SEQ ID NO: 225464 - protein, 334 aa, unidentified
MEITTIGIDLAKSVFAVSCADSAGKVVVRRQLRRAQVLEFLRVLAPCVVGMESCGGANYWARAIGALGHEVRLMSPALVRPYRSGPKHDRNDADAICEAVRRPQMRYVAVKSLAQQDLLALHRVRAQLMKQRIALSNQLRALLHERGVVARLGAAGLRQALAQALQTENSEVSGALGELLLELSGWLRESEQRIAAITRRIERAVKDDEHCRRLMKVPGVGSLSSSTLVAMVGNAREFKSGRELSAYLGLTPRQHSSGGKTVMLGISKHGDRYLRTLLIHGARSLLYRHRRGGAHPRATWAARLCARRGPNVAAVALANHNARVLWALLSRGAS

SEQ ID NO: 225465 - protein, 420 aa, unidentified
MKTIRTKKMKFVNEKTLIVAVDLGKVSNQGYGRCPNGEEVKPFEFFNNGEGFKKFWGRIWQVKETYHLEAVVVGFESTGPYGEPLVHFLSKRPVRLVQVNPMHTKRLKELEGNSPEKTDRKDPKVIADIMGLGHALTVIIPEGAAAELRRLTQARERAVQRKTALWNQLQSLIALLFPEFLQVMKDLKTHSARYLLEHYPTPQEICRLGLEGLTALLKRVSRGKLKLERARAVYEAASESVGIQEGERSLCLEIRELLGAIAATEGFVAVVEQEMAQGLGQIPYSPFLLSVRGVGKVTVAGLIGEVGDFRKFHTLAEIMKLAGLNLFEISSGQHKGRRHISKRGRPLLRKLLFFAALNMVRQNGLMRPFYQRLVGRGMRRIKALVAVARKLLGILFALVRDQRFYIPDYGKKGAVELEAA

SEQ ID NO: 225466 - protein, 470 aa, unidentified
MKIVGAMDVHRKQITFKLRDTDTGEVRRGRIPCDRESVRKWLADLGGGDGVHIALEATTGWLFVAEEIQRVGYTAHLAEPAETAARRGPKRRAKTDKTDCDNMVELLTIGRLPESWIPPDHLLEVRTLVRLRKDLVDERRKWRQRIKAQVFHQGLPGGIKITTDKGRACLAEAELSPAGCQVVATGLRVIDHLDQQIEPIDRQLIALAKRQPGCRALTGLYGVGALTAVAIWAEFGDGRRFSSSDDAVRYAGLDITVYDSDGKRPPGHLSRQGPEACAGRFTKPRNPQRAAPRRTTPTTLRPRPASTTTGRALRSLASCCDAPITSSRTWGTPPLSPSPPTSRPSTAEAFGLLRERLLMVVVRMAVARFVPHIKPMAFAAGSLIPPVATAAPWTSSEDRAAAMLSAGVTRSLIMSPELAPSTEIRLGDRARRHLPCRLSGGDGLIRGGGREQELRRHREPLSVARGSLYR

SEQ ID NO: 225467 - protein, 355 aa, unidentified
MIIIGVDYHPEFQQIASLDTDTGEFEEKRLLHPEEAEKFYRTLAAVGQKVRVGMEASGHARWFERLLAELQLELWIGDAAEIQSKRGRKQKTDRQDAQHMLKLMLKDDFPRIWVPSGENRDLRQLLWHRHRMVQARTRIMNQLQAVAINEGLGCKKRLWRAGGRQQLESFQLAPWASRRRCDLLQLLDQLTPTIAELNQAIEQEAENSPEARRLRTHPGVGALTALAFVLIIGKAERFECGKQVASYLGLVPLEKSSGNRRRLGHITKQGSSLLRFLLVEAAQVTVRSLPEWRGQYFRLLMRRGRKTAKVAMVRRLAIRLYWMWREGRDYQQWKSSVRTQDSPDQAMVCSRTPSK

SEQ ID NO: 225468 - protein, 355 aa, unidentified
MEGTKYIGMDVHKDSISIAVLNSSGKLVMESIIETKAITILEFVHGLRGSLHLTFEEGTWAAWLYDLLKPHVAKLVVCDPRRNGYLKQGSKSDRIDARKLAELLYSNMLRPVYHGEHGVRSLKELARSYLTITKDQARVMTRVKAVYRSWAIPCAGKQVYGQRHRLEWLGKIQEAGVRRRAEFYYAELDALRSLRLVVRSELLLESKKHNVSTLLSQIPSIGPIRVALLIALLQMPDRFRTKRQLWAYSGLAIETHDSAENQYVNGQLQRSKKQSSIRGLNSNHNPDLKNLFKSASAVAAVKTGPFQKFYAALIGKGIKPEMARLTLARKIAAITLIVWKRGVSFDARYLNPQTA

SEQ ID NO: 225469 - protein, 313 aa, unidentified
MYQNFIGIDISKATFVAAQHGLKQTHEFNNTQEGFDAFFQHYNSVIPTSLVILETTGGYEMGLVQYLLTKGISVHRADTRKAKYFMRSLGKEAKSDNIDALGLARYGYERLVLYVASSFHQEHLKQLSQRRLDLKQIMVQEKNRHQAPNQSACIQTSCQTMITALEAQLALVDAEIEASIKAIPEQKARQKILVEIDGIGETISSALLALLPELGRVDRKQIASLAGLAPHPCESGQKVGYRRCKGGRQEVRSILFMAAMSASRSKGPLGQFYKDLLARGKKKMVALTALMRKIVVIANAKLRDWDKEQMITT

SEQ ID NO: 225470 - protein, 402 aa, unidentified
MEKYAGIDIAKRTHWMCVTDGEGHFLMEPRPYDNDADGLSRMVADLDLCGGDVAVGMESTGCYWRSCYKVLAEGGYPVSVINPVVTCAERKSGNLGRAKTDRVDCLVVADALRKQGIAPTPSPDADAAQLRDLCRFRRAVSESMSRTKIQAVALLDQVWPEYGKLFSDKFGDSSRSVLRRFALDEMDADGLADDLRGASRNRFGAAKASDVLQSLRSTCGVPATDALRLQLRLLLDQLDFCAAQLAEIDAEADSLLDAVAPTLPTVPGIGRATAAQIAAEVGDVTRFRDAKALVAYAGLDPTRRQSGGFDPDRNRISKRGSAHLRRSLYIAAQASLRADCEVRDFYDRLRGRGYSHRYAVCAVARKMLCVCWALMRSGEEYSRDRHRARGKAPEGASPVDAG

SEQ ID NO: 225471 - protein, 340 aa, unidentified
MSEVSIIGLDIAKHVFQAHGVDSSGRAVLRKKISRAKLLPFFAARSPCRVVLEACGGAHHWARELIKLGHHVQLIAPAYVKPFVKRQKNDAADAEAICEAAQRPSMRFVAVKSEAQQAAAMVFRGRDLLVRQRTQISNALRSHMMEYGWVAPKGLAHLDKLAALIADPSAVPDGVRSVCVVLLDSLAVLDRQIALLDREIARRAREDEVARRLMTIPGVGPITATAIAALAPPPGTFAKGRDFAAWVGLTPRQHSTGGKQKLGAISKMGERTLRRLLIIGSSAVVLQASKRGAPKGSWLEQMLARKPRMLVTVALANKTARIVWAVLAKNEDYRAPAVAA

SEQ ID NO: 225472 - protein, 439 aa, unidentified
MVWTGRRFRTTPQDLDRLWAMLPEGTDPADLLVVMEPTRNAWVPLAAWFRRSGASVVLVPPERSADLRRYYAKHTKSDRLDSQLLARLPMLHPDGLYAEQSLGPGDALKRAAKLRSTLTHRRSQSLARLDALLEILGPAWHAAIGADLANRTPLKFLAAGYADPHVVKRLGRTRLARFCYRHSRGAWGEPHAAALLAAASETLELWSGGELDYPDLAEDIAIEARLALQLTEEIKDLDERTTLLLREADPSGILTSAPGVATITAAAILGRLGDPNRFTSLAGARAFTGLVPILDASGLNGRHGGPTKRGDAVLRQALFMAAGQARRIDPTLAAKYHRLMTEAGKHHNSALCHIATTLLTRIIACWRARQPYQLRDIDGTPVTIDQARTIIADRYTISKDLRARHRTTADTGTDRRNKRSPSAPSTGPSTTHARRAGAA

SEQ ID NO: 225473 - protein, 352 aa, unidentified
MQHFIGCDVHTRSQVVAWIDEETGEIRKRRLEHEGEEVRKFYAQFPRGTVVGIEATFPAYWFERLLGELGHELWVGDAARIRASDVRYQKTNERDAEDILDLLRSGRFPRIWVPSLEERDLRQLLVHRMKQVRARTQVKNQLHALAISQGLCRKGRLWSAKGRKELESLALLPWAARRRKELCAGLDGLDEQIRELDRAVEEAGRARGEVALLRTHPGVGMVVALAFALTVGPIERFPNRRKLVSYLGLNPREDSTGDRQRLGSISKQGNTMMRWLLVEAAQTAARLDPQLRRTYQRLKNRRVSGVAKVAIARRLAVRLFWMLRTRHNYAQLVRMSGSPSSAVVSPRAGSND

SEQ ID NO: 225474 - protein, 368 aa, unidentified
MKKIAYVGIDYHMNVVAIAVIIEGEKEFYDTIRLKNTDTLIAKYMQKLSHQFTIKACYEASSSGYCFQRKMRAWGYHCDVIAPSLVPKKPGSRRKNDFRDARELAQHYANGLLTVVHPPSEQDEALRGLLRCRQSLKEAEKRVKNQINSLLLSQALHWQKSKWTLRHRQWLASLHLPHTYLQQVLDEHRALLHYLEARVLHFDRQIETLAQSELYADSVKKLCTLKGIRTLAAMILIAEITDFRRFASPRALMAFLGLIPAEHSSGDKQTGCAITKTGNKRCRTQLIEAVLHYVKKPIIRGRLKSALADVDAATSSIALTCMQRLHKRYWALVMKGKEPKVARTAIARELAGFIWALMNQQSATATTV

SEQ ID NO: 225475 - protein, 344 aa, unidentified
MTITVIGLDLAKNVFQVHGIDGNGRAVLRRKIRRSEVLPLFSRLPPARVGMEACHTSHYWAREIARFGHDVRMMPAQFVKPYVKSQKNDATDAEAICEAVQRPTMRFVAIKSENQQAALMLHRTRDLLVRQRSSLISSIRAHFAEFGIVVGQGIRNVERLLALLGAEGDNRLPALAAEMLGVLAEQLRETAARVSEVEIKLLAWHRANPASRRLESIPGIGPITASAIVATVGDPRQFQSGRQFAAWLGLVPQQRSSGGKERLGGISKRGDGYIRRLLVHGARAIVGWRKRSAAHTTPWIERLLKRRPMNVATVAYANKLARIAWAIMISEDRYNPVRAFAAVG

SEQ ID NO: 225476 - protein, 318 aa, unidentified
MTNITYQFNIGVDIAKQKLDVSFSDQRVVSFENNLAGFKRLLKEITDKSQTRVVMEATGGYEKPLAHFLQGQGVAVSIVNAKRVRDYAKALGLLAKNDVIDAKVIRLFADAVNPKLLLAASDTQQALDAQVHRREQLVKQRAMEKQHLETVGNKDAVRSIKRTIAFLDKEIERIEKAIRALIRADSILTEKVERLSAIKGVGDITALTLIADLPELGQLSNKEISALVGVAPFCHDSGTQKGKRTTWGGRKQVRSILYMAVLSAVQYNPPLKAFYNRLLMKGKTKKVALVACMRKLLTVANSMLRNNTEWNPNHGKLA

SEQ ID NO: 225477 - protein, 348 aa, unidentified
MPTSKTLVLGADTHKDVHVAVLLDQLGRRLAVASFPATDAGNQQLWQWATGFGGVSAAGVEGTGSYGHRLAQFLVGKGVQTWEVNRPDRARRRRRGKSDPVDAENAARAVLAGEVTAIPKDRRGVVGELRALLVTRRSAVKARTQAHNQLRGLLVEADDLLRDQLGTLRKAHFARACAQLDPTDGIRRALGSLGRRWLALNDEAADLERQIASLVQKHAPKLLARRGVGALSAAQLLVTAGANPHRLVSHAAFAALCGASPVEASSGKTTRHRLNRGGDRAANTALWMIAHVRMVHDPRTHDYAAKRTATGNSRKEIIRLLKRYIARELFPLIVEALPPPATPSSTAA

SEQ ID NO: 225478 - protein, 314 aa, unidentified
MKTKRMWAGLDVSKDEIAVALWPGDRGWTCPRSEEALAGLAEELRRLRVRLVALEATGGLEVPVVLALARRGVPIHRCEPSRARHFAKALGLRAKTDRVDAVLLARFAASGELKPQALASDAVRELDALVTRRRQLVDLITVESNRLKSSAAKACRDSARRVLKVLVGERRALETQIAAALDAAPELRAKADLLQSAPGVGKVTAATLTAAIPELGTLNRWQVASLTGTAPYANQSGRFRGQTRIFGGRADVRCALYMAVLAGMRHHPWMRGLYEHHLARGKKKKVALVACMRRLVVVLNAMLRDNAAWRPAAV

SEQ ID NO: 225479 - protein, 520 aa, unidentified
MHQTKYRGIITEAGSLTFSPWEPAGPLLAKPPRKSVRPFGGDLCFGWLGSPRLYLYKPLGCVSAFWKWMPARKDKNMQYQKVPKLLENIPYLSVGLDVGADFSWMSIMLPNGTLTGKPFKIVHSDPQSRELAVAKIKEAQEAYSLESRCFLESTGIYHIPLLCFLRDKGFDCSVINPIITKNSTNMNVRKLHNDKFDSKKAAKVGLDASLKTSIIPDDAVIDLRNLVRDYYYFKDLQSAVVLKLTAELKVSFPAYRNVFCKATTQTSLKLLDAYPLAQDLLAAPKGTVVEMIRSTARFGEKYALAKYDALYAAAEDAAIFGRALPSNALRIRLYIKLYREYQEHLDGILEELHKAVDRLKGTPVHNRISLLQTLPGIGFLSAVVLLAEMGSFDLFSSPKKLYAYFGMDPGVNDSGKFHGDRVHMSKRGSSLARRILHMAAINNLKVDKAAKMPVNPVIYDYYVRKCAGKKKIVAVGAVMHKICNTIFAMLRDNKPFELITPEEHCQRYAAEHQGSVSTVA

SEQ ID NO: 225480 - protein, 405 aa, unidentified
MSELGKDLVFAGVDTRKDAHTLCLLDHMGRAIGTFRFAADAKGCDALAGKIGGPATRAGVGVEGTGSYGAGLTRRLLELGCRVYEAMVPGRARRKPGRPKSDPADAEAAARQVLAGVDPSKPKDQSGRTEELRRLMIARDRLVQAASAMINAAKSPMVTAPEDLRRSLEGLSRKNLRSALSTLDPGAGGIVLALGSLGKAWDLQDREADAIEERMKRVLEANAPALLAIYGCGAVSAAALAVAGGGNPERLKSEAEFASLCGVAPLLASSGKTERHRLNRGGDRRANRALYQIAVTRMSYDQRTKDYVGKRKRDGKSKKEAIRCLKRYIAREVFRALRNPLEIKGPSWKDLRPARQALGITLVEAGKALNVGFQKVSYAETGRLMNVRFLEEYDAWLKSQAKRES

SEQ ID NO: 225481 - protein, 309 aa, unidentified
MEIVVGIDVSKERPDVAILPQEEVFAVGNDHAGIDELVERLKGIGVDAIALEATGGFEMLAVAGLSAAGLTVLVVNPAQVRAYAHAIGRRAKTDPIDAAVIAAFVLATKPEIRPLRDAETQALSELVARRRQIVQMVVAEENRLRMALAKQAQKSIKRLLKALRRELESLDADLDSHIRKSPVWRVREALLTSVPGVGATTARTLLAELPELGSLDRRQIASLAGLAPWTRQSGKWKGKSFIGGGRGKVRAVLFMAALVASRYNPDLKAFRDRLVAAGKPKIVATVATMRKLLTILNAIIRDGRPWQNA

SEQ ID NO: 225482 - protein, 430 aa, unidentified
MNQTAQLKTYVAHVGIDWADKKHEVALRLAGTQDIQRCSLEQTPEAIAAWVAGLRQRFGEGKIAVCLEQARGALVYALMVHENLVLYPVNPQSVAKFRKVVHPSGKKDDPLDAAMLLSLLEHFGEQLRPWVPDDVATRKLRLLVEARRGFVDRRTSLLNELQATLKSYFPQAFTLLGEDLTCALATDFLKKWNTLEAVKKLKPATLRAFYYGHQSRSERLIQERLALREQAVPLTQDPAIVGALSLAAQQLAIALASLRGVITTYDTQIAEAFAAHPDAFIFASVDGAGAVLAPRLLVAFGSDRQRFDQPDAMPRYSGTAPVTERSGRQCWVHRRWARPKFLHQSWVEFADQSRRFSGWAGLCYSHLKSKGMGHWAAIRILAIKWQRILWRCWQDHVAYDELAYLKSLKKHGLDLYAELVPGTNTPVNNI

SEQ ID NO: 225483 - protein, 392 aa, unidentified
MYIIGIDIGKNYHEATIIDSSGNLIGRSCRFSNTHKGADKLMNHIFNHIDNNTCIFGMEATGHYWYSIYSFLKSKGYTIYVINPIQSDSLRSLYIRQTKNDSKDSFLIAQVIRFGQFSTTSLADENLLAMRQLCRYRDSVVASRTEIKLRIHTILEQIFPEYDKLFSSIWQNSAIGVIEKYLLPESIANAPLAELFALLKEKSHNKLTMAKAIAVHDAAVDTFGIKIAQSAFAFQLKQLFTRLNLLDEQLKALETEILSYYENFDCYLHTIPGVGVTAAASILAEIGDITRFRNSSALVAYAGIDPSVKQSGEFNSIHNHMSKRGSPYLRHAIFLAATTCVFHDSPLNTYYKKKREQGKHHLTAIGAVSNKLTSIIYAVLRDQSPYEPKKFA

SEQ ID NO: 225484 - protein, 346 aa, unidentified
MIYVGIDLHRKRSQIAALDEQGAELFSRRVANEPEVLKAILAELGGELQVALEATYGWEWLADLLEQEGHELHLSHPLRTKAIAAARVKTDAVDARTLAHLLRTDLLPEAYVAPRELRDLRDLLRHRVVLTRMRSALKNRVHALLARQGIQNEHADLFGQGGRRFLAELPLREPARRRLDSLLSLIGDFDREIELAKREIDALARHDPRVDVLCQLRGIGPYTAMLVIAEVGEIERFPSARHLCAWAGLTPTVRSSDGRARLGHISRQGSPHIRWALVEAAQKAATGGGPLRTAFERIAKRRGRNIAKVAVARRMLTLCYYGLRDGEIRCLQAPGPARTRPVKAAP

SEQ ID NO: 225485 - protein, 316 aa, unidentified
MVPSPLFVGIDVAKATLDIAVRPTAETWSVSNDATGIDALVLRLGALAPPLIVLEATGGYQGPLVAALVAAALPVVVVNPRHIRAFAQAVGILAKTDRIDARVIAHCAEAVQPAPRPLPDAETQELRALLVRRRQLVEMVSAERARLDTVPPSIQDAIQAHIAWLTTQIAGLDDALTRASQTHPVWQAKDDGLQSIPGVGPVLARTMLGQVPAWGTLGPKPLAALIGVAPFNRDSGTLRGRRPVYGGRAEVRAVLSMGALVATRHNPVIKTFYERLLAAGKAKKVALTACMHKLLTIMNAMVRDLKPWQPQEVPSA

SEQ ID NO: 225486 - protein, 364 aa, unidentified
MKKNNTVTTGRKQILKQAKLTIGLDLGDRSSHSCMLDEAGNVILERSLPTTANGIRQAFGRIPRCRIALETGTHSPWVSRQLSQMGHEVIVAHARNVRLIGESSRKDDRIDARTLARLARIDPGLLGPVRHRSAQAQIHLTVIRAPAALVSTRTALVNAARGLTKSYGERLNKCGTEQMSRESSKGLSQELRDALDPLLREIESLNERIAEYNRRIEQIAKEVHPEVARLKQVKGVGTLIALAYVLTLDDPHRFRRSRDAGCFLGLRPGRRNSGQSEPQLHISKEGDRYLRTLMVQGAHYILGPFGQDSDLRRWGLKLAERGGKNAKKRAVVAVARKLAVLLHKLWVGGEVYEPLRNNQQAAVA

SEQ ID NO: 225487 - protein, 350 aa, unidentified
MTISHYIGFDVHKKSVSYCVKTADGRIVEEGKLRATHEALRQWASQRQEPWHGAMEATLFSGWIYDTLQPFAAELQMGHPARMKAIFAFKKKNDKLDARKIADLVRVNLLPACYVGPAEMRELRRMLRYRNLVVGQAVQMKNRMSGMLMEVGAEYSKQRLHGKEYFSELLDRLEEVPESVKDLLRLSRGALEMFETVQRQLLGRLQKEPLLRQRVALLRSIRGVGEVTALSWALEICDPQRFASIGDAVSYCGLTSALVESADKQQRGPISKQRNAHLQTVLIEAAKLAPRWNPQLAALHERALQHGHRNRATLEVARKLVAYLLAVDKSGQPFEVRTAPATETEAQQVA

SEQ ID NO: 225488 - protein, 362 aa, unidentified
MTQVRSWAGLDVHRASVVAATMDRDTGEMRTRRLSGSTADVVAFCAGLPGPVRVAYEAGPTGFGLARALQAAGVQCVVAAPGKIERPTSDRVKTDERDAQRLLRLLMIDGLHAVRVPSIQEEALRDLVRAREDVRGDLMSARHRMSKLLLRHDVRFDGTAGAWTTHHRAWLAKVDLGERGAQVTLLDYQGAIDALIIRRDTLERTIDELVPDSPWADTVARLRCLRGIDTLSAVGLCAEIGDWARFPRPAHVMSYLGLVPSEHSSGQTRRLGAITKTGSGHGRRLLVEAAWHYRRPPRKGDVLKRRQAGQPAHLLAISWQAQQRLYRTWQRLDTERGKRRTVVAVAVARELAGFCWATANAD

SEQ ID NO: 225489 - protein, 315 aa, unidentified
MEHLPTAPSFVGIDVSKDRLDVHVRPSGQTLAVQRNDKGLEDLVSELRKLAPALIVLEATGGFEVTVAAALASANLPVAVVNPRQIRDFARAVGRLAKTDALDAQAIALFAERIRPEPRPLADADSQSLAELVARRRQVVEMIGMETNRLHQAHNPQIQRMLRATLKTLTAQLAKLDRDIDNLIKRSSLWRAADDLLTSVPGVGDVTAHTLIADLPELGQLDRRRVAALVGVAPVNRDSGQLRGKRTIAGGRTGVRNALYMATLSALRWNPVISTHYHSLVDRGRPKKVALVACMRRLLGILNAIMRTKTPWQCP

SEQ ID NO: 225490 - protein, 426 aa, unidentified
MRVLYDRVAAIDVHKDMVKVAIRVPGAKRGTRKTDVLEFRTFYGVLQEMARELRRRGVTHVVMEASGVYTDPVYYALRELDFEEVMVINPAHAKALKGHKTDAKDAIRLLDLYECGLLSGSYIPDPDLREVRDLARYRMKTVQARTSEIQRLQKTLETAGIKLSSVVSDVTGGSATAMIEALISGERRGSVMAGLAQTRMRTAGKMADLSMALAGRFTDHHALMCRLHRDRITIFDDAVKDLDAKIAPLVARYAREAELLKTLPGFGDVILAGWLGAIGPAPHQHFATASRLASWATLCPGNYMSAKKSKGGRTGDGGAYIKPLLTQAAWAAVRVPGRLQARFHRLVRKFGGPRNKGAQKRAITAIAHTLLKIAYSVLKTGKPYADLGADFYTRRESPDARQDYLMRQLQKLNPGCVITITPAEAA

SEQ ID NO: 225491 - protein, 461 aa, unidentified
MKRKRFGSSKKQAGKGRAIKVTRKMANLERVNDYAAGVDIGSESHFVAVPPGSCATPVKEFGVFTRNLYALADWLTECGVKTVAMESTGVYWVPLYEVLEVRGFEVKLVDAGKVKNVSGRKSDVLDCQWLQQLHSYGLLAGSFRPDDEIVVLRAYTRQREMLVKSGATHIQHMQKAMQQMNLRLDAVVSDITGDTGLRIIKAILGGERDVTKLGALKDYRCRSSEQEIAESLVGNYRPEHLFSLKQALELFEIYQGKIRECEAEMESYLKSMTHKRDDEPPRSAEAEKRNRLSFNVRDEAWKLTGVDLFRIRGLNSETILRIIGEVGVDVASRFPTEKTFSSWLGLSPNNRISGGKVLLSKTKPSKNRAAAAFRQAAVSLERSQSELGAFYRRMKARLGPGKAITATAHKIARIYYHLIKTGEEYVDKGAKAYEEKQKERMLKNLRKRAQGYGFKLVPVAS

SEQ ID NO: 225492 - protein, 435 aa, unidentified
MDEVTDEPLYRDRVCGIDIGKAQLVATIRVPSDRDRSRRAAETRTFGTTKREVLALADWLRCWQVPAVVMEATGDYWKGPFYRLEAEGFECVLADAKQVKNLPGRPKRDPADSRWLAACFERGSVAACFVAEPEFRIIRLHTRYRRDLIEERSRDKNRAEKLLESAAIKISSVLTDLHGVTGRDIMDHLIAGERNPKVLAQLARKTARRKIAQLEEALDGAEFFTAEHAALLATMLARIDRVTGEITRLSAVIEVLLAPWEEQLQQAESMPGWGRRSAQDAVAETGVDMTRFPTGSHLSSWGSRAPLDHQSGTRKGRARAKKGNRYLAGVLGETAVAAGRTQTREGARYRRLARRRGKAKAQVALGNTQLKVYHKLLSNPGTRYQDLGPDYYERRADTRRQIAHHVGKLGALGFEVTLARLPEPNPDTAGQTQPA

SEQ ID NO: 225493 - protein, 404 aa, unidentified
MAKYHVGVDVGKNRHHISIRDLPGDTYYKTFSINSERQGFLEFVSALDKISTNKDDFLIGVEACGPYSTTLSYFLLSLGYELVEVNPFRAGQFRKAQGKKAKTDSIDARSLAAILSLDNHKTLFIPNPVLDNLKELTRFRADLVKERAFMLNQLRETLTILFPEFNRVFRQLDSASSLALLIAFPGPEHIIHAKEEAVAQCLSNASPHRMGRGMARRILEVARDTVGILQKEPALGIKISILGERLLNLQSAIDRLESEITNLFHKLPYKPEDFPLGRISSLATIISEIGDIHHFPTLKQFLSHFGWCPRTFQTGNHRLEHPKMSHAGNKYLRRIIWMLSIVAIRNLPRYRAYFEQRVKEGKAKMHILVAVGRKLLSVFYAILKTGIPYNPNWEEDRYLAVAGH

SEQ ID NO: 225494 - protein, 337 aa, unidentified
MFMQVYGIDLSMEKFDVNFIDAKGKERNREVKNKLISISKFLSSVVEDGILCAEHTGAYGDLLVFLCNQAEVPIALVPGYTIKHSLGLLKGKSDPLDSSRIREYGERFIDKLVFSEYDEESMVELKQLYTLRSQLVKARKSLLTSDKGRYHLPMQSLNIHKHLHSVLSNMDTEIVGVDEEIEALIKANQDLNENYELVKSIKGVGPVIATDLLIKTGNFMIIDTARKAASYAGVCPFPNTSGKMVGRSKTSQFADKKLKSLLYMGAKAAVKHNKEYGLYYQKKKLEGKHHFLIMNNVSNKMLRTIYSVVKNKTPYSQDYICLDPRKRNINSSTKKVA

SEQ ID NO: 225495 - protein, 485 aa, unidentified
MVQSVGIDFHGGLHQARCLDERAQLCDGFSFRTTLQGLATLEERIFRDGSTPIVVFEPMGLAWLIVAAYLRARHPGCRLVKAKGQKVAALRRYLRGSAKSDRIDALTLAKMPFIDPEQLAEVYLPPAEVNALQRLTRQRQRLEGEVVARKNRIGRIVDGYLPGVREAFSSPWSLQARAFLRSHLDPFAVVHAGEEALHTFLTKARSRGRGDRAETHPVYLACQNAAALYELSRPSGGVDEGFFADLQDEIARELRLMEAEEAESEALSQRIEELYQKLHTSDNLRTIPGVGEHTAPVFLAVVGDPLRFRCQAAFANWTGVVPGASQSSDVEAKGLRMTKAGPPIIRWALYQAGQIGRRYDPQLAWIYYREMVHHGKSHKQAMGAVMSHLAARVLTVLREGRPYELRDAEGKPVSREEARGLLSKYRVPEEIRREKRRRNPAKGTGRTLRKKTQGMASHRTSEAADAPQSVAATAIPHEPVYRGSA

SEQ ID NO: 225496 - protein, 345 aa, unidentified
MNITRVGVDIAKSVFHVHGVDRHDQVQWRGKYSRGKWLDAIAKRVPEGAEIGMEACASSHHWARELQARGYRVKLIAAQFVKPYVKSNKNDRVDAEAICEAMGRPNMRFVAVKTVEQQDVQAVHRIRSELVQQRTAKANQIRGLIGEYGLVAPTGIGQLRAALPRWLEDAENGLTDDFRALLAGLAEDLRHLDERIVTVTERIERHAQTDPIAKRLMTLRGVGILTASALAGALGDAQAFKRGRDFAASLGLTPRQHSTGGRDRLLGISKRGDSYLRTLLVHGARAALRWNEGHEDNLSHWFRQLAERKHVNVAVIALANKTARIAWAITRHDSAYDPDLAAHAA

SEQ ID NO: 225497 - protein, 343 aa, unidentified
MQSISTIGLDIAKSVFQVHGVDAAGQVVVRRQLRRRHVLAFFQKLPPCLVGIEACASSHHWSRELQALGHTVRLMPPAYVKPYVKRQKTDATDAEAICEAVRRPTMRFVPTKTMEQQGCLMLHRARHLFIRQQTAVINSIRAYLAEFGIVAPVGRRGVEQLLEVVADTTDQRLPEIARACVAALGEQLRALKAQILQFDRCIIAWHRSNATSQRLDAIPGVGPALATALVASIADPTIFRSGRDFSAWIGLVPRQNSSGGKDKLGSISKQGDRYLRSLFTAGALAVIRYAKIHGTRHRPWLTALLARRPTKVAAIALANKLARMAWAMMARNERYKEPAALTA

SEQ ID NO: 225498 - protein, 364 aa, unidentified
MHYVNNTELSSHEETRCQFNGGPGAIKLGIDVHQDFYVVVEQVGGSNPKPPQRFRKEAFLHWAGRLKQKSGAEVHAVYEACGFGFALQRQLSALSIQCHVVCPQKLDEQNRRVKTDGLDAKALCLKLDRFVQGNRDALAIVRVPSEQEEQLRAIHRQREQLVKARKQLEAQGRSLMVNHGLEPVQNWWKPRTFTALPVPQWMKELLANSQPILVALQQKIAALTVQLQNAALPDQPRGLGKMTSVIIDREIGDWNRFNNRRQIASYTGLCPGEYSSGNTRLQSCVTKHGNPRLRAALVELAWRLVRFQPNYKPIVKWRAVLAKGALATGAARKKAIVAVARQLAVDLWRIKTGRLRPEELSLIN

SEQ ID NO: 225499 - protein, 404 aa, unidentified
MYNAVGIDVSKGKSTIAVLQPGGTVIRKPFDVSHTSQSLIELAHYLGSLEGSTKIVMECTGRYHEPMLKALYEAGLFVSVVNPHLIKNFGNNSLRKVKSDPADARKIARYTLDNWAELRQYSGMDNTRTQLKTLNSQFSFFMKQKVAAKANLIALLDNTYPGVNKLFDSPPREDGSEKWVDYAYSFWHVDCVRRIGLKTFTERYRAFCRKHHYIFQPDKPEKLFHASKELVAVFPKEKTYKLLIQQSIQQLNLASGHVERLRQEMNALASTLPEYSTVMGIYGVGKTYGPQLIAEIGDVSRFTHREALTAFACVDPGVDESGQHKSKSNRASKVGSARLRKTLFQIMTTLLQNAPEDDPVYRFLDKKRAQGKPYYVYMTAGANKFLRIYYGKVKECLRNLEQAE

SEQ ID NO: 225500 - protein, 339 aa, unidentified
MDITLIGIDIAKNVFQLAYSNKQGKIVGRKRITREKLLREIRQQPTCTIVMEACGSANYWAREFRKLNHEVKLISPQYVKPYVRGNKNDYRDSEAIVEAAGRPQMRFVTPKTIEQQDIQSILKVRESYVNMRTKTINQLRGLLSEYGIIVSQGASRFRKELPALYDREAQNELSMPMRELVETQYKLIASIDKNIKAYENALKELTKVDERCKRLMEIEGIGLICAAAVVTAAGNGSSFKNGRHFAAFIGLVPKQHSSGDTEKLLGISKRGDEFTRRMLIHGARSVVMRSQHKKDGRSRWIQRLVNERGMNRATVALANKNARIAMALLLSGETYRKVA

SEQ ID NO: 225501 - protein, 337 aa, unidentified
MIAVGVDTHKHEHLGRALDELGQLLGGLQIKTNLAGYLEFADWLRGFGNDVVVGIEGAGSYGAGLCEFLLAEGICVVEVERPRREDRRRGKSDEIDALAAAKKVLAGDGLSTPRAGGSRQALGALLVAYRSCVAERTRMFNQLQALHTSAPLALRERIGPGNGKRLATRVSRMRARRGAPEAEQLILGVLRDYARRARELATQADAYQAELTRLIDSLDPTLLDEPGIGPISAAKLLASDPRRLKGEAAFARCNGTAPKPASSGQTIRHRLDRGGDRQANNAIHTIALNRSIYDKRTRAYLERRTSEGKTKREAMRALKRHLSRSLYKRLVTIPLTS

SEQ ID NO: 225502 - protein, 354 aa, unidentified
MPKTASAQIAVIGIDIGKNSFHVVGHDSRGAIIVRQKWSRGQIEARLANLPPCLIGMEACVGAHHLGRKLTAFGHDARLMPAKYVRPYAKGQKNDFNDAEAIAEAVQRPTMKFVAVKTTDQLDLQALHRVRERLVSQRTGIINQIRAFMLERGIAVRQGIRFLRTELPIILASRTDMLSPRMLHVIEDLAGDWRRLDERIETLSREIETIARQDASCDRLMSVPGIGPIISSAVVAAIGSGDVFSKGRDFAAWLGLVPKQISTGDRTILGKISKRGNRYLRVLFVQAAWVVLVKPVSWERHGLKSWIEAAKKRLHHNVLAIALANKLARIAWAVLAKGRGFEATRTIDGSTKPA

SEQ ID NO: 225503 - protein, 341 aa, unidentified
MSVIIGIDPHKASHMAVAINDDEQSLGVLNVEADRRQTSRLLAWAELLSAERTWAIESAGGLGKLLSQELVAAGEHVVDVPPTLSARVRLLGSSKTTKNDRHDALSTAVAGLRHCGLRSVARDGHSTILRLLVGRYDDLVAARTQAACRLHASLRELVAGGAPRRLSADRAAKLLRTVRPVEAVGVERKRLALELLVDVRRLDRDLVAIKARIADAVRDSNTALLDVHGVGPIVAGLILAHVGDPARFATRARFAAYNGTAPIEASSGPRVRHRLNPRGNRKLNHAMHLIAVTQIAHDTPGRAYYDRKIAEGKTNKEALRALKRRISDAVWRQLQVDIAAR

SEQ ID NO: 225504 - protein, 399 aa, unidentified
MTRGDGMRSIGLDVHRDFCEVAIFEDGKVSRHPRVPARKAALVAFARSLEPTDQVGLEATGNALAIARLIEPHVARVVIANAAVTKGIGAARAKTDQLDARTLAQLLGTGFFPQVWLAEEPTRLARRRMSRRAQLVRERTGLKNQVHAVLHRNLIERPPASDLFGVKGLRWLATVELPEDERETVSSCLRQLRFLGDELRRLDQVIAQSALEQQSIGLLLTVPGVNLITAAAFMAAVGDISRFETPSQLVSYLGLDPTVRQSGLSPARHGSISKQGSAGARWALVESAWVVAGAPGPLHAFAERIRARRGANVATVAVARKLAVLFWHMLTKNEEYAFGRPSLTAEKLRRIELTAGAPSIRGKRGGGRVYASAEQRQREQQIAVHAETAYRQFVSQRRS

SEQ ID NO: 225505 - protein, 344 aa, unidentified
MAYYAGLDVSLRTVNLCVIDDQGELVAETKLASDVQEIVAYLDELKLDIESISLEAGTLSQYLSYGLQSAGFEVICMEARQVKGALSAMRNKTDKHDARGIAQILRSGWYSRVHVKSMQSHHIRMLLSSRKAVLSKCVDLENEVRGLFKIFGIKLPPKLGHGAFDAAVRDIIEIDETLSHALLPLLDARLVLYRTFRVLDNRTRKMAHSDPVCVRLMSVPGVGFITALTFKAGVDDPARFKRSRTVGAHFGLTPRRFQSGEMDIEGHISKCGDADVRATLYTAANALLTRSARWSSLKAWGMKLAKTRGHRRAVIAVARKLAVILHRVWIDDTQFRWGNEGVRS

SEQ ID NO: 225506 - protein, 354 aa, unidentified
MSSFIRSKKGVFIMKKNLFFIGLDIAAVDFAASIFKAPDQSIVTKEAIPNNQEGFDLLLLWLKEHHLDKTNSHICMESTGVYSQAIAYYLLFAGFPVSVEPPLKVKRAFDPVGHKTDPVDSKQIAEYAYRFQDELTSWQPKEEILEKIRQLLSVREQFTKQKVALKNASQAYSKQRVQMVLIKKAHQETLAQIKKQITRIDQELTKLIKQDPEIFQKANNLDSIPGYGMLLAAHLLVITENFTKIQKPKRLAAFIGIVPYQHQSGTSVFKRAKIRHFGPGPSRKLLRLAAQSVATHDVTFRHYYLRKLAQGKAKALVLNNIANKLLKVACAMIQNNTRYIKDYRSIHPMYLKSA

SEQ ID NO: 225507 - protein, 388 aa, unidentified
MIYVGIDIAKLNHYAAVLSSDGTVLTEPFKFTNDGDGFKKLSEELSDYAPEPAIIGLESTAHYGDNLVRYLVANDYQVCVLNPIQTSSRRKDRIRKTKTDKVDTIVIAETLMMQRDRRFVSFYDLDLMDLKTLGRFRQKSLKQRTRLKIQLTSYVDLVFPELQYFFKSGLHQKSVYALLKEAPTPKDIASMHMTHLSHLLKTSSHGRFDKEMARQLRALAQKSVGNSDSTVSIQITQTISQIELLDSQIDKVEAEMTEIMQFNESVIMTIPGIGYINGGMILGEIGDVHRFSKPNQLLAYAGLDPSVKQSGNFNASHTRMSKRGSKVLRYALINAAHNVVKNNATFKEYYDKKMAEGRTHYNALGHCAGKLVRVIWKMMTDNVDFNLA

SEQ ID NO: 225508 - protein, 411 aa, unidentified
MEVIVACCAGLDVHQASVVACVNSSGGGGRSHKEVRTFGTMHDDLIALRDWLQGAGVTLVAMESTGVYWKPVYEALEDAFETIVVNAQHIKNVPGRKTDVKDCEWISDLLRHGLIRPGFVPPRPIRALRELNRYRRKVAQGQAGERNRLIKVLETAGIKLAGVASDVFGVSGRAMIRALIEGEDTAEAMAGLARGKLRRKRADLARALDVPLQLHQRFMLRTQLARIEQAEAELERIDAMLSEMIAPYDHYVGLLISIPGIDWINAVTIIAEIGVDMSMFASPAHLASWAGLCPGNNESAGKKRSGKSRKGNAVLKTALVSAVITGSRRRGGGYLAEKYRRLTARRGKLRAAVAVAHKILVSVWHMLRNGTFYQELGAGFLDRLDRERTAKHLVRRLANMGFEVQLQQKAA

SEQ ID NO: 225509 - protein, 320 aa, unidentified
MMAQNDLVVLGIDVAKDKVDVCIRSPLLRRTFASTAEGRRELASWVRRQKVGKAVMEASGGYEREWARALRNAKIEVRIVDPKRVRSFAQSAGRLAKNDAIDAEMIAWFAETFDEARGQACDAAREELAQIVNARQALLEQQTQMQNRCEHAVPIPVRKMHERLLKAIALEVAKLETAIAAMIKAAPHFAEIAAIIESVPGLGKITSASLIAAMPELGQVSNEAISALLGVAPYDDDSGKRQGERQIKGGRRKVRNLFYMACLGAATRHNPVLKTFYRRLIAKGKKAKVALVACMRKLIVILNIMIARREKWDASRYAVG

SEQ ID NO: 225510 - protein, 430 aa, unidentified
MKSNTQNAKIEAITEKTLVLGIDVGSEMHYARAFDYRGIEYSKKPFKFSNTEAGFVTFKEWILELKERHEKDKVVPGMEPTGHYWFNLGKFLQDNEMKPVLVNPHHVKKSKELDDNNPTKNDRKDPKVIAGLVREGRYMIPYLPDGVYADLRTASNIRFQLQAELTRIQNRISRWFNIYFPEYKTVYGKPDAKSGMLILKAAPLPEDILTLGIDGVNQIWRDAKLRAVGKARAKTLIEAAEHSVGSKEGAVSARMEIRMLLEDYESRNIRLQEVMTLIEGLVKQIPMAEKLLEIKGVGIKTVSGFLAEVGDISRFNTPKELQKLAGLALVESSSGKHKGETTISRRGRKRLRYLLFEVGMSLVAKNSEFRELHNYYTTRRLNPLKKMQSLMAIAAKLIRVFYAMLTKGVDYDPKKMVSDIKRPAVYQQAA

SEQ ID NO: 225511 - protein, 320 aa, unidentified
MSKDTYVGIDVSNNWLDVATHPAAEQFRASNDETGISEIITRLSEREVRLVVVEATGGLESPMAAALSLSGLPVAVVNPRQVRDFAKAIGKLAKTDALDAEVLAHFAEAVKPKVRELADEKAQELSALLSRRQQIIQMLTAEKNRLKRAMKPVQRRLKAHIAYLEKELDGVDSELADAIKKSPLWTEKGDLLRSVPGIGPVSSITLLSGLPELGRLSNKQIAALVGVAPLNRDSGSFRGKRKVWGGRKRVRQALYMAALVASRSNPVIRAFYERLVGTGKAKKVALTACMRKLLTILNTMIRNGTHWDEHRYVSQTQSSS

SEQ ID NO: 225512 - protein, 339 aa, unidentified
MKEVTVLGIDLAKNSFQLHGVSDEGEVILKKAVSRSKLSSIIANLQPCLIGMEACSGANYWAREFQKYGHNVKLISPQFVKPYVKSNKNDANDAEAICEAVSRPSMRFVPIKTLEQQDIQSIHRIRSRLVKEKTALMNSIRGLLHEYGVSIPQGVSSLRKKLIELSEAEITSTTLFMCKDLYEELLEKEEKIKRYDHKIDEIFASNEMCKKIESVPGVGKKTATIILSALGDGSEFKNGREFAAYLGLVPRQSSTGGKAKLLGISKRGDKYIRSLLVHGARSVSIYSVNKSDKRSRWIEDLKERKGMNKTAVAIANKNARVIWALVKNNTEYKETIKAA

SEQ ID NO: 225513 - protein, 366 aa, unidentified
MDTIYIGVDFHARQQTICYLKTETGELVTCELKHQDKQVVRAFYAQFRGQVIVGLEASGYSPWFERMLEELGCEVWLGHATEIRRRARWRQKNDRRDAELILELMLHDEFPRLHRPAVQSREVLRMLRYRQKLIKIRTMSKNSLQAIALQAGLAKGSRLFTKDGQQQLGAAEMSPVMHWQREHWLQLMEPLNQQLLETMVWFKEQSKGDVSITRLRTHPGIGLLTSLCLVHTLQPVSRFRNTRKVAAYAGFDPIERSSGERKCFLGISKAGSRLLRYLLVEAAQTAVRKDEDLKRFYQRLAERRGRPKAKVAAARKLLIRAYIMLRDEIDYAEFRHRAVAARLARRGQGPSNVPEVLIGQPASPEQ

SEQ ID NO: 225514 - protein, 340 aa, unidentified
MNITTLGIDIAKSVFHLHGTNKQGKLELKKRLRREQLLTFMKNFPPCLVAMEACGGAHYWARKFQSYGHTVKLIAPQYVKPYVKTNKNDYNDAEAINEAVGRPTMRFVGIKALWQQDIQSLHRARSRLMQLRNTLSSHTRGLLMEYGIVVPRQIGQLRQKLPLILADADNELSTDMRALFAGLYEQLQNADRLISEKNKQILAIHRESELSQRLGEIEGIGPLTATAFISAVGDAKMFKRGRDCSAWLGLVPRQYSTGGKTILGSISKRGDRYLRTNLIHGARSVIAKASNKTDARSRWIQQLKSRVGMNKACVALANKNARILWAVMASGERYRASKQL

SEQ ID NO: 225515 - protein, 345 aa, unidentified
MKIVGCDLHTRYQQVAMLDTETGELIERRLEHESGEARAFYASLSSPVRVGIEATGHTRWFERMLAELGHELWIGDAAEIRASMVRKQKTDARDAAHVLDLLFSERFPRIWRPTLAERDLRQLVWHRQKLVWMRNAVGNQLHALAMGEGVCRKKKLFTKPGRVELEGLKLGPWASHRRQELLAMLDQLDESLHELDQAVAQQAEQKADAVRLMTHPGVGPVTALAFVLTIGPVGRFQRSKQVVSYLGLNPREHSSGGRQRLGAISKQGNPMMRSLLVEAGHTAARLDAELRQDYQRLKLRRGSGVAKVAMARKLAVRMYWMLRSQAGYAQLVRMQGSPWATLVKE

SEQ ID NO: 225516 - protein, 347 aa, unidentified
MKITTIGIDLAKNVFQVHGVNEHGKTALKKQIKRDQMTAFFVNLPPCLIGMEACGGAHYWARKLQGFGHTVKLMAPQFVKPYVKTNKNDAADAEAICEAVARPNMRFVPIKNIEQQAVLSLHRVRQGFVGARTALANQIRGLLAEFGLVVPKGLSHVCGRVPELIEDASNELPGSFRLLIQRLLNHLKELDVQVGELEAQIKTSHRNSEASRKLEKIPGIGPITASALIATVGDAKSFENGRQLAAWMGLVPAQSSSGGKTTLLGISKRGDTYLRTLLIHGARSAVRAFQSKQDQSSNPWLQKLLGRRNINVAAVALANKNARIVWALLALGREYKPGYTATMTAAR

SEQ ID NO: 225517 - protein, 351 aa, unidentified
MLLIGVDYHPSFQQIAFFEEETGECGERQLNHAEGEAEQFYRGLQQRGVSVRVGMEATGYSRWFERLLAELGFEHWIGDPAEIQAKRVKKQKTDRKDAQLLLRLMREGNFPRIWVPSPENRDLRQLLWHRHRLVQMRTRIMNQLQALAMNEGRRWKTKLWSERGRAELERLALAPWASRRRQELLELLDRLHPTIEELTTAAEQEARKRPEVVRLMTHPGVGPLTALAYVLIIGTPARFHCGKQVGTYVGMIPSEDSSGGKQRLGHISKQGNSLLRFLLVEAAQAAARINPEWRRRYTHLAMRRHKSIAKVAMGRKLAVRLYWMWRNGCAYSSSLEFGSYVGQLGTGHGVK

SEQ ID NO: 225518 - protein, 523 aa, unidentified
MVTKSKSRSRRSRRYLTIVKPSGSLHPRVQKVGPEHFGIVAVDCAKARSKWMLADFYGRILVPPTVVEHNKQGFDSMCAEIRRASESHGLGDRLAAIERTGIYHLPVKRAFVSKKFDTRIVHPLTTRQYRLPADPGNQTDDTDLFAIHRATTNGFGLIELPLDEIHGPLRLLARYRRSLVRKNASLRNQIIALLDVLSPGYTGLFKDVFDNQAAVAIARTVKSASEVRALGSEGVAQILKKLDVRYQRRSLKKILDWANGVESTTEYAELYHTILVHLDDERCARLQQIAKLEQEMAGLLVRTAYVVLLSIPGVSIVTAAEFASEMGPISNYANDQAITGRAGIYPSRYQSDKVDRSDGPLVRRANRKLRGVIMMIADNLLACNRYFQTLKVRWVAAGMAEQAMCVRVAKRFCRIAYQMVAGGQVFRHPSCQKRDSILRKLSIFHAEHGSAMAQVMTDLQAATDHIPKSEHATEAKSLCAELQPSNRRQQSGPRRLGEILPVVLAKLGVTAVELSLKGENDRT

SEQ ID NO: 225519 - protein, 343 aa, unidentified
MQTVTTIGFDIAKSVFQVHGVDAAGQVVVRRQLKRRQVIALFQKLRPCLVGIEACASSHYWSRELQALGHRVRLMPPAYVRPYVKRQKNDMADAEAICEAVTRANMRFVPTKTPEQQSGLMLHRTRHLFMRQQTSVINAIGAHLAEFGIVAPVGRRGVEELLRVVADANDKRVPEVVRTCLAALGSQLLSLKQQILDFDRMIMAWHRSNQTSKRLNCIPGVGPLLATALVASVADPKTFRSGRNFSAWIGLVPKQRSSGGREKLGSISKQGDRYLRSLFVTGALAVIRYAKIHGAKHRPWLTALLARRPTKVAAIALANKLARMAWAMMATGARYNYPASLRV

SEQ ID NO: 225520 - protein, 388 aa, unidentified
MFFLGIDTGKNFHVASLIDDKKKVIFKAFSFSNSTEGANSLINKLEPFCDSLDIAMEATGHYWINLFSFLLQKNFSVHLINPIQTDGWRNSTEIRKRKNDTIDSILIADLLRYGDFVESTLSNEDYLSLKNLTRFRSYLISSTGDLKRKTIALLDQVFPEYERCFSDVFGKTSKEILLSFTTPQEFENISSSKLTKALENITLKKFAKKKIEELSEKAKTTIGVKFCLDSFSLQIKMLIEQISFIETQVESIEEEISTIMSKLDSPITTIPGIGPVIGATILGELGDISRFSNASKVVAYAGLDSVVSQSGNYEAKSMSISKRGSSYLRKVLFQAALRAEFCDPVFSDYYQKKIAQGKHHLVATNAVARKLCYTIFVVLTKNEAYKIQ

SEQ ID NO: 225521 - protein, 419 aa, unidentified
MVLRKEIPTIEVIHPVCCGMDVHKMSISACLITVDGDGKEQMEIREFGTFFSDLVELRNWLVGNRCPILAMESTGVYWRPIYNILEGSIEVVLANARHIKNVPGRKTDISDCKWLAGLLRHGLIKASFIPEKIVRQWRDLTTLRKSHVQTVGDYKRRVHKLFETANVKIDSVVSDLFGTTGRNLINLLSSEKTHLTADDIKACAKGSLRSKVKELQASLEGFFEDHHRFQLKGMMGIIEKLELEIQSLDERLTQLMGTQEELLDRLDEIPGINRVAAQAVLSRIGITLEEFSTEANFCSWSGLCPGNNESAGKRKSGRHFVHSHPFKTLIIEIAWAAVKKKGSYYKEKYYRLKARLGPGKAITAIGHRIAKAIYHIIKDGQSFKELGEDYLNNNDKTRKLNNLRKHARRLGFDLVAIEA

SEQ ID NO: 225522 - protein, 411 aa, unidentified
MIKENYMYVGIDLHKETHTAVIIDCYNQKLGEITFPNRPADFPKLVAKVKKCNTAGKEVVYGLENAYGYGRALAVWLIDKGYFVKDVNTAISHRQAKHRGAMYRKSDSDDAKAIALATLNMLDKLPDACPNDAYWSLGQLVHRRDNIMKQRTRLVNQLHEQLCIAYPSYKQFFNDISRPTALYFWENYPSRKYLKGKSVEDLRAELVPVSHNKCSTKTCEKILDAVASDKVKNNNFQDARDMVTLSIVSDLQHYDSQLAEVDKMLEQMYKMLGCTLTTIPGVNVITAVKILAEIGDIKRFGNANKLAQFAGIAPLHLSSSGKGKDVATKQGNRRLQATIYFLAIQMVQVSSKGTPRNPVVRAYYEKRKAEGKTSQQALICISRRLISIIYGMLKNGTEYRMPVVENAGEKK

SEQ ID NO: 225523 - protein, 460 aa, unidentified
MKRARKTRPVPKVSSTAAEVDELTVIHPNAAGIDIAADEVWVSVRADRDPQPVRCFGMCTPDLIAVADWLKACGVETAAMESTGVYWIPLYELLEDRGFKVYLVNARHAKNLPGRKTDEADCQWLRRLHAFGLLNNSFRPAGEMCAVRAYMRHRADLIEHRAAHIQHLQKALRQMNVLLSPTVTDITGATGLAIIRAIVAGERDPVKLARLRNPKCAKPETEFVKALTGNYRDEHVFALKQALALYDAYTQQILECDQELERKFSALKPIHDDELPPLDTRDKRNTHSKNAPAYDGRSLLYQLLGVDLVAVDGLNEVTAQIILSEIGTDMSRWKDDKHFCSWLGLAPHNDISGGKVLRSRTLKTHNRAGQAFRLAAQAVSKTQTALGAYFRRMRTIHGPQKAIVATAHKIARIVFFMLRDHVAFHHTSAEDYTQREREREIARLKKKAAKLGFTLAQASA

SEQ ID NO: 225524 - protein, 356 aa, unidentified
MTSDIKYVGMDVHKESISIAVRNAAGKIVMECVIETKASTILQFFDGLRGDVQVTFEEGTWAAWLYDLLKPHVTKLVVCDPRRNVLLQEGNQTDRVDARKLAELLRNNQLRSVYHGDHGLRTLKELVRSYLTITRDLGRVMTRVKAIYRSWAIPCSGKQVYGLRHRAEWLGKINEAGVRQRAEFYYQQLDALRSLRQGVRRELLAESKKHKAWRRLCEIPSIGPIRAAVLLGILQTPHRFRTKRQLWTYSGLGIEVHSSADHEVANGQLRRKKKPVEIRGLNENCNHDLKNLFKAAAVVASIKRGPFAEFYAALVAKGMRSEMARLTLARKIATIVLIVWKKGVCFDANHLKPQTA

SEQ ID NO: 225525 - protein, 414 aa, unidentified
MIKILNVGIDISLNKACCCLLSQEGKYLGRVFEVENNPSGFDRLRDRILVAIKERGFELTRIGFEASSMYGYHLAEFFKQTTLPTEVKVYMINAKYIHRFKKAFPEREKTDLVDAQFVAEYLRFGKLPVEYEPDSLYLPLKRLVRYRYHLVKSLEREKKLFIANLFLKFPGWVQARPIKTLNKTSFEVLAEFSLDELTTMPLQELSLFVARAGNNRSPNPEAIADEIKKAARESYRIREDLSSSVTFILASIHRSITALSKALKELNKAIEGQSRGLVNPLVSVKGIGPVYATGILASIGDIKRFPCHDKLARYAGLVWKKRQTGKSESEETRIVKECDKYLRYYLVEAANSLRVHNEVYRSFYQKKYLEVNKHRHKRALVLTARKLVRLVFALLSKNQYYSQHKGMPVTPAKK

SEQ ID NO: 225526 - protein, 389 aa, unidentified
MPTVADRPEAQTAIQTNLAAIFISLELSRSIWLITSLSPGGGEKMSKHSVPAGDIAALLARFSELKQKALARTGKSFPIVTIQEAGLDGFWLHRVLQSEGIESHVVDPASIATSRRRRRAKTDRIDGEALLRALLAFKRGEPRVCAMVRVPTPEEEDRRHLCRERKVLISERVKHVNRVNGLLFSQGVSGYEPLRRDRRQRLDELTTGDGRPLPTHLKTQISRELDRLELLLDQIKAAEAERDALLAAQQAATPAPAGRMLLDLKGIGPEFAANLWLEGLFRHFDNRRQLASYAGLAPTPWQSGSVDREQGVSKAGNPRLRTTLIQLAWLWLRHQPQSALAQWFKQRVSRNGGRLKKTTIVALARKLLVALWKYVTAGVVIEGAVMKAA

SEQ ID NO: 225527 - protein, 366 aa, unidentified
MEKSSTAFVGMDVHKESIEVAIADANEARHYGRIGGDAASVDKLTRRLRSAHRKVVFVYEAGPCGFWIHRRLKAQGLECMVVSPSMTPRNAADRVKTDRRDAMKLARLARAGELQPIYVPDALDEAMRDLVRAREDAVCMQRQARQRLQALLLRNEIRYVGRSSWTRAHRRWLSEIKLPNAAQQIAFEEYVLACEECERRVERFEQAILAQLEHWRWRPVVKELQALRGISSLHAVRIVAELGDFRRFETPRKLMGYLGMIPSEDSSGARRRQGSITKAGNSSARRALIEAAQAYAHPARVSWVIARRQVNASKRACDIAWKAQLRLCARFGRLAARRLPRNKVIVAVARELAGFVWAIAREVQPS

SEQ ID NO: 225528 - protein, 368 aa, unidentified
MNYIFIGCDSHDKTLVNKVALNREEAEKKSFAANRSGRQKLIEFLKRRSQMAGGAKVVIAYEASGNGFNLCDELKEAGFECHVLAPTKIERSAKQKRNKNDDRDAERLLDIVRSHYLAGTKLPSVWVPDRQTRDDREPVRGRQDLSQKQTVVKTQLQMLLKRHGMEKPEGIGQSWNKPYRQWLKALSEDPHQGWGMKKVLASLLRQLEFLEKEIEQLNETMEQLADRPRWKPIVQAMKKEKGVGLMTAMKYATDIGDFSRFRRGRQVGAFYGLTPSSNESGENSDRKGHITREGSPTGRQVLCQSAWSRVRHDEHEREVYRRLVLKNPKKKKIALVACMRRLAVRLWHVGFQAQLQVKATPVEKGISF

SEQ ID NO: 225529 - protein, 341 aa, unidentified
MELFVGLDVSIRTTSICVMEASGKLIRESKVESEPDAIGALLHAIGGPYKRVGLEAGPLSQWLYSGLAAAGYPVICVETRHMKAALSAQINKTDRNDARGIAQMMRVGLFKPVHVKTVRSQEIRMLLTARKFVQTKILDAENNLRGLLRNFGLKVGAVTRLQFERRIIELLEQSPHLRLVIDPLLEVRRVLRKQFQHLQKAMERLAESDDTCKLLMTAPGVGPLVALSFRAGVDEPARFGRSRSVPAHFGLTPSRYQSGEIDRDRGISKCGDAGIRWALVEAAGILLRISKRSSPLKAWGLSVARRRGMAKATVAVARRLAIILHRMWVDNTPYRWEAKAA

SEQ ID NO: 225530 - protein, 500 aa, unidentified
MKTKRSKAKIRGDRKGISVPCSEPAKELRILRPDAAGIDCGAQEHYVAVPPDRVSVGQPTVRRFSAFTEGLDAVVDWLKDCRVTTVAMESTGVYWIPLHQKLETAGIEVYLVNARHVRHVPGRKTDVQDSQWLRQLHRFGLLNASFRPEDIICRLRSLHRHRDNLVSSSAAEIQHMQKALQQMNLHLHHVVSDITGLTGLRIIDAILAGQRDPQQLVRLRDTRVYKSTPQEMQAALVGDYRGEHLFVLSQSLQAYRFYQARIEECDREIEPLLEKLAQQIEAASANLMLDALEPSGSKSESNRPEQLPEPKPTSSPKSKRKRKPRANEPKIQLAGLLERICGIDLTQVVGLNVLNVLLIVSEIGVDMSKWRSAKAFCSWLGLCPGNKISGGKLLDSRTRQVVNRVADALRLAAQSAGRTQTCLGIFYRRKQAHLGAPKATTATARKLACLIYHLLKNKQPYQEPDSASYQLRLQKSALSKLQRQAIALGYTLLPTAPVPA

SEQ ID NO: 225531 - protein, 409 aa, unidentified
MDTDTCGEVFVGLDWAADTHAVCVIDACGAVLERFEVAHDRDGLAELMRRLARFAISVRIAIERPSGLIVDALVEAGHQVFPIHPNAVKASRPRYRSHGAKSDASDAYLLADLLRTDGHRWTQLSPQSDSIRALRALVRSRDDLVATRVALGNQLRSTLQAYWPGATCIFFDVTSPIALAFLQRYACNTSALRLSEAALGRFCRSQHYSGRRSPAQLLARLRSAPAGLAGPITNEASTQLVRSMVAVLLPLVEQIAEITRRIERFVESLPDGQIIMSFPRAGRVCAAQILAELGDVRERFPSLEQLAAEAGTVPVTYQSGKTRSVTFRWACNHRLRQAITCMADNSRHANDWARAIYASARARGCDHPHAIRILARAWLRVIWRAWTDRTLYDQTRHLGAQKLALSEGG

SEQ ID NO: 225532 - protein, 355 aa, unidentified
MSQEKYIGMDVHQATISVAVMDVSGKLIMECLLETKAATIVEFIQGLQGTLSLTFEEGTSAAWLHDLLKPHVNRLVVCDPRKAALLKEGNKSDRIDARKLAEMLRTNQLKPVYHGEHGIRTLKELGRSYLTITKDVTRSMNRIKALYRSWAIPCAGTGVYTPRHRTEWLAKIVEPGVRVRAQRLYQQLDLLQPVRLEARRELLVESHKHAAVKLLRQIPSIGPIRAALLVALLQTPHRFRTKRQLWAYSGFAVETHDSGEYRVVRGKLQRNRERITVRGLNDNHNQDVKNLFKSAAISASTRPGPLQDFYVALVGKGIRPTMARLTLARKIAAITLTMWKKGVSFDPKQLYRQAA

SEQ ID NO: 225533 - protein, 328 aa, unidentified
MGQASPASLGIDVAKATFEAALLVDGMMLQRSFAMTVAGFDALHTGMSKQGVERVHVCLEAPGAYGAALALSLHEAGHVVVVSLVNPARIAAYAKSRLTRTKTDQADAALIAHVCYTQHPLAWTPPLAEVRELQARVRRVEMLQEMAQQEVNRLQSGLHSPLVRASMEATLTFLRQEIATMQRLVQEQVEQSADLRHKQHLLCSIPGAGRWTAARGLAESDQVRTSVSARQLAAYAGLTPRERTSGTSVRHQPRLAKTGNSRLRRALYLSAIVAMRHNPAVRALAERLRVRSKRPMVIVGVAMRKLLHLIYGVLMADKPFNATRAMPA

SEQ ID NO: 225534 - protein, 306 aa, unidentified
MHCIGVDVSKQELVTYDGKKERIFPNTRGLDAFTRFINRTAEPMIVFEPTSTYSRRLETLCRMRQIACCQLNPRVVPHLRLVGKGRSKTDSSDAELLYRYGIERGQGEATQLENDALAESIQARLACYRVVQKSRVAYQNVLEALSQDPATSRVLLDEVSGEIRELKRKEKQQVDTAQRLVEDKPDTRRRLKLLLTIPGIGPITALTLLALFRKYGDANRSQIVALAGFDPIQIQSGTSVHGKSRISKRGNREVRRRLYEATLSAARYTPSVRSLYRRLKEAGKPEKVARTAAARKLLVIAAKQEL

SEQ ID NO: 225535 - protein, 409 aa, unidentified
MIYCGIDWAEKTHDVALVDDSGQLLAKRHITDDAAGYKVLLDLLVEYGDSEENPIPIAIETSRGLLVAVLRTGKRQVFAINPMAAARYRDRHSVSRKKSDPGDALVLANILRTDMHAHRPLPADSDLGRAIAVLARAQQDSLWNRQQLSNQLRSLLREYYPAALAAFEPWRNGLCRPEARELLKAAPTPTRATRLTRTQLEAALKRAGRKRGMTAEAERLRDVFRDDYAHQLPLVEDALGKQMLALLVQLEAACTAADDLAEAVEDAFPQHPDAEIILSFPGLGVQLGARVLAEIGDDKTRFADARGLKAYAGASPITRASGKKSSITRRWVKNDRLNHAGYLWAFASITASPGAKTHYRRRRDDHGDWHAAAQRNLFNRMLGQLYHCLQNRKLFDEHTAFPAALAAAA

SEQ ID NO: 225536 - protein, 335 aa, unidentified
MTKVMGPVFVGIDVSACTLVVALERDHQPGRQRREFLNTAVGHEGLIQWLSKSATAVQVCIEATGLYSLDLALALHRAEGIEVMVANPRAIADFAKALLQRSKTDQLDAEVMLEFARRMPFVAWQPPSSPQLDLRALMRRITGLKLVSQQEKNRLHSVSQSAEITPLVRKDIQSHLVQLERHIEKLEHQAETIVQADRELARQFCHLVSVRGIARVSALHLLAELVVLAPDMTARQWVAHAGLDPRHHESGTSVHKPTRISRAGNRYLRSALFMPALVATQHDPNIRAFYQKLVDHGKTKLQAIVAVMRKLLHALHGMLRTDSDFVGEKFFVIPS

SEQ ID NO: 225537 - protein, 367 aa, unidentified
MKKGSTAAARPLSHFSPQKLTIGLDLGDRFSYYCVLDENGELVRQQKIPTTAKGLQAAFGGTPHSRIALETGTHSPWVSRWLSELGHEVIVAHARNVRLIGESRRKDDRLDAQTLARLARIDPQLLCPVKHRSAKAQADLTLVRARAGLVRARTALVNTARGLAKSYGQRLRGCNVRNLNPEKAEGLSPELQAALQPLLAAIESVSEQIRQYNQRIETLAQQSYPQVALLKQVKGVGTLIALTFLLTLEDPYRFRKSRDVGCYLGLQPGRRNSGQSQPQMHISKEGDPYLRTLLVQGAQHILGPFGPDCDLRRWGLKLAGRGGRNGKKRAIVATARKLAVLLHHLWVSGEVYEPLQNGNRAALPTAA

SEQ ID NO: 225538 - protein, 379 aa, unidentified
MDRTTTSADLRDTLYGAMELSKNTWLLAIQFPDRPQPSLYPIAGGNTEDLVAKLIAASDRWAKVSGKRPSITLCYEAGYDAFWLARFLKTRGIECLVVDAASLQVNRRGRRAKTDRIDVEMLLRALIAWCRGERHVWSVVRIPSIDEEDLRRSHRERSRLVQERTAHINRIKGLLFAQGIRGINVRSKYKRLEVSKLVTGEGRPLPPRLAREVVREIERLTLVQQQLVAIERERDEAPTPCTSTEKKRLQLSLLNGIGPTVSAIMAREVYYRQFTNRRQVAGFLGLATSPHDSGAVERSQGISRAGSGPVRVTMIQAAWLWVKHQPKSAITRWFLQRTDGQSGRIKRIAIVAVARKLAIALWRYVEQGLVPQGAILTSR

SEQ ID NO: 225539 - protein, 374 aa, unidentified
MEKDSRFVGLDVHAETITVAVAEAGGEVRPLGTIPNTPDAVRRLITKLGARERLRVCYEAGPTGYVLYRQLTELGVHCAVVAPTLVPVKAGDRVKTDRRDAEKLARSYRSGDLTPVWVPDAAHEALRDLVRAREAAKQDQLRARHRLSKFLLRHGRRVPAGFKAWGAKHGAWLNTVRFDAPAQEATLADYRHEVDHATERIARLERTLTAVVAAAPAPVRAVIAALQALRGIAALGAVTIVTEVGQFSRFAHADALMGYSGAVPSERSSGPKTRRGAITKTGNAHLRRILMEAAHPYRHRPAVGYTLRVRQRGLSEEIKAIAWKAQHRLHARYRHLSDKGKPLPKVITAVGRELLGFVWAIGVHVEREEAARVA

SEQ ID NO: 225540 - protein, 341 aa, unidentified
MQITTIGLDIAKNVFQVHGIDAAEKVIVRKQLRRGQVMAFFEGLTPCLVGMEACATSHHWARELTKLGHEVRLMPAKDVKAYVKRNKNDAADAEAICEAVRRPTMRFVRIKSAEQQGQLMLHRARDLLMRQRTQVINALRAHLAELGVTAAQGREGIKQLLAIIAQDEGSRLPVDAHASLTVLAAQLQAVQTMIGSLEKRIVAQHRSNEASKRLETIPGIGVIGATTIAAVVPDPRVFRSGRDFAAWIGIVPRQDSTGGKQKLGPISKQGDQYLRRILIVGAHSVLRRARQQPEKYPWLTQLLARRPFKVVAVALANKMARIAWALLAKGGTYRAPQLVAV

SEQ ID NO: 225541 - protein, 338 aa, unidentified
MKTKYFIGLDVHKEKTTYVVRDRLGNILLEGEAATLYNELQDRLKPYLKSSVIGVEACTSYYTLYQSFLKNNYDIRVANTMQLRQLITKNDSLDSKRLSEMLRLGTFPCSYIPDEDIQRLRSLVQIRHSLMEEKTRCNIRIQAFLDRNGIVMPSYKAFTKKWRHALMQYMGSGEVSLELRYEYDHFVYLEKKIEQLDQEMTGYTKKHWKVEYLFIQSITGFGPLLTCYIIAHILPIERFSSNRKLRRYAGVIPTFHESGGKSSKGHIPKSSSRKLLRWALVQAANTAGKTDTKLGRYYRMKKKQKKNAGIAKIAVASSMIDIIYEVLTTKQLYNPTVY

SEQ ID NO: 225542 - protein, 322 aa, unidentified
MAMLSFGGIDVSKDRLDVMVLPEEQCSSVPNDAAGWADLVERLSGCSIAAIGIEASGGYERGVVRALLAAGMPVRQVNPFKLRQFARASGVLAKNDPLDARMIASFVTIMPTRPAQRHTPAAERLAEMLAIRRQLSAEKVAAENSARLLEDAMLQRLSRRRIVRLAADIDLLDKRMVEIVATDDALVHRYRLLTSMPGVGAVLACTLIALLPELGRMSRKQVAALVGVAPYAFESGTLKGRRCIWGGRAHIRQVLYMAAMSASNWNPVLKAFHDRLTAAGKLPKVVIVAVMRKMITMLNAMVRDDVVWADRLSGRHVLPTAR

SEQ ID NO: 225543 - protein, 358 aa, unidentified
MLYTGIDLHKQLIVMCTVNDNGEIIARSKIKTEPDAVITYFRQWSEPHRAAVECTSNWYWLSDLLISLGVDIVLAHAKYLKAIAYAKVKTDAVDAHTLAQLLRMGFVPEAHQLPSEYRGLRDLLRQRMVMEHQRTNLMVRMRSMLAKFNIIKLPCVASQPRFADFLANCAIPEDYRLTLLLYHQQCLQVAQHKKHLEHYFKGELRPTPTLQLLVSIPGIGDITGAIIAMETGPISRFANDKHYASYCRLAPGARDSGGKHKHRSGSKDGNQYLKYAFTEAALKAMRFYPQIKEFAQRLEQRSNPSIARTVIAKELSRITFYVLSRKEEFKTFKGIEIHKTRDWPRTCKPVRITGVHSL

SEQ ID NO: 225544 - protein, 316 aa, unidentified
MDDKSKVYGVDVSKATLEIGRYEVQTIQRINNSAASIAAWLAAIPAGSTVAMEATGEYHRVLAHAAHAAGMVVLVLNPKVLKHYARAVGQRGKTDRTDAQLIARYAVHERAKLMPWQPSAPAADALAKLLVRRHALVNARQMLEQSLGPIAVLKTQRQALFASMKRMIMHLDLLVAKELARVPALAALHRRLMSIVGVGPVVSAQLVACLTRLHFHNERAFIAYTGLDPRPDDSGTHRGRRYLSKHGNALLRCLLFNGAMAAMRTKLFKPLYLRLRTRGLASTPAMVIIARKLARIAFALYKSGQMFDPEKYLKSA

SEQ ID NO: 225545 - protein, 443 aa, unidentified
MSELAVLDPRAAFVDVGSEKMHVSIAGGPPALFGTVTSQLHALRDYLAEHQVRSVAMEATGVYWLPLYGVLEAAGMEVVMVDGRQTRNLPGRKTDMKDCQWGATLHAHGLLRAGFVPPANIRRLQDYLRLRGDHIAAAAGHVQHMQKALERMNIKLHEVISSLTGASGLTVIRAILAGERDPQVLLGLCDIRIRNVKAERVVESLRGDWAEEHLFALAQAVQSWDHYQGLIAACDRQIAVVLRQMPDAKVPPPAASTKAGKPRTRPGVNAPDIADLREILAQICGAKDLTTLPAHSEYSVLQLIGEVGTDLTKWRTEKHFTSWLGLAPGSAQSGKRKASVKRRRNRAGQIFCVMARALARSKYVALGGFYRRMAARRGGLVANKALARKLATLFWRVMVKGLDFIETGVAQYETRVLETKHRILHRLARQLGQQIVPNPAAVV

SEQ ID NO: 225546 - protein, 412 aa, unidentified
METIIERCCGLDVHKKTIVVCLMTGQPQEKPKTTIKTFSTMTRDLLACRDWLVSEGCTQVAMESTGVYWKPVFNILEDSMEVILANARHVKNVPGRKTDVKDCQWIAQLLRHGLIEGSFIPPKPIRELRDLTRYRQKLINQRSSEINRLQKFLEDANIKLASVASDITGVSAQEMIQHLIQEDMTSPEMADLAKGRLRNKIELLEQSLEGYLSDHHRLLLRLSLQMIASHDEAIENLNIEIDKRMEPHREISQRLETVPGVKKKTIECLLAEIGTDMSRFPSHAHLASWAGVSPGNNETAGKRKSGRATHGDKWLKATLVEAAWAASKTKGSYLKAKYQRLVSRRGKKRGALAVGHNILIIVYHIIKEQCVYKELGVDFFDRLNEQHLVNRLTKRIMALGYKVDLEKLPMAA

SEQ ID NO: 225547 - protein, 356 aa, unidentified
MNSPHYIGFDVHKKTISFCIKTATGEVVEEGVVAAQRRALQQWASARSQPWRGALEATLFSGWIYDTLRPYGEQLEMAHPAKMKAISAGKKKSDAIDARTIADLVRCNLLPACYVATPRIRELRRLLRYRSLVVSEAVRMKNKMAGLLMETGAIYVKEKLHRKKYFANLLEELEEVPPSVIELLRLSRGALEMFETTQKRLVRELLADPELTQRVERLMTIPAVGEITALTWALEIGDPHRFRSGAEAMSYCGLTAALKSSAGKQQRGPISKQRNRWLQSTLIEAAKLAPRWNPQLAAVHARELERGHRNRATLAVARKLVTYLLAVDKSGHSFQLRGPLIEDRAQQEMPLKIKTS

SEQ ID NO: 225548 - protein, 403 aa, unidentified
MSPEHSIDIFLGLDVGKSEHHACALDRDGNKVFDKPLPQLESELAGVFHQLQKLGTVLVIVDQPNTIGALPIAVARDCGCEVGYLPGLAMRKAADLYPGRAKTDKRDAFIIADTARTMPHTLRAVDRNDEVLSALKMLSGFDDDIARDCTRTVNRLRSVLTQIYPSLERVFAGSTLTRTPILELLIHYKGPQGLKRAGYQRVLNWMIKRTRKDSTPLVDDIFTALKAQTVTVPGSDAAELVIPQLAANIQALKEQRNTIAEQVEEMLADFPLCEVLMSMPGVGIKTAAQILLAIGDGSDFASAGHLAAYAGIAPVTRRSGSSIRGEFPARSGNKRLKNALFYSAFAVIRSHEPSRRYYERKRAEGKRHNAAVICLARRRCNVIYAMLKNKEFFREIPPRPVAA

SEQ ID NO: 225549 - protein, 353 aa, unidentified
MKKYIGCDSHSRYSVFVSVDEHGRVSPAVRVEHGSRELRDYLSTLEPGTPVAVEASGGWYWFLDELEAAGMDARLVNPLEAKRRMGGKNKTDKLDARGLAILLRNGTLPEVWVPPSELRDLRGLMRARLALRSHTTVLKNRLHAAIRRYGTLDGEPPSDLFGQRSRRRLALAIGRLPEETRTAAWHECELLDEVERHIGELEVRIRTRIGCIGWVRLLKTLPGVGEILGATMHLEIGDVRRFPTAAHLASYAGLVPTVHASGGRSYHGPTSPQANHYLRWAFVEAAACVVSHKHRWAGLHVVELYERLKKQKCHGKAAVAVARHLAEASWWILSKKEPYRQPHAAVVSSSKNG

SEQ ID NO: 225550 - protein, 418 aa, unidentified
MKREWNTRVSGTRCIGLDVHKQYITVGGMNAEQEIVLRPRNVEMENFPKWAEQNLRETDEVVLEATTNTWEVYDTIAPLVKRVVVAHPAEVKQIANARVKTDNQDVLRLIRLLIADIVPEVWVPPVEVRQLRAMISYRWRLVKMSTAIQNRMHSLLHRHNLQAPEGKIDTGENREWWERLSLSPLEDLRLKQELKTLRMVRENIVEVDAELGRLSTGQRWGDQAVYVMQIPGVGVIVTMTILSAIGDIGRFESPKKLVGYAGLGAGVHDSGQTHRGKGITKFGRKELRWALVEAAWQGIRANPQWRAEYDTLCKRKHPNQAIVAIARKLLVTLWYLLTNREAYNRSSEEDLAYKMLTWSWRIDQSALNGMTRQQFAKYGLLRLGKGENLTRIVKGGLPRRIALKEEVLALKPDLILKR

SEQ ID NO: 225551 - protein, 412 aa, unidentified
MFKIFRNNCCGLDVHKTWIYACIGITDPNGRTEYKQARFSSFSNGLRELAAWLAKYSCTEVCMESTGKYWIPVFNILEKSCSVTLAHPKYTKPQKGNKTDRKDAKWICDLFMCDMIKPSFIPSPEIRQLRDLVRYRVKLTNMLTGEKNRAQNCLTVSNLKLDDVFSDVFGKSARSITNYILEHPGETFDVSPFVDPRCKTPVSEIQAAIDGAISPEQAVKLRQCLAHIDELEAHRKEIESEILQIAEPFSAVLDLLYTLPGLDKNPMIAIAILSEIGPDMSVFPSSKHLVSWAGCCPRNDQSNQKVKSRRISRAGSYLKPLLVQVANALIKSKKHPEFKERYHRIKSRRGHKKAVIAVCKMLLTAIWNMLSKLEPYNPEGFLEHRPVRQEKTLTVSQALELLRLRGYTITNQ

SEQ ID NO: 225552 - protein, 362 aa, unidentified
MTTEEKQRTLFVGIDVHKDTHTAVGISPFGEKLFETTIGNYQKDFDDLAKEVRAVGERSLLSPFIGLEDCSGYGERIASALYIDGFPVVHVPPILVDRLRKRQTHPEKSDSLDALGVAKVMMHDTDSLPIYSISERTAVAKFLKELSVDREYLTVERSRLRNQLHLLLHRIYNTEYASYFKDPFALKALRYWVRVRPDCDQYLLRSMKRKAKRMLELHTEIKELEKDMQSVLDAEGYTLSTASGCGVVLATTMIGEIGDIARFKSPASLAKYAGCAPREHSSGKTTRYRKTKSGNRRLNCAFHRMALSQISPTGNNTARAYFKKKVSEGKTKSQALVCLRRHMVTVVYMMLKHGTEYRCPQP

SEQ ID NO: 225553 - protein, 347 aa, unidentified
MGKSITDLSSVTTVGLDLAKHVFQVHGVDASGRMIVARALRRKDVLAFFAQLPKCLVGMEACGSAHHWARELIKLGHDARMMPPAYVKPYVRRQKNDAADAAGICEAVTRPSMRFVGVRTLENQAALMHHKVREMLVAQRTQLINALRGHLAEIGVIAAQGLKNARDLARVILAEGDETIPACARAALAPLVRQLHVLDQEIACSDRTIAAMARDDEMARRLMTIPGLGPVTASAMATSVQDVSAFSGPREFAAFLGLTPRQNSSGGKERLGRVSKMGNRYLRKLLVVGAHAVLYHRKPHDDAPRSWAKKLMQTKPFKLVAVALANKMARIAFAIMRGKTTYSAAPA

SEQ ID NO: 225554 - protein, 437 aa, unidentified
MSQRLQVGLDIHQKHNHVCLMTNDGQMVNPHQRFDNNWTGFQEFVEMLVGVLDEGQFEGVDIAGEATGLLWFHPFYHLAQAEELAPFDSHLYLFNPRTIKHFKKVLAQRDKVDPKDAHAVVERLRFGGRLPHEVTFDERYLPLQRLTRYRYHLARDLAREKVYARMVPIYLKASDYTRKPMPFSDVFGATSRHILSEYATIDELASMPLDDLAEELDRVGRHRFKDAADNARRLQRAAAQSYPLTPCLVEPVNAILDSLLAHIRFLEGLLENLNLLIEAALTDVPGAPYLLSVKGLGLVYSAGLLAEIQDPSRFMQGFKRDKQGHLRPKTRHDGQAALARFAGLWWPRSDSGDFHAEDRRLPKTGNHYLRYYFVEGGNSLRRHNAEYTPYYQRKFDESLKHKHWRATVLTARKLVRLVFALLHDEEMYQPPEVRYHS

SEQ ID NO: 225555 - protein, 324 aa, unidentified
MNNSVIGLDIAKNIFHLFTLLDDGKTLKKKLKRHELLAFFANYPASIIGIEACGSSHHWARELTKLGHEVILLNARFVKNYVVGNKTDFNDAEAIHEAVLRPNKRVVAIKTVAQQDIQLVHNIRKDLVDQRTALVNQTRGLLSERGIVINQGIEQLREQLPLIIEDAENSLTDLSRELFAEQYEKIKTLDAEIKAQDQRINRLCNANDLSKRFLDVPGVGPLTATIVAADIGDGGKGYKSSRDYAASLGVVPKQHSSADKQHYLGISKRGNRYIRTLLIHGARAVLKNCGKKTDKLSLWLQALVARRGFNKVAVALANKNANKP

SEQ ID NO: 225556 - protein, 369 aa, unidentified
MKKHNTVKQSPKRATAGEAGPITIGMDLGDKASCYCVLGGDGEVLSEGSVATTKKAMTQKFGGMGRCRIAMEVGTHSPWLSRLLSRLGFEVIVANPRQVRLISASSRKNDRMDAQLLARLARVDPKLLRPIRHRSEEAQADLLKIRVRASLLEARTSLINAARGFTKAQGDRLPACDADAMDVEKMEALPESLQETLRPLLEQVESLTEKIQKLDTTLEQIARTQYPETELLQQVHGVGTLIALTFVLTVEDRRRFDRSREVGCYVGLRPKQGESGESQPQLRISKEGDLYLRQLLVQGAHCILWRGPDTDLKRWGLKLAARGGKNAKKRAVVAVARKLAVLLHRLWVTGEVYEPLRNSQAQQEKGRAA

SEQ ID NO: 225557 - protein, 495 aa, unidentified
MAKKKTSVSERLRSGKLNRKQRKELVRRVYADDPGLEVVHRNVAGIDVGNESHYVAVPPGRDPQPVQEFGCWTADLVRMAEWLKSCGIQTVVMQSTGVYWIGVYDVLEKAGLKVWLTNARETKNLPGRKSDVQESQWLMKLHTYGLLRNSFRPPEQIRAVRTIWRLRDRNVRDAGREVQHMQKAMTTMNVQLANVLSDVVGVSGQAIIRAILGGQRDPQELAKLRDYRVKASAEEVARSLEGNWQEDILFELQQAVDRYDFCQEQIAKCDQRLEKYLEALPSREKAPVKAPVAQAEAAADTQGAGPHPPKTKTKKKKKKHSKPRGNEPQFDLEAELNRICGVNLTTLDGVYVMTALTFISELGTDMSRWRTEDHLVSWLKLAPSRQISGGKVIKQERNRTRNRVANALRMAASGLKESDSYLGARFRQLRARLGPGKAIKAMAAHLARLIYRMLTNGQEWVDRGTQEHEKRRVEREKQALLHKAAALGYRLEPAA

SEQ ID NO: 225558 - protein, 330 aa, unidentified
MQGKVMSEHSASDEVGVGIDVCKEWLDVHILPAGTVLRFSNTKKGHKQLLFALKPLVVRIVVVEATGKYHRGVHRFLHDAGLSIAAVNPLRARLFAESLGALAKTDSVDARMLATFGLMAQLAATPPLPETIENLSEIVRNREAAIAAGTALENQLATAAVAGVKHQIERQIKSAKAAAGALEALAVRTIEADPGLARRFAILLSIPGVGAVTACGLIANMPELGSLNAKQAGLLAGLAPLACDSGKRNGPRRIRGGRQAVRNGVYMAALSAARFNPHLKRFYERLIAAGKVKKLALTAVMRKLIVLANDLIKEDRFWSPEKPTAEPLHA

SEQ ID NO: 225559 - protein, 337 aa, unidentified
MNSSRRTIAIDTAKRVFFLHGENEFGKVILRDKLTRERLLPYLANQPASTIAIEAGSGAHHWCRAFVRLGHEVRMIHAKFVRPFVKSNKNDWNDAAAICEAAQRPTMRFVAPKSLEQQDLLTMHRIRERIVSQRTGLCNQIRGLLAEYGIVLPQSVSRLRRALPDVLEDAENELTVRGRELIASLLEEFRAIDERIKPYDRAIEQASLDSWTCRRLRSIPGIGPVGATAVVATMGDPKAFKNGRDFAAFLGLTPQQHSTGGKSRLGSISRRGDVYVRRMLIQGAHSILKHIAHREGPRADWLSALVARRGRQVAAVALANKSARIAWRGERSIPGAA

SEQ ID NO: 225560 - protein, 419 aa, unidentified
MELIHARCAGLDVHKDSVVACVRSQQDDRIRHEVRTFGTTTGALMDLAGWLQQNGCAHAVLESTGVYWKPVWHVVAGAGLKLVLANAEHVRNVPGRKTDVKDAVWLADLLAHGLVASSFVPPEPIGELRDLTRTRRQLVRQRVRHVQRIQKTLEDANVKLDSVISDILGKSGRSMLEALIAGQTDPIELVKLASTRLQAPREQIVEALRGRVTPHHRLMLRLHLEQVDATDVTIADIDKEVERVLEPFRAQVTLLKTMPGIRDLLASTLLAEIGADMKQFPTAAHLVSWAGLCPQLRESAGKRKNTRVRKGAPWLKPVLVQAAWSAVRRKDSYLRAQFYRLKSRRGPKKAIVAVAASMLKAAFHMLRDGTLYRDLGGDHFDKTAKEKVTKRLVRRLAELGYQVELKPAAAPSPLVGVSF

SEQ ID NO: 225561 - protein, 346 aa, unidentified
MKQITTIGLDLAKQVFQVHGAEADGSPVVSRKLRRADVLAFFKKLSPCLVGMEACGGAHYWAREIAKVGHDVRLIPPSYVRPFVKRGKTDAADAEAICEAVIRKTMRFVAVKSADQQAAAMVLKTRELLVRQRTQAINALRAHLSELGIIAGTGPAKIATLIEIVRDDEDVRLPPAARFALSELANQIEWTKMRIDKLERAIVIEAKRDEDMRRLVTIPGVGVIIAASIKALVPDPHGFKSGRHFAAWLGLTPRSHSSGGKERLGRISKMGNSTLRSLLVIGATSVLKHVRHRADGPKWLVAILARRPFKVVATALANKMARIIWALLTKGGTYRKSGLAIGTASA

SEQ ID NO: 225562 - protein, 462 aa, unidentified
MQKFYLGCDVSKGYSDFVIIDDQMNCVEENFQLDDTATGHAELSERISAFFEKHPSATLYAAVESTGGYEDNWYAFLLRQQGKFNLHAARVNPNGIAHDNKAGMIRNLTDKISARSVAEYQIRHPDKIPYGKRDPNKSLKKMWGRYRSLKKQMGVLLNELESLLYSANPELLPYYRSRMPQWLMLLLLKYPTAKMLARARVTTVASIPFLKKPLASVLVKNAKASTAEDSDDLTAFLVTSTVSQIASLAKQITIFEQRFEKECDWPEVQLLMSINGVGRMTAIVLMLYIEDITRFKSAKKLASFLGVHPELKLSGDGSKKGSYKMSKKGQKAPRAMLYMSVLAGLSKGSRNDVIKRIYDEKRASGMVAKAAIGVCIHKLVRLAYGVLASSKPFDPAIDDKNREKSKPAEKPVPLSKDRRYQGFDTAAPVSRRQNKKRMEQIKSQDSYAVECGIKDHAPRALQ

SEQ ID NO: 225563 - protein, 318 aa, unidentified
MSSIIGIDVAKAKLAIVLLTPDGKAWQKSCANTAAGHADLIRWLTRHAGPPVVVGLEATGGYQEAVALALHDAGHHVSILNPSAVAAYGQSQLRRAKTDRTDAALIADYVRTQQPPRWVPPPPEARQLQALVRRLDALLEMQTQETNRLELAAPIVRPSIEATLAHLHEEIGAIKRQIADHIDLFPTLRNQRDLIVSIPGIGDTTAAIVLGELLDIARFTSARHLAAFTGLVPQIRQSGTSLRGRGTLSKLGAGRLRKALYWPAITAMRHNAPLHRFAARLRAAGKPTMVIVAAVMRKLVHQIYGVLRSGRAFDPTRA

SEQ ID NO: 225564 - protein, 340 aa, unidentified
MIATTKFFIGIDVSKPHFDIALMAVVNHVKQEIITARFDNTAPGIKLLEKWLKSQKTTFNEDSLVVMENTGIYHRLIWTFCSNRNLPIHIGNAAHIKWSFGIARGKNDKVDSIRLCNYAFKEADDLKATPVLNAQLLHLKDFVSARTKLLKQKSSLGVSIKELENVNDKSHQKLIEKAMKNALDGISKSIKNIEDQIKKIISENQDFKRNYKLLISIPGIGHVTAVYLIGCTANFAGQPSGKELACYAGVAPFEHSSGISIKGKTRVHRMANKELKRLLHMCALSLIQHNQEFKAYYNRKKDEGKHSMSIINAVRNKIALRVAAVIKNQASYKNNYKIAA

SEQ ID NO: 225565 - protein, 334 aa, unidentified
MKYKFFVGIDVSKSTFDVAVLCRDNSQQIVHHVFSNDEKGIKEMGQFLKETFSDYNHTNTLFCMESTGMYCNALLNFFKETSTDVWVENAIQIKRSSGITRGKQDKIDACRIALYAYKNADAARLWKPAREVMEQIRNLASLRDRMVQTQKKLQTPINEFEAVGEKKMAALLAKSISKSLKAIDADIKQIELKITTLMKQDESLNHLFKLVSSVVGIGFVTATNLIIHTNEFTIMKDCRKLSCFCGVAPFPNQSGTSIRGKTRVSHMANKKLKTNLHMASLTAVKFDPELKTYYERKVAEGKHKMSVLNAVKCKLLARVVSVVNNQKEYVKKAA

SEQ ID NO: 225566 - protein, 377 aa, unidentified
MSLATTETTTQPVTAVTIGVDTHSQLHHAAVLDQHGVLLGDKQFTTDLPGYQQLLDWAAGYGIINAAGVECTGSYGAGLTRHLLAAGIDVVEVNRGHRLTRSRSGKNDAIDAEAAARKVMSGECSSPAKDTTGAVEAIRNLHLLRDSAVKSRSAALVQLRDVLITAPNGMREQLDAKTLEGKATQARALRPDSTRLDEPNHAVKYTLRELGRRIFNLTAEINATEKHITKLVEAVAPTTAALPQVGPVTVAQLLVTAGQNIDRFPSEAAFARLCGVAPIPVSSGKTHRMRLHRGGNRRANRAIYLVTICRLRYDQRSQAYRDRKRAQGHSSADAIRSLKRFVTRELYYALKRDLTPSATTRILSKAGEVDLAGGNGN

SEQ ID NO: 225567 - protein, 393 aa, unidentified
MIYVGIDVAKDKHDCFIVNSDGEVLYDVFTIQNDMDGFEDLLFKIKTASKDLSKVKVGLEATGHYSCNILGFLKSKGLYTIVINPLYTSLSRKSVSLRKTKTDKVDARTIASMIMSDVSLKPYSDTVYHNEDLKSLSRYRFDKVSDRSKLKQSVSRLVNILFPELEKLVSTLHAKAVYALLSEFPGAHQVASANLKHLTALLSTASKGHFGREKANEIREAARRSISSYLPAKSLELRHTIKLIHELNAEIAEIETEIKKIMDSIDSPTLTVPGISYALGSVIVSEVGDFSRFDNPDKLLAFAGCSPSTYQSGQIYSTHAKMEKRGSKYLRWALLNAAKYVCKWEPTFAVYLRKKLAEGKHYNVAVSHAAKKLVRLLYHLETTGEKYIPQTLS

SEQ ID NO: 225568 - protein, 382 aa, unidentified
MDTSGNWSRIIGLDLSKATFKGCILYGEGFVRRKNFSGEMRRDESGYVLINNTIQAGDIVLMEAGSSSFSLARYLQKNSKASDVVVLNPAHLRIIWDSQKKNDKADAMKIACIARDMRPEAWPRVTVPSEKEQSERSVIMHWIFLRKQETMLCNRFFALFNSLGYPEIDKSRLKKDQDFRVQTINDLLSFSELAFTDAIMLEEQITIVQRQLSFMEDRLRSICLDHPRQALAWLSIPGIGLINAATLIAYIGDGSRFSKPDQLMNYAGMVPKQNQSGTVDIKGKITKRGCTAIRRSIVQGAQVLIQLPPTCDITKFAYRKKKECPFNGKVAVAVANRMLRTGLALLHHNDLYRPMIEDGFDKLERKLTGNKLQALVPYLTSN

SEQ ID NO: 225569 - protein, 348 aa, unidentified
MKKPPQHLIAEVPRRQAKVEITIGIDLGDVWSHYCTLNQDGLVVDRGRFRTTPKAIEKWFTDVPPARVAMEAGTHSIWISAQLQELGHEVIVANVRELRAISHSDRKSDQVDAEKLARYARLDPNILRPIAHRTVEQQQALTLVRARALLVRLRTAAVNAVRGLTKSCGYRMPASATTCFAQRSLAVMPPGLAQALCPVLQQIAEMTIKIKQYDRQIQQLGQTDYPETQALLKVHGVGHLTALTFVLTLGSKERFGRSRDVGCYLGLRPRRSQSGDHDPQLGITHAGNAYLRSLLIECSNHILRPHGRDSALRQWGLHLAARGGKQAVLLHHLWSTQEPYMPFYEQAA

SEQ ID NO: 225570 - protein, 336 aa, unidentified
MSHYCGIDLHSNNHVVVVIDEKDKRVFDKRLDNDLSMTLEVLSPYRETLQGIAVESTFNWYWLVDGLQDNGFGVQLVNTAAVKQYDGLKYSEDHREAFHLAHLMRLGILPTGYIYPKEQRAIRDLLRRRMSLVRSASTRLISVQSQIWRSTGIRIKSGDLRKSEFAPPPMDQYTLLAVDAGLSVYQSIQQQINVLEQSAYQAVKLTDAFKILQTVTGIGKILGLTIMLEIGDIRRFAGAGNFASYCRTVDATRTSNGKKKGTGNAKAGNKYLSWAYSEAAHFAVRFEPLAQRFYERKKAKTNGIIAIRAVARKLARATWMMLRHQVPYDAKLMFPN

SEQ ID NO: 225571 - protein, 442 aa, unidentified
MAHANQLSRGDLRRNARLERLRGVVSRDRAVLAVDLADDTQVVVVCDHDSRVLARRTWRCRPWQLDRALGWGLAVACRQGFAGVVVACEPTGHRWRVVVEHADRLGLEAVCVQPLLVRRAREAEDFTHDKSDDKDALLIARLTTQLHCYLPERPTAAWARLRHLGNRRVEQLTLATAAQQRLRDLLECGWPAALEVTRHPLDSLTWRAAMTVGRCDPARIRRLGLARFARAVARELPRWGGRRRHLGILRALYAATGDARGVTAQRAGALERAALVLADFKQALAALAEVEGRMAKVLEELGLAELVTSIRGVSVVGAAAILAETGDPARFDDAKAVVKHAGLCPRDNASGAFAGKTTISGRGRPLLRLAAWRAVWGALPHNPVFAARYAHLTSRQRNRLSDGQARTAVAAALLRQLWVVCVNRIPWELAVAGGTPARLLRR

SEQ ID NO: 225572 - protein, 324 aa, unidentified
MQGKDTPEAKAEVQVYVGLDVSKAAIDVYLHPLGHVFRIANTNQGLRQLKSRLAGLRVVLVTIEATGKFHRQAHRTLHAAGYPVAVVNPLRSRLFAEAIGKLAKTDPIDARTLAIMGESLKLAANPPPAALIAELQELVLARRAAVTEKTALENRLGAAQSRFLIAGIKKLLKAVERHVAHLDTEIDRLIAGDPALARRQEILTSIPGIGRVVASTLVACLAELGMLSSKAIAMLAGLAPVACDSGESKGRRRIRGGREHVRSPLYLAAVSAVRCNPDLKAFYRRLRDEKAKPAKQALTAVARKLVTLANTLVHDDRLWVEKPA

SEQ ID NO: 225573 - protein, 350 aa, unidentified
MIIIGVDFHPEFQQIASVDTDTGEFQEKRLTHREEAETFYRALACAGQKVRVGMEASGHARWFERLLAELQIELLIGDAAEIRTKRVRKQKTDRQDAQLILNLLLEDRFPQIWVPSWENRDLRQLLWHRHRMVQARTRIMNQLQAVALNEGLRCKKKLWRERGREQLESFRLAPWASRRRRDLLELLDRLNPTIAELSQAIQQEVEKCPEARRLMTHPGVGPLTALAFVLIIGEADRFHCGKQVASYLGLVPLEDSSGNRRRLGHITKQGSSMLRFLLVEAAQVTTRSLPQWRSKYFHLMMRRGRKIAKVAMARRLAVRLYWMLRKQWDYQQVLKFGSHAGQLGNRHGVQ

SEQ ID NO: 225574 - protein, 351 aa, unidentified
MNYYTSETEFNCGIDLHAREMYVCVMDRAGHKVVHTNIRGNDFGHFLKKVSPYRHSMTVVSECTFNWYWLADACFESKLPFVLAHALYLKHIHGGKNKNDRIDSEKLAHLLRANLIPQAYVYPAGNRPVRALLRQRMSFVWQRGALMAHISTNQTAEGLKPAKRTGCDRDEWMEQVLTQYDHPLHRLSASCEIDLVRAYDVQILKLEEEILKQVKCHAGNYYTLLNTVPGIGRILAMTIIYEMDTVERFPSVGEFLSYSRLVKGSVASAGKFKGLTGGKMGNAYLRWAFGEAAVLGKHHHPLLAPYADRLIAKHGKFKGNAILASKLARCVYFMLQKGTAFDAEKLVATSL

SEQ ID NO: 225575 - protein, 383 aa, unidentified
MRVVCGLDVHKDSIYLCILHSTGEIFENVFGVLTSLLEEMRDLMLTHHVQEVGMESTSIYWIPVWRILEPHFKLKLINPYFIKQLPEHKSDVKDAQWIAECMIKDLVRGSFVPPERIQQLRLYDRRIYDLDDEIIRKLAKLDAPVQRCNIRLSNYVSNTDSVSYKSVIDKICDGVTDPKILVQEIHGRIINRHGKETIMASLKGCVTEADIDIMAQLKAEIDLAEAHKQKCMDKMQEICEKEYAPQLANLQTIRGIKIRTATSLIAEIGTDMDHFETANHLASWAGLKPRNDQSNKTIKSRRITHGNRYLRRTIIQCTWGASRAKDCFFSRFSYHQTQIRKKNKMKVQVAIARKMLVCVWHILSKNVVYKDFNNKILTSETNG

SEQ ID NO: 225576 - protein, 333 aa, unidentified
MQFESVIGIDVSKLTLDIALVTQDAEVENFKIENKPLSIKKFFQKLSKKTALDTALICAEHTGHYCYPLRKVCLEMGFSLWLESGAEIKQRSGVTRYKNDKVDSIRIADYAKRHQDKAKIQKTEDYTIESVRALSTERDLFIKERTKYKTQLKDLKGFMDEELYKARSKRLKKQEQALTKLIKEIDKQIKSLLESSEKLANQRAILTSIDGIGDQVALQTIVATSGFSKFESGRKFACHVGVAPFAFESGTSQRSRRKVSFRANMDLKKLFHMAALSAIKMKGEFKDYFDRKVAEGKNKMTVINAVRAKLINTIFALIRDNRKYEKNYIMSLV

SEQ ID NO: 225577 - protein, 403 aa, unidentified
MLFVGDDWAEDHHDVYLMDDGGARVAARRLPEGVASIAALHELIAAHAEEPGDVVVGIETDRGLWVNALSAAGYQVFAINPMAVARYRDRHRVSGAKSDAADAKLLADLVRTDRHNHRPLDGDSPEAEAVKVLARAHQSLIWARARHIRMLRSALREYYPAALQAFDDLGGRDALAVLGRAPTPAQGARLSVSKISAALKAAGRQRSIESRAQQIQAILRAEQLSAPEAVAAAFGATTRATVNIVIELNEQISDLETTLANHFEKHPDADIYRSLPGLGVILGARVLGEFGDDPNRYTNAKSRKNYAGTSPLTIASGKKKAILARHVRNPRLYDAVDRWAFATLLNSPGARAYYDQHRAAGDTHHQALRALGNRLVGILHGCLRHQTHYNEHTAWAHRIPTAA

SEQ ID NO: 225578 - protein, 343 aa, unidentified
MQKITTIGLDIAKSVFQLHGVDAAEEVVIRRQLKRRFTLSFFEKLPPCLVGIEACASSHHWSRELQALGHTVRLMPPAYVKPYVKRQKNDTTDAEAICEAVTRPNMRFVPTKTSEQQSCLMLHRARHLFVRQQTAVINSIRAYLAEFGIVAPVGRKGVEQLLEVVTDTADHRLPEVARMCLTALGSQLRSLKAQILEFDRRIIAWHRSNVTSKQLDAIPGVGPALATALVASIADPKVFRSGRDFSAWVGLVPKQNSSGGKNKLGSISKQGDRYLRSLFTAGALAVIRYAKIHGSGHRPWLTGLLTRRPTKVAAVALANKIARMAWAMMARGERYREPVALAA

SEQ ID NO: 225579 - protein, 441 aa, unidentified
MEQSTRFVGMDVHKETIVVAVTATGEVGKATAYGTFPNTGAGLEKLVKRLRQAGSGPIKFCYEAGPCGYGVHRTLTKTGEDCMVVAPSMIPRKSGERQKNDERDAASLAVLHRGGLLTAVWVPDAAHEAMRDLIRARLAAVRAARQQLSAFLLRHERVYPGNRTCWTKTHRGWLADQAFAQPAQQIVLEESVEAVRLSEQRRHRVDGHLRAQIPTWSLFPLVQNLCALRGLDMIAAAGLAAAIGDPSRFATAPHFMAYLGMVPSEHTSGPKRRIGAITKAGEVHARTLLIEAAHSYRYPARIGRHKLTAVDAVPEAVRAIAWKAQTRLCQRYRQMTAKGKPKQVVVTAIARELAGFVWSIACITSDPVVSGNVVTEAYDAGTILWNEVTIASEEVARQIQQITPDTGRPRAPRHQSLKGTARRASKTGQTRAGSVDRSRTG

SEQ ID NO: 225580 - protein, 434 aa, unidentified
MKIPQSTIRLLTGRLVKILLNREVSTMKSNTQNAKIEAITEKTLVLGIDVGSETHYARAFDYRGIEFSKKPFKFSNNEAGFEMFKAWILDIKEKHEKDKVVPGMEPTGHYWFNLGKFLQDNEMKPVLVNPHHVKKSKELDDNNPTKNDRKDPKVIAGLVKEGRYMIPYLPEGVYADLRTASNIRFQLQAELTRIQNRISRWFNIYFPEYKTVYGKPDAKSGILILKAAPLPEDILTLGINGVNQIWRDAKLRAVGKARAKTLIEAAKHSVGSKEGAVAARMEIRMLLEDYESRNTRLQEVMILIEELVRKIPMAEKLLEIKGVGIRTVSGFLAEVGDISRFNNPKELQKLAGLALVENSSGKHKGETTISRRGRKRLRYLLFEVAMSLVAKNPEFRELHNYYTTRRLNPLKKIAVTYGDCSQADTSLLCHADKR

SEQ ID NO: 225581 - protein, 364 aa, unidentified
MRGSRYREPLTRRTAPVSPQATTVGELWDRCRSHARPNSRQTSIARTRQVTVAKIICGVDVSSFSLEACIGPAGPTQAFSNTAKGIVELLAFCRQHGVELVAMEASGGYEKQPFALLWAHGLPVALLNPRAVRRFAEGMGLLEKTDRIDARVIAWFAAVKSSRPCAPVCAEQQRLKALVTRLRQLTELQVAQRNQRLLVSEATVLTSFTEVLALVASQMRTLEVAIAALIAADPLWQKLDQAFRSIKGVADRTVARLMAEMPEIGTASNKAVSKLAGLAPLARDSGKHQGKRVVRGGRRDVRAILFVVAGVVRRYDPDFAAFHQRLSAAGKPRKVIRIALAHKLLVRLNAKARQVRHEFAALTA

SEQ ID NO: 225582 - protein, 421 aa, unidentified
MSYRIAAIDIHKKVLMVVVVTAAEEVADATGEALEFACRRFGTGSSERSQLVAWLQQRGVVEVVMESTAQYWKPVWLDLEPHFAKLHLAQAHSNRAPKGRKNDFGDAKRLGRRLLAGELLLSFVPDAEQRNWRTLTRSKQQLVRDRVQLHNQLEALLEEMRIKLSSVISDLLGVSGRRILTALAEGEADPVKLAQLGDERLKCTQTELTDALRGAPMPVHLAVLRLFLKRLTLLDEQIRELDKLVAEELKKHEEAVLRVTEIPGFGVDSAQQIIAEVGVDAETFPSAAEFSSWVGVCPGSNVSAEQNHSSRSPKGNRFVRRILTQAAQAAVRKKGCHFQSVLRRFLPKLGYNGAIWAIAHRLAGVLWKILHNGVRYIEQGNETNPRAKKRRAQKLAQALRRLGYAVTLTPISPDAPVADQG

SEQ ID NO: 225583 - protein, 370 aa, unidentified
MLIVGCDYHPSVQQIAWLDTESGECGERRLLHSNGEAETFYRKLREQGVSVRVGIEATGHARWFERLLAELEYELWVGDPAQIKAKRVRKQKYDQEDARLLLKLMMEDRFPRVWVPGVENRDLRQLLWHRHRLVQMRTRVMNQLQAVALNEGVRRKKALWSDAGRSQLESFRLGPWATRRRQDLLQLLDQLNSSIAPLTASVEQQAGQHLEAQRLMTHPGVGALTALAYVLIIGSPQRFRCGKQIGSYLGLIPCEDSSAGRQRLGHISKQGNSLLRFLLVEAAQAAVRSNADWRREFLHLSMRRQRQIAKVAMARKLGVRLYWMWRKGWDYETFLQFGSHVGQPEVGYGVKSITATLIGTPRSLPQGSSK

SEQ ID NO: 225584 - protein, 315 aa, unidentified
MNKRGLHYVGFDVHKKTIRICVQNRMGDVVQEKTVASLPSDLLSWVKKEAPKKWIGALEATVFSPWVYDSLKPFAHELHMGHPKDLKRIGKHKSDRLDAITLCNLIRADYFPSCYVSPPEIRRLRNILRYRTTLVREMVRFKNKTACLLMASGVSYNKKRLHGKRYFSRLIEREELPGEVKELLTLKRLPIEFFHFQAKRVLRKLEKHPMLVKRLELLKSIPGVGPIMGLTWILEIWDPWRFPSEKQAHSYCGLCGSRKESGGKEKTCRSPRIETRIFNGFLSSHPRSREKYVLDFKKFMIRWKKPKTQTQPQLQ

SEQ ID NO: 225585 - protein, 361 aa, unidentified
MVRQRRFAGLDVHARSVTGHALDEDTGEVWQQRLPAEPAEVCRWLESLPQPVKVSYEAGPTGFGLARFLNGRGIACVVAAPSKLQRPAGNRIKTDARDAELLCRLLRLDEIVEVALPDVEQEAARDLVRAREDIRGDLMRARHRVSKLLLRHGIVYGGGKAWTGEHERWLRRQRFDAPARQLAFEDALEAVLLTTQRRSRLDAAIEAMAADSSYTALVRRLGCLRGISTLTGFGLAVEIGDWHRFTGSSIGAFLGLVPTEDSSGESRSQGSITKAGNTHARRLLVEAAWHHRKSYRNPGRTMQKRWQLAPAAARIRGHEGNRRLNMRWQTFQGRRKKNTITAVAIARELAGWAWSLAVMDD

SEQ ID NO: 225586 - protein, 320 aa, unidentified
MTIAQRAPMPWVGIDIAKDDVVVAVRPGGDQWTVPQTPAGHRQLARLLVAGSPERVVLEATGGYERALVRVLHAAGVPVAVVNPRQVRQFARATGRLAKTDQLDAAVLAQFAEVIQPDVRPPVDAATEEFEALLDRRRQIQEALTAERNRLPLAPPLIQRRIRAHVRWLEKELAELNRELENRLTHDPRWRDRAAVLQAVPAIGPVCAATLLARLPELGQLSHRQIAALVGVAPYNHDSGALRGKRRIAGGRGEIRRVLYMAALQGARVNPVLRPFYQRLLAAGKPKKVALVACINKLLRLLNAMVAHGRPWSPALPATP

SEQ ID NO: 225587 - protein, 333 aa, unidentified
MNTIGIDVGCKELVVVVMVNGKARKAKSFDNTSLGHQSIIQSLIKLKGETRVCIEATGVYHFDLAVALSRANDIEVMVINPKAAHNFAKALMTRSKTDAIDAENLAIYAERMPFEAWKRPADECIGLRATARRIAALSKQKTQTKNQLHALESTLETPALVIEQTEQLIDILDAQIKTLRDSALTIIHQNEGLVQAYTLITGIKGIAQASAIQILSELMILPEDMTARQWVAHAGLDPRIFDSGSSVSKKPRISKVGNKYIRQALYMPALVASRFEPNIKGYYHHLIDDNGLKKVQAVCAVMRKLLHAIHGMLRTNKEFDGTRFYTMPVMTDS

SEQ ID NO: 225588 - protein, 463 aa, unidentified
MQRRKKAKAARSEMAMVHPNAAAIDIGATMHMAAVGADRTSEPVRSFGTFTGDLHRLVDWFAECGVKTVVMESTSVYWIPIFDLLDERGFEVFLVNARDSKHVPGRKTDVSDAQWLQRLHSYGLLRASFRPKGEIAELRAYLRQRERLLDTAASQIQHMQKALTEMNLQLHHVVSDITGATGMRILRAIIGGERNPSVLASMRDKRCHSSVETIEKAMTGHYRPEHLFVLEQAVALYDVYQQKVAACDIRIEAVVKALSSVRCRQQAATTDRPASPKRHRHRTANEPAFDVGGSLHTLLGKDLTRIDGLGPYLVLKLVSECGDDLSAWPTAKHFTSWLSLAPNNKISGGKVLSSRTKRSGSRAASLLRLAAGSVGRTETALGAFYRRLSSRVGKAKATTATARKIAVLFYNAMRHGMEYVDPGASYYETRYRERVVKNLHRRAKALGYIMLAAEAPTAAPAVS

SEQ ID NO: 225589 - protein, 344 aa, unidentified
MLHAGLDLSRRRLDVCLMDERGEVITHTAAAPDAGGLRHLAARLWGQPVRAVIESMTGARFVHDTLEELGWEVLVADAQKVKGLAPLACKTDKIDARVLAELSWRDLVPAIWLPDPSIRRERELARYRLHLVRHRTTLKNRIHATLMTFGHPCPVSDLFGHAGRELLDKLAIPDPWRRNVDAGLELIDDLELQIAKLTFDIKRQGADHRYIPLLVTAPGFGWINAFTVASEIGDIERFSSPAKLCGYTGLCPRVYQSGSTDRRGPISKQGSRYLRWALFEAALHACSHPVYAERYQATKKRLGRQRGPKVAQIDLSRRLTEAIWHMLTRNQPFAPAGARFRLAA

SEQ ID NO: 225590 - protein, 372 aa, unidentified
MYESYSQYIQSGEKMKKGYHLPKPDKMKVSLKQTVGIDVAQNELVVSLGRMDEQMSIEIYDYKVFPNNKKGFSSLVSWVNKQTSTTTDVRYIMEATGVYHESLAYYLCSIKKQVSIVLPNKISNYVRTLDIKTITDKSASQAISRFGLERQLEVWQPPLKIFNDLKQLCREREQLVHERTMLKNQLHAERTSATSSESSVKRTKRRIAFIDLQEKEIREEIAVLIKTDKALVEKMKIVSSIPGIGSLTAVTIIAETNGFELIKNKRQLVSYAGLDVREKTSGTSVKSKPRISKRGNRNLRKVMHFPALAAIRTDERFRNIFLRIVSKHGIKMKAIVAIQRKLLELTYILWKNNAYYDPCFDYCLGPSVAITV

SEQ ID NO: 225591 - protein, 324 aa, unidentified
MKKDTPYFGIDISKDFFDVMSQKGVHYQFKNTPKGFSDFLKILTKKSHCVMEATGYYHYQLAYFLVGNNILVSVENPLSVKRFIQMKLSKIKTDKRDAKMICEYAQCVALKLWKGESEAQQECLQIIRMLSVYGKQRTALKNKIHGEDTLGNTRTLVVKSIKRSLKSIKKETDLLEKQLLEIVKKSHQDLLTRLESIPGLGRKTSLMLIVLTDGFDRFETASALCCYSGLTPTIRQSGSSIKGRPRISKMGNPKLRNLLFMCSFTACKYNKNCKALYDRIVAKEKSKKLALIAVCNKLLKQAFAVAKSGLPYDENYRSTLAKNN

SEQ ID NO: 225592 - protein, 338 aa, unidentified
MELYAGIDLHSNNSVVVVLDELDRIVFSKRLPNDLSAINGALKVCPGRLHGVAVESTFTWYWLVDGLQDAGHTVHLVNTAAVKQYDGLKHSGDFEDARHLAHLLRLGILPTGYIYPRHERALRDLLRKRSQLVRQRSTQILGIENLMARNLGAHPGVNAIKRWPAGYIDTLPLLPEQKLALSANLQVMQCIDAQVDGLERVILATARLRADYQALKTVSGIGQVLALTIALETGDINRFAGAGNFASYARTVDSRRESNGKKKGSGNTKCGNKHLAWAFIEAAHFAIRYEAIIRTYYQRKQARTHPLVALKAVAHKLARACYHMLRAQVPSDLSRAFG

SEQ ID NO: 225593 - protein, 394 aa, unidentified
MIYAGVDIAKTDHVIGAVDERGAEMCRPMPFKNTEAGLERAVAWLEGLAGSPSDVVVGMEATGHYWMACYSFLVARGYSVAVINPMQVKAVRKLKGLDKVKNDRVDAWLIAEALRIGQYDETRLATDEVASLRSLSRYLQSLRGMVAELKTQCVCLMDAHFPEYAGIFSDMFGAGSRAVLSKSPLPFELARRRADSLARDVAEASRRGGKSAGYAARIKAAARSSIGVRLGQEAASFQVKSLIRQIEFADSECAKVEARVRALLDEVEPLVLTIPGVSYATGAQIVSEIGDVSRFRNASALVSYAGLNSSVSQSGQFDSGGGPITKHGSPYLRRALWLAANRARQYDPGLRAFYDKKRAEGKPHRVAVTAVARKLCHIVFAVMRDQVPYDPGRE

SEQ ID NO: 225594 - protein, 325 aa, unidentified
MRYIGVDLHTTQITVCYLTEKEDFSIKKYQLCEIEKFVSDLRKTDEIAVEATGNTRWFVEQVKRVVKRVVLVNPREFDVVKNSVKKTDRHDARNLARFLRADLLPEVRGKSEEAEKVQSLVQTRIKLVRLKTSLINKIHGLSVSNGRKIKKTSLSSEKGLEKVLQAEWSAIERIELEIIIEQIRFLKVSIKKLDKAIATESEKLKGFNNLLSISGIGSLSAGILLSVIGNIQDFGTADKLASYFGIVPRVSNSNETVNHGRITKRGNKTGRTTLVQCSLSAIKQNDYLKKYYEQVKTRRRHGKAKIALARKYLGIIYNTLTKPES

SEQ ID NO: 225595 - protein, 313 aa, unidentified
MNIENNTVHNFVGIDISKKVFDVCFLSQNGQMEQRQLEQSPKGYQTLIELIGQDAICVMEATSTYHLPLALWLHDQGVQVVIENPLKIKRFSQMHLQRCKSDKADARMIREYATTIVSKKINLWRPQADEIQQLKQCDTLSQSLNKELTAITNTHEALGQLSVVNTAVKQIIQRTIKHLKTALSELDKQMQQLIKKHYNDTYQLLLSIPGVGPKTSVMLICQTDNFKNFDDVKKFLSYIGMSPRTFESGSSIKGKGHITKVGNGRLRSLLYMCSWTAKTCNLQCASIYEKMLQKGKPEKVIKIAIAHKLLTQI

SEQ ID NO: 225596 - protein, 376 aa, unidentified
MQITCGLDVHKDSVFCCILCENGEKKEKKFGVLSPELDELRSFIIENGVVETAMESTSIYWIPVWNALDGACKLLLVNPYFIKQLPGRKSDVRDAAWIAECVMKNLIRGSFVPEATIQKMRQYNRRSFDLTHEITHKLTKLDSILQKCNIRLSNYVSTLDSKSYRDVVRMLSEGETNPKKLIDCVHTRTINRHGRKVLIAALTGIVTDVDIDMIRQLKEELEIALKHKEECQEKLSAICMEHFSDDFERLQTIPGVKRLSAASILAEIGADMRQFPTPGALVAWCGLAPRNEESAGKIKRRNITHGNRYARKTMIECAWGASRKQDCFFYRFNHNQVMVRHKNTMKVRVAVARKMLCVMWHLLAEKTVYIDYSMQS

SEQ ID NO: 225597 - protein, 415 aa, unidentified
MKVVFPTCCGVDVHKRFLVATIITSPTDSLQPHYQKKRFSTFNSDLNRFADWLHENACLDVCMESTGKYWVPVFNILEKCGIRVVIANPKWVKAVKGNKDDTKDSKWIGDLFRFGLVKSSFIPDKNIRILREFTRYRYKLISMKSSEKNRFQNALTVCNVALDSVVSDMFGKSATAITDYLTSNEPFDAEHCVSLLQRSLKKKAGAVLESIEGYSITDEQKMRISIIREHLNHIVGLIDKVDDCINTLISEYEGQINLLCTIPGVRRDTAITIISEIGIDMSQFGSSKRLCCWAGLTPGNNESAGKKKSVRISRAGVYLKPALVEVAHAAVKDKSHPYYALKYERIAKRRGKKRAIIAIARMILTAIYEMLSTGEVWNPVDLYKVDMPEYLKEKQLEMAVKQAIRFLEEQGLKVS

SEQ ID NO: 225598 - protein, 354 aa, unidentified
MKRTTKYVALDVHQAMTAASVREEGGRIIARSILPTEEPALLEFFQGMRGAIHVTFEEGTQAQWLHDLLVDRVDRVLVCDRRGKARQGNKGDQADADQLSELLRRGALRAVYHGSPHRSTLRELTRTYQNVVEDATRVMQRLKALFRARGIKTPGKRVYHPKNREEWLAKLTGEGVRFRAQALYAQLDVLRELRPKVKGTMVAEARRDPAWSVLRSIPFLGPVRVALILAIMRTPWRFRTKRNLWAYCGLAVVTHSSSDFAMVDGQAVRRRRAPMTRGLNRNHNRELKDVFKGAATAATARLGPLQDLYHGMLARGMREELARVTLTRKLAAITLRLWKRGEVYDPTQLTQQAF

SEQ ID NO: 225599 - protein, 350 aa, unidentified
MNLHAIGIDLGKTVFHLVGLSRAGEVAVRKKFSRTQLLRFTSNVQVDLIGMEACVGSHFLGRALREQGHQVRLMPAQYVKPFVKTNKNDFIDAEAIAEAVIRPTMRFVPIKTDEQLDMQSLHRVRERWITRRTAVVNQIRCLLLERGVTVRTGRCHLDAALPNILADGLIPLSGAMRFLLTDLKQELEQLAAHIEQTEILIQRAAQQSEACQRLDAIPGIGPLTATAIIAAVGNGAAFGKGREFAAWLGLVPREHSTGGKQKLLGISKRGNCYLRKLFVQGARAVLKYRDKQSSGLRNWLAELSSRSHHNVVGVALANKLARIAWAVLARGEVYRPPVLTDLTGLQMTPV

SEQ ID NO: 225600 - protein, 403 aa, unidentified
MSTFFAGLDWASRTHAVCILDERGAVCEQFDIAHDAAGLAQLQRRLIHYGNPPVAIERPSGIVVDTLVEAGFTVVPIHPNAVKATRPRYRSHGAKSDATDAYLLADLLRTDGHRFKPLAPQSDEIRALRALVRGRDDLVATRVQLANQLRSLLESFWPGAAEVFAEIDSPIALAFIERYPTPDSASRLGPKRMAAFCAQHAYCGRRAPEELLERLRCAPAAVCEELEMDAKGELARCLARTLARLVEQIRLLSSRIEHHVASLDDGRILMSFPRAGRICAAQILAELGNVRERFDSDQHLAAEAGVVPVTYASGKSKAVAFRWACNHRLRAALSCLADNSRHASPWAAHIYAKARARGCDHPHAIRILARAWLRVIWRAWTDRKLYDPTEHRTAKALLQTAAG

SEQ ID NO: 225601 - protein, 345 aa, unidentified
MIYIGMDVSSKSFTIHAIDERKKVIFKGAIKPTRVGLKGMIGGLGRQTKLVVFEAGNQLKWIALTLKKMKGVHIHVVHPNEIKWINQSSGKTDKIDARKLAHLARGDMLPRRVHIVEGRARELRELISARNTIQSKRIALINSIRGCLKQEGYKLAKGFFKNEKWRDQLGKMRIGSTQKVILEKFRESIEGMAKAESELTVRILEVEHKDIDLLETIPSIGGLTSRVLVSAIDDAKRFDSKKSVSKYGGLTPRIYQSGGVTHLGRINRDGRMEVRKVLLQCAHTITRMKSYEAWPLREFFNRIKRRRGKKIAVVALARKLLTIAYGVLKTKRVYDPEMLFAQMGH

SEQ ID NO: 225602 - protein, 370 aa, unidentified
MAQPTPLFVGLDVHKDSIAVAHAQGQSADPPVFVGAIGPKQSDLDKLIRRLQGKTPELVFAYEAGPCGYGLHRYLTGQGFTCQVVAPSLIPKKPGDKVKTDRRDAVDLARLLRSGDLTRVYVPTVEDEALRDLCRARDAARLTLKNAKLRLKAFLLRLGLNYVGRADWNDAHRRYLAKVVCPTPTQQIVFQESVRAVDEQVDRMHRLEAELLERAPAWRLYPVVQALQALRGVQFLVAITVVAELGDLTRFDSPRQLAAFVGLVPSEYSTGPSRRLGAITKTGNGRARRALIEGAWAYRHPAKVSEHIQRRIDTLPKPMQDIGWKAQVRLCKRFRRLTARGKHPNVVVTAIARELIAFMWAIAKEVPIPT

SEQ ID NO: 225603 - protein, 389 aa, unidentified
MLLDHPSDGPTAIRTQFGAIFVSLELSRSNWLITSLSPGKGEKMSKHSVTAGDVAGLMRLFADLRRKAEARTGESYPIITIQEAGLDGFWLHRVLQQNGIESHVVDPASIATPRRRRHAKTDRLDGETLLRALLAYKRGEPRVCAMVVAPSPEEEDRRRICRERRSLIAERITHVNRIKGLLFAQGISGYEPLRRDRRARLEALRTGDRRELPSHLKAQIGRELDRIELLLEQIEAVETERDALLAAARKPASEEAAPDVVTMLLALKGMGANFAAVLWSEAFYRQFSNRRQVAAYAGLAATPWQSGGIRHEQGVSKAGNPRLRTTMIQFAWLWIRHQPQSTLTRWFKERSPRGRKRAIVALARKLLVALWKYVTQGVVIEGAVMKPAA

SEQ ID NO: 225604 - protein, 349 aa, unidentified
MPDPHTSAHTQIVGGVDTHTDTHHAAALDHHGRVLGDDEFPATPDGCAQLLSWLSSFGPVTTVGVEGTGSYGKQLATLLRRNNIEVREVSRPNHGKSDAIDAINAARTTLCGDGTATPKTATGPVESIRALRIARTGAVKARPAALNELTNLITTAPTALREALRHHKGTALLTACTALQPDTTALADPTHGTMLALHTIAERITSLNQHIRHLDKHLDQLVAATAPTLIGLLGIGTDAAGQLLVTAGDNPERLHSEASFAKLCGVAPLEASSGRTDRHRLNRGGERQANRVLHIAVVVRLRYCPRTQAYLQRRTEQGLTKRDIIRCLKRYVARETHTAIMKDLALATA

SEQ ID NO: 225605 - protein, 374 aa, unidentified
MTTIARRITGGVDTHLDVHVAAALDERGAQLGVESFAATGAGYQELLGWLEGFGTIELVGVEGTGSYGAGLTRHLLSRQVAVVEIDRPNRQRRRRTGKSDPHDAVAAARAAQGGEATGSAKTRDGNVEAMRVLRVARRSARGNRTQALNQMRSLISTAPEELRADLRNLSIYKVLQLASAFRHTGKTDVATVTKLTLRTLARRALSLEEEVKEIDRMLKVLVAETAPELHAVDGVGTDVASAILVAAGDNPERLKSESTFAKLCGVSPLDASSGKQQRHRLNRSGDRQANSALWHIVFTRMVNDPRTKHYIERRMKEGRTKKEAIRCLKRYVAREVFAALPRSEFALDSPQEHRSGTERGQLKPLEAWPEVVVT

SEQ ID NO: 225606 - protein, 404 aa, unidentified
MWYVGLDWVDTHHDVEVLDEAGKRVGVRRFAHNHAGLHELQAFLLGIAPEVEQLACIVETNHGLLITFLLEAGIPVYPVNPKTANQLRKSAGAKTDQIDAHLLAKLGRLELAELRRLEPDSAIVQELKTLTRDQDALIQTQTRLVNQLTACLKEYYPAALHLFAKLQQRSALVFLQAYPTPQAAQAATLAEITATLHTGKHTNPRQAAPKIFEEVHRPQLVAKEVIVRAKQRLMLSLVKQLLVVIEDIATYDKEISTLFLTHKDQEIWRSLPRAGKRLAPRRLPEWGDDRARYADASSVQSLAGTAPVPFQSGNYAKAHKRFACVKPLRNVLHQFAWQSTRQEAWARDYYQRKRAQGKTHSMAVRALANVWVGIIYRMWVSKTSYQTATFEAARQAHAPQQHVA

SEQ ID NO: 225607 - protein, 334 aa, unidentified
MDSVKYIGMDVHKEAISIAVLTSSGKLVMECIIETKASTILQFFQGLSGSVQVTFEEGTWAAWLYDLLKPHVTSLVVCNPRKNALLKQGSKSDRIDARKLAELLRNGSLSAVYHGEHGLRMLKELSRSYLTISKDLGRVMNRLKALYRSWAIPCAGTQVYAPRYRSEWLSKITEAGVRRRAELYYQQLDALRFLRQQARKELLAEGRKHSATKLLCQISGIGPLRAAHLVALMQTPHRFRTKRHLWNYSGLGLETHDSAQYCIVEGQLQRSKKPQQLRGLNAETKKCRHRADAEICLLTFPFIGLFRYRRYRDLEVHRSEKSSRRVESEPGLRR

SEQ ID NO: 225608 - protein, 365 aa, unidentified
MTARQRSTFSSTDPPIRREVVLGVDTHGEVHVAAVISPLGKILGTESFPATAVGYRQLLVWARKRGTVRRAGVEGTGTFGAGLSRYLLAQRVQVFEVNRPDRTARRLLGKSDPLDAQAAARAVLSGRARARAKSGDGPVHSARIYKLAKDSAVKARTQAINQLKAVLVIADPTLRERLSSLGNAELFRTCATLGATAGGGDEDAVAQATHMTLRMLAERIEQLTGQINELNQRLTRLVERHAPQLLVPVGIGPDSAVTLLITMGDNPERLNTEASFAALCGVSPIEYSSGRRRTRRLNYGGDRQANAALHRIVFTRLRHDPRTQAYYERRTQEGKTRREIIRCLKRYTAREVFNLVRPASHTPAL

SEQ ID NO: 225609 - protein, 434 aa, unidentified
MNASNSTPLDPAPAPSAITYAAFIGIDRSDSRLDVCLQENRSGAHPETLALKNTPEAIEQWLKQLCQRFGEQALAICFEQPAGALLHQLAGCHFVQLYAINPLTLARYRQTFTTSRAKDDRRDARCLMEIVRDHRDKIAPWQADLAQTRALAALVEARRAAVDLRTQLCNRLKTHLKGYFPQALELVGDHLYTSLCCDFLLRWPTLQELKRARAITVERFYIEHRSRQSSVIARRVQLIKAGVPVSEEAALLTSAVLTTQMLVGQLKQLSASVAAFDAKIEDLFHSHEDAFIFASLPGAGSVFSARLLTGFGSDRTRFASAQEVQKYSGIAPVIKQSGQNRVVQRRRACPRFLHQSLVEYAAKSILHCAWAKAFYGQQRAGGKGYWAAVRALAFKWVRIIFRCWQERVAYDEARYVEGLRRSRSPLLAYLEVPV

SEQ ID NO: 225610 - protein, 408 aa, unidentified
MDVVYSHVCGLDVHKKTVVACIITPDEKEIRTFSTMTDDLLQMVDWIKSKGCTHAAMESTGSYWKPVYNLLETEEIQTLVVNAQHIKHVPGRKTDVKDAEWIASLLRHGLLRGSFIPPRDQRDLRELIRYRRSLIEERAREVNRIQKVLEGANIKLSSVASDILGKSARAMIEALIAGNVDPESLSELALRRLKNKKADLQRALKGLIGPHQRLMLQTQLRHVDELDALIQQLDEEIKRRMLPFEEDLERLDTIPGVARRTAEQIVAETGTDMSRFPSAAHLCSWAGVAPGNNESAGKRKSGRTTKGNPKLRSALIEAARAAVRTKHTYLSSLYHRIAARRGANRAAVAMAHRILTIVYHLLKEKQVYNELGPHYYEERRREQMARQAIRKLEMLGYDVMVKEREQTA

SEQ ID NO: 225611 - protein, 322 aa, unidentified
MAMLSFGGIDVSKDRLDITVLPDEQCSSVSNDAAGWAELIEQLRGSLITAIGVEASGGYERGVVRALLAAGMSVRQINPYKLRQFAKASGILAKNDRLDARMIASFVAIMPTRPAQRQTPMIEQLAAMLTVRRQLSDHKVATENASRLLEDAMLQRLSRRRVARLTADIDLLDQRLVEIVTADPALAHRFRLLTSMPGVGAVLACTLIALLPELGQMSRKQVAALVGLAPYDFDSGKLKGRRCIWGGRARVRHVLYMAALSASNWNPALKAFHDRLEATGKKPKVVIVAVMRKMITTLNAMLRDGTAWVDRYSGRRSASTAR

SEQ ID NO: 225612 - protein, 435 aa, unidentified
MELMRRSTCVATEITRAHGRGACMQVLHQICAGMDVHKKDVKVCLVTRDSQGQRQEEVRSFRTMTRDVLAMRAWLQGQGCTIIAIESTGVYWKPIFNLFEGDFTVLLVNPSHIKQVPGRKTDVKDCRWIAELLEHGLLRGSFIPPVEMRDLRDLTRYRRQLVNTHSAEVNRLQKVLEDANIKLASVATDVMGVSGRAILRALLAGVVSPEALAELAKGRLRKKKQDLQAALLGRFRPHHTQLLTHILAHIEFLEESIAECEAQIEALCRPFAEVIALLDTIPGVSQRTAQDLIAEIGVEMAWFPSAKHLCSWAKLSPGNNESAGKRKSGRTGKGNKWLRALLVECAHAAGHTKETYLGTKFRRFASRKGKQRAAVMVAHRILEAAYFIIRDKVPYRELGEQYLDAQHREHVIRHHVRRLESLGLHIDIRELPLTA

SEQ ID NO: 225613 - protein, 437 aa, unidentified
MSNVAYLGLDISQADVSVCFLLADGAEPVPRWTVANSQPGAESLSRTVAGLCQSQQVEELRIGLEATGLLWWHLACALTTAAPLLPFRPQIYVLNPHLVQTFRRNYGALPKTDRADAFLIAERIRFGRQLPSPFQVDVRYAPLQRLTRFRFHLAHNLAREKSYFLSFLFLTFSSFGQVQPFGDPFGATSSAVLTELTTEELAQQSLAELAAYLQTQGHGRFTDPQALAETLQQAARDAYRLDKVLAEPLRIVLSTTMANIRSLAAQLKTLDQTIAAELQAIPQTLDSVPGLGPVWTAGLIAELGDVRRFADDDAIAQFAGLTWPARESGQFQAEDTHLSQRGNSYLRYYLVEAANSVRRHCPEYADYYAAKYAETPRHPHQRALVLTARKLVRLIDALLRSQALYQPPEQRPTQPDAAPHGQRPNRQRQHRRADAVT

SEQ ID NO: 225614 - protein, 280 aa, unidentified
MIIIGADYHPGFQQIAFVDTDTGEFQERRLQHREEAEKFYRDLAAQGMRVRVGMEASGQARWFERLLSELHFELWIGDAAEIRTRRVRKQKTDRQDAQLILKLMLKDDFPQIWVPSWENRDLRQLLWHRHRMVQARTRIMNQLQAVALNEGLRCKKRLWRKHGREQLEAFRLAPWASRRRRDLLELMDRLNPTIAELSQAIEQEVEKCPEARRLMTHPGVGALTALAFVLIIGKAERFGSGKQVASYLGLVPLEDSSGNRRRLGHITKQGSSMMRKTAGC

SEQ ID NO: 225615 - protein, 337 aa, unidentified
MKDVRIGLDIAQMVFQVHGVDEPGKSVLKKTLSRSELLNFFANTPASLIGIEACAGSHYWARELIKLGHDARLMAAQFVSPYRKSGKNDANDAEAICEAVGRPNMRLVPVKSEEAQAVLAVHRARALTVSERTALVNQVRGLLGEFGIVAGQGIAQAGRLLAEIGAGGRQLPLLARETVGELHDRLRTLDERILAYDRKISVLAKACEPARRLMAIEGVGPVTATALVASVGNASAFKSGRQFAAWLGLTPRQNSRGGKTKLGSISKRGDVTLRTLLIHGTRSVLRLTADKTDRKSRWAEALKERACANVAAVALAAKKARIIWAMRSRGTEYQVAS

SEQ ID NO: 225616 - protein, 390 aa, unidentified
MIYVGIDVASQKHDYYIISDQGEIYTSRSITIPNNNEGYKKLHKSIQEFCGATKDYKVRIGLESTGFYHKNLVSYLLANKYEVMVINPLLTNMYKKSRKIHIQKNDNIDSIYICKYLMDTETVFKPYTNISYHTDALKALSRERFSLVEELRLAKINIYKLLTQLFPEFLKLFSNVYQGSALDILEKYNSPSKLSKAHLKTISSMIHGKCSVTADKLIETAKSSIGIKDEYLAFQLSQGIKRLKSIQSTIDEYNEQISKYVDMINPNILTISGVGYITAGLILGEIGDINNFKNSEHLISYAGLDVKIYESGKYKATNLSISKKGSIYLRYALYQVAKVCWVHDSMFHEYYLKKQAENKHYYVILGHIEKKLAKVIYSVLKNNKPYSPQI

SEQ ID NO: 225617 - protein, 337 aa, unidentified
MAAVVDERDRVLASASFAATRQGYRQMLTWMRSFGAVQRVGVESTGSYGAGLLRFMQQAEIEVLEVTTPDAHDRRRRGKSDDFDAQSAAHAAFAGTRTVTPRSRDGMVESLRVLSACRKTAVAARRIALQMIHNTIVCAPDGLRETLRRMTRMQLVRTLAAWRPDLTGYRDVEAAYRISLKSLARRYLELHDEIADLDAMIGAIVDELAPELVARNSIGRNGAAQLLLTVGDNPERLRSEAGFAALCGVSPVPASSGKTVRHRLNRGGDRAANSALHIIAIGRLRTDARTKAYVARRIAEGHSKLEAIRCLKRYIAREVFTLITQRQRAINQTRIAA

SEQ ID NO: 225618 - protein, 369 aa, unidentified
MEKDTIYVALDDSKRKLVVAMLRPGATEPEEREIPKDPPHIQRLFGRLQRGGPVQACYEAGVSGYDLYRQLTAGGVTCQVIAPALTPRRPGQRIKTDRRDARKLVRLFRAGELTPIHVPDEAEEAARDLVRCREAVRRDVVRWRHRLLKLLDRHGRLWVAEKNWTQRHWTWIRGQHFALAALQRAFEATVFALEQALARQAALDDEIEALAQTAPYRDPVGWLRCFRGIGTLSAMVLLAEIVDFQRFRRPRELMAYLGLVPSEYSSGETQRRGGLTKAGNTHARRVLVEAAWHYRHRPTVGRALARRSQAQPEAVVGQAWRAQQRLHRRYRHLIGHGKRPPVAVAAIARELVGFLWAAMTRRETRVQVA

SEQ ID NO: 225619 - protein, 317 aa, unidentified
MLDAESGQLGRERLPATREALDGWATRWAGKLEAVAFEATTGWRWVARELQARGFEVRLCDPGEARALGGSKRRPKTDRLDAAWLARLLAKEMLPEAWLPPAEIQYLRDRTRLRHALAQDRNRWAQRLHALLTHEGWPCGRGRLLTVSGQQWASALALPDPARASVETMLTIIHALDEQIELLDTELRRLARSDPRLQALCAIFGVGPVLAAHILAELGAASRFRRARQVVRLSGLDPVVSESANLRRRGRLSKQSSPELRWALAEAAHHACRQTSPEHALSTSAKQRRGTQRATLTLARKIARRADHVLADLEQAA

SEQ ID NO: 225620 - protein, 331 aa, unidentified
MMNASEMIFVGIDVSKNTLELALDDKSKTRCFDNNEQGIKQVMACLKAAINGSASVSVGAIVLEATGGLERKAAIALCEAGWPVMVINPRQARDFAKSMGYLAKTDSIDARVLSHFARTLHQSDRRERLLMKLPDAQQVALQALLTRRSQLIAMRVAEDNRLETSHKSQRKSIEAVRKVINKQIAVIDKDIDGLLQAHFAEKLSLLKDFKGIGIGTQASLMAALPELGSLTNEQISKLVGVAPLNCDSGKHKGKRFTWGGRADVRCMLYMAALSAVRYNPVIKPFYERLLSKGKVKKVALVACMHKLLIILNAIMKSGKKWNPLHLETINP

SEQ ID NO: 225621 - protein, 427 aa, unidentified
MPEKPVAGIDVSKDFSDMCIIKPDNKVFQTVHIFHDATSLRRSLAALEAAAREFREKPVIVMESTAHYHRVIAQFLQSAGYEVMVINPMQSGALKNINIRKVKSDKSDAHRLALLYRLKTLHTTNQPNELLSNIRDYCRQRADIMNSHTAYVNRLTSLLDQAFPGYARVFSRVACKSSLGILKTYPSPAAILAADPEQLAETISKYARRGVTTDYVIKKVAALRRVAENAEEINLKREAYSVLIVTVAELLEGLQRHIETLKKRIIELATEDPSVKFEVSLLQTIPGIGLYSAVLLRAEIGDFSLFQKPKQLVASFGMDPSTRQSGKFVGTKTKISKRGSPYARAILDICAQSAVHPVKGKEPANPVLANYYAEKVKTKEPKVVKCIIMRKLVNIIFAVLRDKKPFELRTPEEHIELLKHPNISRAA

SEQ ID NO: 225622 - protein, 357 aa, unidentified
MKRQKQYILRNEEVFVGLEDSKKTWKLCVRSGGVIVHEASMPAQYEVLRNYFHNKFPGCQIKVIYEAGFRGFELHDRLIADGWGCVVTPPHTVMEEKCQRKKNDRTDCRRLAKNLENGDYHICFVPDRELREDRQVSRTYGQVEEDIRRTCNRIRRMLEFHGLDEGFPPGRWTQAMYDLARQKLGRLDMSESLRFSFEVLFRELEYLRGLRRELLRQLRRLARSDRYREDVELLKSAPGIGALTAIRLVLEWGDVRRFARKGDFASFLGLVPSDYSSGEKERRGHITKQGNPRLRTWLVECSWVAIRVDPVLLEKFRRVVRACGSKKKAIVAVARKLALRLRRVLISREPYVIGVLE

SEQ ID NO: 225623 - protein, 416 aa, unidentified
MLFIGDDWAEDHHDIELEDEDGRRLVRARLPEGLEGITRLHALVAEHAPPAWADLPPEHVADQVIVGIETDRGPWVTALRAAGYQVFAINPLSAARYRQRHSTSGAKSDAGDAHVLAEIVRLDRDHHRAVAGDSDLAEAIKLLARAHQTAVWERTRQVLRMRSTLLEYFPAAVQAFEDLAAPDALSVLGRASNPDRAAKLTRGQLVTALRTARRHHVEAKADALLAVLRAPALRQPATLQGAYAAVVLGQVGIITALNAQIAALQGVMAKHFGRHPDAEIYLSQPGFALVLAARTLGEFGDDKDRFASSRARKNYSGQSPITRASGKKSVVLARYATNRRLGAALHLQAFAALGASPGARAYYDALRGRNIGHHAALRQLANRLVGILHGCLKTGAVYDENIAWQHHQITTGTVAA

SEQ ID NO: 225624 - protein, 485 aa, unidentified
MKTKRREEAQEAKKASSSATHGKWHDMNRKQRRDMMRKIQSEDLSLEVIHPDAAGIDIGNESHYVAVPPSRDSQSVQRFGCTTAELKAMAAWLKQCSIHTVAMQSTSVYWIAVYDILEQAGLEVYLVNARDTKNLPGRKSDVQESQWLMKLHTYGLLRNSFRPSQEVRTMRTYWRQRNDLVRAAARHIHRIQKALTQMNIQLANVLSDVSGMTGQAIIKAILAGERNPRKLAAFRDPRVKASEEQIARSLEGNWQQDLLFVLKQEQDGYESCQQQMAECDRQLNQYLEQREDRSQAAPLPEEKRKERLKKKKGNKPQFDLRAGLFRMTGTDLTQIDCVDVMTATTIFSEAGWDMNKWKTEHHFVSWLRLCPDNRISGEKIIGKGRLPTNNRVTTALKIAANNLRLSNTYLGAQFRRLRTKLGAPIAIKAMAAKLARLVYRILCYGIKYVDRGAAFYEAKHRQIQIKHLKWKAAKLGFKIIEAPAA

SEQ ID NO: 225625 - protein, 411 aa, unidentified
MEELHERYCGLDVHKRTVVACTVTPQGKTTRSFGTLTSQLEELRDWLKALGVTHVAMEATGVYWKPVWNVLEGHFGLLLVNAAHIKAVPGRKTDMLDAEWIASLLGHGLLQGSFVPDQQQRELRELTRTRTALVRERARVVQRLEKVLEGANIKLGIVLTDVMGVSGQRILEALVRGEEDPEELADLAHSSVQKKRESLEMAVVGKLSENSRFLVHQHLQHWKELDQRIAAFDEQIERVMRPFETQLRQIQSIPGVSRRIAEVVVAEVGVDMSRFPTEKHLAAWAGMCPANRESAGRRKPAASRHGSPWLKAALTEAAWAASRCKGGYLAAQYRRLSSRRGRKRAIVAVGHTLLVTLYHMLTDGTLYHDLGSNYFDKRDRRAVERRALTRLEALGYKVTLEPVATPPPRAA

SEQ ID NO: 225626 - protein, 368 aa, unidentified
MASVLYVGLDVHKDSIVIALARGGREAAEMWKTIPYDGVRLVKALKMLVKSREELRVCYEAGPTGFGLCRRLRKAGIDCIVVAPSLVPGKAGDRVKTDRRDARRLAHFLRSGDLTAVHVPEEAVEAIRDLERARDDAKCAERVARHQLSKFLLRHDRHWDATTWTVKHRDWIRAQKFSYPAQQRVLEDYVKTVEDLAERVARLTEAMGELVEETVLAPLVKALQAFRGISTVSAVTIAAEVSDLRRFATAGQFMSYVGLIPSEDSSGKRRRQGPITKCGNRYLRRILVEAAWHYRHAPVMSKELRRRNQGVAPEVRWIAWEAQKRLNKRLYHLIRAGKSTQKAVIAVARELAGFIWAVGQQERLLEAA

SEQ ID NO: 225627 - protein, 375 aa, unidentified
MAEITRALIARVGVDLAKNVIQVHAVDGAGRRVMARAFKREQFLAWCAQLPAGCLVAMEACGGAHHFGRKLRAMGLDARLIAASFVSPYRMEGKGGKNDMTDAAAICEAASRPTMRFVPIKSCEQQGVMSLHRVREGLKEERTACVNRIRGVLAEFGLVFGKSPKALRAVLGEVIEDADNELSTTARLVIQRAFEHWRELDEHMRWCDRQVGQHVRSSPAARRAAKIDGIGALGASALTASVGDFNQFRSGDQFGAWVGLVPRQNSSGGKASLGRITKRGDDYLRTLLIQGAKSAVMSAGKRDDPISRWLVQLTARVGWQKACVAMANKNARILWSVMTREQGYDPHHVSVKPLAKLPVQRGGGQAMPTEQSCAA

SEQ ID NO: 225628 - protein, 338 aa, unidentified
MTILMGLDQHRAQITTEWLDTSTGEVSRARVAPADRAGVRRFLARFRGWQLEVALEATTGWRFVVEELQRIGAVVHLAEPADTAALKGNKKHAKNDRADARHLRELLMAGRLPESWIPPAHILDLRARVRLRHTLSEQRGEWQQRIQSVLYHHGCPQRGDLINRAGLTWLAALPLPACAREQVTVGLAMIDALERQLAPLDKELRSYARRQPGCKALQRHYGIGPLTAVTILAELGDPRRFSSSRESVRFSGLDITVHASDQRRAPGHLSRQGPPALRWALFEAAQCARRPNSPDHAYYQEAAKRLGGNRACLAVARKLLKRSYHTLRELGEEALQPA

SEQ ID NO: 225629 - protein, 390 aa, unidentified
MIYVGIDVAKTTHYAAAADSDGVVLVEPFAFDNDAPGFAKFISKIASFPKEQLIIGLESTGIYSENLICFLFDSGYKLAVINPIQTATLRKTNIRKTKTDKVDTLLISKSLMVNSYRLYTEQDTQSLKLKSLCRFRQSLKKSKARLKIQLSGYVNLLFPELLSFFKSGIHISTCYTLLKRCSSPAEIAALRLDSLSRLLSNASRGRFSRSTAEALKSLAKSSVGVKNPYISIQIAQTIQQIELLEQQIDEIENVIKDTICELDSVIMSIPGIGAIDGAMILGEIGNIDRFASPAKLLAYAGLDPTVCQSGKFKARSTKMSKRGSKILRFALINSAWQLTLKNDTFFNYYQLKLSQGLSHYGALGHVAHKLVRVIFTLLKHNVLFDPTRLV

SEQ ID NO: 225630 - protein, 367 aa, unidentified
MNNYTTVVGLDVHKETIVAAVLPQGYNEVTEKVSIENNPKAIEKLVNRLTRHSPAEFVYEAGACGYQVQRQIAGLGQHCAVIAPSLTPIRPGERVKTDKRDAVNLARFYRAGELTEIHIPTCEEEAARDLPRAREDVLTDRLRARHRLSKFLLRQGRVYRETTSWGTAHKAWLRTQKFEFPSSQQTFEANMRAYDECEARLATLDQQTYDLAQHPAYCTAVNYFRALKGIDTLSALTLVVEAQDFRRFSKASEFMSFTGLVGSESSSGEKVRRGSITKAGNTHIRRVLVEAAWSQRYPNVVSRELAERRKGCPKEVLQIAKKAQARLHRKFLRMIGKNKLHQVTVVAVARELAGFVWAIGQHIPAAV

SEQ ID NO: 225631 - protein, 316 aa, unidentified
MNTEPVYVGIDVAKASLEVAVHQSADRWTVEYTDPAVATLVARLTALTPSLIVLEATGGLEVPLVGVLAAGGLPVVVVNPRQVRDFAKATGRLAKTDTLDAAVLAHFAAAVRPPVRPLPDAATQGLAALVTRRRQLVDMLTAERNRLSCAPKVLHKELQAHIRWLERRITGVDADLDQAVRTSPVWRAQEDLLRSAPGVGPVVARTLLAQLPELGTLSHKTTAALVGVAPLNRDSGRFRGRRQVWGGRAAVRAVLYMGTLAAVRCNPVLRAFYLRLRAAGKLPKVALTACMHKLLTILNAMMKHQQRWDPNYAPTT

SEQ ID NO: 225632 - protein, 327 aa, unidentified
MRHYISFDVGKQWLVMYDGEEERRIRNVKGLDELDLFISTKYRDRVKDIVFIFEPTGTYSNNLKDFAVKRNIKVLIINPLRVHNFSKALGNRSKTDSIDARTIYRMRKIMDEDDISFPLNDERVDKLTKALSTYRIIKRMRHSLMNHNSENRSDIKLLKDRITEEIERLKLLEDEIVRAIIDEIIERDEELSRSFNLILTIPGIGVISGVSLLLLFIKYKNTNRNEITSLLGLDPVLKESGISVKGKSRISKRGNGMIRSILYFPTMSAIRHNNRIREFYKRLLDRGKPKKVALIASMKKLLLIAHAVYKSGIPYRERNNSFTFSSP

SEQ ID NO: 225633 - protein, 370 aa, unidentified
MKEDTGVFVGIDVAKLRNAVAVAQPGRDGEVRYYGEVDASEISMRQLFKKLASRHGRLTVCYEAGPTGYGLHRLVKELGHECMVVAPSLIPKKASDRVKTNRRDALALARLLRAGELTAVWVPDTTHEAMRDLSRARTAAVKDVGIKKRQVSSFLLRHHRVFHRPTAWTKRYIHWLHEQRFDHPADHVVLQEAIDAVRVAQERVARLDRAMEEFLPSWSFAPVVSALQALRGVSLVTAVNFVVEIGDVRRFENPRQLMGYVGLVPGERSTGDTVRRGAITKMGNARIRQLLVESAWTYRYPASISAKKLPLFERAPERVREIAMKAQTRLTRRYRALSARGMKSTVICTAIARELVGFMWAVAREVSPAA

SEQ ID NO: 225634 - protein, 319 aa, unidentified
MNPVSTSPCAVGIDVAKGQLDIADTRSEHHWATSNDPEGHDQVRQRLTELNPAVIVLEATGGYERPIVAELAAAGLPVVVVNPRQVRDFARAIGRLAKTDAIDAAVLAQFGMAVKPEIRPIPDEHAAALHELLARRRQLVQMRTAESNRLKQAHTRRVKTSIQHVLELIHQQLEHLDDDLDRLIRQCPAWQKKYDLLTGVKGIGPQTARTLLIELPELGRASRQQIAALVGVAPLNRDSGMMRGRRTTWGGRASIRSTLYMATLVAVRHNPRLRAVYQRLLQRGKRKKVALVACMRKLLVILNAMLRDQKPWHDPQQIA

SEQ ID NO: 225635 - protein, 365 aa, unidentified
MTNSTTATVSVALDVHARSVRLAATRSDELIAEQALPYEHEAIYRATSRWPGARVCYEAGPTGFGLARHLRERGVECEVVAPSLVPSKPGDRVKTDRRDARRLAYMHGAGLLTPVVVPTPAQEAVRDLVRAREDARRDRMRERNRLSKFMLRHDRPLPGRSWGVTRRKWLVDQRFEHPASQRTLETYLHALDVTDARIEAMEREIAELATDGPWAQLVADLRCLRGIDTLTALGIAVEIGDLGRFASAEQFMSFVGLTPSERSSGEKRAQGSITKAGNEHVRRLLVEAGWHARRRPKVSYELRRRQQGRDPLVIERAWRAQKRLHSRWQRMAGRGKPKQKIVVAVARELAGFIWAIGTNQPLRSA

SEQ ID NO: 225636 - protein, 372 aa, unidentified
MEAYAGTQFVGIDLHRRRSVIVRTTERGDPLETVRISNDVDSLSKVMARAGVCPEVVVEATYGWYWAADALADLGAVVHLAHPLGVKAFSYRRVKNDVRDATDLADLLRMGRLPQAWIAPPATRELRELVRHRAKLVAIRSGCKCEIHAVLAKCGIPVLMSDLFADPGLALLERLEAPAPYLARIGSLRRLIDDLDVEIDLFARLIRGRLAADPGYRAVQTIPGIGPVLAAVFVAEIGDVHRFPGPAQLTSWAGLTPKHHESDTHVHRGRITKQGSRLVRWAAIESVQALGPSTGAGRLKRRVGDRRGRNIGKTAAARQQLGYVYYALRDGQVRALAHHPGPRRDRGPLQHLARGLVVQVMTPVRGAVAPSD

SEQ ID NO: 225637 - protein, 402 aa, unidentified
MIFINCLGIDIGKSESVVAHYKDEVLVKEMVIQNNQNGYRYLKNYIKHLDSLFILFESTGIYSRGMKRFCEIHKIDYLEMNPLEAKFKTSSLRSWKTDKSDAHKLALLAFRMKDSKVQRHPEEIYFELRERARFHLEMEINQNRLKVELVETLHQTFPGLEKLFTNRYSKIALSIAKAFPHPDFVSTLTHDELVEKVLHSTDKGISVNKAHKYVQKLIEIQINSFPNVDKSSFLLQKVQYLCDKLLIGIEEMKEFDQEMIDLAKNTTEFENIISIPGIGELTAALLIGELGNIREFKTNKQLNAFVGIDIKRYQSGTSKSRDTINKRGNKKARRLLYLIIMNIIRGRNHYQSHIVDYYYKLREQPHGKTHKTAVIASINRLLKTIHYLIVNNKLYDYQKAPH

SEQ ID NO: 225638 - protein, 281 aa, unidentified
MKPIYYVGLDVHKETISIAYALGGSRDDATYHGQCGGSVAAAVKALQKLAEKLNIEFRDLKVCYEAGPTGFVLARHIIKKGVACVLMSPSKTERKPGDKIKTDKRDACNIARLFRNGDITQVRIPPVLDEAVRDVCRARTDATDDLVRAKQRLNAFLLRNGFNYTGKSKWTAAHMRYLRELTMPSDPQRIVLEESIQAIDTCENRIERLVTKMKQLLETWEWKPIVHALMAFKGFQEVAAMTLISELGDLRRFDHPRKLMAFLGLVPSESSSGGKKRQGAI

SEQ ID NO: 225639 - protein, 286 aa, unidentified
MKQQKKSSRDITIGLDLGDRRHRFCVLDKWGGLLEEGSVRNERVFLAQLSERYPGALAVVEAGCHSPWISRYLQEQGCRVLIANPRKLRAIYQHERKSDQRDAQMLARIGRLDPALLYPVRHGTADAQQDLLRIKLRDSLVRARVAVINSVRFTLKSLGYTVRNPSSERFHKVAMEGLPVALCQMIAPSLQALEELTARIKALEAEINSLARRKYPHAIQLQQIPGVGPITALYFVLKIEDPTRFQKRARRRRLRGLMSKTRSKRAERSTTAHLQMWRRLPASIAR

SEQ ID NO: 225640 - protein, 372 aa, unidentified
MLYAGLDLSRKRLDFHLLDAEGATVDVGASPPDAYGLRGLSQRLDHQRAPIRAAIESMNGARFVHDTLKLYGWQVEVADAQKVKGLAPLACKTDRIDAWVLAELARRDLVPAIWLPDPRVRAERERARWRLHLVRHRSSLKQRVHAVLLTHGKPCPVSDPFGVRGRQLLSQLGLPEPWQDTIEASLRLIDELDREITDCERELRRLGAEHDYVPLLLTVPGISWVLAYTIAAEIGDIDGFPSPRKLAGYSGLCPRVYQSGDRDLRGPLVKQGPRYLRWALVEAAAHACTHPFYRDRYQATKARIGKQRGAKVAQDRPRPPTRRGDLAHAQPPRTLRSQRRHRPPGRLTVLKEMRHRSELQSALSSREEAIER

SEQ ID NO: 225641 - protein, 316 aa, unidentified
MTKAERFVGIDVAQATLEIAVRPTGESWQVANDEVAFGALVDRLHELAPTLIVLEATGGIQLPVVGALAAAGLPVVAMNPRQVRDFAKATGKLAKTDRIDAQVLAHFADAVRPEVRPLPDAATQELAILVARRRQLLEMRVAEQNRSRGVPPRIRAQIREHIIWLNRCLADLDRELGQLVRSSPVWRERVDLLRSTPGVGPVLSATMLADLPELGTLSHKQIAALVGLAPLNQDSGKKRGKRVVWGGRASVRGALYMATLVATRRNPVISAFYQRLLGTHKPKKLALTACMHKLLTILNAMVRRQTRWAPPVALVG

SEQ ID NO: 225642 - protein, 408 aa, unidentified
MKSYRFYVGIDWADQAHLVCIRESGTEKIEERSFQHSGQGLTAMIEWLTEHARGRPEDVAVAIEVTRGAIVEALLERRFVVFAINPKQLDRFRDRHTVAGAKDDRRDAFVLLQSLSTDPKAFRQLDIETPALMRLREHARMYEDLKHDLRRLTNQLRAQLHRYYPQILELCSAADAPWIWDVLERAPLPERGSRIKVSTVERLLHDHRIRRIAAADVVKVLKAPALPVAPGTAEAARDHVLMLLPRIRITRHQLDTVEAKLGDLLDEMESTESEIGGHHDVAIIRSWPGQGMIVAAMMLAEGWRPLGCRDYHWLRALCGVAPVTRQSGKSRQVVMRQACNDRLRAAVHWWAGCAAVHDPRAKALYQSQKARGHSHGRAVRAVADRLLRDLVVCLANQEVYRPELRKVA

SEQ ID NO: 225643 - protein, 411 aa, unidentified
MRRVIGIDVHRTFGEVVIWEDGRLRHAGRIDMTRTALEGFGKTLLASDEVVVEATGNSMAVSRVLAPFVARVIIANPLQVKAIAQAHVKTDKIDAGTLASLQAAGYLPQIWTPDAETERKRRLVARRYQVVRHRTRLKNEVHSILHAHLIPKCPHADLFNGRGRAWLVAQPLPDDERAAIDRHVRELDRLAEDLALLDREIAQDAIDDSAVNRLMTITGVNLAVAAGIMAAIGDISRFNSPQKLVSYFGLNPRVRQSGLGAAHHGHISKIGRSHARAMLVEAAWAAAKAPGPLHAFFVRIRARRGHQIAAVAVARKLTVLCWHLLTKGEDYLWARPALVAIKTRAMQLQAGHPQQKGSRRGPAYAYNIKVLRDREMLIAAQAEQSYERLVTQWKPRRPKTGARAPQLGKTK

SEQ ID NO: 225644 - protein, 326 aa, unidentified
MGLRSRIQEGVIIMNNSISQIFVGVDVSKNSLDVHIYPVNKAFTVANSKKGIREMKRKLARYCVGQIVCEATGGYEILLTTQLNDYNLWVVEPKRMKAFIMSENMNAKTDKIDARMIALFAAQKTPQYTSKHLSKDEAHIKALNQRRLDLIEMLNKETNRIQHPAQIHCKTELKKHIAFLKKQLTKINAEIERLINANDVLQEKNVIIQSIPGVGKVAASMLISFMPELGTITDKQIAALAGVAPFDRQSGSHRRKSIIKGGRSEIRKVLYMAALVASRFNPVMKAFYERLINVGKKPKVVLVAIIRKLIVILNVMIRKGEMWQPQ

SEQ ID NO: 225645 - protein, 314 aa, unidentified
MAARKWVWVGIDVAKDQLDVHIRPLGSGFMVSNDAAGYAGLIAQLRPLRVKRIVLEATGGYERALWLALTEAGLIAAVVNPRQVREFARASGRLAKTDRLDAAVIAHFAETFEPPRRTPDPVADRLSEYVLYRRSLSEEIIQLENQSRRLADEALVVRARARLSRLRTELQEIDAAMRTIVAADRAKRALFDCLTALKGVGPVLAYTLIANMRELGTLSRRRVAALIGVAPVNDDSGKRRGSRAICGGRKGVRNVLYVATLSAVRYNPQIGAFYRKLRDDGKKAKVALVACMRKIVTILNARVRDHLAAMSTIA

SEQ ID NO: 225646 - protein, 355 aa, unidentified
MKKRDKYMGMDVHQATTVVSVIDAEGKLVLETTVATEAGPLIRLMESISGPLHVTFEEGTQAEWLYEVVRGYVTEVIVCDPRRNKLLEEGSKGDKLDARKLAELLRAGLLRTVYHGQQEATRKLKQLVRAYENLSQDTQRTMARIKAVYRSRGIASRGRAVYQRTQREQWLEKLSEPGARQRMEWLYEELDQLGPIRRRAKQAVLSESRNHRAVALLRTIPQLGPLRSALIVATVDTPHRFRTKRQLWSYSGLAVVTHMSSEYEIKEGRVVRSRKPIATRGLNRNGNRRMKEVFRSAATGGAQMEPYRWYLEKLQQNGMKAEMARVTLARKIAAIALSIWKKGETFDPKKLNGTT

SEQ ID NO: 225647 - protein, 406 aa, unidentified
MKEKYIKFPIAVKRGCGMDVHKDTVVVTIMGEGLRTQTRSFKTFTNSLVKLKKWLKKHNITHIAIESTGVYWKPIFNVMGDEFELLLVNARHVKNVPGHKTDKKDSRWLAKLLLSGLLKASFIPERTIRELRELTRYKTKLTQQITSEKNRFLKVLEDANIKLSSVLNDVFGVTGTKIIDHILSTEDYKPEELLQHVHGRVKASGEEIKEALTGYITEHHRFMLEMIRTQISKIEETITKLEEKIDEKVAPYGKEVELLMSIPGVGRDGAIRIISEIGTDMSRFPSEKHLASWAGVCPGSNESAGKNKSGRITYGNKYLRSLLVECGWAASRTKGTYFNAKYKSLVGRRGKKKTIIALGHKILIASYFIIKDKVAYKELGEDHLNNFRRDRLIAYYQQQLERLMSA

SEQ ID NO: 225648 - protein, 402 aa, unidentified
MNAVGIDVSKSKSVVAIMRPFGEIVSTPFEIKHTASDIHSLIELINSVEGESRIVMEHTGRYYEVLAHQLLEANLFVSAINPKLIKDFDNDSLRKVKSDKADAVKIARYALDKWQNLKQYNVMDELRNQLKTMNRQFGFYMKHKTAMKNNLIGILDQTYPGVNTYFDSPARSDGSQKWVDFASTYWHVDCVRKMSLNAFIDHYQNWCKRKKYNFSQSKAEEIYGKAKELVPVLPKDAITKLIIKQAVDQLNSASTTVESLRTLMNETASKLPEYPVVMAMKGVGTSLGPQLMAEIGNVSRFTHKSAITAFAGVDPGVNESGTYEQKSVPTSKRGSADLRKTLFQVMDVLIKTHPQDDPVYQFLDKKRTQGKPYYVYMTAGANKFLRIYYGRVKEYLSSLPES

SEQ ID NO: 225649 - protein, 368 aa, unidentified
MKQITTYVGVDAHKKDLFIAMLVGDQTTPVTWQLANEPNAVRRLVRKLEREAPGPVQMCYEAGPCGYALQRQVTTPRVSCQVIAPALIPRKPGDRIKTNRRDARKLAELLRAGLLTEVRPPTPEEEAVRDLCRARDDAREDLQRCRHRLGKLLLRRGLHYSGRNWTRAHRQWIDSLEWSQPAERVVVDDYLLAIDHVEARLIEFDVRLTEIAQTEPYRTPVGWLRCFRGIDTLTAILILAELHDFRRFHTPRALMAYLGLVPGEDSTGEKHRRGRITRTGNALVRRLLVETAWHYQHRPGIGVALMRRRKGQPGRVIAIADKAQQRLCRRFRRLAEQHKPAPKIAVAIARELAGFLWAALQPAPAPAK

SEQ ID NO: 225650 - protein, 349 aa, unidentified
MTTMTSTATAVIGGVDTHADVHVAAACDQIGTVLGTASFPTTATGCRQLLAWLRTFGDVNLVGIEGTGSYGVGLTRFLLEAGVELREVLRPNRQVRRRHGKTDIIDAIAAARAVINGDAKARPKSHDGAVEALRALKIVHRSANKSRTQALNQIRDLITTAPDELRAELRGLRRRERLAVCAAFRPGDRDDLLAITKLTLRALARRIAELDEEIALLDARRRRITKAVAPDLVAAHGIGPDTATGLLLSAGDNPDRLGSERSWAALLASNPIPASSGKTKRHRYNPGGDRQGNSALWRIVMVRMANDPRTKAYVERRTKEGLSKPEIIRCLKRYVARETYALLPKQLLV

SEQ ID NO: 225651 - protein, 289 aa, unidentified
MKKSDCPTFLGIDVSKGSLDCCLYNGTDHKTRCFKSNKIATIQKIITHFKISPDSCRVVLEATGVYHSAAVVGFVKHGFDVVVENPLRIRSFSTMRNLLRTKTDPVDARTIAEYGFVNKPEPTKLKEAYQYKVLAKLKLIGFFRKLIAQNRNYLEAINNNSFECDAASLVTPIKNEIDHLKVAIRAVKKDVEKILIENCPELYQQYMSIPGIGPAVAGAIICYYGDFSGFSDSKKAAAFAGICPRVCKSGSSVDKQCSISKKGILCSERYSIWHLFQQPDAMTHARRPT

SEQ ID NO: 225652 - protein, 391 aa, unidentified
MSMYFVGIDISKYKHDCCIISAADQKLVSRFTVKNDKTGFEQLLTIFNSLSNPQDIRIGFESTAHYALNLELFLENANQSFMEINPVLIKEYKKSTSLRRTKTDSIDCESIARWLMTVEYKPHSKGFYHAYSLKSLTRLRDRLVRQRSFYLVKITNVLDHTFPEFKPFFHERLSKTALYLLENYGSAEKMARMNSASYEKLRSLSRGKFSPQQFIRLKELAANTVGVNNSIFDVELNSLLTLYKSLVKEIDTLETEINKLIEEVRPHYMSVPGIGAISAAVIYSEYGDISNFSTPAQMLAFAGIEPGVNDSGTESHGGRMVKHGSSGLRYVLINCCLPLIRFDMTFATYYAKKRGEGKPHRVAITHVAKKLVRVIYALEKQGVDFNAQKLR

SEQ ID NO: 225653 - protein, 378 aa, unidentified
MPSENIIHLAIELSVSSWLVAVRLPGAEKSRLHRITGGDTTALLALIAELRARASAKLGQAVEVACCFEAGRDGFWLHRLLTAQGIAAYVLEPTSILVNRRARRAKTDRLDAEGMLRVLAAWLAGDGQICSMLRVPTPEEEDAKRPHREREHLVQTKLRLENRIKALLFTQGIRSRPSLRSWERDMAELHTGDGRALPPLLRTELDRLRRQLVVILELIRELEAERAAAIEAAADDAMVQKIIGLQRIRGIGPNVAAVLVREVLYRSFANRRQLASYVGITPMPHQSGGMDRDRNISRAGNPRARTMLIQLAWLWLRYQPGSTLALWFRERVGALQGRARRIAIVGMARKLLIALWRYVETGVIPDGVEITIPEAATA

SEQ ID NO: 225654 - protein, 366 aa, unidentified
MEVTTIGIDLAKSVFAVSGADSRGRVVIRRQLRRAQVLGFMRGLPRCVVGMEATGGAQYWARQFTALGHAVQLMSPALVMPYRKGNKTDRNDADAILEAVSRPSMRFVMVKSVAQQDLLALHKVRAQLVKSRTALCNQLRGLLRERGVAVRMGVAALKRGLPAALADESSELSGEMRELLSEMSQWLGTLEQRIASCEARITRKFKHDERCVRLAEVPGVGPLTATALVAAVGNAQRFKNGRELSAYLGLVPRQHSSGGKTVLLGITKRGDRYLRTLLIHGARSALRQCKLKGDARSDWARRISAARGPNVAAVAMANKNARILWALLSRGDRYRSSRVLTRAVLRPGSPPPVKRARGAKLRVAKD

SEQ ID NO: 225655 - protein, 374 aa, unidentified
MLKTTFIGLDVHAKTVTAAALNADTGEIDQATMPADNPTVISWIKAHGDDTAVTYEAGPTGYGLARDLTDQGITCTVAAPSKLLRAPGDRVKTDQRDALGLARMLSLGEITAVRVPPIGQEGLRDVSRARQRAVLDLTHARQRINAMILRHALRYPKDTKWTQVHHDWLARQRLEPAASQQALSAELETETLLMAHVRRLDATIADLVAEAEETPIIDALMCFRGISITTGFGLAVEIGDWTRFTGATIGSYLGLTPSEHSSGQSRSQGAITKAGNTYARKLLIEAAWSHARPYSRPGARLLRQFDKVDAATRVRAIEGNQRLHRVWANFDARKKRRVKANTAVARELAGWCWSVAAPLQMNVTGPEGQEAQMG

SEQ ID NO: 225656 - protein, 413 aa, unidentified
MPDAYLFFVGIDLGSDRHQVHLIDQPGQTVAQLNVEHGGAGIRQLLEWISQNTNSAAPATVAVALEAPRGAIIDALLERGYPGFSINPKQLDRFRDRFSVAGAKDDRRDALVLAQSLRTDLPLFRALAPDDPQVLRLRELSRAEDALQEDARRTANQLWSYLQRYFPALLQLSSGADELWLYDLLRRTEALPHRAARLRRSQLQALLGRHHIRRFSAEELQQHLGNPLSLAAGVDRALAEQVLLLLPRLELLHQQRSDLARRIQQLLEDLAQDENFTEHRSVEILRSIPGLGRVFTATVLAEAFTPLVHRDYHALRALAGVAPVTQQSGKTCLVSMRRACNRRLRDATFHAAMIFMQKDPRARQIYASLRQRGHSHARALRGLADRLLELICLLLRQQTLYDPSLRALEQAAA

SEQ ID NO: 225657 - protein, 328 aa, unidentified
MNEATLPTLGIDISKDSFHLELSCHNKLRHRKFTNRQEGFAERCVWLVKHKAPQVHACLEATGPYSEDLALYLYQHGHRVSVVNPAQIKAFGQSELRRNKDDQPDAGLIRRFCEKQQPAAWTPLPAPVRELQALTRHLENLHETRQQQLNRLEGNKTKGVVKSLRKLVAYLDTEIARTEKQIEDHIDHHPDLRGRCQLLESIPGIGKRTAAKLLAEIDDISQYKSARQVAAYAGLTPKNNRSGTIRGKTRLSKTGNARVRKALFLPAMTAKRYNPIVRSFCQRLASHGKSKMQIIGAAMRKLIHIVFGVLKSGKTFDPNHELLLNSAP

SEQ ID NO: 225658 - protein, 411 aa, unidentified
MTKEDFIYVGIDLHKETHTAVMIDCYNNKLGEITFPNRPADFPKLVTKVKKCNTDAKEVVYGLENAYGYGRPLAVWLIDKGYFVKDVNTAISHRQAKHRGAMYRKSDSDDAEAIALATLNMLDKLPDACPNDAYWSLGQLVHRRDNIMKQRTRLVNQLHEQLHISYPSYKSFFNDISRPTALYFWENYPSRKYLKGKSVEDLRAELVPVSHNKCSTKTCEKILDAVASDKVKNNAYQDARDMVTLSIVSDLQHYDKQLAEVDKMLEQMYKMLGCTLTTIPGVNVITAVKILAEIGDIKRFSNANKLAQFAGIAPLHLSSSGKGKDLATKQGNRRLQATIYFLAIQMVQISSKGTPRNPVVRAYYEKRKAEGKTSQQALICISRRLISVIYGMLKNGTEYRMPVVENAGETV

SEQ ID NO: 225659 - protein, 349 aa, unidentified
MNKKLFVGIDFSKETFDAAILKVSEESSIDLKIIGNEQFKNDVPGCKRFVKWLNKTCALSGDYSSVLVGGEDTGNYSTTLPKQLYVLGIDCSVQNAYSIKCGSGKIVRDKTDKMDAEKIAYYFYRFRDQIRLYKPLSKDMESLERLYSYRYGQVRESARLQCQIKEYEHILKSEPNDETLKFMIQRLEEQERFLKEEIKTIEAKMVEMIEADEELNEIHECLLSIPGVGKITSLLLIVVTRGFTRFDNPKQLACFLGVSPHPNQSGTSVQNGNHRSWFADPYFASLLHMTALTASIHNPKFKAYDERLKSKGKPKLLIMNNIKNKLLTVAFTIATRRTKFYSDYDAKRA

SEQ ID NO: 225660 - protein, 409 aa, unidentified
MVPLSRMSTTSGEPQDGTLISKKRIGDDPAGFTALTELLTAAGDTAEDPIPVAIETPRGLMVAAIRATGRPVYAINPMAVARYRERHTVARAKSDHADAMTLANILRVDAHMHRLIPADAELTEAIAVLARAQQDAVWRRTKASNELRSLLREFHPVFLAAFADKSATNLAKPEARAILAIAATPATAAKLTRARVTAALRRAGRKRGIEALAEDIVDKLRRPGLRQPDQVEKAMGRQALALLATLDAACTGADDLEQAAAEEFRKHPDHAIITSFPGLADLTGARVLAEIGDDRRRFADARALKAYAGTAPVTRASGRSISITFRRIKNDRLAAAGWVWGFSAAANTGPAREHYLRRRAHGDRHSAALRHLVNKMLGQLFYCLQNGQEFDPAKAFGQPITTTPEPVAA

SEQ ID NO: 225661 - protein, 394 aa, unidentified
MYFVGIDISKYKHDCFIVTEAGEVIKDTFTFDNTRTGFDQFFSILDGLGPKNEIKIGLEATGHYMNNLMKHLSVKGYSFILLNPIIVSRFRHSETLRRTKTDKVDAKLIAQVIASKDFSSYPLQAYHFPDLKTLTRLRDRLIKQRSLYLVMLTNQLDLSFPEFKEFFDGRLKSKTAQFILTKYGISSRIANMNSQSFELLRKVSHGKFSYAKFAKLKELAKNTIGCSSEIDEMLFALTINLYQSIDEAITEVESKIIEIMEKLDSPTASIPGIGIMSAATIIAEYGDISRFANDGQMLAYAGLDCGRYQSGTSDFPGRMVKHGSGYLRQVLMNVAETCMIHMSSFYDYYLKKRNEGKSHRVVLSHIARKLVRMIYKLETSHTHFDLSVFNSQHQ

SEQ ID NO: 225662 - protein, 389 aa, unidentified
MKIFVGIDIAKLNHFAAAISSDGEIILEPFKFTNDADGFQLLVSKLESFDKNSIIIGLESTAHYGDNLVRYLVAELYQVCVLNPIKTCQMRKNNIRKTKTDKVDTYVIAKTLMMQDDLRFVSFYDLDMMDLKALGRFRQKTIKQRTRLKIQLTTYVDQVFPEIQYFFKSGLHQNAVYALLKEAPSPKEIASMHMTHLANLLKVNSHGHFTKEQAKELRVLAQKSVGANDSAISIQITQTIQQIELLDSQLEKIEAEMTDIMKFNDSVIMTIPGIGYINGGMILGEIGDIHRFSNPNKLLAFAGLDPSVYQSGNFQAKTTRMSKRGSRVLRYALVNAAWNVVRNNATFKAYYDAKRAEGRSHYNALGHCAGKLVRVIWKMLTDEVEFNLE

SEQ ID NO: 225663 - protein, 361 aa, unidentified
MESTPLIAFDQHAATTVAAVLLPGQRTPALHTLASDSPTILRFVKRLQRQGPLRCCYEAGPCGFELQRALVRQGIPCDVIAPALIPRRPGDRIKTDRRDAAQLAVLFRAGALTAIHIPTEQEEAARDLLRCREDIRADLLRARHRLSKFLLRHGRRFTETKKAWSKRHDAWLRAQTWPLPALEQTHRAYLRTVDEAVARLRAVEEDLRGLLDLAPLRPRVGRLRCFRGIDDLTALTIAAELGDARRFATAPSLMAFVGLIPSEHSSGTKQARGAITKTGNAHLRRVLVEAAWHYRHHPFVGDTLRTRQRGAPATVVAQAWTAQQRLHRRYARLAARGKPKQHVVTAVARELTGFVWAALTQ

SEQ ID NO: 225664 - protein, 388 aa, unidentified
MQIVADRAEAPTAIQTDLRAIFVSLELSRSIWLITSLSPGGGEKMSKHSVQAGDIAGLVRRFAYLKEKARTRTGRDFPIITIQEAGLDGFWIHRVLQSEGIESHVVDAASILTSRRRRRAKTDKIDGETLVRTLLAYKRGEPRVCSIVKAPTPEEEDRRRICRERKVLVIERVQHVNRIKGLLFAQGAFDYEPLKRNRRGQLENLKTGDSRPLPVNLKAQISRELDRLEVVLQQLKAVEAERDALLDQASEEPPAPAAMLSQLKGIGPEFAAVLYSEGLFRSFDNRRQVAAYAGLAPTPWQSGSVDREQGVSKAGNPRLRTTMIQLAWLWLRHQPDSALSRWFQDRVLRNGGRMRKTTIVALARKLLVALWKYATDGVVIEGAVMKPA

SEQ ID NO: 225665 - protein, 312 aa, unidentified
MEKLSYGGIDVSKERLDVVVLPEGRFFSVSNDAAGWAELAARLRPLAVSAIGLEPSGGYERGIIRALLAAGLSVRRINPNKLRQFARARGVLAKNDRLDARLIAEYVAIMPTRVVQRDDAVERLAEIVTMRRQLCDEHVTVENQAAHLEDAMLRRLSKRRLTRLAADIRLLDKRLAEMVATNAAFAQLYELLTSMPGVGPVLAFTLIALLPELGKMSRKQIAALVGLAPYDFDSGKLRGHRSIYGGRMPIRNVLYMAALSASRYNPALKAFSNRLADADKKSKVIIVAVMRKMITTLNAMLRDNAAWQPQSA

SEQ ID NO: 225666 - protein, 417 aa, unidentified
MIRKVMEVIHQCVGGLDVHKKMVMACRRRLLGDGQVESETREFGTTTLQLCGLSKWLSEWGCTHVAMESTGVLWIPVWNVLEGDFKLLLTNAQHLRKVPGRKKDVTDAEWIAQLMQCGLLKGSFVPSREIRQWRTLTRQRMKLVDQRTGVVNRLHKVLQQGNIKLSSVATDVMGVSGRAMTLAMIEGEEDAQRLASLAKGRLKSKHEQLVESLEGRLNDDDRWVMKELWEQMEYLEEEIARYDDQIKEKMSPYEESLERLMTIDLIERRSAENILAEIGPDMSFFPSDDNLVSWAGLCPGSEESAKKNRSGKTPKGDQWLRRALVEPAWGAARRKDGYLGAMYRGIAVRRGEKRAVIAVARTILQAAWHILSKGVEYNERGGDYFDRQNSEQTKNKLIRRLERLGYEVELKAKPAKV

SEQ ID NO: 225667 - protein, 525 aa, unidentified
MPRNPDTVSKVIHRRAERASQAERSEAVNNFAAMNFESHLRLAHDDAGRQARGRTRLRNPDPTRIEPRTPVGPGAFIKKSERTTPQEGHRIRTTQDKSHGPRASKTMSELNHWETISHYAGFDWAKDHHDVVIVSPQGQIVKSLTFEHSAEGWGQWKEIVAAYPRLAVAIETNQGAAIEQLLESGVAVYPVNPKSAERYRERKAPSGTKTDYLDAWSLADALRVDGQGWRALKPLDPLTHELRLVCRDEVELISQRTEWVNQLQAALQEYYPAALAAFDDWTVPASWSFLQQFPTPELLHQAGRRQWEKFLHAHRLYRPETYEKRLQIFARAHEFCGPAAVTRAKSRLALTLVKLLQALEKQLQEYRREIQRLFQEHPDHDLFGSLPGAGEKLAPRLLSEMGSDRSLFESAQALQCYVGTAPVSFQSGQVHQVYVRFMCNKSFRHAVHLWADLSRKFCSWAQIYYQQLRAKGKTHATALRCLGQRWLKILWKMWQTKTCYNPEFHLANQLKHGSWVLQVKSSKSL

SEQ ID NO: 225668 - protein, 354 aa, unidentified
MKRSTKYVALDVHQAMTVVAVREENGRIISRTILPTEEQAILEFFRSMRGSIHVTFEEGTQAQWLYDLLVNRVDRVLVCDRRGEKRHGSKGDQADADHLSELLRLGSLRAVYHGSPHLSTLKELTRTYQNVVEDSTRVMLRLKALFRARGIKAPGKRVYHPRNREEWMAKLPEDGVRFRAQVLYAQLDGLRELRPKAKAVMVAEARKDPAWEVLRTVPHLGPVRVALVLAIMRTPWRFRTKRNLWAYCGLAVVTHSSSDFVQVNGQVVRRKRAPMTRGLNRNYNRELKDVFKAAATAAIGRPGPLRDYYQARVDGGMREELARLTLTRKLVAVTLRLWKKGQPYDPEKLTVQAC

SEQ ID NO: 225669 - protein, 366 aa, unidentified
MQEISTMQASGSDNFKGRQVTIGLDLGDRSSNYCVLNATGDILLEDKLPTTSQAMKQLFGRMLRSRIAMETGTHSPWVSRLLTELGHEVIVAHAQKVRLIVKSRKKDDRIDARTLARLARIDPQLLSPVQHRSAEAQIHLTEIRARAELVRARTALVNSVRGLAKSYGERLRKCGTQQVGRELAMGLSAELRAALDPLLREIESLNEHIKEYDRRIEKMAKDTYPEVKLLKQVKGVGDLIALGYFLTIEDPHRFKKSRDVGCFLGLQPGRRNSGESEPQMHITKEGDRYLRTLLVQGAHYILGPFGEDSDLRRWGRKLSERGGKKAKRRAVVAVARKLAVLLHRLWVSGEAYEPLRNNQKTVSVAA

SEQ ID NO: 225670 - protein, 421 aa, unidentified
MNQQPDQPPLAACVGLDWADQQHVICLQATSAAAVETKRLDQKPHVLHEWIAQLRTRFGGAPIGIAIEQSRGAVIHALMMYDFLQIYPINPKALARYREVFHVSGAKDDPSDATLLLDLLRFHRPRFRPWLPDSVETRRLQFLVEYRRKLVNNRIRLTNRITSLLKMYFPQALDWAGSLDTLQACDFLQNWPTLTALQHVDVAQVRTFYVQHRCRHHNLIEQRLGEISNSHALTDDPAIIETLSLAVQADVTQLRAVLQGIARFDQDIARLSALHPDHELFESFPGAGPVYAPRLLSVFGQNRERWGSTFDFLCHSGIAPVTRKSGNSHSVHRRLACSRFVRQTFHEFAAQSIRYSSWARAYYEQMCARGLKHPTAVRALALKWIRIMYRCWKDRKPYAEDIYLASLRAKQSPLAKHLPDV

SEQ ID NO: 225671 - protein, 359 aa, unidentified
MTSMNHNQRRGRVVIGVDTHKHIHVAVALDDFGGVLGKEKFTADTAGYGQLIDWSMTHGHLLTFAIEGTGSYGAGLTAAVRRRDIGVVEVMRTDRRDRRLRGKSDFLDAENAARAVLAGHADAVPKTADGLVEMIRTIKVAKDVAVKARTSAMISLKAVLVNAPATLREQLQPLSKMALIHRCAGLRPGSMTTVEAATKHTLRSIARRWEQLNDEITAHEKMLAELTTTLAPQLCAAFGVGADTAAEMLIVAGDNPERVRSEPAWARLCGVAPIPASSGMTTRHRLNRGGHRQANAALYRTVIVRMQHHEPTKSYVARRTAEGKTKAEIIRCLKRLLAREIWSLMRPLRINPQTVESAA

SEQ ID NO: 225672 - protein, 430 aa, unidentified
MKSNTQNAKIEAITEKTLVLGIDVGSETHYARAFDYRGIEYSKKPFKFSNTEAGFVTFKEWILDLKEKHEKDKVVLGMEPTGHYWFNLGKFLQDNEMKPVLVNPHHVKKSKELDDNNPTKNDCKDPKVIAGLVREGRYMIPYLPDGVYADLRTASNIRFQLQAELTRIQNRINRWFNIYFPEYKTVYGKPDAKSGMLILKEAPLPEDILALGIDGVNQIWRDAKLRAVGKARAKTLIEAAEHSVGSKEGAVSARMEIRMLLEDYESRNMRLQEVMTLIEELVNQIPMAEKLLEIKGVGIKTVSGFLAEVGDISRFNNPKELQKLAGLALVENSSGKHKGKTTISRRGRKRLRYLLFEVAMSLVAKNPEFRELHNYYTTRRLNPLKKMQSLMAIAAKLLRVFYAMLTKGVDYDPKKMVSDIKRPAAYLQVA

SEQ ID NO: 225673 - protein, 404 aa, unidentified
MTESSDCESVQVFIGVDVGKDTHHAVAINRSGKRLFDKALPNDENKLRSLISDLKQHGQILLVVDQPATIGALPVAVARSEGVLVGYLPGLAMRRIADLHAGEAKTDARDAAIIAEAARTLPHALRTLKLADEQIAELSMLCGFDDDLAAQTTQASNRIRGLLTQIHPALERVLGPRLEHPAVLDLLQRYPSPEKLASLGEKKLAAQLCKLAPRLGKRLAADIAQALAEQTVVVPGTNAAAVVLPRLALQLITLRKQRDEVALEVEQRVLAHPLYPVLTSMPGVGVRTAARLLTEVACRAFASAAHLAAYAGLAPVTRRSGSSIRGEHPSRRGNKALKRAVVPVGLRRAQGSALQGLLHPQNESGKTTQSGAYRPGETTLRRSVRHDARRDFLYPAGVITCLTT

SEQ ID NO: 225674 - protein, 420 aa, unidentified
MKALKPEDFAVLIGIDWADTKHDICEMPIGGKSCQFSVISSKPKSIHDWARSLINRYPDKPVAVACELKKGPLIYALSQYRHITIFPINPSTVAKYRKAFTNSGAKNDPSDAFIQTEILEYHMDKLQPINPESPDVRALAQFVEYRRKLVQDRVDIANCITTTLKNYYPQVLDWFNEKDTLIFCNFITKWPSLIQVKKARKATLMLFFNQHNSRYPAVIEKRVADIKAAQALTDDLAVIEPNQMLVEVLISQLVLLIEGIKKIDKQIKQRYHKLDDRVIFDSFPGAGPQLAPRLLVAFGENRNRYGEATDVQKYVGIAPVTEQSGKKSWTHWRYSCPKFLRQTFVEWAGQSVRYSYWAKAYYDQQISKGKPHNTIIRALAFKWIRIAFRCWKNKTPYDESKYLNALKKRNSQLLKFAAGA

SEQ ID NO: 225675 - protein, 311 aa, unidentified
MNNTIGIDISKDTLDAHRLADGQHKQFLNGKTGHAQLVKWIGKQSDPLIIFEATGAYHRQLERVLCTHIIPFVKVNPKQARRFAQASGKLAKTDRVDCEMLAKMGAALQLMPKPFTAENLYDLRELLSARRALIKDRTAAKARKATVINALIKQQLEKRLRQIKNDIAKIDALMLDVAREDQYMSERLDILFSIPGIGVITALMILVDMPEIGALNNKQVASLAGLAPMSQSSGKWMGKARIQGGRPNLRNAIFMPALVAIRHNADLKTKYDRLVTAGKEKKVAITAVMRKLLVLANALLRDNRKWAEKAA

SEQ ID NO: 225676 - protein, 429 aa, unidentified
MNYTQNEKIEQVTDTTLVIGIDIGSQIHYARAFDNRGLELTRKVFSFGNDIEGFNTFNQWAEDLKIEKNKTDVLIGCEPTGHYWFAFAKYVTEHKMTLVMVNPFSVKKIKELDDNSPKKTDAKDPKTIAKLVIDGRYSIPYMPEGIYAEIRDLVYSRDRIVKQHNISANRIQRWLAIHFPEYLGIYTRFDAASGLVVLEKAPLPKDVIALGVGGIKKLWHDKKMRGRGVTEVRAKTLVDAAHNSIGLDGGAGTRSELYMLLEEHRLWTSQIEAVEKAIEEAVLKVKYVEKLLAIKGVGIITIAGFVAEIGDIRRFKSPKQIQKYAGLELVENSSGKHKGRSRISKRGRRKLRRILYQVMIPLLASNREFRSVYDYYVTRVKNPLKRRQAMVAVSCKLIRVFYAVLTKGMDYDRFKMMSDIHRESNQIVA

SEQ ID NO: 225677 - protein, 359 aa, unidentified
MDVRDPAKRHVVGGVDTNKDLHVAAVVDERDRVLGSQSFATTRQGYRQMLAWMGSFGEVQRIGIEATGSYGAGSLRFVQTVGIEVLEVTTPDRHDRRRRGKNDDLDAQNAAHAAFAGQRTVTPRSRDGMVESLRVLSACRKTAVAARRVALQLIQNTIVCAPDGLRDVLRSMTRMLLIRTLAAWRPDLTAYRDVEAAYRITFKSLARRYLELHDEIADLDIMIGAIVDELAPDLVARNSIGHVGAAQLLLAAGDNPNRLRSEASFAALCGTSPVPASSGKTVRHRLNRGGDRHANSTLHIIAIGRLRTDPKTKTYVAKRVAEGHSKLEAIRALKRYIAREVFTLIMRRYKTINQTQIAA

SEQ ID NO: 225678 - protein, 474 aa, unidentified
MTTNISNRLSTRVLAHFNEFSGNRALTFSIIFSREQAAGSIRSIKINGLQSNMTPDNYVAYIGIDWADRKHDIALYDCASGTWQESIIQTRPQDLLDWVNQLRARYGEGRIAVGMEQKRGPLLYALCQYDNLVLFPINPRTVANYRKAFQPSRAKSDPVDARLLVELMQKHSDKLELWVAGCPKTRALRQWVESRRMLVGEKVRLTNRITASLKSYFPQVLDWFEDKDTLVFCEFIEQFPEVNAAQAATPKQLTQFFRSHKVIRKSAINRRIQQIQDAGPPLTNDAAVVVPAQALTRALVALLKVILHQLTDFNAQIAALFETLPDAELFSNLPGAGPHLAPRLLVAFGAERDRFTSAQAFMSYVGIAPVKEESGKKRWVHWRWSCPIFLRQTFIEWVNQARRFSPWSQAFYQQQKRAGKTHQKSIRALAYKWGRILWRCWQDQTAYDEEKYVSALRRKKSPLVKLLAVEATDF

SEQ ID NO: 225679 - protein, 276 aa, unidentified
MNNTEHATKSVVGIDVAKDNLVLFIDSRREHLTCPNTGKDLSRLAKRLKKLDPELIVLEASGGYEKAAAAAFSAAHLPVAVVYPRRVRQFAHGLGLIAKNDEIDARLIAYYGRVAEIKPQPRQTDELCGLRALTQRRTQLIEMHLAEQSRLDTAHQSIHSNIKQHISWIERQILKIDGQIQTSIKADPHLNETDSRLRSVPGVGPVLSYTLITELPELGILSNKRIASLVGVAPFPRESGRSNGKRFCKGGRNQVRRVHGHCLRHPFQPGYQSLLQ

SEQ ID NO: 225680 - protein, 315 aa, unidentified
MENRVDNYIGIDVCKDWLDVDGYPQSYRRRLPNDEAGHVALVEMLAPLAPKCIILEATGGMEFQAASALARAGMPVFIVNPRQARDHAKALQLLAKTDQVDAFALARFGEGVKPTPRPLKSEELCRLEDILTRRRQLVEMVTSEKNRRAKAVGKIAKEIDEHLEWLARRIKGADTDLSDAIKRSPIWQAKSDLLSSIPGVGKVTVNTLLAELPELGQLNRREIAALVGICPFNRDSGSHRGKRRIWGGRASVRSALYMAALVATRYNPIIKAFYQKLLAAGKLKKVALVACMRKLLTTMNTMVQKNTHWRTAAEG

SEQ ID NO: 225681 - protein, 412 aa, unidentified
MLYVGIDWSDGDHKVYCIDDKETCLDAFVIPHSPEGVSELFQRIEKCAHDVKEVLFALEKPSGLLVDAILDKGFPLYPINPKAVDRYRDRYKVSGKKDDFFDARVLANILRTDRQNHQPLVPDSVVTRHLKILTHQYEGLSRLKRRILNQITGTLKDYYPVALEVFNKIDQKVTIDFLKKFSTPDRFSQLTRETMRKFLKKNHYPGIDQKTEEIYRLSQRPHFKVEDFVVESKSLYLLSLLSQLEHLLVSLKTFEEKMSQLLEQHPDKDIFLSLPGSGEITAAKLISEFGDHREKYPKVSCVQEIAGSCPVTEQSGKYKRVYFRRACRKTFRNAVSQFSFCSLKESTWARERYKRYIQSGKKKTHAVRCLGNAWLEVIFRMWQDRSTYDEQKHLKIVKEQFQEDFLPVSLSC

SEQ ID NO: 225682 - protein, 398 aa, unidentified
MKVSGLDVHKDTIFCAIYNGKTPGEVKEFLTLTACIREMGSYLQEAGVEKIAMESTGIYWVPVWNILEEMGFLLMLVNPYLIKQMPGRKSDVKDAQWIAMLLHKNLLRGSLIPCKKIRELRTFSRKYIKLQRRMTSVLQEIERTLEMCNIRITSFVTNIESKSVLKVVKQLVQGEVSPDLLAQCIHGRIMNRHGKKIRQSLEGFIGEHHRFNLELLLEEYELLLHHSDRCEEEMYKLCSEQYHQELELLQTIPGIKRLAAMLIIAETGADMKAFENSGKFTGWTGLRPRNDESAGKFKSTAITKGNRYLCSLLVQAAWAATRTKGSFFQVKFSRLTIRKNRNKALIAIARKVAVIIWNMLYYKQSYNPDLIPIYEPEKLQAKMNYHQKEFDRLQQLLH

SEQ ID NO: 225683 - protein, 413 aa, unidentified
MEVWLGGISCLISEGGARMYSLLVGIDVSKDFFATAGIDFEGKESISRSYSMDSNGFDDFLKTIRSHCEDLSRVMVAMESTGCYHINLFSFLASQGIRTMVVNPLLIANFAKLSLRKTKTDKKDAMTIARFLMDHHEEVSHLSLSQDHQDLRDLSRERESLCHLMAATKVEIKRVLRTIFPELESIGNLYTGAMLRFLQQYPSARLVRGAKPKAITKALKQPHVGNKLTYSAEDILGAAKSSIGTVSPAKEIILQGKIATLLHFQERLDEMTKLLTDLCKATRIDDLKILRSIKGVGLKTAAPFLAEMGEVQHYASHKKLIAFTGIDPSLHQSGNYIGMSKLSKRGNRHLRRAVYLMTAAVASKNPFFKAYFLKRKREGLPPQKALFATAHKLIRVIFAMLTQRTYFNPKEVI

SEQ ID NO: 225684 - protein, 339 aa, unidentified
MLHIAVDVGSAKSQVCVREPGGEILEEGTWPTARLAERLQGYAPSRVVLETCAEAFAVAEAVKRAGHEVRVVPATLVRTLGVGSRGVKTDKRDARILSEVSCRIEVPSVHIPSAMARELRMLCTLRDAMVTSRTKLINSVRGYLRGRLIKLGLGGSKTFHSRVRKKLQGAEEGIPIAVDRLLCAIEQLSIQIEAATQELDLLAAGDPTCQRLMTAPGVGTISALRFFAAIDDIGRFPSHSAVQSYLGLTPGEHSSSERQRKTSITKAGSAPVRSTLGQACWCAWRSQPDDPLVHWAKKLAERRGRAIAIVAMTRRLVGILFAIWRDGTRYDPAKVGAKM

SEQ ID NO: 225685 - protein, 345 aa, unidentified
METMYYIGLDVHKKTIDHCVKDSSGRIYAAGSIPSTRLALDMWMKTLPRPWTVAMEATIFTAWIYDHLQPHAAAVKVAHPLMLRAIAVAKKKNDRIDAKKIADCLRCDFLPECYMASTEIRERRRTLRYRNLLVRQAVQMKNKIAVLLMEAGVSYNKQKLHKVGYFRELLATNQDIDEGLKPLLRLCRETVVRLGKTESALVRSLERDSLLVERVERLMTIPAVGPITALTWALEVGDVQRFSSIKKAISYCGLCGAERSSADITKRMPLSKQRNKHLQTVLIEAAKMAPRNSPELAMVYEQEKQKGNANRATLAVARKMVAYLVAVDRRQKGFLVVERENRTAA

SEQ ID NO: 225686 - protein, 321 aa, unidentified
MTYVGIDVSKATFVVAYSSAKNSKTKTFKNTTKGVHEFIQTLSANEHHCVLEATGNYSSLLVYLLSQANITVSLENPLKIKNFARVMLSVTKTDETDARLIALYGERMQPAPYKLRSDAILTLKQKRTVIRQLKKQLIATRNLKGSMEALPFFDPKCKKAIEKTIVFLEKQTKGLEEELAALAQSEYKKQIDLLTSIKGIGVTLAAALIMATGGFTYFDNAKQLTRYLGLSPTYQQSGTSVNVKGHINRNGDSSLRGQLYIAAMASLRCNAECKACFDRLRSNGKPGKVAVIAVANKLVRQAFAVVTQEKPYVDGFKSEKP

SEQ ID NO: 225687 - protein, 334 aa, unidentified
MKSPIATATTTALGIDIAKAKFDVCLIRSSGKAKHKVFANNRHGFEQLIRWLDSHQVSQLHACLEATGTYGEPLALFLYDAGFVVSVANPAAVRAFANAGLSRTKTDKVDAELIARFCLAQQPAAFVPPAPELRELQALVRRLESLIEMRVMEENRLSAGGLTEAVSHSLDEHIRYLVEQIKQTTRLIRQHINNHPDLKQQSDLLDSIPGIGETTAALLLAEIVNIKQYTSARQVAAYAGLVPRERRSGTSVRGRVCLSKIGNARLRKALYFPAITALRSSDFFKAWAEPLRTRGKSKMSVIGAAMRKLIHLAYGVLKTGKPFDPNWTKMTEVA

SEQ ID NO: 225688 - protein, 424 aa, unidentified
MKVTYQTCCGVDVHKSFLVATSVKTTGGIEPSYQKKRFSTFNSSILEFKQWLLDNDCHDVCMESTGKYWVPVFNLLEDEINVVIANPKWVKAVKGNKDDTKDSKWIGDLFRLGLVKGSYIPCKIVRILREYTRYRYKLVSCRSSEKNRYQNTLTVCNVALDSVVSDIFGKSSMSIIDYLLEQSGTSINHEEIASKLLRSLKSKEDAVIESVEGYQMTDAQKYRVRLVRAHMDYITAEINDVDKMIENMIFSNPDFENAVQFLCTIPGVKRDSAITIISETGTDMSQFSSSKRLCCWAGLTPGSNESAGKKKSVRITRAGVYLKPALVQCAHAAVKSDKSPYYKKKYESLVKRRGKKRAIIAIARMILTAIYQMLSTGEQWNPSDLYKIDMPVALVEKQKAKAIKQAKKLLQREGILPPDEPLAS

SEQ ID NO: 225689 - protein, 342 aa, unidentified
MDEYDGRQFVGIDLHRQRSVIVRQSESGDQLSAVRIVNDPAALRLELERAGTDPEVVLEATYGWYWAVDVLRDCGAQVHLAHPLGVKGFRYRRVKNDVRDAGDLADLLRMGRLPEAWIAPPQTRELRELVRYRAKLVAIRSGLKAQVHAVLAKAGVLIAVSDLFGVGGRQRLAKVPLGAAYAERVRSLLELIDVLDGHEARFAGLIAKRLCNHRGYQALQQVPGIGPVLAAVFVAEIGDVHRFTSPAHLCSWAGLTPKHRESDTVVHRGHITKQGSKLVRWAAVEAIQRYPTTSKIALDRTRIESRRGKNIAKIAAARKLLTLVYYGLRDGHIRALDRPRAA

SEQ ID NO: 225690 - protein, 342 aa, unidentified
MEQVSVVGLDLAKSVFQVHGVNAHGEAVLRRRLTRGQLLKLFEKLPPCLVGMEACASSHYWARELTALGHEVKLMPPQYVKPYVKRGKNDAADAEAICEAVTRPTMRFVGAKSPDQQATMMLHRVRKILTRQRTQISNALRAHMAEFGITAAIGRGGLDRLIAVIADQDDARLPDEARACLAVLCTQLDMIKEQILDNDRRILADARKTEAGRRLMMIPGIGPLLASAIVACVPDPSTFDSGRGLSAWIGLTPRQNSSGGKERLGSITKAGNTYLRELLVVGAMAVVRRAKQSSTKWPWVAQLLERKKPKVAAVALANKNARIIWAMMATGEPYREPELAAA

SEQ ID NO: 225691 - protein, 417 aa, unidentified
MIDDVQWFVGIDWATQSHRVCLLDVEGRHVNERDFAHCGAGLTELRDWLLEKTKAAPEQIAVAIETPHGPIVEMLLDHAFLVFAINPKQLDRFRDRFTVAGAKDDSRDARVLGGSLRTDRQAFRQLVVDDPLVIELREWSRIAEELKQERTRLANRVRQQLWRYYPQIIELTDDVADDWFLALWQQVPTPATAAKVSEKTITRILKDHRIRRLDAATVLQTLRQKPLFVAPGTTEAARAHIRTIAARLHLVNQQIKEAHRALDGLCAKLEARESPSGQNREQRDVTIIRSWPGIGIIVLATLLTEAAEPLRARDYHALRALAGTAPVTRRSGKQCFVIRRHACSGRLQTAIYHWSRVAIQHDAVARRRYDALRRRGHGHARALRSVGDRLLYALCTTLKRQTTYDPNCQTAQITASL

SEQ ID NO: 225692 - protein, 361 aa, unidentified
MRIIGCDLHARQQTLAMLDTETGEVVNLTLMHEGNEVREFYAQLPRPVLVGIEATGSMHWFLNLMDELGIECRVGHPATIRAAEPRKKKHDRRDAELILKLLAENRFPAIWLPTKELLDLRALVLHRHQWVRIRTRIQNALQAIALANGLRRGPGLWSYDGQAKIAFLPLLPHASYRRSMLQEMYRKMEKEIENLTQRVTEQAGQRCRARLLMTHPGVGPVTALATEVFLGDPRRFVDGKALASYVGLIPREYSSGGRQRLGGVTKQGSPLLRFLWCEAGAHAVRRDPELKRFYRRKLVQKGLGKARVAVARKLGIRLWIMLRDEIDYQEFCRRGQKQQSGAACAGMPETPNGANRHRPVD

SEQ ID NO: 225693 - protein, 404 aa, unidentified
MFYFGIDWSARFHVLCIRNEAGARISQIRFEPTPLGFDHIEAERRKLQAPATECLVAIETAANLVVDYLLDRSYPVYIVPPQATAAYRNRQHSSGAHDDDSDAALLAGILRTDRASHRQWQPNSALTQQILAQVRLIESLRRSIQRQANQLRAVLNRTYPTALTLFSDLTTQITLQFLSAYPTATEAQALSQAAFEAFCREHDYRRTDKLASGYAQLLAAQPGAAPAVAQAYRNQVRSLAEVLLVQVRCQAQAGRELAQLLAAHPDAFIFTSLPGAGALLAPALLAKFGDERARFLTAGEVQALAGTCPVTKRSGQRTHVQFRKGCDREFRRISQQFARASVSESGWAAAYWAEIRPDCDSDSHAYRILANRWLAIIWKLWQSRQAYDEAYHLQQRALRRKPRQ

SEQ ID NO: 225694 - protein, 433 aa, unidentified
MKVMYEHVAGIDVHKEMIKVAIRSPGDKPWTRKTEIFEYRTFYGVLQEMARELRRRGVTHVVMEASGVYTEPVYYALCEQDFTEVAVINPAHAKALKGHKTDAKDCARLAELFECGLLRGSYIPSAEQKEVRDLTRYRTKTVQARTSEIQRLAKALESAGIKLGSVASEITGKGATAMIEALIDGERRGGVLADLAIGRMRSAGKLADLSMALAGRFTGHHATLCRLHLDRIKVFDDAVDGLDGRIAAGAARWQREAGLLKSVPGFGDVVSWAWLAEIGPAPHKWFSRHEKLASWVSLCPGNNISARKRKHGRTGDAGTYIKPVLIQAAWSAIRVRGRLQARYNRLVRRFGGQKNPAAKKKAITAIAHTLLKIAYQVLKTGTPYQDLGADFYTRRNSPEEQQKYLERQLQKLHPGCTITITISPPEAALPPGR

SEQ ID NO: 225695 - protein, 405 aa, unidentified
MQVHFVGLDVHKQVIAFCIKTPSGEIVREGTVLARRESLDQWVATLPGPWHGGMEATMFSHWIYRHLEPHAAKLEMGHAARMKAITAGKKKSDKIDARTIADLLRCNLFPACFVISPELGALRQQLRFRGLLVQQRVRFKNKTAGLLMEAGVEYQRSRLHGQRYFQDLLQHNAEIGEHLRPLLEFNHREIQTLRRMDRQIVVRLQQHPRLQARVEHLQTIAGVGQITALTWALEIATPQRFASIKHALSYCGLTSALRESAGRQMRSPLSKQRNRHLQSVLIEASKLAPRCNALLREVHRQALQKGAHKNRATLQVARKLVAYLLAADSRFQRAGIVSRGSSRRLTILSFGCRCKQVPARPPWNRDRQATPVAMPLLYCFEAGGFASNQASGRARSGPIQLRDVW

SEQ ID NO: 225696 - protein, 300 aa, unidentified
MKTMTKQLQGEELFVGIDLHKRRWHVTIRVADVEIFSSSIAGRWQELEKVLNRYNGCRINAVYEAGYFGFWLFDHLTNFGVECIVTPPSLIPQEHGNRVKTDRLDSRKLARLLAKGLLKSIWVPSAKERFHRQVIRRRRQLVGDRVRTQNRIKSELCFYGIDLPAPHGQWSQVYFANLQRIKFNNRWMQQSFNQLLEQYEFLCAQIDKQTQLLKQLSQLPLYRDRVKILRSIPGIGILTAMEILLELQDVSRFRRAEQLAAYVGLTPSQYSSADKIRMGRITGHRTYGIGGILLALDKER

SEQ ID NO: 225697 - protein, 450 aa, unidentified
MGSNYAGVDWASEKHDVLVADETGERVLAATFAHDEAGLRSLCRTLVRLKVQLVAIERPDGLLIERLLDAGLGVMAIHPNQVAAARPRFRVAGGKSDRFDAFVLCELARTDSHRFRVLVPDSDETKALRALTRAREDLVETRVGLSNQLRAELERFWPAATEMFADIDSPISLAFLERYPSPLDARGLGEKRLAAFLARHGYSGRRAPTDLLDRLRAAPEGRAGAQETEARRAIVLALVAAIRPIVAKITELTAEIAHRVRAHPDGEIFLSLFKNPKSVVTAATLLAEIGDCRERYPTPDALAADAGMTPVAVESGKKKVATFRYGCDKRLRAATSTLADATRHWHPWAQDRYAQTRARGHDHPRAIRGLGRAWCRVIWRCWQDGVPYDPAKHRGLQQHITVTIPSPSGPRPDLAATQRMAGAAVTETAAQRAQRETLDGKPTPATHPRG

SEQ ID NO: 225698 - protein, 395 aa, unidentified
MRETLRGAGVEGLPLLSAVVAMDRLPEISPTHTRTSVDKESSGIACNRLDRRLDREVTPVCGHPSTHTLALGDKRMQTTLATPLYIGVDVSKDTLVSCGHGSGVRCTLANQRRAIEAWLERLPAGSRIGMEATSVYHELLADLAHRKGMLVYVLNPKDVRHYAKGVGTRGKTDRVDAALIARYIAHEQAKLHAYRPASPEQRRLQRLLSRRAKLSRARASVQQSLQGLAGLKGPLRSLLERFDALIAAIDARIRELVGACPQRQAACQRLRSIKGVGPLVSPALLSALQHFVFQSADSFVAYTGLDPCADDSGKRSGRRRLSKHGPSELRRLLYLAAMAAVTSPAWKPLYQHHLAKGLSRTAALVIIARKIARTAWSVYTYNTTFDPKRLTSGLT

SEQ ID NO: 225699 - protein, 344 aa, unidentified
MTLVGCDLHTRKQQVAALDTETGETHERQLVHEGSAVEEFYAALPRPVTVGIESTGYAIWFHALMHRLGHTVRVGDAAKIRAMVVRKTKTDQRDARHLLDLLRHDRFPTVWVPDPATRDLRALLTHRRRLVRIQTMLKNGLHAIALNERLVCGSKLLRHAGLAQLQALPLPPYTAQRRDHSLELLELLHTKIQQLDGAIATATLAHPDAPRLLTHPGVGPLTALATVVVLGPVTRFADAKHVVSYVGLAPSLNASADKYRLGHITKQGSSLLRWVLGQAAPHAARLDADLSRTYGTLRHRRGRAKARVAVTRKLLVRLFIMLRDQIDYAEFRRRGRPPAPVAAG

SEQ ID NO: 225700 - protein, 389 aa, unidentified
MKIFVGIDIAKLNHFAAAISSDGEILIEPFKFTNDADGFQLLVSKLESFDKNSIIIGLESTAYYGDNLVRYLVAEFYQVCVLNPIKTCQMRKNNVRKTKTDKVDTFVIAKTLMMQDDLRFITFFDLDMMDLKALGRFRQKTIKQRTRLKIQLTTYVDQVFPEIQYFFKSGLHQNAVYALLKEAPSPKEIASMHMTHLANLLKVNSHGHFTKEQAKELRILAQKSVGANDSAISIQITQTIQQIELLDSQLEKIEAEMTDIMKFNDSVIMTIPGIGYINGGMILGEIGDIHRFSNPNKLLAFAGLDPSVYQSGNFQAKTTRMSKRGSRVLRYALVNAAWNVVRNNATFKAYYDAKRAEGRSHYNALGHCAGKLVRVIWKMLTDEVEFNLE

SEQ ID NO: 225701 - protein, 417 aa, unidentified
MRIVGFDCAEDEHSAALLDASGEFERGLDVINERGQIQESLAELMLAVGPEAELVVVVESKRSHGRVVADVAVELGCEVWQVNTVALNHFRDLEGQPRKDDEWDAYLGARMVYLRMGGCRVATQTTEEERVLSRLIRVYSRVTDDRKQQIARLRAVLLELAPETLHAAWKGPQPGSKAMLYLLERWPGLEGLDRAQLRSIEKILHTCRYGSKARHVAKLIRKMARGISVGPEERRAFTMELNVLVRKIRVCNESANQVYAEIAHRVEHHPVGQKLLEMHGIGPVIAGVLVSELLPVARTSTEPKCATYSGVTPLARKSGKNLDNDRLTQGVNKRVLHALYTSSVVAIKNSAVDRAYYNKKLRDYAGHPKPHVAAFIALSRQRHKVVFKLMTTDARYDKETLIARHLDRLEETRAAAA

SEQ ID NO: 225702 - protein, 420 aa, unidentified
MPNIEIGVDSMVKENFIYVGIDLHKETHTAVMIDCYNQKLGEITFPNRPADFPKLVTKVKKCNTDAKEVVYGLENAYGYGRPLAVWLIDKGYFVKDVNTAISHRQAKHRGAMYRKSDSDDAEAIALATLNMLDKLPDACPNDAYWSLGQLVHRRDNIMKQRTRLVNQLHEQLCIAYPSYKQFFNDISRPTALYFWEHYPSRKYLKGKSVEDLRAELVPVSHNKCSTKTCEKILDAVASDKVKNIDYQDARDMVTLSIVSDLQHYDSQLAEVDKMLEQMYKMLGCTLTTIPGVNVITAVKILAEIGDIKRFSNANKLAQFAGIAPLHLSSSGKGKDVATKQGNRRLQATIYFLAIQMVQVSSKGTPRNSVVRAYYEKRKAEGKTSQQALICISRRLISVIYGMLKNGTEYRMPVVENAGEK

SEQ ID NO: 225703 - protein, 409 aa, unidentified
MRYYLGVDWADQTHAVWVVDASGAKITARAVAHTAEGLGEWGRALDEWRAQGIDLWAAIERPDGRVVDFLLDHGVVVYPVNPKALDRARDRFRQSSAKSDPFDARVLADFLRTDHTHLRALQPSSEAAQELKLLTEDCQRHIRQQTRLVNQLTATLKAYYPRALEVAEVTSALAREFLPAYPTPAAVTALTERQWQRWARAHGLSAARAGDLWAVLRQPHLPVPAHVVRAKARLMQALMEQLMPVVTAVAQYRKAIDDFFASMPAARWARTLPIGKHGITAPTLWARLGDAPGRWESFRHLQAHAGAVPVTKRSGKQQVVHFRFACDKALRHVVDQVAFLSLLSSAWARAYYDQQRARGHSHRQALRALGAKWLKIIFVMWQRQVPYDEQYHLATMTRQQLQRGQKQIA

SEQ ID NO: 225704 - protein, 346 aa, unidentified
MMIIGCDFHPSWQQVSWLDRETGETGERKLVHAEGDAERFYRQVPAPALIGMEATGNSHWLVDLLAEIGHELWVGDAAQIRASYVRQQKTDKRDAAHIMKLLAEGRFPRIWMPSSEVRDLRQLLLHRYKLVIIRTRVKNELQHLCLNRGVQRKRKLWSQAGQKLLRELPLQPWAARRRDDLLRLMAMLDQQIDPLDAAVKAEALRDKMALLLQTQPGVGPVTSLAYVLTMGDVSRFPRGKQVASYLGLIPREHSSGGRQKLGSITKQGNRMLRMLLVEAAQTTVRLDPGFRKQYLHRCHQKPKAVAKVVAARKLAVRLYWMLRTQTRYPEIVRIESSPRVPLVGAS

SEQ ID NO: 225705 - protein, 531 aa, unidentified
MRPKNSSKSAGSKASKKSRSKHAEFLQKPRGVVHPRVQAVGGPQFFGVVSVDCAKARSKWMLADFYGNILIPPTEVSHNRVEFELAIRHVREALATHGIKDCLVAVERTGRYHHPIKNAFRAAGFEVRLVHPFATKQFRQPADPGNKTDDTDLAAIHRAAVAGFALLEAIPTEDWRELQLLIRQRRDLVRKCSALCCQIREHLDAALPGYAACFDKLWDSNVAFRFVRRFASPAEFVEHGVTGLCQYLRGEKVRFQKRTVDVVIEWAQNAAAPDLAAVRHRTIALALEDDRSRKNQEIRDLEREIAHRLAKTPYVLLMSMPGINVVSAADFAGEMGPIENYANPKAITGRAGLFPSRYQSDRVDRAKGPLVRRANRALRAAIMGIADNLILCNIHFRNLAAAWKLAGKDARHSHVKVASRFCRIAFHMVAGRQVFHHPSIRERSYILDKLLAFHVERQTPMKEILADLYEAADQVPKKDRAAEAQKLIDTSRASRPRGKTGPQPLSELIVLVLARLGVGLESKPSGEKDPT

SEQ ID NO: 225706 - protein, 344 aa, unidentified
MDHFGGLDVSVKETSICIVDDTGRIVKEVKVASEPAALLKVLGNPTYRFKRIGLEAGPLSQWLFSALAEAELPVICVETRHMQAVLKAQINKTDRNDARGIAQMIRVGLYRPVHVKTLRSQKLRMLLTHRKLLQSKAIAIENDLRGTLRNFGLKVGMVGKVRFEARIQELVENIPDLAVLVEPLLIVRRVLREQIVILHRRLLAIVREDEVCRRLMTTPGVGPVVALTYRATVDVPARFRKSKSVGAVFGLTCSRYQSGEIDWSGKISRCGDEMMRTMLYEAAQSMMHSKKWSWLKAWAMQIARRRGMKKAIVALARRLAVIMHRIWVDGTEFRWTREQAAAAA

SEQ ID NO: 225707 - protein, 351 aa, unidentified
MLIIGCDFHTRFQQIAMMDGTTGELVKRRLEHGTGEAERFYAALAAPARVGIEATIATQWFEKMLTRYGHELWFGDAAEIRAAMVRKQKTDDRDALHILDLLMQNRFPRIWVPSAAERDVRQLVRHRHKLVRLRTSVMNQLHALAMGQGVCLRKKLWTRVGRQKLESLQLDPWASRRRRELLELLDRLDPSIEELNRAVISEAESRPTAVCLMQQAGVGPVTALAFVLTVGPASRFANSKKLVSYLGLNPSEESSGGRQRLGAISKQGNTMMRSLLVEAAQTASIYDPELRRDYQRLKFRRGHSGVAKVAIARKLAVRLYWKLREAARPAPLARMQGSPASPVVGESLSSY

SEQ ID NO: 225708 - protein, 342 aa, unidentified
MEYYAGIDVSLEYSSRCVVDGTGKIVREAKAASEPAALIAWFGSLGLGLTRIGLEAGPLSQWLYLAMKQAGLAVELLETRHVRDAFKAMLVKSDRNDARGIAQLIRLGWFRPVHCKSMDAQEVRAVLTARKLVQTKLLDVENSLRGILRGFGLKVGKTTDRSFATRIQELVKGHPNLEAIGEALLSVRAILLREFNAFEKRVRAMSRLNARAKLLMSTPSVGPIVALTYASAIDDPARFKSSKQAGPHFGLTPKKYQSGETDYSGRISKIGDAAVREALYQAAHVMLTRPIKGCSELKSWAMRIARRAGMSKAKVALARKLAVILHRMLANATPFNAAAAAA

SEQ ID NO: 225709 - protein, 335 aa, unidentified
MKLQFFIGIDISSDVLDFCVLSHSEVILEIQIKNSLKALKRLIKDLRRLGVNAQNSWFCAEHTGVYGNNLRLVLEAEQLVYSMVSATEINRSIGLVRGKNDRVDAMRIAEYCMRFNDKLKPSKLPEQTIIELKQLFSFRKQLVKTRSALKNHSKSMRESLASDSQKLIIKQAKKQIRELDKLIASLELKMKQIIDENEAINQNYKLLISVPGIGLMTACYMTICTENFQLFTNARKFASYAGVAPFEHRSGSSIRGITKTSKYRNKQMKTLLNNGMTAIIGGKNELADYYRRRIEEGKHKNKVKNAIVFKIITRAFSVIKRQTPYVQLDRYKFVA

SEQ ID NO: 225710 - protein, 410 aa, unidentified
MELLFERVAGVDIGKASLTACVRTPGPRGRRGEVRTFATTTRALEGMRDWLLSCGVTVAAMESTSTCWKAPFYCLEEVMEVWLANAAHIKAIPRRKTDVRDAEWIAQLLECGLIRPSFVPPPDIRRLRMLTRYRVQLMGDRTREATRLELMLEDASLKLSVVASSLTTVSARAMLNALIAGERDPAVLAELARGKMRAKIPALTEALTGHFDAGHAQLARSMLYRLELVEDALAELDAVLATAFTPWAHQLELLQTIPGVGVKVAQVIIAETGADMSRFATAAQLAAWAGVAPGVHQSAGRHTAVGTRPGNKWLSAMLVEAAGSVGRMKGKNYLAAQHARLTARRGMSRAQVAVAHSILVSAYYMLLRDEPYRDLGADWLAQRNDEAHTRRLVAQLEKLGHNVTLDQPAA

SEQ ID NO: 225711 - protein, 419 aa, unidentified
MTPHKDYVLEPCPPAPMPLLPPSPVLSEALQVYHPHAAGIDIGEAEHWVAVPPGCDPQPVRRFGTFTADLDTLADWLIDCGVTTVAMESTGVYWIPLFELLEARGVQVLLIDPRQAKRVPGRPKTDRLDCKWLQRLHTYGLLAGAFRPEAHVCVLRSYLRHRQMLLTYAAHHIQHMHKALEQMNLKLTQVVSEITGVTGMAILKAIVAGERDPQHLAKLRNPHCHHDADDIAKALQGTWRAEHLFALRQAIELYDFYHQQMTQCDQQIKAHLATFDDKSAGQPLPPKARRHKKTNEPRFDARTPLYRLAGVDLTTIEGIEEGTALVILSEIGTDMHRWPSVKHFCSWLGLCPQHKISGGKVLSRRVRPGAHRVTVALRLAARSLHHSQSALGAFFRRMKARLGTPKAITATAHKLARLV

SEQ ID NO: 225712 - protein, 342 aa, unidentified
MSEIITVGLDLAKNVFQAHGADASGRAVLRKKLRRHQVLEFFGQLPACVVAMEACGGAHFWGREIGKLGHDVRLIPPAYVKPFVKRQKNDAADAEAICEAALRPTMRFVPVKSEETQGAAMVFRVRELLIRQRTQTINSLRGHLGEFGQVVPQGAANATKLIAIIEDPECDLPADAIPTLKVLVVALAQLEAEIGKLDTEIARRAKENDVARRLMTVPGIGPLIATAIATLAPPPETFRKARDFAAWLGLTPRQHSTGGKQRLGATTKMGERSLRRLLIIGANSVIIKRHVHAAARPGSWLAGMLTRKPPMLVRVALANKMARIVWALMARGGVYQSPVVAA

SEQ ID NO: 225713 - protein, 416 aa, unidentified
MNAVGIDVSSRKSTVAVLRPLGEVVCLPFDVTHDIAGLASLAEKLKALDGETRVVMEHTGRYYEAVAKALHEAGLFVCAVNPLLIKEYGANSLRRVKTDKADAVKIARYALDNWADLRDFTPMDAIRYDLKTLNRQFQLASKQRTASANNLIALLEQSFPGIRKCFDSPVRSDGTQKWVDFAHSFWHVDCVRKQPFPAFCERYRKWCKRHAYLFKLSNAEEVYALAKRAVVLTPKSKVVKVLVQEAANQLISISRSVEVYRAEMDRLAAMLPEYPVVMAMYGVGKSYGPQLMAEIGDVRRFERKQALVAFAGIDPMPNQSGDKNVRSNKSSKRGSPYLRKTLFNVIRTYLQCAPQDEPVFQFLNRKRAEGKPFYVYMLAAANKFLRRYYAKLRDYFASLDTLQPVDPIPATLKASL

SEQ ID NO: 225714 - protein, 359 aa, unidentified
MPVYVGIDVHRKRSQVAVIDEGGEVLANRNVPNGVQPVLGVIGGLPPGTPAAFEAAFGWGWLVELLEDYGFDPHLVHPLQCKAIASARLKNDKVDAAILAQLLRADLLPEAWIAPPQVRQLRALLRHRIQLVRLRTLLRNRIHAILADHGHDRPGGCWSGPGRAWLASLELPAVSREVIEDDLALIDALQVPIDRLDWEVHQHARSDPSVKVLTQLPGVGPFTALVLLAEIGDVTRFGSARKLAAWAGLTPTVRGSDRTVRHGHISKQGSVWARWALCEAAQTAKRHPDFAASYQAIARRRGKNIATTAIARKLLARAYHLLTDAQITAPAPAATAPAPAGAPTGREGVASPGRARKTA

SEQ ID NO: 225715 - protein, 349 aa, unidentified
MDATTVAVDLAKDVFEVAEANAHHRVIQRRRLSRRQFERYLAQCPRDTEIVMEACGTAQYWARQCQARQLRPVLLPVQYVRAYVRRNKSDRTDAEALLEARRCDAMLPVPVKTAEQQSLQAFHRIRQQWQGTRTARINALRGLLREQGVTLRRGTAALRTVPERLATTELPGLVQLGASELLEDIRTLTDRVARLDRRLQVLADSDESTRRLQTIPGIGIVTATALVGSVPHIHAFRRGRDFASWLGLTPREAASGHRRWSGRISKRGDTYLRTLLIHGARSVITNARRRTTHGGTPLTALQTWAVTIADRRGANKAAVALANKLARVIWAVWRSDGAFTTWRQTPRVA

SEQ ID NO: 225716 - protein, 397 aa, unidentified
MSAVVGIDVGAYKHAAAVCRSGEREAERSVLRLTADRSGFDELEHWLERLGPVERVVLESSGHYYWPLASHLHRRGYPVAVVNPLRAKYFAKSRLQRSKSDPADARTLAALGMSEEPRVKDPMLGAEAKEAARFWGGLVKEQGQVRQKLLRLVEIGFPELKECFEDPLCETALAVLREAPTARAAARKRVSSLADTTRPGGRRRLGENKARRLHELAKETIAPPELDAQMSFEVGMLIQQFDLLDKQIEIAEQRVAEVLDSELARRLQTIPGVGPALAATFIAEIGDIWRFEDFDQLASYAGIHPKEQSSGTKGQNPETSWHMAKTGNAYLRSAAYKMAVVGTQHNPVIRAHYLRKRAQGKSAMNALGHAMSKALAIVWGVWRSGRDFDPTLGGPRT

SEQ ID NO: 225717 - protein, 418 aa, unidentified
MTRRDDNRIIRIVHPICCGLDVHKESVSACIIFPDDKGEEQSDVKIFGTFTDDLIRLRDWLAEHKCPVVAMESTGVYWRPVHNVLEDSVTVVLANARDMHNVSGRKTDIGDSKWIAGLLRHGLLKSSFIPPQDVRQWRDLTRLRKKYVYTVGDYKQRTHRLFESANIKIDSVVSDLFGVTGRNLMQLLVADRELTLSAIQTCVRGKLKGKEEELFRSIQGFFTDHHRFVLKMLLSTIATLEAQIEALDLQIRGAMKEHDALLDRMKQAPGIADVASREILAEIGSALDSFPKDTALVAWCGLCPGNNESAGKRKSGRSPVRKHHLKTIMIDVAWAAVKKKGSYFKDKYYRLKARRGAKRAIVAIAHRILLGIYHVIKDGADFRDLGGDYLTLRNKSQKVFHLRKQALAMGFDLVPQAV

SEQ ID NO: 225718 - protein, 412 aa, unidentified
MEVLYARCCGLDVHKSSITACVLIAQAGKPLKHIRRFGSTTRELRELLAWLREFGVEHVAMESTGVYWKPVWNVLEGHFQIVLANAQHIKAVPGRKTDTKDCQWIAELLQHGLLRASYIPTVLIRDLRDLTRARTSLSQEHSRIASRIQKVLEDANIKLASVASNTLGKSGRAMLAAMIGGEESSERLADLALGHLRAKIPQLQIALEGHVRDHHRFLLQSLLRQLQFLEAEIALLDVRLDQIGREHLDLADALDRWITVPGVDRVAAWSFIAEMGTDVTQFPTAAHLASWAGVCPGSNESAGKRLSSKTRKGSPWLRRMACQSAWAAARTKNTYLSAQFKRLAARRGRKCAIIAVAHSILVIGYHLQQKRCTYADLGSSYFDRLHADGLRRYLVKRLESLGLSVTLQPRTA

SEQ ID NO: 225719 - protein, 346 aa, unidentified
MEHYAGLDVSLKEISICVVDRDGGTVARGVCPADPEGVAGWFRNRELKPRRIVHESGMLSIWLQRGLAGLGLPATCIDARKAHKSLSARLNKSDAADAEGLAQLARTGWFTPVHIRSEDADRLRNLVSARERLVRLRKDLEGHIRGVLKTFGIRVIGIGQGRQRQAFRDQLAAAGETDPVLRVIADAFIATHAKLCQVADDLDKAVRKTAKAHPVARRLMTIPGVGPVNALSFIALVDDPGRFSRTSDVGAYLGLTPKRHQSGEVDWSGRVSKCGDSAMRGLLFEAASSVIHQVKRFSRLKSWAVRLAGRRGFCKAAVATARKIAVLMLTLWKNGTDYRWKKEATA

SEQ ID NO: 225720 - protein, 352 aa, unidentified
MKELSKESVIKFVGIDLAKRSFHLYAVDGEGRAVLSRKLTRARLSAVVAQLPACTIAMEACGSAHHWARLFRTFGHEVRLIAPQFVKPYVKSNKNDAADAEAICEAAQRPGMRFVAVKTVEQQDIQAIHRMRSLAVQQRTAQINQIRGLLLEYGLEVAQGRAAIQRRLPEILEDADNGLSPRFRAELHGLAEELRHLNERVAHYDTQIDAIAHGDRQARDLMTIPGIGSKGATALLAAVGEDPSLFHNGRGLAAWIGLVPRQHSTGGRDRLLGISKRGDVYLRNLLIHGARAVLRTLEHKEDRTSLWAKALKARRHTNVAIVAMANKMARVAYAVMTTGKHYDPAIGTVATD

SEQ ID NO: 225721 - protein, 349 aa, unidentified
MKIIGCDFHPGYQQIAMLDKNTGEVTENRLSHSNAGEEAKKFYAQLTGPVLVGLEASGQSQWFERLLAELRHTLWIGDAAKIRASTERKQKTDRRDANLLLELLEQGRFPRIWVPTPAERDVRQLLLHRAKLVRVRTQVKNQLQALALNQGVQRKRKLWSAVGRKQLENLPLLPWASRRRADLLKLLDELEGSITALDGAVLQEANTRPAVRRLMTHPGVGPITALAFTLTLGPTERFRRGKQVASYFGLIPSEHSSGGKQRLGHISKQGSSFVRGLLVEAAQSAVRHEPQLRREYQRLAQRRCRALAKVAMARKLAVRLYWMLREEVDYAQLLQGSYAGQPESSRGRG

SEQ ID NO: 225722 - protein, 344 aa, unidentified
MEHYAGIDVSLESSCVCVVDSSGRMVREAKIASEPEVLIAWFGEQGIKIARIGLEAGPLSQWLYAAMRDAGLAVELLETRHVRAAFKAMPVKTDRKDARGIAQLMRLGWFRPVHCKSVPAQEMRALLTARKQLQSKLHDIDMSLRGILRGFGLKVGPTTARTFAGRVCELVSEHPILALIADALLAARTMLAAQLHRLEKQVLAAARNNARARLLMSTPGVGPIVALTYVAAIDDPARFKSSKATGAQFGLTPKKYQSGETDVTGRISKIGDAGVRTMLYEAANTILTRPVKGSSLKSWAMRLAKRAGMRKAKVALARKLAVVLHRMLADGTTFIADKAAAMAA

SEQ ID NO: 225723 - protein, 364 aa, unidentified
MKKLVLREVGKQAQRPRAPEAGEVVIIGVDLSRSKWVYACRWGGQEQRRFGSSGELKHLQAVVREYQQRGCEVHVVYEACGFGYQIAWWLEAHNAPVIVVAPSCVEKAPGAQVKTDGLDAGSLALKYERGMLKGIYIPTREQHEYRQLSRTYGQALKDRSRQQVRLRMLLQEHGYTPPAAGSGWGPLERWVSAQPWPPPVGSCVAELRELRASASRSAQRLANGLRAVGRLPQYVGVATALAAQSGVGRFTAIRFLLEVGDIHRFATADALPNYLGLAPREYSSGDLVHRGRIRKCGPGSLRAWLVQCAWAAIRAGKDAALVECFTRLEPRVGRKRAIVAVARKLALRLRARWLAFEEEVKPAA

SEQ ID NO: 225724 - protein, 355 aa, unidentified
MNDAKYIGLDVHQATISVAVLDSAGKLVMEAVLETKAETILQFIRGLRGSLHVTFEEGTCAAWLHDLLKPHVMQVLVCDPRKNTVIKTGNKNDRSDARKLAELLYLDKLHPVYHGETGIRALKEVARSYLALTRDTTRVMNRLKALYRSWAIPCAGQRVYAPRYRSEWLAKITEAGVHRRAQIYYQQLDALRSLREQVRRDLLAEGRKHSAMNLLRQIPSIGPIRAVLLIALMQTPHRFRTKRQLWAYCGLALKTSTSGEYRIVEGQLKRAKKFLAIRGLNANHNHDLKNIFKGAATRAAAVPGPFREFHAALVARGMKPTMARLTLARKIAAITLIVWKKGVRFDAEHLKQQAA

SEQ ID NO: 225725 - protein, 378 aa, unidentified
MFYSGIDQHKLDSVITTYNAAGERLRQHRLRNDRAALVRYFAAFPGPHRAVVESTGSWYWLRDLLVAHGVDLQLAHATRLKAISSAKVKTDAIDSDTLAQLCQADLIPPAHMIRPEVRGARDLLRTRLRLVGKRTSCRNSVHRLLEKFNVPTVAELPAIYQLQAACHLEQSALLLAQIRRLEQELNPEVLRLPAVQRLLWVPGVGKLGAPTLVLEIDAIARFPSDRQFVSYCRLVPGADNSGGKTRHRSGSKDGNRYLKIAFTHAAIRAIQYYPEIKAWYTRLARRKHVRVARTLVAKELARPVLPRHQGLVHPPGPAQARAGRPHPGRQGTRADRLPRAAHPDRLQRDLQGESTQSDQTLAVATLGKPGCLTDSASS

SEQ ID NO: 225726 - protein, 454 aa, unidentified
MMARKIRKLKMKKIQPLHTLQPNAAGIDVGATEIFVSVPQDRDVEHVRCFTTFTDDLHKAARWLKKCEIKSVAMESTGVYWIPVFQILDAHGFDVMLVNAHHVKNVPGRKTDVEDCQWIQYLHSVGLLRGSFRPGQDICSVRSLLRHRGNLIKIASTHVQHMQKSLTQMNVQIHNVISDITGVTGLTIMDAIVDGQRNLNKLANLKDPRIKASKDTIKKSLKGDYRPEHIFTLKQALQSYRHYRQMIYECDIEIEKHLKDLESRIEPDQPARPPGDIKPRGNAPNFDLKHHMHRLLGTDLTLVDGIDVGTAHTIFTEVGPDLSCFPTPAHFCSWLGLCPNNKISGGKILSSKTKPGSNRVAQVLRMASISLLRSRSYLGEFYRRMRAKSGAPKAITATAHKLARIVYHLIKYQKAFDQSVFNKEQEMHKIRMEKNLRKQAKYLGYQIVPAVTMS

SEQ ID NO: 225727 - protein, 383 aa, unidentified
MENTITYVAMDTHKKQHKVALHYPCQEEIVEFTINNAVRDIRKMVKKITRQAPGEVEFCYEAGVCGFTLKRRIEQLDCRCVVIAPSLVPRKPGERVKTDRRDAKKLLMMHKAGLLTEVHAPNEHQEAARELTRLRETAKDNLKRIRHQLLKFLSRHGYVYRDGHHWTQKHIAWLRAIEFTEPMLTSVFEKYFNEMIYCIGRLEALDKEVGLLADSEEYKEIVGLLRCFHGIDTLTAITILTEIFEFGRFESPRHLMSYLGLTPSEDSSGDKQKKGSITKTGNKRVRRLLNEAAWHYRHRYVPSKALKQRRKGQPQWAVEIADAAGRRLSKRHRHLVNNGKMPCKANIAVARELAGFIWFVVTQYHARNNTKDAACNQTTAISV

SEQ ID NO: 225728 - protein, 522 aa, unidentified
MALKSKKSSRNSAASRRLLGRPGGIIQPRVQKAGPNRFAVIAVDCAKLRCKWMLCDFYGHVIVEPTTVDCNGQALRAMTLQARAACDQAGIVDSIVAIEMTGVYHKPVVRAFREADFETRLVHPHASKHYAAVSHPDLKTDDNDLEAIFQAACQGFGLLKPAVDEVYQTLQVYSRHRRNLVQQRGRLQVQIRALLHQTMPGYADLFSIDKFFNNSIAIDVARNFISPQQIVDAGVKVLAEYLKRKQIRFRKPTLERIVAWAASAATPDSLAKLLHRTWCELDDLRQKMSAQIQAAEQKMAEFLAKTPYVLLLSVSGINVVTAAELAGEAGPIELYPNAEAIKGRAGLFPSRYQSDAVDYNDGAIARHGNRRLRGALMRIAECLIKHHPQYRGLSEKWKAQKTDPRDRRCRVANRAVRMIFQVVSGRQVYRRRGVDRQYLLSKLLEFHRQHSSSPEEIAANLSNVFRWLPKSSYQAEGSALGDELRKRKRKLQSLGELLIPLLIRLGVQREPEVESKTSEARD

SEQ ID NO: 225729 - protein, 416 aa, unidentified
MEYPPETLPAVPPGGVTCGIDWANDDHAVCVVDLAGTVVQRFTAQHTGEGLAGLVRRLRRAAVGEAAIERPDGTVVDTLLEAGFTVVVISPNQLKNLRGRYRSAGKDDRFDAFVLADTLRTDRARLRPLLPDSPATVTLRQACRARKDLVRHRVAVCNQLRAHLKGAFPGAVGLFCDLDSPISLAFLARFDCQDRAGWLSPRRLAAWLKGQGYCGRKDPAVLHARLAAAPRGATGDDGAAKAHITRALLAVLTSLVTQIKALDAQIAEQLALHADAPIFTSLPRSGTVRAARLLAEIGDCRARFPTPEALICLAGVAPSTRQSGKVTHVGFRWAADKQLRDAVCDFAGDSRHASPWAGRLYDDAIARGKDHPHATRILARAWLYVIWHCWQHRTAYDPARHKALQRILAEQKPAAA

SEQ ID NO: 225730 - protein, 312 aa, unidentified
MERIFVGIDIAKDQVDVHVHPTDERFQLSRDDAGLAGLVARLQPLGPRLVVLEATGGYEIPVAAVLASAGVPVAVVNPRQIRDYARATGQLAKTDALDARLMALFAEAVQPEVRPLPTPEAQALGDLVTRRRQLVDMLGAERNRHQQARDLRLQRRIATHIRWLTKALAEIEADLATRIRSSPIWRERDNLLHSVPGVGDITAYTLIADLPELGHLDRRKIAALVGVAPFNRESGHWRGRRMIAGGRPAVRSVLYMATLTAVRFNPAIAHFYQRLTAAGRPKKVALTAAMRKLLTILNAMLRDQRPWQPESA

SEQ ID NO: 225731 - protein, 375 aa, unidentified
MKEKVRFLGLDVHAETIAVAVAEPDGSVRSLGTIANRAESIRKLVKKLGAVDQLRACYEAGPTGYVLYWQLAELGVECAVIAPTLAPRKAGDRVKTDRRDALRLARSYRAGDLTAVWVPDEGSEALRDLVRAREAAKQDQLRARHRLSKFLLRTGRRPAAGVKAWTLGYLAWVRQLRSQQVAQESTRLDYLHEVEHMAERVKRLEQAIAEAIQVASPELQEVVQGLQALRGVAQISAVTIAAELGNISRFEGARQLMGYSGAVPSENSSGQRKQQGSITKTGNAHLRRIAIEAAWSYRLRPGIGPALRKRQQGVPEEIKEIAWKAQHRLHKRYMRLAAAGKDQRKIVTAVGRELLGFIWAIGIKAEAMSKQPMAA

SEQ ID NO: 225732 - protein, 422 aa, unidentified
MLQETQETEEIIERVAALDIGKAEVACCVRVPDGGRAGRRLQEVTTWPAMTRSLLALAQRLAELQVTRVVMEATSDYWKPAFYVLESHGFDTWLVNARDVKHLPGRPKTDRLDCIWLCKVAERQMIRPSFVPPPQIRRLRDVTRYRIDLVGARTAEKQRAEKLLEDAGIKLSVVASDIFGVSGRDMMNALVGGERRPAVLAQLARTRMRGKMAALEEAFTGHFTGHHAFLLGKMLARVDALDADIAELDAAIEEMIAPFARLVDRLDEIPGIGRAGAAVIIAEIGTDMSRFPTAGHLVSWAKLAPGVKESAGKKKGNGSTGHGNRYLARTLGEAAIGAAHTSTFLGERYRRIARRRGARKAIVAAGRSILVITWHLLSDPDTPYADLGADYYDNRINPERRKRTHIRHLEALGYKVTLEPAA

SEQ ID NO: 225733 - protein, 392 aa, unidentified
MKFDYRSIEVFVGVDMAKQHHYALAVTTAGTEVFHRPVLNDQTASGKLIVDASKHGRVALVIDMPSSPAQLLLAVAREHDVPVAYVTGLQMRRAAELYAGQAKTDPRDAWVPTSLWRAGADVINQAGADAINQLVRARSPRVADRISTAVIKALEAQTVTLPGEDTWGEIIAGPVADLERIFEQRKQLRAQIEQVFLEHPLGQVLVTLCGFGPRTGARTLAEIGDPTRFKDGGRLAAYAGLAPVGRRSGKSINNAAASRRGNHRLKNAMFERHVPRRVRRHAARPEREGVLPTQTRRGKRPQRRRDLHRPPTLRPHPHHAHHQPGLPPPPIRKPGKSRLTKRQGHPHPTQDQHRELRRDRRATTCVVPVRVVRLVAMAGTLSTDETAIRARR

SEQ ID NO: 225734 - protein, 465 aa, unidentified
MRDKTKPNREGASFSMTMIHPNAAAIDIGATMHMAAVSPDRSSEPVRSFGAFTADLHRLADWFAECGVKTVAMESTSVYWIPIFELLEERGVEVFLVNARDAKHVPGRKTDVSDAQWLQRLHACGLLRASFRPSGDIVELRAYLRQRERLLDTAASHIQHMQKAMTEMNLQLHHVVSDITGATGMRIIRSIIAGERDPAVLASMRDTRRHSSAEVIEKALTGHYRAEHLFVLEQALALYDVYQHKVAACDVRIEAVLKQLGSVRAQEGDARREASGPPPKRQSRQSNGLAFDVGAALHSLLGKDLTKIHGIGPYLALKLVSECGDDLSAWPSAKHFTSWLCLAPGNKISGGKVLSSRTRRSGNRAASLLRLAAVTIGRTDTALGAFYRRLSARVGKAKAVTATARKIAVLFYNALRHGMDYVDPGASYYETRYRERVIGNLQRRAKAFGFVLQAAVAPVAEPAVS

SEQ ID NO: 225735 - protein, 409 aa, unidentified
MVVQAAPVTSSTVVVAVDVGKTEFAFSVTDVARASLLKPRTGCSMTGPSLVQVVADISQVLPDDAVVKVGIEAAGHYHRPLLMATSWPTGWEVLELNPGHVTEQRRVLGKRTIKTDVVDLQAMTELLLAGRGQPVRDRSLVLGELTAWSAHRTGRVALRSATKNQLLGQLDRTFPGLTLALPDVLGTKVGRLVAAEFPDPARLAALGSTRFIRFGATRGLQIRKPVADRLVQAARTALPTTDAAVARAVLAADLALLVDLDAQVDRATGQLARLLPLSPFASLLTVPGWGPVRAGNYGGALGDPTRFDNHRQVYRTAGLNPIQYESAGKRRDSVISREGSVELRRALIDLGVGLWLSDPAAKVYGSQLRARGKKGLVIACAMANRANRIAFAVVRDQSAYDPSRWTKEG

SEQ ID NO: 225736 - protein, 338 aa, unidentified
MVVIGIDPHKGSHTAVAIDEEERKLDEVRVRADRRQLERLTSWARAFPERSWAIESANGLGALLSQQLVGSGEEVFDVPPTLSARVRVLGTGKSQKNDPNDALSVAIAALRSPRLKPVVAEDYIAVLRLLWNRHKNLTSLHTQAVCRLHALLAGIIPGGTGRRLSADRAAALLSGFPPNSAVEKARKAQALDLVADVRRYDALLKASKRTITEAVAAVPTTLGELSGIGPVATCIILAHTGNIRRFGSEDNYASYNATAPIEASSGPRKRHRLNPRGNRQLNHAMHIIAFSQLSHAGPGRVYYEHKIAEGKSQKEATRSLKRQISNAVYRQLMRDTQR

SEQ ID NO: 225737 - protein, 400 aa, unidentified
MLLFFEVITMIFVGIDVAKDTHYAAVSDDSGAVLVKPFAFQNNAEGFCLLLKKLSEFDRSKLLIGLESTGIYSENLICFLYESGFRLAVINPIQTATLRKTAIRKTKTDKVDTMLIIKSLMVNSYRLYSQRDADSLKLRTLCRFRQNLKKSKARLKIQLAGYVNLVFPEFGKFFKSGIHIAASYALLKKYSSPKEIAALRTSTLCTLLSKASHGRFGKDTAEALKSLALSSVGVKNPYISIQIAQTIAQTELLEQQIKDLNSAIEEAMESLNSVLMTVPGIGAVNAACILGEIGDIKRFSKPCKLLAYAGLDPTVRQSGQFSAKSTRMSKRGSALLRFALINSAWQLTLNDTTFKAYYDLKRSQGLNHYGALGHVAHKLTRVIFKLLTSDTPFNPAKLVA

SEQ ID NO: 225738 - protein, 348 aa, unidentified
MAHFVGLDVSVKETSVCVVDDAGKVILEQKVLTEPDAIIALLTSLGVTYGRIGIEAGPLSQWLVNALTAAELPVICVETRHMKALLTAQQINKTDRNDARGIAQMMRVGLFKPVHVKTLVAQEQRMLLTSRKLLQRKLLDVESDLRGTLRNFGLKVGVVSGGRYETRVRELVAGFPRLAAIVEPLLSVRRVMRQQFAVLHKMLLDMVRGDPVCRRLMTAPGVGAVVALTYRATVDQPQRFVHSRAVGAHVGLTPKRYQSGEIDYDGGVSKCGDALLRTMLYEAAHVLLTRGAKWSWLKAWGVRVAQRRGMRRAIVAVARRLAVVLHRMWVDGSEFRWSKDSTPVPAVA

SEQ ID NO: 225739 - protein, 361 aa, unidentified
MYASTKSVSSGSAVTVAIDLAKDVFELAFGNADFRIVERKRLSRAAFAGCLSNRAPLDVVMEACGSAHHWARVFVRVGHRVRLLPAQYARAYVHRNKTDRADAAGLLEAARCGAIRPVPIKSALQQGTQGLHRVREFHKAQRTAAINLARGLLREFGIAIPLGAAKVRPAVLAALEAADNELPMALRHALAAVLDEIQSCEKAMAAIEQALTEIARNDVRCLRLMQAGGVGLLTATAMSAGLGDLARFPSGRHLASALGLTPREYSSGNTRKLGRIGKQGDVYVRTLLIHGARSNLLQAALRRKRGQPLDRTQQWALALAEKKGHNKAAVALANKTARRLWAAEHHGASFNPDHVSRRSAA

SEQ ID NO: 225740 - protein, 328 aa, unidentified
MKAMKQNECVPGVFYVGIDVAKDTLAVFAEGVFEGEVENRKKGVGRLVRMIRKAVGKDADVRFALEDTGAYSLPVHLELERLHEKACVLNPAWIRHFAKSHGVLAKTDRIDARMIARFAADRSCEPTPVPSATRLALRDLIRTRSLLVKVRAMIETLRQMPLVGPTSRAVLGEVDRFVGARVERLDREMAETMKGDPGILRVWKELQKVQGVGPVTATTVAVLAPELGTLGRRRAAALAGLAPQPRDSGPFKGQRKIGGGRDELRHALYMSALVAKRWNPTIKAFYHHLRDARGKKHMVALVACMRKLFIHMDRIVARLNEPSPETAS

SEQ ID NO: 225741 - protein, 385 aa, unidentified
MTAMARSLDANGLDEILCLSLELGEREWKLTFGVGVGGRIRRRSVAPRDRAALLREIARAKEQMGLPADARVVSCYEAGRDGFWLHRFLVAQGVENLLVDSSSIEVSRRRRRAKTDRLDGESLLDLLQRHLTGGRRKVWSVVRVPTPEQEARRHLHRELLTAKRDRTRVTNRIRGLLANQGLTLELKGDVPARLDGLRLWDGSALAAELLERLVREWEQVVFLTRQIEQLEEHRRELVRTSPDADIAKVRQLLTLRGIGSNAAWLFVMEFFGWRDLRNRRQVGALAGLAPTPHASGQEERERGIGKDGSRWVRTLAIEIAWGWLRFQPESALAKWYQRRFGHGSKRLRKIGIVALGRRLLVDLWRFAETGALPEGAVLKPELRVR

SEQ ID NO: 225742 - protein, 353 aa, unidentified
MLRRRRPLVSEVYAGRQFVGMDLHRRRSVLVRMSETGEHLETVRILNDRDVLAEVMSRAGESPEVVLEATYGWYWAVDALAELGATVHLAHPLGVRAFSYRRVKDDQRDAFDLADLLRMGRLPHAWIAPPATRELRELVRHRAKLVAMRSQCKAHVHAVLAKGGIWVPMTDLFGVEGNLLLDKVTMPAPYRERIASLRRFIEAFDAEIDLFTALAQRRLTHDAGYTAIQQIPGIGPVLAAVFVAEIGDVHRFAGPAQLTCWAGLTPSHHESDTTVRRGRITKQGSRLVRWAAIESVKILPDTSRIGAIREQVAHRRGNRNIGAVAAARRQLELVFYALRDHHVRALHRPPHAA

SEQ ID NO: 225743 - protein, 366 aa, unidentified
MRKVMAGMDLHGNNVMVGIVDDQGARLQHRRLACELPEIIEFLDPYKAELESIAVESTFNWYWLVDGLRAAGFPVVLANPAKIDQYSGIKHADDKNDAYFLAELQRLKILPTGYVYDPELRPVRDLFRRRMNLMRQRTTLYLSAKSLHQRTTGRALELRRLKAMEPEEAAALYTHPANQLIAQIQKEHIDSLDQSIRQIEKAVLKVALQQPYYQRLQTIPGVGIILGLIISMEVGNIARFAGPGQFASYCRTVDAKRISNGKTKGDNNQKCGNKYLAWAFVEAAHGARRFDATCRRWYDRKAGKKCTTVATKALACKLAKAAWYVMAKGTEYQAGKIFPGLTEPKAEEISGEQASASKGVGPNPED

SEQ ID NO: 225744 - protein, 369 aa, unidentified
MGEHSEVFVAFDVAKRKHAVAIAEGGRTGEVRFLGDVENAPLPIGRTIKRLADRYGRLHVCFEAGPTGYGLYRQVQALGHDCMVVAPALIPKRSGERIKTNRRDAVTLARLHRAGELTGVWAPDAAHEAVRDLVRAREAAADDLRRKRQQLLSFLLRHSRIYSGGGHWTLAHRRWLAGQKFEHAAQQIVFQEGIDTIEDALQRLRRLEKQLAAIVPEWSMAPVVEAYQAMRGASFLVAVTFAAEIGDVRRFDTPRQLMSFLGLVPAESSTGDTIRRKGLTLAGNRRARRALVEAAWTYRYPARVSETLRARLEGLPKTVRDIAWKAQVRLCARYRRLSAIGKKLPIVVAAIAREIAAFLWAIGREVAPT

SEQ ID NO: 225745 - protein, 357 aa, unidentified
MEAGTARRVIGGVDTHKDLHVAAVVDERDCILGTRCFATTRQGYRQMLAWMRSFGELLRIGIESSGSYGAGLLRFVQKVGVEVLEVTTPDKLDRRRRGKNDDLDAQNAAHAAFAGTRAVTPRSRDGMVEALRVLTACRKTAVAARRVALQMIQNTIVCAPDDLRDILRSMTRMQLVRTLAAWRPDLTAYRDVEAAYRISLKSLARRYLELHDEVAELDIMIRAIVDELAPDLTARNSIGHTGAAQLLLTAGDNPERLRSEASFAALCGVSPIPASSGKTIRHRLNRGGDRHANSALHIIAIGRLRTDPKTKAYVAKRVAEGHSKLDAIRALKRYIAREVFGVIVRRQKEINQTRIAA

SEQ ID NO: 225746 - protein, 417 aa, unidentified
MTDDAQWFAGIDWASQAHRVCLVDAGGKIVGERAFAHGGAGLAELCAWLLTITGAAPTGIAVAIEVPHGPIVETLLERGFQVYAVNPKQLDRFRDRFTVAGAKDDRRDAHVLGDSLRTDRHCFRLLSDEDAMVVELREWSRMTEDLQQERNRLANRVREQLWRYYPQALVISDDLAADWFLELWAAAPTPAKAARIRESTVDRILKRHRIRRIAAAEVLPLLRQKPLTVAPGTAEAASAHIRTVAQRLILVNRQIKQAHRRLDELCARIAENEAESATGQKPEQRDVTILRSLPGVGRIVLATLLAEASEPLRRRDYLALRTLSGVAPVTKRSGKRCIVIMRQACHMRLRGAVYHWARVAIQHDELSRHRYAELRKRGHSHGRALRSVADRLLAVTCAMLTRRSLFDPEYAAKRMAA

SEQ ID NO: 225747 - protein, 420 aa, unidentified
MLAESEDSEQIIDKVAALDIGKAELVCCVRLPGRGSRRLQEVTTHSTMTRSLTELASHLVETGVKRVVMEATSDYWKPVFYLLEAHGLTPWLVNAREVKHLPGRPKTDVQDAVWLAKLAERQMLRPSFVPPPAIRQLRDLTRYRIDLIASRTAERNRVEKLLEDACIKLSVVATDIFGVSGRAMMAALVEGERDPKVLAQLARSRMRAKIGRLEEAFNGYFNDHHRFLLARMLSRIDSIDADIAAVDEQIEAQLAPFAAAAARLDEIPGIGSVAAAVILAEIGTDMSIFPTAGHVCSWAKFSPSTKSSAGKTKGNSATGHGNRYLAQILGEAAIGASRTDTFLGQRYKRIARRRGNKRALVAVGRSILVIIWHLLADPDATYTDLGADHYTQHLNPDTKKRNHIRQLEALGYTVTLTPAA

SEQ ID NO: 225748 - protein, 313 aa, unidentified
MKKFNKYVGLDTHKETIAVAIADSQGSKTRFYGEIPNTRDAVDKLMHSVSPQGEVVSFCYEAGPCGYELFRQITGAGHECLVAAPSLIPAKPGDRVKTDRRDAENLARLHRADELTGVWVPDCEQEAIRDLTRAREDIKQLEREMAKAMEGWTLGPVAEGLMALRGCRLITAMTVVAELGDISRFETPRQLMKYLGLVPSEHSSGAKVQRGGITKTGNTHVRRILTESAWTYRFPARKTGPLQRRAEQTSEAVQAIAWKAQKRLCGRYQSLNARGVQKNKVCTAVARELSGFMWAIACEVMDSGSVKPPAVPQ

SEQ ID NO: 225749 - protein, 316 aa, unidentified
MESSDVFVGIDVSKANLDVCVLPGGEGWTVPNDESAIKGLVKHLKRVSAERIVMEATGAFHLCAAAAMAISGLPVVVMNPRQVRDFAKSMGILAKTDRIDAKVLAQYGQSVRPEVLPLKDEQTRELEALVTRRDQLQKMITAEKNRLGVAADKMRPDIKEHITWMQKRVKELDKELDKFIKGSPLWREKDAIIRSVPGAGLVLSTSLLAKVPLLGLINRRTVAALVGVAPLNCDSGAFKGQRHIWGGIASVRRVLYMATLSAINHNPVIRAFYARLRQAGKKKKVAITACMRKLLTIVNSMVRDGTMWDPCKFAVV

SEQ ID NO: 225750 - protein, 372 aa, unidentified
MTSIIYVGMDVHTTNYTLCCYSMEDDRFFAEVQVEPEAKNILKYLARIEKQQSRDCRIVCGYEAGCLGYSLYHQLHAHGIDCVILAPTTMMTKPGKRIKTDRRDARLISKCLAFHTYSPVYIPTEVDDAVKEYIRMRDDANSALARVKQQIIAFCIRHGKIHDGKSYWTNKHLEWLSSLDLGNKILSEVLQEYLIRYYQLREQVDMYDMRINELAQAEPYRQKVEKLGCFRGIAAHTALSFCVEVGDFRRFATAQQFASYLGLVPGECSSGDKQQYTGITKAGNSHLRKLLVETAQVFGRSATKSGKSAALKERQAKCDSLTVAYADKANARLKKKYFKIAMRSKVNIAKTAVAREMACFIWGMMTDNISCA

SEQ ID NO: 225751 - protein, 343 aa, unidentified
MEHYVGIDVSLESASICVVDGSGRIVREAKVASEPEVLISWFGGLGIAVARIGLEAGPLSQWLYAGMRDVGLPVELLETRHVRAAFKAMPVKTDRKDARGIAQLMRLGWFRPVHCKSLPAQEVRALLAARKLLQTKNHDVEMSLRGVLRGFGLKVGPTTPRTFATRIRELVAGHTTLSTIAEALLAARGTLFEQWQKLEKRVRSLAREDRRVRLLMTAPGVGPIVGLTYASAVDDPGRFRSSKAVGAHFGLTPKKYQSGETDVTGRISKIGDGGVRTALYEAANVILTRPVKGSSLKSWGMRLAARAGMRKAKVALARKLAVVLHRMLANDTTFLADKAAVAR

SEQ ID NO: 225752 - protein, 338 aa, unidentified
MAIVMGVDQHRAQITYDLLDTETGEVRGGRVSPADRESVREFLGRFSGRELVVALEATTGWRFLAEELQAVGAEVHLAEPADTSERRGRKKRAKTDRADARLLRELLLSGGLPESWIPPGHLLELRSKVRLRHTLAEQRSEWQQRIQAQLYHHGVPQRRQLLTAENRAWLEQLELPGSARLQVDVALRIVDQLRAEIEPIERELRAYARRQPGCQALMRHYGIGELTAVTIVAELGDVRRFGSSRRAVRYAGLDITVSQSDQRRSPGHLSRQGPPALRWALFEAAQVARRPNSPDRGYYEQTSERIGGNRACLAIARKLLKRSYHSLRELGEEALQPA

SEQ ID NO: 225753 - protein, 359 aa, unidentified
MNRIEQGWVGIDAGNGHHHVVLIDRDGRQLLSRRVDNDELALTGLIETVRGRVMEPTWAIDLADGAAALVIGLLLHRDQPVFYLPGIAVNRASAGYRGEGKTDAKDAAIIADQARMRRDLRRLQVLDEDIAELRLMTAYRADLAADRTRCINRLRNLLLGVFPALERVLDFTCHGPLVLISGFQTPTAIRRLGATRLLRWLERRGVRHPGRLATAAAEAAGQQTIQLPGEAAAASLVARLAQTILELDRQLADVDRKVAASFHIQQDAAIITSLTGIGDVLGAQFLAAVGGSLSGFASADHLAGYAGLAPTPRDSGYRTGNLHRPERYNRQLQRVFYTSAMISVQRSPASRAFYDGKRA

SEQ ID NO: 225754 - protein, 383 aa, unidentified
MSARLTNSSRDMRLKGGAVQKIYIGVDFHARQQTICYLTTDSGELQLHELKHQNKEEVRAFYSQFEGHVIVGLEASGYSPWFERLLEELGCEVWLGHATEIRRRARWRQKNDRRDAELILDLMLHDEFPRLYVPPLQSREVLRMLRYRHKLVKIRTMGKNSLQALALQSGLAKGSHLFTKVGQQELRAAVMSPAMQWQRDQWLQLLESLNQRMMETMFWLKQQSLDDARIARLRSHPGIGLLTSLCLVHSLEPVTRFRNQRKVVAYAGLEPLERSSAERIRFLGISKAGSRILRYLLVEAAHVAVRKDEELKRFYQRLAERRGRAKAMTAAARKLLIRAYIMLRDEIDYAEFRRRAVAARLARKSQRPEVPEFVIGQPASPGT

SEQ ID NO: 225755 - protein, 403 aa, unidentified
MVFLGIDWAEAHHDVCLLDEQGKLLGKRRVVDGLEGVRQLHELVAEQAPEPEQVVVGIETDRGLLVQSLVATGYQVYAINPLAVSRYRERHSTSGAKSDPADAKLLADLVRTDRHNHRPLSVDSELAEAVKVLARTHQNLIWSRQRQLNQLRSLLREFYPAALEAFAGDLASADAIAVLERAPTPHQGRSISQGQLVSALRKAGRERNLVVKAAQIQACLRRPQLEAAARLTQAYGRSVTALVRLVRQLNQELASLEQELSASFELHPDAEIYLSLPGLGKVLGARVMAEFGDDRTRFQNPKARKNFAGTSPITKSSGKHKAVLRRFACNHRLLDACYFWAFASLRRSPGAKDYYRRLRARRQSHKQALRALANRLVGILDGCLRHCQLYREKVAWPLLEAAA

SEQ ID NO: 225756 - protein, 340 aa, unidentified
MGEISIVGVDLAKQVLQVHGATADGQVLFRKKLSRAQFAKFMASLPPCVVAMEACATAHYWGRELSRLGHEVRLIPPIYVKPFVKRQKNDAADAEAVAEAAQRPTMRTVAVKTADQQARAMLFRTRDLLVGQRTRLVNALRGHLAEHGIIIGQGVGNIARFAACLDQDTLPDLVRDLGRLYLDQIAQISDEIGKLDKRITTAARENSTARRLQTMPGIGPVCAMAIASFAPAMREFRRSRDFAAWLGLVPRQHSSGGKQKLGRTSKMGQRDIRRLLIIGAMSVVHWRGRHGGRPGSWLSRMLARKPRKLVAIALANKMARMIWAMLAGETDYRDPTGAIC

SEQ ID NO: 225757 - protein, 322 aa, unidentified
MSVKVLGIDIAKQKFDVALLADGKIKNKTCRNSAEGFETLKVWLEKQGIQKVHACMEATGNYGEDLSIYLHEAGHTVSIVNPARIKGFAQSELVRTKTDKLDAGVIARFCLAMKPETWLPPAPEIRSLRALVRRVDSLIDMRSQEKNRISTAHESVIVLIKEHIVYLDREIEKIRKQIVDLIGQNPQLKQRKDLLDSIPGIGKATIPHLLAELDNLDKFTHVREMVAFIGLAPKETISGSSVKGKPRLCKIGNARLRKALYMPALVSIQCNPVMIAFYNRLKEKGKNGKVIVCAIMRKLVHVIFGVMKSGKMYDPNYKPTLA

SEQ ID NO: 225758 - protein, 342 aa, unidentified
MGTLMVMGVDSHLDTVAAAVVDANGAQVALLEAKNTEVGWSELVRLCVVHEVSTVGIEGASGYGRRLAQTMVGAGLEVKEVPTRLTASTRRVDGAGKTDPGDARTIARAVARGEGNRWVDDPALETLRVVSNRRDQLVRLQTAEINQLRALLAEVDPEAAAEMPSLRSRHQFVALTSFEAAGDVHREMVAQLVRDLAEGCLARWGQINRLGRQLDELMPEAGRRIIDTIPGAGVVATAQLLAELAGTGGFATEAGMAAWAGIAPLDASSGRQQRHRLNRGGNRQANKVIHLIVTTQLKPGGEAAAYVARRMSEGKTKKEAIRAAKRYVIRRIWRTLNTTELT

SEQ ID NO: 225759 - protein, 386 aa, unidentified
MEKANDLSRSSTVLEPNSTLIAVIEMSLSSWLVAGIVPGLARHPLKKLDADAEALLLLLHRWREEAAKYGHGIARMAIAFEAGRDGFWLARWLRARGVEAFVIHSTSVAVPREHRRAKTDRLDTEHLKRAFLGWLRGEPNHCQMAGIPSLDEEDARRPNRERENLVNQQTSIVNRMKACLIRLGVRNFKPTLRHASERLEMVRTPEGAPLPPNTLAEMRRDMARLRVVREQIREIEAARSQRLQVSESRAQAMVKLLTRIIGVGIETADMLVHEILSRQLRDRRAVARYAGLTGAPDESGKRRREKGLARAGNARVRRGMIQLAWRFLLFQKDSALAQWFRARTAEARGGTRKTLIVALARKLLIAFWRLTMTGEMPVGIKLRPVV

SEQ ID NO: 225760 - protein, 343 aa, unidentified
MTQRQPVVEVFAGLDVSAREIKVARVQGQDQNPTLATFANHASGHQALLAFLLEKTERVRVCLEASGNYSLDLALSLHAQRQVEVSVINPRRARKFAESLGERSKSDPVDARVLCQYAARMPWESWKPPSATALRLRAIPRAMESLGVMHTQESNRGHALASSQALPALVLRERQRHQRYLENRMKQLRREARRLIARDAELDRRYRLMLTVPGIGETSALQILGELVVLSDTADARQWVAFAGLDPCIFTSGSSVEKRPRISRGGSRHLRRALYMPALVALRRKPHLKRFYERLLSRGTARLQAVVALMRKLLHALFAMFRANQPYDGSKLCPSELITKAAA

SEQ ID NO: 225761 - protein, 457 aa, unidentified
MRTIGIDLAVSAAHRAVVMAADGQFVTPVLSFHARWEEIEQLVQRAREGADPDLPLQAVMEPTGMAWFPVAVALQRLGIALYLVNGQRVYDLRRFYKRHSSSDRLSAQVLAKMPLVDQESLHPLEIPSASRLACQRGCKELDRLQGQMTAIKNRLRDIDRFAWPGLEQIFRDIYSPRARFFRRTWYDPAQVVGAGLGRFRASFGTFAGQDQEVDWVERLFQLAIETLQLYGSTALDYILLQQQVCRELDHLAYLEQWADAVWRDTVRPLYRQLHPSRHLETLYGVGEQGAAVYASFIGRAERFSDQRHFRGWHGLIPDSRQSGDVEGKGLHISQAGPDLIKKFGYLNAQIARQYDPQIAAIYYDQMVHKGNHHHQAVCACATHLLDRVYVVLKQDRPYELRDVDHRSLTPEQARATIAQHYTVSPEVRQRSQRRARKARAERRIERQHKPKGSCPRP

SEQ ID NO: 225762 - protein, 409 aa, unidentified
MRIIGLDIHRAFAEAVAWDDGKLRRLGRVDMRRDLLTAFAEQLLADDVVVVEATGNASAVVAVLAPHVKKVVIANPMQVRMIAHAKIKTDTIDAGVLAQLYASGFLPEVWVPDEPTQALRRQVTRRNQIVRQRSRLKNIIQSILHSHLIPSCPHADLCGTKGRAWLVDQVVPEDERLAIERPLREFDRLGEDLKVIERDLARSALADEGVKRLMTIPGVDMVVALAMTAAVGEVTRFDEPQKLVSYLGLNPSVRQSGPGPAHHGRITKQGRGHARGMLVEAAWAAARAPGPLRAFFLRVRARRGQHVAAVATARKLAVVIWHLLTKGESYVWGRSSLHAKELRDLELKAGYKAARGQKGAAHAYNSKSHRDEERRWVEQAETAYARFVTGWNPQGPKKVRTGAATEVRR

SEQ ID NO: 225763 - protein, 340 aa, unidentified
MEYFAGLDVSLEEAAICIVDDTGLIVREARIASEPDALIAFFRASGMAMKRVGLEACSLTAWLHQALIEAGIAAICIETRQAKAAMGAMPNKTDRNDARGIAQIMRTGWYRAVHVKDPCCRSWRALLTARRMVLNKRRDLENGIRALLREAGLKVGTPSRRNFAARVIELVVDDPVLAALTRSLLSVIAVITEEIDRLTKRVLDEVRIEPTCRRLMTVQGVGPFTALAFRATIDRPDRFRRSRDVGAHLGLTPRRYQSGETDVQGRISRCGDELARTALYEAAHSLLIRSTKWSALKAWGMNVAKRRGMARARVAVARKLAVILHRMWADGTEFRWTKQA

SEQ ID NO: 225764 - protein, 345 aa, unidentified
MLHAGLHLSRRRLDVCLIGDDGAVVGRLAASPDADGLRHLVERVGRQGRVRGVIESMTGARFVRDTLAELGWEVLVADAQKVKGLAPLACKTDHIDAQVLAVLSHRDLVPAIWLPDPQVRAEREQARFRLHLVKHRSMLKHRIHATLITFGHPCPVSDLFGVAGRELLDRLAIPEPWRGTVEASLSLIDDLDAEIDLINRRLRLSGAEHPYIPLLLTVPGIGWVLAFTVAGEIGDIHRFATPRKLCGYTGLCPRVNQSGDRDRRGPLTKQGPRYLRWAMLEATMHALRHPAYAERYQHTKRRLGKQRGAKVAQIEIARRLTEAVWHMLTRNQPFAPAGATLRLAA

SEQ ID NO: 225765 - protein, 400 aa, unidentified
MLSIGIDVSKGKSTVCGMKPGGEIVYTPFEIQHTREGMSELVSLLHNSCEEVRAVLESTGSYHCPVVAALLENGIFVSVVNSLRMKRFCSQSIRKVKTDRIDAMQIALYGLAYWQELQPTRLPEDTYRELQLLARQYYQMTSLLIKAKVDFNAICDQVLPGMQELMNDHAGRHKLSDFVLQYCHTTHILEMGETRFRKDYCKWAEKKGYRNCERMAALIFATAQNGIPVLPNAPSTQIVITEAIRVLHTVEASRDAILTQMQALAKTLPEYSLVREMPCIGDTLAPRLIAEIGDVRRFHSKRALIAYAGIDAPPYQSGKFCANNRHISKRGNRYLRKTGYEVMQSYVMHKPANDPIFTFIEKKRGEGKSGKLAMVAGLNKFLRVYYGKVTELYRSLPAIE

SEQ ID NO: 225766 - protein, 355 aa, unidentified
MKSSTKYAALDVHQATTVASVREESGRVIARTILATDAPVLVDFFRGMRGTVHVAFEEGTQAQWLHDLLTPVVHHVLVCNRRGDAGQGNKGDQLDADALSELLRRGSLRAVYHGSPHRAKLKELTRTYENLVEDSTRVMQRLKALFRARGIKTPGTSVYRADGRAQWLRQLGEPGVRFRAETLYAELSVFQELRPQAKAAMLAEARRDPAWVVLRRIPYLGPVRVALLLATMQTPWRFRTKRHLWAYAGLAVVTRTSAEYELDAERRVRRRRRRPLTRGLNRNHSPVLKDVFKGAATAASVRPGALQDWYQGLLARGMREELARVTLARKLAAITLRLWKQGERYDPAKLTRQAQ

SEQ ID NO: 225767 - protein, 308 aa, unidentified
MSIWIGIDVAKATLAVHVHPEGRFLSLPNSPEGYDQLLAYVAGRPVGNVLLEATGGYERPVMRALADAGLPVTRINPRRARAFAQALGKTAKTDPIDAALLARMGELVVAERMHPSAEQEELRALVQRREQLVQQRDDDRRRLKQATHERVRTSLITHISWLRAQIRDIAKDIAQLQRQVDDDLAQRLMAVPGIGEVTAASLQAYLPELGHLDRREIAALAGLAPYNADSGQKEGKRRIRGGRSAIRRVLYMASWSVIRTQPDFKARYERLRAQGKCAKLAITACMRVLLIRLNAMARDQTEWISAQG

SEQ ID NO: 225768 - protein, 366 aa, unidentified
MLCVSIELSSKTWLVTSLAPGSNKMSKHKIEGGDHCALLDLLQRLQSKAAERLGAPVRIVTIQEAGFDGFWLDRLLQAEGIESHVVDPASVAVPRRHRRAKTDKIDGELLLRTLLAWLRGEPRVCSMVAPPSPEEEDRRWLARERNILVDERTAHTNRIAGLLATQGIRGYRPLRRDCRARLEELETGDGRPLPPGLKAEIGRELDRLELVKQQIAEIEAARDALLASQDKAPGKLLLQLRSIGPEIASVLWFEGFYRHFDNRRQLAAFSGLAPSPWRSGNIDHDQGIAKSGNAKLRTTMIELAWLWLRYQPDSALSQWFRMRVQGNGTRRYRKITIVAMARKLLIALWRYVTQGVVPEGAVMKTA

SEQ ID NO: 225769 - protein, 402 aa, unidentified
MNAVGIDVSKGKSMVAIMRPFGEIVSAPFEIKHTASGINSLVELINSVEGESRIVMEHTGRYYEVLAHQLSKANLFVSAINPKLIKDFDNDSLRKVKSDKADAVKIARYALDKWQNLKQYNVMDELRNQLKTMNRQFGFYMKHKTAMKNNLIGILDQTYPGVNTYFDSPARSDGSQKWVDFASTYWHVDCVRKMSLNAFIDHYQNWCKRKKYNFSQSKAEEIYGKAKELVPVLPKDNITKLIIKQAVNQLNIASATVESLRTLMNETASQLPEYPVVMAMKGVGTSLGPQLMAEIGDVSRFTHKGAITAFAGVDPGVNESGSYEQKNVPTSKRGSSNLRKTLFQVMDALIKTHPQDDPVYQFIDKKRAQGKPYYVYMTAGANKFLRIYYGRVKEYLSSLPES

SEQ ID NO: 225770 - protein, 460 aa, unidentified
MNQFYLGIDASKGYSDFVMLNAKKQPVIENFQLDDTFQGHARLYERLGSFHQDHPEATIYAAVESTGGYENNWFQALLKFQGSLPIKTAHLNPLGVNYNHKAALKRNVTDKISAQNVAEYMIAHPEKVSYQHQDSLASLRKQWGFITMLTKQSTQLLNQKESLVYNANPEILMYCKDGTPQWVLKLLTRYPTALRLSKAKAKSVARIPYVSKERAQQLVATAKKSVASADDEVTEQLIVATVKQILDLNNTIKAQTKILADKCAVPEVELLKTFIGISDYSAIGLMLEIQSIKRFLSSKKIASFFGIHPAYKKSGDGIWKYRMSKKGRKEPRRILFMVAMSAIKSNPLIRSIYQQAVKRGMKKKAAVGLCMHKTLRIIYGMLKHNKAFDPEIDRKNRQKKPLRQRRVRQDKDRRYQDFDSKAPISRRQKMKRKERKQSQNVNNVEYGINEASVPVTELAN

SEQ ID NO: 225771 - protein, 354 aa, unidentified
MSQTQNAAIAVVGIDIGKNSFHIVGHDERGAIVLRQKWSRGQVEARFANMSPCLVGMEACVGAHHLSRKLNSLGHNARLMPAKYVRPYSRGQKNDFRDAEAIAEAVQRPTMKFVATKTADQLDLQALHRVRERLVSQRTGIINQIRAFLLERGIAVRQGQRLRRAELPRILATPPDVLSPRMVRMIEDLAGDWRRLDERVESLSNEIETIARQDAGCERLMSVPGIGPIISSAMVAAIGAGDVFTKGRDFAAWLGLVPKQISTGDRTILGKISRRGNRYLRVLFVQAAWVVLIKPKIWERHGLKPWIEAARKRLHRNVLAIALANKLARIAWSVLAHGRAFEARKIDQAANQSA

SEQ ID NO: 225772 - protein, 385 aa, unidentified
MQASNVCTPTVDHFGTILVAIELSRQTWLVTMHSPDRDRISRHKLPGGDHAGLLALIERAQERAARALGSVPAVVSCYEAGYDGFWLHRRLMAAGITNHVFDPASIAVEQRARRAKTDRIDGELLLRTLMAHWRGEPRVVRIVRVPSAEQEDARRDTRERQRLITEQTAHTNRIKALLRLLGMAVGNPRRRDWLIWLAAQRDWQGQPVPPRLAAELEREHARLMLVREQLEALSQAAVGADAPAAAAQMARRSALLLRLKGLGPVFAATLTNEVFYKDFRNRREVAGYCGLAPSPWRSGATNHEQGISKAGNPRARHKAIELAWLWLRHQPDSALSQWFRERTLNGSGRIKRIAIVALARKLIAALWRYLTTGLVPEHAVLKAKA

SEQ ID NO: 225773 - protein, 387 aa, unidentified
MSQTASREKFNAVEQRLMVAFELGWSKWRLALGAAMGQKPWQITIPARNAVALCEAIVKAKKRLGLPADCPIVTCYEAGREGFWLHRLLEQMGIQNLVVDSSSIEVNRRARRAKTDRLDAGKLLSMLLRYVAGEKRLWSVVHVPTREQEDGRHLQREIRTLKKERTRQINRIRGLLANQGVAIRANRRGLLEPLDSIRIWDGSPLPAALKRRVEIEVARHDFVHRQLLDLESERDARIRKSQERAAEIARRLMTLRGIAEVGAETYAREFSWRGFTNRRQVGSLMGVTPTPHQSGELSKERGISRAGNRHMRGIAIDLAWLWLRQQPDSQLSLWFNRRFASGGPRLKKIGIVALARKLLIALWRYADYGEIPKGALLKPGFSQINAA

SEQ ID NO: 225774 - protein, 419 aa, unidentified
MSFKILKFKCCGLDVHKTWIYACIGITDSNNRTEYKQARFSSFTKGLNELCDWLAKYNCTDVCMESTGKYWIPVFNILEQHNLWVTLSHPKYTKPMKGNKTDRKDAKWICDLYMCGMVKPSFIPPADIRELRDLVRYRYKLTCMITGEKNRAQNCLTVSNLKLDDVFSDVFGKSSRSITEQILQHPGEKFDVAPFVYGRCKTPIEEIQAAVDGAISKEQAVKLRQCLDHIDELNKHISELEQEILRLSDKYEAALNLIRTVPGFDKNPMTAVQILSEIGGDMSVFPTAKHLVSWAGCCPRNDQSNQKIKSTRISRAGSYFKPVLVQVANALIKSKKHLEFTNRYKRIKARRGHKKAIIAICRMILTAIWHILSDLKPYTPEGFLESHPVKEGKVLSSSQALNFFKQRGYIIKDEPLSVS

SEQ ID NO: 225775 - protein, 346 aa, unidentified
MEKISIIGLDLAKQVFQVHAADAQGRCILRKQLKRREVLAFFAKLTPCVVAMEACGTAHYWAREMAKLGHEARLIPPAYVKAYVKRGKNDAIDAEAICEAASRPSMRFVPVKSVEGQALAMLHRSRDLSIKNRTMLVNALRGHLAEFGFIAAKGIGKLPDLIKIVSEAPKEALPDMVRATLSGFLDAIAGLNVHLAGIETQLRAWHKSDAKSQRLASAPGIGLIGATALCALVPDPSLFKNGRHLAAWLGLTPRLDGTGGKTRLKRISKAGDGYLRRLLVLGATALLRSLANKTTPLALWMQGLLARRPRRLVTVALANKLARIAWALMAKAEAYKPLAAAQMANA

SEQ ID NO: 225776 - protein, 457 aa, unidentified
MAKKTKSKAKDSCRMLPVMHPDAAGVDIGAEEIFVAVPADRDVESVRSFDTFTRDLHQLADWLQSCRVRTVAMESTGVYWIPLYQILETRGFQVFLVNAQHIKNVPGRKSDVSDCQWIQYLHSVGLLKASFRPPDEICVIRSLWRHRESLVQMAAEHTMHMQKALSQMNLQLHHVLSEITGVSGLAILDAILAGERDPAKLASLCNWRVRSSRETVAKSLEGDYRPEHLFALRQSLVGYRFYQKLLFEVDQELERSMRDLPRAVGAPVQMPPRTKTCIYQRAGNEPAFDLKAELFRIAGVDLTDVPGISTITAHTILMEVGPDMSRFRNASAFASWLGLCPEKQVSGGKVLSTRSRKVKNRAAIALRLGAHCLYRAKNYLGEFHRKMKWRLGAPAAVTATAHKLARIVYHMLSTKDPYSESVLVQCDRQASTRAEIRLRRQAANLGFQLTPVSELDS

SEQ ID NO: 225777 - protein, 341 aa, unidentified
MRQYVGLDVSQRETAVCVVNETGQAIFEGKAKSDPGDLSKLLRKHAPLAERIGFETGAMASWLWHELRRVELPVVCIDARHAHAALSVRMNKSDQNDARGLAELVRVGWYREVKVKSEENQKVRAILVARFRLVSMRRDIENQVRSLIKECGLLFPRAIGQQFRNQVGELLGEDHQLLNVIGPLLSIHEHICQQQSKFDDEVRRLAKSDETTRRLMTVPGVGVVTALTFRHTIDDPSRFRSASTVGAYLGLTPRRNQSGETDTSGKISRWGDRLLRTYLFEAATVLLYRTKKWSSLKAWGMKLAKRVGMKKAKVAIARKIAVILHCIWVDGTSFDWGHAPA

SEQ ID NO: 225778 - protein, 329 aa, unidentified
MSKLSKKVIGVDVGAKFLTVSFNDDQNQDQVYNIGNNQRSILSFLKKICAKDYCFVIEATGNYSSRLLHLSLSNGFEASLINCMSVKHFSRMKNIISKTDAEDAKLIRLYGELFRPQLYVPKSIEIEYLDQEIKLLNDLEEEKRRYSVKLKALRYNPQLNPDTEKHYERRLKQLDKEIKEVELRLPQLQDEEFKEIKGLIQSVSGIGEKTSLQLMTATSGFKNFDSAGSLVKYFGLAPRIYQSGKKSYSPGKCRTSKTHIRSLLYVCSWTAMKHNTQCKALYERLLEKGKAKKLALIAVCNKLLRICFGVVKNKTAYQQDYQKNFKILT

SEQ ID NO: 225779 - protein, 441 aa, unidentified
MAVRKVFELMYPNAAGIDIGSASHYVAVPADRDEQPVREFKSFTEDLVAMAEWLSGCGIDTVVMESTGVFWIPVFELLESRGFAVYLVNARHVKNVSGRKSDVLDCQWLQQLMSFGLLSGAFRPTEEICVLRALSRQRDMLLDAQGRHVQHLQKALTQMNVQLANVIADIVGKTGQVIIRAIVAGERDPVKLAQFRDPRIQASEEQIAKSLRGNWREEHLFSLAQALKLFDAYQQLIGECDERLEQLLSQLARHAGEPEPNRNKGRQKNAPKFDMRTALFRVCGVDLTRIDAIDVSTAFKVIAEVGPDLSKFKTVKHFCSWLALCPGTKISGGKRLSGASKPCANRLAQALKLAATALLRSHSALGAYFRRMAARMDKPKAIKAAAHKLARLIYTMLTKGTEYVDQGQDYYEQQYRQRVVANLQRRATALGYTLMPSAQPA

SEQ ID NO: 225780 - protein, 414 aa, unidentified
MEIVHTHCAGLDVHKKTVVASIIVPDERGGLRKETCTFGTMTSDLLALSDWLLNCGVSQVAMESTGEYWKPVYNILENNFEVLLVNAQHIKAVPGHKTDVKDSEWIAELLRHGLLKASFVPPLGQRELRELARYRSTFVRTRATLVNRVHKVLESANIKLTSVATDVMGVSGRAMLEAILQGQSTPEDMAELARGRMRDKRDLLAKALEGHVEAHHRFVLIELLAQIDSLDATIQRFNAQIEEYCRPFEEAVVLLDTIPGVGRETAEVIVSEIGTEMSRFPTSDHLASWAGVSPGNNESAGKRYSGKTTKGNKALSAALNQAAHAAACTKDTYLSAQYHRLAARRGKKKAIVALEHTLLVIAYHLIQRKEPYQELGGDYFDKRRPEATAKRLIKRLEQLGYFVSFQQSPALLPA

SEQ ID NO: 225781 - protein, 385 aa, unidentified
MSNTDHLIRELTTIRVEHAVIAVSLELSQVSWVVTALLPGSEKLSRYSLAAGDGTGLLSLLERLQVRAAKQHGTGLRTVVIQEAGFDGFWIHRLLQANGVESHVVDAASIPVPRRRRRAKSDVIDGETLLRSLLAWLRGEPRVCSMVVPPTPEEEDRRRVVRERQVLHAELTRQTNRIRGLLTAQGISDYRPRRRDRHKRLQEIKTGDGQPLPDQLMREVRRALARIELLESQIKEIAAERTALIERAAPDSPAPRLLRLRSIGHEFAATLSLEGLNRTYANRRQVASYSGLAPTPWKSGKIDRDQGISKAGNPRLRKTMIELAWLWLRYQPDSALSRWFRERVGDQRGRVRKIAIVALARKLLIALWRYVVQGVVPEGAVLKAA

SEQ ID NO: 225782 - protein, 319 aa, unidentified
MNTTSIAYKKSKERNVGIDVGKDLLDIYILELELHWQEENNAEGIKRLVSKLNRYKLTRVLVEATGGYERAVIEACAEKGLPIIIVPPVKVRQFAKAQGILAKTDKIDARLIALFAFTIRPEIRPMPTKKIRSIKDLLARLRQLNETRTQELNRQHKAPEVLKKSHERMLKFLNKEIAVIKKKLAKDVAEVTEWQRAHEVICSVPGIGDGVAYTLLGELPELGHLSHRQISALCGLAPYNHDSGKLKGKRRIRGGRAPIRTVLYMAMLSSIQYNPIIKAFYTKLVANGKHKKVALTACMRKMMTILNAMVRDDLEWKMN

SEQ ID NO: 225783 - protein, 337 aa, unidentified
MSYLGVDLHSNSFTVCCRSSQGKERIATYELGRLGKFSKTLRKHDQLAVEATGNTAWFAEQIRDRISRVVVVDPHQFKVIRKSVKKTDKHDARTLAFFLSKDMLPEARMKSKENAQLHSLAGTRDKLVKQRTALINKIHNVLNSHGIKYRKESLSAQKHLTKVLSFDWDVIVGVELEVLVEQIRSLTKSIRKLDDEMSEHGKNLKGHKNLVSIKGIGERSATVLLSVIDDVNDFADEDKLAAYFGVVPKVSDSNETVRHGRITKNGSKIGRTTLVQCTLVAKQYSPYLRQYYERIKRHRGSGKAIIATARKFLGIIYQTLKNDWIFEDFPNFVIANT

SEQ ID NO: 225784 - protein, 412 aa, unidentified
MDRLYDCCCGLDVHKQTVVACLIRPTPGVGQTKTIRTFGTMTDELDGLADWLAEAGCTHVAMESTGVYWKPIYNRLDGRFTILVANAHHIKAMPGRKTDVKDCEWIADLLQHGLLTASFIPNQAQRELRDLTRTRTTLIDERSRTVLRLQKVLEDANIKLSGVASDIMGVSGRAMLNALVAGTTDPALLADLAKGTLRAKRERLERALAGRMHEHHRLLVGGHLTHVDFLDEQIDQLSQAITERLRPFETDLERLETIPGIGRRTAEVLAAEIGLDMSHFPTAGHLASWAGMCPGNHESAGKRKTGKTRKGSKWLRRALVQAAQAAVRKKGGYPSVQYRRLIVRGGAKKALVAVGHTLLITVYYLLTRQEDYHDRSPLQLDAELRARAKKRAMQQLDALGFDVTLSPKPIAA

SEQ ID NO: 225785 - protein, 341 aa, unidentified
MERFIRTAIDLGKNYFQVHGLESEGGRSISRKVKRSKMHEFYSQIEPCRVGMEACGSAHYWARQLTAMGHEVVLIPPAYIKPYVKRGKNDVVDAAAICEAMSRPDMRFVPIKSADQQAVLMLHKTRELLVKQRTMAVNALRGHLAEFGIVAAKGIGRVDELLALAKADAALPHIAGAAVACMAGHLEGLDLSIETVDEEIAKAHRQNPISRLLDEIPGIGTLIASATAASVPDPGVFKSGRDFAAWLGLTPRQNSSGGKEKLGAITKQGNRYIRKMLVTGATSVLRVAGKRKGALADWINALRARKPERLVAVALANKLARICWAIMTTGEGFRTDTYVKA

SEQ ID NO: 225786 - protein, 422 aa, unidentified
MKNSTARKLRQIPEGYLIVGVDPHKKRHAAVAMTGDALVHCKFKVVNSGQGYEELLERARAQMIALGCRGVIFAIETASHFWRNLAYFLEERGVPFRLINPFTLKRRREGRDLNRAKNDFRDAEVAAELLRTGEFSETRLPKGVYAELRAAYNAYRRLVKERARWLNLLQGLLDGLFPEFCQVFKDPAGKTALAVLSLCPVPGAIARMTEEQFVGAIKDGYQRPRLKLTKLRALHHVAQTSIGVRSGTQSVAVELSLLVERLRLNAKQVEKVEELLMGWVEAIEDSHYLLSVRGLSYITVAGLLAELGPMRSYQNAKQLIKMAGTNPTETESAGKRGSHTPMSKKGRPGLRWCIWQAAISLLRHNPDFRSWAKKRRERPIHAHPLKAREVIGAVGNRLLRLAYGLVRKQTMYRMPGLATAVA

SEQ ID NO: 225787 - protein, 312 aa, unidentified
MAIDTLGIDISKDYLDAFWHSRAELRSVPNTPAGFADLCNWVASADDILFVFEATGAYHRGLERHLGLAAVPFLKVNPRQARRFAQAVGRLAKTDSVDARLLAKMGVVLDLGPQRVEGEDIHDLRELLTARRALVKDQVTAKTRRATAVNPIIQEQLDRRISDIALDIRALDDVMAQIAQQRGTLEDRIQRLMRIPGIGRLTATVMLIDMPELGHLDSKKIAALAGLAPMSQQSGQWQGKERINGGRATLRRAVYMPALVAIRFNADFKRKYEQLIKAGKAKKVAITAIMRRMIILANTLLRENRNWLPVRP

SEQ ID NO: 225788 - protein, 492 aa, unidentified
MKPTPKRKSVYRSQNATLRALFERAGDPRKVICIPLDYAKRKHVALVCDGHGDILKGAFPVENNPAGVAWLIEQISATARHRKIPKNQIFLGGEDEPAYVANFTAALREAGYLVMRVNAHEAKNNRESHAASTDHTALLGIAKTLLSRRARSSGDASPENPAYHHLRELARCRRSLVRQQTATANRIHALVDQLFPGFLDDSKTGLSAFCNASIELMKDRFSAPEIAKRKPLALAKTLRRLLVHHPDEAAAKIINLARSVLPPAPHRVATLQRTLTVTVDLHQCLSRNANELRADAALTLATTPYALLTSIRGIGFVLAAGVAGELGDPTTLGTTDSLCCYAGIVPKTLQSGGPDSPPVQGHVSPRCNHILKDWVVQSAQKIHLYGVPEHKDRITRWNAEGRSGLYAGARHYLRLLRSLVKNQVPYLAPAGRTRGAAPEELAAAAQDTWKVMQNKWRTIPGGLDLMLDEAHPLGFWRRVVKETHDIQLPIRP

SEQ ID NO: 225789 - protein, 337 aa, unidentified
MRHVGLDVHKSQTEMCVLDERGKVVSRRSIRGEWHAIAAAVRALGKKDVTVCFEASQGAGFLRDRLREAAEKVLAADPAQVEAIWRSKRKHDRADAQWLAKLTMLDSVPESHVPEEEVRAWRQLIEYRRRLLGKRTAVKTAIRAHLRAHGKAAKGRGLWTRAGLARLAAEKFGTEMAALRRDMLLTELAEAEAQLRRATKALDAKAAEHRGVQLLMTIPGVGARTAEAAVAYIDEAERFDRTKRVGSYFGLVPVQDQSGPRNRLGRITRRGPSVVRWLLTEAAWQGIRRSPKLRGFYERVRKGDPDRRKLAAVATAHFLARAMLAMLKSGEAWRESA

SEQ ID NO: 225790 - protein, 347 aa, unidentified
MLADELDYVIGVDPHRDTHALAVVDVRTGGVVFEATTVADGGGYACVLRLADQHAPGRRVFAVEGTASFGAGLTRFLISHEERVLEVGRLRRERRVGKSDALDAIRAARSVLGQTRPARPRAGGEREALRALTAAREGAVTAKRAGLCQLRGLLVSAPEPLRAELRSLTRAQLLRRLAAVRPERRQDPELRGTLLALRALARRVKALTVEERELAREIEALTRKQAPQLLDQPGVGPLAAAQILISWSHRGRITSEAAFARLAGCAPIPASSGQTIRYRLDRSGDRRLNRALHMILVTRRRSHPATIAYIERRLQEGKSRREANRCLKRYLARSLYRLLEHKTPVAT

SEQ ID NO: 225791 - protein, 379 aa, unidentified
METSSKTCVAVDTEQATLFVALELSQSTWLVGLHSPIADKISINRIDGGDTDKLLALIEKKREQAARQLGRPVRVVSCYEAGRDGFWLHRFLIGHGIDNRVLDSASILVDRRARRAKTDRLDAAALLRVLMALVRGEEQVCRVVQVPSIAQEDERRLSRERERLLHERNSHIARIKGLLALHGVRDYRLVVRVWKERLDAIRTANVHALPARAKTEIERECRRLWLAKEMLAEVEREIEQTIERDSAAAGKLIRVRGIGPTFASVLTHEVFYRSFDNRRQVGSYLGLVSIPWQSGGVRRDQGITRSGNARARRCAIELAWLWLRHQPGSALAGWYRTRVGTMTGRMRRIALVALARKLIVALWRYLQTGTVPEGAVLKA

SEQ ID NO: 225792 - protein, 323 aa, unidentified
MHTFHLGIDVAKAKLDCALRRPDGKLRSKVVANNLGGFKALIEWLGKQGAGAVTLHVCLEATGVYWEAVAEVLAAQGMTVSVVNPAQIKAFGASRMVRTKTDKVDAQLIAGFCFERHPEPWQAPSPNEQALRAMVLRLEALQTMRTQESNRLEVAREAVKPGIAEHIEWLDKQIDALAKTIRDHINDDPDLKDKQALLDSIPGVGERTIATLLAFYANVERFGNARQAVAFAGLDPRQHESGSSVKGKPRLSKVGHAFLRKALYMPAMVTLYQTAWGKRFRERLAAAGKPPKLIIGAMMRKLVHVAFGVLKSGKMFNPALHGC

SEQ ID NO: 225793 - protein, 442 aa, unidentified
MAGRSQVVSVGVERRNARLTSLRTLVPLDAAIVGIDLADDKQALVVTDHEARVLARRMVRGSVWHAIKALPWAAKVARDAGFDRIVLACEPTGNRWKPLLQHARDNALELVCVNPMLVARGREWEDYTRERSDHRDAAVIARLTSERRCFAPYQPEGAWARLRHLGIHRDQQLKRATASRQAVRDLLTCAWPTALTAADHPMGSLTFRAVMSVSVDPEEIERMPLEHLTERARAPLRQWGGKRAHHGILQRLHASASAPGGVRAERAAAAERAHLAALDWLDAHTRQRDTEARMVATLEELDIARITRTLPGLSLVGAATILAETGDPKRFTHARAWVKHAGLCPRANESGTYQGRTRISGRGRPRLRSAAWRVIWGLLPHNHVYAVRYTHLRSRARNPLNDGQARSALAAALLRQLFVMIRTHSAWNPAIAAGREDLLDAA

SEQ ID NO: 225794 - protein, 316 aa, unidentified
MQTILNLGADVDSRFIVVACAARSFAPQRISNDRQGIRTWLQSVPRGSRLGIESTGSYHELLADLAHAAGLQVFVINPRVLRRYAQGVGQRGKTDRIDAEMIARYVAREHAELHAYVPPTKEQRALARLINRRGTLVAARGTVTQSLRGVADIDAELSHLEVCFDRLLRQIEILMQDALQQLPAAKQAAKQIATIPGYGPLGSTCLGYTLTRLPYANSDAVIAQTGFDPRPDDSGQKHGRRRLSKRGPSEQRRILFNCARAASRTRHWQPYYAAQLAKGLSSTAATVILARKMVRVAFAVVKQDAPFDPERVYAHA

SEQ ID NO: 225795 - protein, 428 aa, unidentified
MSKKNHTRLEEFRQLQKEIRGSDEYLIVGIDVAKERHKAFFGTATGKTLFRRLVFGNDRQGFERLLLQAEAMRVQHGLEKVVFGLEPTANYHKPLGEYLITGGHRVVLVSAKSVKRNRELLDGRWDKHDTKDSANVADLISQGKCLYYEYPELKLRQLRGLLSLKRRLKRQEHGLRVRIRNHLIAQYFPEFDRYFGRSESEGLAIVRWCLGPSVIASLAYDQFARWVAPGTRGIRQQERLRAIWQKASVSIGCEVGEAVRFEAKLMVEGLRQIREALRATEARIREICGGFAEYEYLLTIPGFGPDVSSKVLGAIGDPFRFTRGSQVLKMAGLDLVADRSGKRSDGVVPVISKNGKADLRYALYQAAMIASSRDRDFIMWFTNRVRGRQREKGIKTRMRVKLSAKLLIIAWTVMKKKEPFNPDYLRIE

SEQ ID NO: 225796 - protein, 401 aa, unidentified
MRFIGLDVHRDFCEVAIAEAGRVRRARRVETTPAALGLFAQSLAADDRVALEATGNALAIARIIEPHVGRVVLANPKAVKNATRSAKTDKLDARTLARLLAAGFLAEVWPPDERTRVLRRRISRRAQLVRQRTREKNQVHAILIRNLKGRAPATDLFGRAGRRWLAEQKLPVDEREMLEACLRGIDFLDREVAAIDRALAELVLASAELRRLLTLPGVNVVAACALLAAIGDIRRFPTARQLVGYLGLDPKVRQSGSEPARHGRISKQGPGETRHVLVEAAWHAARTSGPLRAFHERIAGRRGSNIATVAVARKLAVIAWHMLCRGEDYAFARPSLTREKIRKLELATGAQRQKGKRIGVWATKEQHQLDKELAAQAELAYRRLVQDWQPTRQETAPPPAL

SEQ ID NO: 225797 - protein, 360 aa, unidentified
MPYSTSIGLDVHARSISAAAYIFETGELVEATFGYDAEAVAKWAEGLPEPKAALYESGPTGFDLKRKLDALGLPCHVGAVSKMRKAPGDRVKTDRRDAAYLARLLMVGDYVECVPPTPRMEAARDLSRIREDAREDLMDARHQLSKMLLRHGYVWPAGRASWTKAHRDWLKGIHLAEPTAQYVLEEYMERVRECEARKARLDEAIADRAKEEDVAGIVQRLCLLRGISTLTAFGIAAEIGDFARFRTAQGFMSYVGLVPSEYSSGSSAARGPITKTGNSHVRRLLVEAAWQHSRPLSPASDSMQPPEGVPPEAAGIAAKANMRLHSRALHLRRRGKKACVANIAVARELAGFVWALALCG

SEQ ID NO: 225798 - protein, 485 aa, unidentified
MAKVKLSAFDRLRLGARLNRKERRDVEQRLSATDPGLEIVNRDAAGIDVGNESHYVAVPRGRDAQPVREFGSWTAALVEMAQWLMGCGIRTVVMQSTGVYWIAVHDVLQKHGLEVNLVDARGTKNVPGRKSDVQECQWLMRLHTYGLLRSCFLPAPEIHGIRTMWQLRDQHVKDAARCIQHMQKSLIAMNVQLHNALSDISGRSGQAIIRALLAGQRDAKSLAALRDPRCMASEEEIVHSLQGVWKADVLFELQQAVDAYDFYRQQMAKCDEQLKQHMALLPARKVETVVSSAEPSATTDRSKTSRSGKPRKPKGNQPAFDLEAELERILGVNATTIDGINVITVQTVLAEVGPDLSAWKTEAHWSSWLNLAPKRDVSGGRVIRHIREHRTNRVGNAFRMAAQTLLHSHSYLGARCRYLRAKLGGLKAVKAMARVLACLYYRLVTKGQRWVDQGIEEFNRRSEQRELAVLQRKAHKHGMQLVPTA

SEQ ID NO: 225799 - protein, 422 aa, unidentified
MRAVGLDVHLDFCEVAIVEDGEVRSAGRIETKPEQIELFAGSLGPDDRVALEVTGNAWEIARIIGPHVAQVLVVSPSDTGIRQARAKTDRLDSRTLAKLLAAGSLDAVWMPDRETWVMRRRLSRRGQLVWARSRAKNEIHAVLMRQLVGRPPFSDLFGVKARKWLAGLELAFEERETVDAAMRQIEFLDSEIAEVERLIARDALDSPEIKRLMGVPGVNVIVAASFMAAIGDISRFENPRKLVGYLGLDPRVRQSGPGPATHGHISKQGSVRARHALVEACWSAVRQPGPLHAFYQRIRARRGHSVAIVATARKLSCLFWCLLSREEDYAYAQPSLTKKKLRRLEITAGAERYTSAASGIWKANEAIRDAERELAHQAEVAYARTVRDWHATQAAKAGASATLGRASNRPSKGKAARQTTSP

SEQ ID NO: 225800 - protein, 354 aa, unidentified
MMTSTGADVVGGVDTHGRTHHAAAIDCAGRLLGDAEFPASAVGYRALLAWLVGFGRLVKVGVEGTGTYGAGLARHLAAQGIEVVEVDRPDRRTRRRQGKSDPIDAIAAARAVLAGTARGAPKTRTGPVEAIRALRVARRGAVKARTAALNQLHGLVVSAPELLRAELGGLTAAELVPRCAGFRIDPALLLEPSTGTKAALRAISRRVQALDEEIALADARLRPAVVATAPRTAAIFGAGPEVAGQLLVSAGDNPDRLRSDAALAHLAGISPLPASSGRIDRHRLNRGGDRAANSAVHRIVLVRMRHHQPTRAYVARRTTQGLSKREIMRCLKRYVIREVHTALLADFENLTQAA

SEQ ID NO: 225801 - protein, 316 aa, unidentified
MSDPLYVGIDVAKDSFDVASNPSGLTRSLPNDPAGRQRLLHALHSHSVALIVLEATGGYERSLAADLLGAGHKVVVANPRQVRDFARGIGRLAKTDRLDAQVLAQFAAMVKPRPRQESSPEAVDLAELVTRRHQLSDLATQESNRLPHARHPDVKRSLKKSLRAIDKQIDDLDKLIRQNIDADDGLRRKDEIVQSFKGVGPGTSAMLLSHLPELGRLNRQQIAALAGLAPWDFQSGKWAGQSHIWGGRMPVRNMLYMAAMSAIRFNKVIRKFFQRLDSKGKLFKVAMTACMRKILVILNTLVRNDCLWSPPPEQKA

SEQ ID NO: 225802 - protein, 343 aa, unidentified
MDHIGIDVHKNQSQICILTADAELIEKRIRTDRDRFAAVLGSRPTATILIEASTESEWVARCLESQGHKVIVADPNYAPMYSHRSRRVKTDRRDARALAEACRIKGYRKAHRAADERRHVRGRLAAREALVQTRTKYICLVRALLRREGLRIRPGSSSNFVERVGELDISKPLQREIAPILRLMAPLNRQIERATKDLEKIAHQDPTVRRLCTAPGVGPITAASFAAIIDTPERFKGAHQVESYLGLVPRELSSGEKQRKGRITKTGDRRTRYLLVEAAWALLRSKRPAVAPLQAWTERLAARRGRRVAVVALARKLAGILYAMMRDETEFNDKYWTAKTQGV

SEQ ID NO: 225803 - protein, 322 aa, unidentified
MIEEAVCVGVDVAKSTLDVVVTDSGEARQFANNDEGISQAVRYIAGVKPVGIILEATGNLEMPLAAALQAGRLPVAVINPRQVRDFARATGALAKTDRIDARILALFGARVKPEIRPLPDKKAREMGSLLTRRRQLIEMLTAEHNRLFQTSDDIRPSIEIHIKWLEEALSEINDDLDRRIRLSPSWLEKDNLLKSVPGVGKVVSSSLLIELPELGMLNRRKIAALVGVAPLNRDSGTMRGRRTVWGGRAKLRAVLYMAALVASRHNPIIAAFYQRLLDAGKMKKVALVACMRKLLTILNAMMRTMTVWQPETILRCVSTEAS

SEQ ID NO: 225804 - protein, 342 aa, unidentified
MTIYYIGMDIHKKTIAFCIKKQDGTIVDHGTVKATRPALKKWVGSLQCPWIGAMEATIFTGWIYDFLKSYAEDLKVANSKMLKAIVSSKKKSDRIDAQKIADLLRCDLLPECYMLSEEIRELRRVLRFRNLMVREASRMQNKASGLLMECGAEYSKKKLHGKKYFNSLLDSLEEIPESVITLLQISRSSYEMFQRSQKTLIRGLKNHSSIRKRVELLMSIPGVGEITALTWVLEVGDPMRFSSVKKAVSFCGLCSAHRESAGKCKRGPISKQRNKHLQTILVEAAKLAPRWNSQLAEIHAKALEKGDKNRATLEVARKLVAYMLAVDKNQKPFISAEKQTAA

SEQ ID NO: 225805 - protein, 404 aa, unidentified
MQVLIERGAGLDVHKKTVVACWFAGHELTSRAVKRTFGTFRWQLQELRDWLLRAGCTHVAMESTGVYWQPVHRVLEDHFQVILGNARHMANVPGRKTDMNDAEWIATLLRHGLIRPNFIPPKPVRELRELTRYRRKLVQTTTAAQLRVDKVLQSANIKLSSVASELFGVSGRRMLRSLANGVTDARALAELSRGKLRPKRDQLVQALSGNFTAEHARLLAIQLEMIERVEASVAELEHLIEEKASPYQSWITQLDAVPGINQTIAVDVLAEIGTDMTSWPTHRHFAAWAGLCPGNRESAGRRRKARTREGNPFLKSILVQAATSARKRRGSYLAARFQRLSRRRGERVATVAVAHELAVSIYYMLLRNEPYREPAAADPQHARDKRKTQLLRQLHRLGYDVVIA

SEQ ID NO: 225806 - protein, 391 aa, unidentified
MSMYFIGIDISKYKHDCCIISAADQKVVSKVTIKNNKAGFNELLTIIHSLANPADIRIGFESTAHYALNLELFLENSLLTFMEVNPVLISEYKKSKTLRRTKTDSVDCESIARWLMTVEYKPHSKGFYHAYSLKSLTRLRDKLIRQRSFYLVKITNVLDHTFPEFKPFFNERLSKTALYLLENYGSAEKMARMNSASYEKLRSLSRGKFSPQQFLLLKELAVNTVGVNNSIFDVELNSLLSLYKSLVKEINTIEKEINKLIEEVHPHYMSVPGIGPLSAAVIYSEYGDISNFTNPGQMLAFAGIEPGINESGTESHGGKMVKRGSSQLRYTLINCCLPLIRFDMTFATYYAKKRGEGKPHRVAITHVAKKLIRVIYALERQDIDFNAQKLR

SEQ ID NO: 225807 - protein, 331 aa, unidentified
MFPVGIDVSKNTLDLCMLYDGIKGRIKTRNIQNNRHSVENILRWLRLQHCSPEDVHVVMEATGVYHEQLATELHDAGFRVSLANPHRSREFARGMGIMTKTDKVDAYMLACYAFLKKPHRWEPPAPEIRYLGALLRRRDVLLGDALRDENRLEKYLSTDTPADIISSCRRMAQLLREEISNIERQIKAHIKASPALRRDYTLLTSIKSVGPQLGMHMLIVLRSHNFVSAEQAAAFLGVVPIEKRSGTSVRRRPRMSKIGPPQLRAKLYMSALCGKIYNKRMRNIYDEMCLRGKPKMVAIGALMRKLVHWCYGVLKTGTVFNDEDLKPVLST

SEQ ID NO: 225808 - protein, 417 aa, unidentified
MKCFVGLDVSSTKLDVCIMLSDTSTPVTASLSNDLSGATEIKNHILDLNHTYHFERIVIGMEATSLYSFHPAMFFHEDSQLKELHVEIMVEQPNKIKKYRDAFEENKNDTIDAFYIADYFRIERFSPSFLKEEKYMTLQHLTRTRLQIIEQLTRTKQHFIENIYYKCNTLAYQFKKEELSTNLWSSTMMTLITDEMTLDELANMPLQELADWLQQLGKGHFKDSEKLAQTIQAAIRGSYRLSKLQQDSVNVILGLLAREIRNLEKMIKEIDKAIEDMVETIPEYQCLTSIPGVGKVYAAGIIAEIGQIERFKDHPQVAKFAGLNWREKQSGNSNSQHTSLVNRGNRYLRYYLVEAANSVRRYDDEYKDFYKKKYHEVPKHQHKRAIVLTARKFVRLVVVLLRNHQLYTPPRRLMEDN

SEQ ID NO: 225809 - protein, 422 aa, unidentified
MLEETQDREELIARVAALDIGKAELVCCVRVPSMDTPGKRLQEVRTYQTMTRSLLVLADRLGELGVTRVVMEATSDYWKSPFYLLEAHGFEVWLVNARDVKHLPGRPKTDRLDAVWLCKVAERQMLRPSFVPPPPIRRLRDLTRYRADLVAARTAEKNRVEKLLEDAQIKLSVVAADIFGVSGRDMMAALIAGERDPKVLAQLARTRLRAKLSLLEEAFYGRFSDHHGFLLATMLGRIDQASADIAVLEAKLEEEIAPFAQAVERLDEITGVGRTAAHVIIAEIGVDMGRFPTPAHLASWARFAPSVKESAGKRKGKATTGHGNPYLARVLGEAAVAAGKTNTFLGERYRRIARRRGTKKAIVAVGRSILVIVWHLLADPDARFHDLGPGFYDTRSNADRRKRNHIRQLEALGYKVTLQPAA

SEQ ID NO: 225810 - protein, 396 aa, unidentified
MMNTFIGIDWADKKHDVCALSPKGDILAEFIIADTVKGFEQLHTFLKSQDKVEILIEKPNGLLVEFLLQRGWCVKMITPSVSASRRPRRSKTDTGDAFLLANLLRMNDPDCHLIHQDSALVQELRQVVDAHVNLQREKQRLILQLRYVLKQYYPMIFNIFPKLGTKLTLNFLETYPTPQDAKAASLDEIRHFFKSQVYRYMDRVPHKYQQLQKASVTAQAQTGFAMRVLSLVRVLKVMVQEVKALQKSVIQLFKQHPDYDWWLQFPGLGKLNAARLLSRIGDNRQNFKSADHLRAVAGTVPVTRHSGKRKQVLFRQQCSHSLRKLMFDFAMKSKSQCDWAKGYFESQLDRGHMKSRAYRALANRWAGIIWKLWQTGEVYDEKVHQANRQQALVQSA

SEQ ID NO: 225811 - protein, 360 aa, unidentified
MAHFAGLDVSIEETAVCVVDDQGMVLLQCSVATEPEAIAEALAPFAATLRRAGHEAGSLSPWLHPQLKALGVPVVCLETRQVRAAMSAQRNKTDATDALGLAHLMRTGWFRKAYVKTDGAYRLKLLLTHRRNLKRKFLDLENAIRHSLKSFGVRLNKVGRGGFEQAVREACAGDAFTAELMECMLTARAALWRQYLKLHKLAVGLVARDELCRRFMAIPGVGPVTALTFSAAIDDPSRFRRSRDVAAYFGLTSKRWQSGASIDVQGRISKAGDPDVRRALYEAASAMLTRYKGKTALKSWGQKIAKRCHKKAVVAVARKLAVIMHAMWRDGTAYADRPHAAGRPDDAPTAKERKLLGVLA

SEQ ID NO: 225812 - protein, 291 aa, unidentified
MLYAAIDIHKRSFQAAVLDSESGEISEQRFGASREELSHWAMSLQGGVAAVAIEATSGWRWVWRELVPLGFDVRLADPSEVKALRGTGKRAKTDRLDARWLVLLLAKELLPLSWLPPAEIQQLRDKTRLRKALAEDRTRWAQRLQAFLQHEGWPCARGRLLTAQGRRWVSGLALAPVARAHVETLLRLIDLVEDEQRALESELRRFARSDRRCQALETIYGIGPILACHILAELGEAKRFRRARSAVRAAGLDPVVADSGETTRRGHLAKHGSPACTGASRRAARPLNPPS

SEQ ID NO: 225813 - protein, 320 aa, unidentified
MSNITLGIDVGKFELAVALRKDGKFIDKLVENNSKGFQKILKFLKNNAPEAEIYLEATGRYDEKVTDFLSDKGFDVKVINPTQIRDFARTKLARHKTDKVDARIIAEYGSIFGGRTYTKIKDNVRELKELHRMSLSLKDELVATKNHLENQDTFPKFVTDLWKKRAEDLENDIKLVERKMKEIIFADPDLKLKFELLIKVPGIGEGTATAVLAEVTRLENFKTARELAAFIGLTPKHQTSGSSIRGRPRISKMGLKILRKALYLPALTAMRFNPTLKNFAEKLREKGKKFKQVICAIMRKLVHIIFGVLKYDVPKFKVGD

SEQ ID NO: 225814 - protein, 358 aa, unidentified
MEVYVGMDVHRKRSQVALLDHDGGQLLNRNLPNDPAELTPILGALAPGTPVAFEAAYGWGWLADLLEELGLEPHLVHPTRCKAIASARLKNDKVDARTLAHLLRADLLPEAWIAPPQVRDQRALLRHRAALVRTGTALKNRIHAVLADRGVRVPQRLWSKAGRAWLAALDLPPAPRMIIDDCLAVLDQLTPIITRMERDLLTHARPDPRVQALRELPGVGRITAMTLVAEIGDITRFPTARKLCAWAGLTPQVRNSDRTIRHGHITKQGSAAVRFVLEEAAERAKTRPPFAGFYVQCAARRGRHIATVAVARKLLARCFHVLTQLDNHQHNHADHASEKVTSPGALEVPHVPATRPFN

SEQ ID NO: 225815 - protein, 373 aa, unidentified
MDQDTIFMGLDVHSASISVAVAEGGGGDVRSVGTIPNTSTAMAKLINHLGPATRLSCCYEAGPCGYGLQRRLTRMGATCIVVAPSLVPQKPGERIKNDRRDALKLARLLRSGDLTSVWIPDETHEALRDLSRARGDARIDLLRHRHQLGKFLLRQQLAPDKKLTPWTKGYRTWLEALHLPHPSHQIVLRDYLAAMDRAAERLAELEKELALQAAHSPQAPVIAGLQAFRGIALTTAIVLVAELGDLRRFPSARDLMGYTGLVATEHSSAERHHRGHITKTGNASVRHVLVEAAWQYRRPPGVWGALKKRQVGLPPAVVAMSWKAQQRLHRRFRRLTHRGKLPHVAVVAIARELAGFVWAAAQHWPAVPQTMSA

SEQ ID NO: 225816 - protein, 454 aa, unidentified
MDILQRICAGLDVHKDTVVACVRWLDDRDRVHTEVRTFGTTTPDLLQLLDWLLARQVPIVAMESTGVYWKPLFNLLEGRMKVLLVNPEHIKKVPGRKTDVKDCAWIAQLLQHGLLKASFVPERPIRDLRDLTRQRTQLTAEKASVANRIQKVLEDANIKLGSVASDVLGLSGRDMLRALIAGQTDGAALANLARGRLRDKLPQLRKALTGCVTDHHRFLLRLHLDHLTHLESLLGQLDQRIGQEMAKDCPPEPPSGEGPAATVAVGPRGVPELAAADQPAQPSSGGTRVPLWSALWLLTTIPGISRRTAEVVLAEIGSDMGRFATSGQLASWSGLCPGNHESAGQRRSGRTVHGDRWLRSALVQAAWAASRARKTYLAAQYRRLARRRGRKKALLAVAHTLLVMCYQLLKKGQPYQELGPDYFDQLEPERRTRQLVRQLESLGHKVTLEPQAVA

SEQ ID NO: 225817 - protein, 423 aa, unidentified
MAAVSGIDWASQWHDVDIADELGTRLLAARFAHDERGVCALIAALAEHGVERVAIERPDGLLVARLLAAGITVLAIHPNQVAAARDRFRAAAGKSDRFDGFVLRELCRTDSHRFPVLAPCTDETLALRALVRTREDLVGARVALANQLRAQLDAAWPGATRIFRDTDSPIALAFLRRYPSHADARGLGPKRLDAFLARHGYCGRKTPEQLLKRLRSAPTPAIGEHEADARRNAVLGLVAALEPLVCQISQLTGEIRGAIRRHPDGPIFLSLFRDPKSVVCAAGLLAEIGDNRARYPHSDALAADAGQAPVTKQSGKHRAVSFRWACDKRLRNHIGVLADSTRHWHPWPTTSTNARSTAAATTRTPRASSAAHGPASCGAAGKTTPPTTPPNTERSHATSPCRVDTGCLMPLARERPGWCGSRR

SEQ ID NO: 225818 - protein, 370 aa, unidentified
MKQYSEAFIGFDTAKKKHAVAIAGVGRESEIRYLGEIDSSPAAVERMIRKLAGRYEKLHFCYEAGPTGYGLYRQVRALGHHCTVVAPSLIPKKSGERVKTNRRDAVTLARLLRAGELTSVWVPDTVHEAVRDLVRAREAASQDLRRKRQQLLSFLLRHRRIFGGRQHWSRAHLHWLAQQKFDHPAQQIVFQDGVDAIDDAATRLRRLDEQVAAIVPSWSMAPVVEAYQAMRGVSFVVAVTFVAEIGDLRRFDNPRQLMAFLGLVPSERSTGDRVRRAGLTLTGNKRARRVLIEGSWSYRYPARVSQTLQARLEGLPKAVRAIAWKAQIRLCARYRRLNAAGKKLPVVIAAIAREMAAFLWAIARQVAPAV

SEQ ID NO: 225819 - protein, 296 aa, unidentified
MDHFAGLDVSVKETSLCIVDDAGRIVREVKVASEPEVLLAVLTNPACHFKRIGLEAGPLSQWLFNALAEVGLPVICVETRHMRAALKAQINKTDRNDARGIAQMMRAGLYRPVHVKTLRSQKLRMLLTHRKLLQSKAIAIENDLRATLRNFGLKVGVVGTVKFEARIKELVDNTPDLVVLVEPLLIVRRVLREQIGILHRRLLAIVRNDAVCRRLMTVPGVGPVVALTYRATVDVPSRFRNSKAVGAVFGLTPSKHQSGESNRTGGISRCGDEVMRMMLYEAAHINAGAFGKMVLA

SEQ ID NO: 225820 - protein, 403 aa, unidentified
MYYLGIDVSKSTSRFVMLDQDGERYSKPFTLQNNKLEFEKLISKFKELNLNKDALLTGLEATGIWWENLYCFLTKKGFKVIVLNPHQTNKFREALRKKAKTDDIDAYVIAGLLRSRDYASSYIPEEDIQSLREFTKLRYELIKDRTCYERQVYSLLSLVFPEYSKTAIKNPFAVAPIAILKRYPTAKHLKDAKVKHIEKIVRSIKGNNFNVKEIQQLIDSAKDSIYSGRAKDARGLNLNILLSQVESLNKALLKLDEQIDEILSPGKDDDFPGSNLLTIPGVGPKTVAAVLSAVGSGAQSFASCKHFTGYIGFFPQIYQSGETMKANILSNRGPKYLRWALYVAAVACLRHNPELKNLYQKKRSQGKAPKQALICVAKKLGHMMLSMLKSGETYRPQRVFVYS

SEQ ID NO: 225821 - protein, 340 aa, unidentified
MSLVLQSFLPYPDSCLGTSPYQQGWDTKMAELSFGGIDVSKDRLDVLLLPEGLCFSVCNNAPGWAELIVRLRPLAVSAIGLEPSGGYERGIIRALLAAGLSVRRINPNKLRQFARARGVLAKNDRLDARLIAEYVAIMPTRVLQRDDAIERLAEIVTMRRQLCDEHVAAMNQATHLEDAMLRRISKRRLLRIEADILLLDKRLAELVAADPRLAHRYQLLISMPGVGPTLAYTLLATLPELGQIDRKQIAALVGLAPYDFDSGKLKGHRCIYGGRMPVRNVLYMAALSASRYNPALKAFSNRLAAGGKKSKVVIVAVMRKMIITLNAMLRDNTEWHPAAA

SEQ ID NO: 225822 - protein, 305 aa, unidentified
MKQQHQDSEVTIGLDLGERRHRFCALDGRGEVVEEGSVLNDRASLARLTARYPRALAVMEAGTHSPWVSRYLEGLGWEVIVSNPRKVRAIYQHERKSDQRDALMLARIGRMDRALLYPVRHGSEQAQQDLLRIKLRDSLVRARVALINSVRFSLKSLGYAVGNPSSERFHKVAMERLPEVMREMIALSVQALAELSARIAVLEREISLLARTKYPQTLWLQQVPGVGAITALYFVLKIEDPKRFKKVRDVGAYTGLCPRRDQSGGSDPQLRISKRGDAYLRRLLVSAAQYILGPFGPRSALREYG

SEQ ID NO: 225823 - protein, 358 aa, unidentified
MAHYSLSALKSFVATHHSEPFWVGIDIHKRSYHLALLRSDAKTFTLVTPACPEKLVEQLRHLDIIIAGVVYEAGPTGFSLARTLQTDDFQVIVAAPSKVPRSITAGAKTDRLDCIKLAHFASKGLIRPIAIPTEQEEAHRALSRRRHQLVDSIRRCKQRIKGFLLYHGFEETKSIKNWSSNYEEQIAALPLETEGCLTVESHLRELNFLQNELSSVTHQLNQINLKPKHRAVIRSLTSVPGVGKVVATTFCTEMFRPERFNRGEEVASYLGLAPTVRHSGEQTPRGHLVPVGQTRLRSLLIEAAWMWRAKDPYALELYNKLLNKTGIPQKAIAALARKLAIILWRLSIEQRVYRPIAI

SEQ ID NO: 225824 - protein, 325 aa, unidentified
MSSYQITVGVDIAKRKFDAVRLENGKYKHKTFDNSADGFATLITWLLTFGEIKPLICMEATGAYSIPLAEFLVNSGHSVSVVNPAKIKAFAKSELSRLKTDKADAKLIARYALEKQPSLWTPPPPNMIELQALLRRIEHLLEIRQMEQNRLDTANPVIIESIKTLLTLLDEQLESTRKQIRQLIDQDPVLKHRAKLLESIPGVGSASIAHLLLALSEHHGFTHAKQAAAYAGLEPRISESGDWTGKTRLSKTGDALLRKALYMPALVAWRHNPAIHVFCERLKTNGKNGKAIACAAMRKLVHIAFAILKSNKPFDPLYKTKLALA

SEQ ID NO: 225825 - protein, 425 aa, unidentified
MGIAKPIDSKSNTKEGEIVDKLFVGIDVGSRDNAVYIMMPDGSKHSAFEVQNNLGGAREISKRVVSALVAKNLSAVTIGIEATSVYGDNLMCFLREDGALERFERKLFVLNPKQVSKFKGSYSDLPKNDPVDAFVVADSLRFGRIGSPIYMDDYRYKALQNLTRARFYAVQNLTREKQRFMNHLFMKCSGLAQKKIFSDNYGVAALAVYEEFESPDDIAEMDVELLASFIAEKGKNRSPRPDEIARAVQAAARGSYRLPKTVNDSVNQVLSISISSMRAMQAQIKALNKEIERQFVNIPNTLISVRGIGLVFSAGIIAEIGDINRFDGQARLAKYAGLAWKENKSGMFEGQNTRLIKSGNRFLKYYLCEAALSLVRCDTEYRRYYDLKFKEVNKYQHKRALALTARKLVRLIFRLLKDNRLYIPA

SEQ ID NO: 225826 - protein, 319 aa, unidentified
METVQFEQLISVGCGIDVHKDIIVATIRKSNKDYQTKSYNAFTSSLIDLRDWCKSEGVTHIAMESTGIYWKPLFNILEEDFEIILVNARHIKNVPGHKTDKKDSVWISKLLLSGLLKGSFIPPVEIRELRDLIRYRKKKTQFIASEKNRMIKFLEDCNIKLSSVVSDTQGASATKIINDIIDGKGDITSLLIHAHGRIKASKEDIAKALTGRVTPHHRFMLKMIRETIDENEKLIRKLDQQIDLSIEKYQVELQLLQTIDGVGRDTAITIISEIGTDMSRFADEHHLASWSGLSPGTNESAGKKKAPESSTETNTSNLA

SEQ ID NO: 225827 - protein, 315 aa, unidentified
MVEQVVVGIDVSKAKLDVALLPGGEQFTVSNDRHGIGELLRRVSPLAPSRVVLEATGKLEQLAVSELAAAGVPVVVINPAQVRHYAKARGKWAKTDPIDARLIAEFARDLEPELRPLPDAETQALAALCQRRNQLLEMEQMEKSRLQRAPRANQKSIKAMLRFVRRQVEQVEKQIEHSIRHSPLWQAKRELLESMPAIGKVNSSTLLARLPELGQFTRQKICALVGVVPYNDDSGQWHGRRHIAGGRAGVRQVLYMATLSAVRCNPALRDYYQRLLGRGVEPKAALIAVLRKMLTILNARVRDNTPWRPPWPTHA

SEQ ID NO: 225828 - protein, 445 aa, unidentified
MEVVNPHAAGFDIGSRSHWVAVGQSDDEVREFGVFNEDLYSVADWLKEHKIKTVAMESTGTYWQSLYAVLLSEGFEVILCNGKFTKNIKGKKTDIKDCQWIQKLHTLGLLSGSFLPDKQTEQLRTYCRQRALLLDSAASASKKMQKYLRLLNLRLDVVVNDICGLTGLSIIKSICEGEKDPKKLASLRHYNCRKSESEIAKALETNGRQDYLFGLKQELDMYQMFQVKIHECDVEIKKLLDKIIDENNSKRQHHIDAKPHKKVNKNTPENIDLNLKAYQFFEGVDLMAIEGMSYSTVLSIMSEVGYEGIKKFKTAKHFANWLRLAPNNKISGGKILSSKVPKGSNRLKIALRNAANAIGNLKESTPLRDFFQRINFRKGRVSAISATARKLAVIIWNMVVKCKPYFNPVEYLYLDQKRKMGLVKRIQKQITKFELSKENFEFATI

SEQ ID NO: 225829 - protein, 367 aa, unidentified
MKKISTVMAKQSRNFSQPKLTIGLDLGDRNSWYCVVDEAGQIQLEQRVRTTAKALQEVFGTMPRSRIALEIGTHSPWISRMLSDWGHEVIVANARKVRLIAESRKKDDRMDAQTLARLARIDPELLYPVKHRSAQAQADLTVIRARAGLVRARTGLVNSARGLAKSYGERLRGCNVRNMNLEKAEGLSPELQAALEPLLNAIESLSERIVQYNERIENLAQQSYPQVALLKQIKGVGTLIALTYMLTLEDPHRFRKSRDVGCYLGLQPGRRNSGQSEPQLHISKEGDPYLRTLLVQGAQHILGPFGIECDLRHWGLKLAERGGRNGKKRAIVATARKLAVLLHHLWVSGEVYEPLHNSNRTTVEAAA

SEQ ID NO: 225830 - protein, 343 aa, unidentified
MEYYVGLDVSLKQTSICIVDQAGLVVREGVVDSDPEAISAYVKSKAPDAVRIGLETGPTSTWLWTELKRLGLPVICIDARHAKAVLKMQINKSDRNDAIGIARIMQTGWFKEVHVKDIDSHSVRALLASRALLVKIKRDLENHVRGLLKNLGLVIGRAKFNVFAVRVDELIEGRPELVAAVRPLLEARNAVEQQVSELDRKVMRLARHDAHVRRFMTVPGVGPITALAFKATIDDPARFARSRSVGAYVGLTSRRHASGEVDWSGRISKCGDAMLRSYLFEAAGVLLTRVPKWSAVKAWGVRLAKRNGLRKAKVAVARKLAVILHRMWIDGTEFNWSKKEIAA

SEQ ID NO: 225831 - protein, 344 aa, unidentified
MGEVSTIGLDIAKSVFQVHGVDIDGIVVIRKRVSRAKVLKYFGELPPCLVGIEACPSAHHWGRELQRLGHTVRLIPPSYVKAYLRRSKNDANDAAAICEAVTRPSMRFVAIKTTEQQTVLMLHRTRQLLVRQRTMLSNALRGHLAELGIVSAKGRNGTAELLKIIADGEDSRVSPLVRDILDVLARQYGTIGAEITSIDKSIQALHRLCEGSRRLAEIPGIGPLSATALVAEIGDWSTFSSGRSLAAWIGLVPKQHSTGGKEKLGSITKQGNRYLRWLLVVGAMAVIRYARKYGTKRRPWLARLMERRPTKVAAVALANKMARMAWAIMVRGERYREPKPLLAA

SEQ ID NO: 225832 - protein, 349 aa, unidentified
MAMTTIVEAARAVTGGVDTHLDVHVAAALDEIGGLLGVESFEATAAGEDKLACWLASFGPVTRVGVEGTGSYGAGLARHLAAVGVEVVEVDRPNRQLRRRQGKTDPLDAVEAARAAQAGRALGRAKSRDGNVEAIRALVVAKRSGRSTKVKTMNQIRHLGFTAPDPLRARLSGLSRAELAGQAASLRPRPGSDPVVFATKTSLRILGRRVLALDEEKTELDVHLTELVTAAAPELLAVYGVGIDTAALLLVAAGDNPQRLRNEASWAHLCGVSPIQASSGKVTRYRLDRGGDRQANHALWRIALTRMGSDPRTRTYVERRLAEGKNKLEIMRMLKRYIAREVFPLLPRT

SEQ ID NO: 225833 - protein, 341 aa, unidentified
MKQEMNVLGIDIAKHVFHAVGMDDTGKIVLRKRLSRHDLVPFVAKLPIVLIGIEACSGAHYWARRFRAYGHEVKLMAPQFVKPYVKSNKNDSRDAEAIAEAVTRPTMRFVPTKDVAQQDIQALHRVRERLMGERTALVNEVHGLMHEYGIVMPKGVAKFRQAVVGKLEAEKDKLTPLSQEMFWKLVEEFAALEEQLAYYQEKLEALATTHPECQRLMTIPGIGPLSATALVAAVSDASAFKNGRQFAAWLGLVPRQHSTGGKERLLGISKRGDSYLRKLLIHGARATMRWVGRKTDRRSQWIRQLSERRGKNRTAVALANKNARIVWALLTSHQAYEPAKG

SEQ ID NO: 225834 - protein, 366 aa, unidentified
MRPSITPLGVPVGVDVHKRRCKVVEFNHGEIKVRKSIANTREEWVELLTELPPEAEIGLEVSTAGYYAMSVLEEAGWRERAHWVHTAGIDSNRRQKNDRLDAERLARKLAAHHLDPLPEAWFPPPEIRALRLRVRQRCWLALLRTQTKNHMQSLLQMHGLLLPGSDPFGAEGKAWIEQQKLPAPLSESIPQIQQVLKLLGKEVEISEKNLAAMEKQFPQLALLRSIPGIGPLLAAVIWSEIGDIERFASAKALANNTGLVASFYDSGDVQVSGPITRQGSRWLRWALVTAANVAIQHRNPFADRYHRLRRKKKPNVAKAAVAHSLARCVYGVLKHGCPYREDRWGRKVGALEQEARGSQRSTKTVP

SEQ ID NO: 225835 - protein, 408 aa, unidentified
MNPLFVGIDVSSRSNIAYLMKPDGSKHSSFSVQNNLGGAKLLSERIVSALGSMQLERVVIGLEATSIYGDSLVYALREDGRLGRFQRKIHVLNPKQVRKFKEAYSDLPKNDWVDAFVIADHLRFGRINREVYMDDYRYKALQTLTRARFDVIQNLTREKQRFANYLFLKCSGMAQDKDIQNTSATTIALMEHFETVDDLANADLEELTAFITETGRGKFADPDATAKAVRAAAKGSYRLPKTVNDTVNQAMAVSIASMRALKGQVKVLDKAIEQQFEIIPNTLTSIPGIGKVYSAGIIAEIGDIHRFDSQASVAKYAGLVWNRSQSGDFEAEHSRMIKSGNRYLRYYLLEAANSVRRCDSEFRRYYDLKFKEVNKYQHKRALALTARKLVRLVFRLLKDNRLYIPPEG

SEQ ID NO: 225836 - protein, 368 aa, unidentified
MGNEAKRFVGIDLSKRTYEAVAITINPQTIIRWNGKLDLRGRKCLLDKLHSGDTIALEAGTASFKIAKEIQSKQGVMVVVLNAANVAIIHASLKKTDKEDALKLARLIEKYSPEELPVVPIPTDQEMERRALVAHETRFRQDRVRLINRLHAVFLRAGFPDHTKRQLGITASREKLIVSELDGFNLVEAMNLDHMIVEYEKILEDLDKQINDTVVACGEDAEILLSIPGFGIKTTMAVLAYAGDMRRFENPSQLVNYIGFSPRLYASGDIERSGSITKRGNPQVRWLLIQSAWCMVQSKAANPLKDRFDAMLKRGKAKSVAIVALARKLLELVFILLTRREKYRFIDPSLYAIKLRRAGFNLVGAGIG

SEQ ID NO: 225837 - protein, 348 aa, unidentified
MLIIGCDYHPGFQQIAFVDTETGEFGERRLTHRDEAEQFYDTLRERSVRVGMEASGHARWFERLLRDLQFELWIGDAAEIRTKRVRKQKTDRQDAQLLLRLMVEDRFPRIWVAGAENRDLRQLLWHRHRLVQMRTRVMNQLHVVALNEGLRRKKALWRPAGRNELESLILAPWASRRRRDLLDLLDQLTPKIQELTRALEDEVEKRPVTRRLMTHPGVGPLTALAFELVIGTPERFHCGKQIASYVGLVPSEESSGDRRRLGHISKQGNSLLRYLLVEAAQVTVRSQPHWRSKFFHLAMRRGRKIAKVAMARKLAVRLYWMWRQGCDYAHFEKLGSHAGEPGNRHGVE

SEQ ID NO: 225838 - protein, 353 aa, unidentified
MLAEDYDFVIGGDPDRDTIDLAVLDTGAGRVHAHLADSADGAGYRRMLTWAGQHAPGRRIWALEGTGSFAAGLVVFLGDAGEKVVEVGALKRARGAKNDRIDAIRAARQALASDEQGALRSGGLREALRMVFACREGVLVSRTKAINELKSLIVVAPEELRAQLRGRSLLVQLARIEQLQIATVAPVEQRLSVFSLQSVAARVRFLYAQLAELDPQLLELIRQHPAGPALLAEAGVGPVVAAQLLISWSHHGRVRNEAAFASLAGVSPLEASSGQRPRHRLNRGGDRALNRALHTVAITRMRCHPETRVYEARRIAEGKSHRDIRRSVKRALARRLYRKIEAAVRLQDVTVAA

SEQ ID NO: 225839 - protein, 446 aa, unidentified
MATRTVGIDVAIRGPHVAIILDEQGRPLGTPIRFRLSAAALDELVTKIRAGLQADDTVMVVLEPTGMAWFPLARRLTQAGCTVIRVKGQRVKALRRYLSEYAKTDVTDAQVLGRMLAFGRRGLLPLYVPAAKQQALNRLTKQRARYQDAISSIRRRLLDLIRWAQPTLEPVLPSLGTSVSLAVLEHYFNPAQLQALGARRLTEFIGRHVGGNHPAHGPFVEELARGLLAAAADAVALFGADGVDFELLQLEVRQEIQLLRHHRELLVELDRAIEQLYRELHPVEALRTLPGIGDTLGPALLGVLHTASRFGAQRRLRGFCGLFPRRQESGGVAHPGQPITQDGNNRIKRNLMLAADVARTVDPELAAVYYRCMVEKGHHHRQALCAVATRLVNRIHAVLRDGRPYELRDLDGHPITVSAAKQLIQTHLRVPDVIRRTRKKAPVAAA

SEQ ID NO: 225840 - protein, 375 aa, unidentified
MKNKVRFLGLDVHAETIAVAIAEPDGEVRSLGTIANRAESIRKLVKKLGSAEQLKACYEAGPTGYVLYWQLAELGVACEVIAPTLVPMKAGDRVKTDRRDAERLARSYRSGDLTAVWVPDEGSESLRDLVRAREAAKQDQLRARHRLSKFLLRMGQRPAVGMKAWTAPYMAWVRQVHFTQVAREATMLDYLHEVDHMSERVRRLEQAITEAVKLATPAVQEVVKGLQALRGIAEISAVTIIAELGSITRFDTPRQLMGYSGAVPSENSSGKRTQRGSITKTGNAHLRRIVVEAAWSYRLRPAIGPRLRKRQEGVSEPIKEIAWKAQVRLTKRYARLAAAGKDQRKIVTAVGRELLGFIWAIGIKAETASKLQMAA

SEQ ID NO: 225841 - protein, 408 aa, unidentified
MNTLYVGIDVSSKSNVVYLMLPNGDKHSNFSVANSHEGSTQLVKRILSALTSHSLDTVLIGLEATSVYGDNLVYFLREDATLAPFNRKIHVLNPKQVKKFHDTYNDLPKNDYVDSFVIADCLRFGRINKEVYMGDYRYKALQNLTRARFFAVQNLVKEKQRFMNVLFKKYSTMTQEKVFSDAFSTTALAVYDEFESAEALANMDLHELTDFIIEKGKNRFPDPDAVAKAIQKAARSSYRLPKTVNDSVNQVLSISITSMKALESQIKEFDKAIKALMELLPNVLISIPGIGPVYSAGIMAEIGDINRFDNQASLAKYAGLAWKQHQSGGFEAEVTRLIPSGNRFLKYYLCEAAFSLVRCDKKYSDFYHLKYKEVNRCQHKRALALTARKFVRLVFRLLKDNRLYCPAK

SEQ ID NO: 225842 - protein, 423 aa, unidentified
MLGGDREKGSGLTITCGIDWAENHHDVALVDEAGQLAAKRHINDDAEGYRQLLSLLAEAGDDPRDPIPVAIETARGLLFACLRATDRKVYSINPMAVARYRERHRVTRAKSDHADAVALAHILRTDSDVHRPLPADSELVQAISVLARAQQDAVWNRAQLNNQLRSHLKRYFPAALAAFQVRGIGLDSREARAVLAAAPDPAAAARLTRVQQRSLLRKSGRQRNIDTWADRLRTVFTNDYLHQLPLVEQAMGYQTTGLVRQLDAACRAADDLAEAAAEAFTQHPDAEILSSFPGIGPLTGTRVLGEIGDDRTRFRDARALKAYAGAAPITVASGKSHAVHHRRVKNQRLAAAGYVRIFGALPSPQVKEHYDRRRARGDRHTAAMRNLFNRLLGCLHHCLATGQRFDPAKAFPALGTPAEAAAS

SEQ ID NO: 225843 - protein, 323 aa, unidentified
MQNHVIGIDVSKKTLDICVIFNGKIKKKALTNTESGFKNLIAWLSKFELVNPHVCMESTGCYSENIAEFLYKNKFKISVVNPLLIRAFRISKMVRQKTDNSDSEVIARFCLQNNPILWSPKPRENKELHEINVRVDALNKELNRLINALEKEYLNETVKKSIDEEIKFVKKEIKALKIEAKKIIKDNEKLKNQFGLLTSIKGVGTKTALTILSDMPDVDKFENAKQYAAFIGVTPSHFQSGTSVNGKSHISKLGSKKVRKILYMSALVTKNHNSHFDGFVKKLEKKGKTAKVIIVAIMRKLMHLFYGMLKKNVKFDENLAFKS

SEQ ID NO: 225844 - protein, 400 aa, unidentified
MHLTANISIPQKNFIAIDLHSDNAVICVRRNALNKAGELVGKNICCGRVSIRDGLDNFIKVLVPHCQDFDHVAVVESTYNWYCLADAFEERGWLLRVADPSTVSQANLKSSDDRTDAQYLAERLRVGSLKHYLPLNYSSRALRDLCRYRMAMVQDCASLKIKLINLYRNQLSKNVRVADLLERCQPHMQPNYRFNSDILEEFKDPNIRLRVAFEISRIAMLEEMIEECNAEIQKQCKDQELVKLCKTIPGCGPVLSAVICTEISTMQRFKSAGDFVSYCRLCSTSKLSNGKSKGLGNAKNGNAYLSWAFTEVAQYASRNPVIREILQRLLRKYGGLRVKAIRTLAAKIARVTFYVLKNKQPFNAAKCFGMELTKSIVKKLPHKPLGEDAAVVLPAAAGQA

SEQ ID NO: 225845 - protein, 402 aa, unidentified
MYVGWDWASQRHDVTVIDDTGQLVDRWRLAHTEAGIHQAMTRLAGHGRPDDLAVAIEATSGIVVDRLLAAGHPVVPIHPNSFNAARPRWGASKAKSDPGDSFKLADYLRTDGHRLRRLQPTDAATRHLQAISRLRTDHLEAKTTATNQLSALLEAHWPGAKAIFARLDSDIALDFLERYPTPQAAQRLGEARLAAFLRRHGYSGRRTPAQLLHRLRAAPVAVDQLDPEVLADCIRIQVRLLRSLLGSLADLDRALAAALGEHPKATVLQPLPRIGQINLAQVLAEVGPILDRTGDLSAAAAEVGATPVTKQSGNSAVVQFRWAANTRARNALGIFADNSRHASRWAAHLYRQARRRGKRHPQAIRILMRAWLRVIWVCWHTGRPYDINHHRAEQRLAQEPAA

SEQ ID NO: 225846 - protein, 343 aa, unidentified
MQTITTIGLDIAKSVFQVHCVDAGGNVVLRRQIKRRYMLAFFQKMPPCLVGIEACASAHHWSRELRALGHTVRLMPPAYVKPYVKRHKNDATDAEAICEAVTRPNMRFVATKTPEQQSCLTLHRTRHLFIRQQTSVIKAIRAHLAEFGIVAPVGRNGVEQLLGVVADGSDKRLPEVARACVTALGNQLRVLKSQILEFDRRITAWHRSNEVSKRLDEIPGVGPALATALVASVADPKAFRSGRDFSAWIGLVPKQNSSGGKDRLGSISKRGDRYLRSLFTTGALAVIRYAKIHGTKHRPWLTALLARRPTKVAAIALANKIARMAWAMMAKGERYKEPAALAA

SEQ ID NO: 225847 - protein, 422 aa, unidentified
MSYRVAAIDIHKKVLMVVVATAANEVDDPTGEALEFECGRFGTGHGERTQLVNWLREREVMEVVMESTAQYWKPVWLELEPHVPKLHLAQAHSNRAPKGRKNDFRDAKRLARRLLAGELLLSFVPDAEQRMWRTLTRSKQQLVRDRVQLQNQLEALLEEMRIKLSGVISNLLGVSGRRILTALSQGESDALKLAELGDERLQCSQEELADALHGSPAPAHLAVLQLALERLELLDRQIQRLDLLVAQELKKYEETVIRVAEMPGFGVDSAQQIIAEMGVEAQAFPSAGEFSSWAGICPGSNVTAEQNKSSRSPKGNRFVRRILTQAAQAAVKKKGCHFQSVFRRLLPKLGYNGAIWAVAHRLGRVVWKILHDGVRYIELGTESTPQVKKRRARKLVQALRKLGYRVTLTPMDAPVPNPAGAG

SEQ ID NO: 225848 - protein, 466 aa, unidentified
MKPFYMGIDVSKGYADFMILNSKKQPVTQSFQLDDTFDGHQSLYKILGRFLTEHPGSALFAAVESTGGYENNWYNSLIEFQGSLNIQTARLNPLGVMHNSKADLKKNTTDKISAQNIAEYLIAHPEKVVYQKEDQLSGLRKQWGFVKMLTKQSTQFLNQLNTLLYTANPELLSYCQDGVPGWMLALLVQYPSAARLKNAHAKTVGNIPYVSRMKAQQLIANAKRSVASASDATTEQLIVATTRQILHLKKTIAEQTKRMIKECSVSEIELLKTFPGIGDTSAIGLLIEIQTVKRFASVKKLSSFFGVHPVYKVSGDGAGGFKMSKQGRKEPRQILYMVALSAIRYNPLIQKIYEKHQQQGKHNMAAVGICMHKILRILYGMLKHNAAFDPQIDIRNRQRNVPVKNDTPVKNTNRRFQDYDQKAPVTRRQRKKRLERERPHNEGNIESWVTTPVPLADIIAGILPQL

SEQ ID NO: 225849 - protein, 347 aa, unidentified
MTIVKAPPGITGGVDTHLDTHVAAALDPLGRLVGTESFDADAAGYKALLSWLEGFGQVTKIGVEGTGSYGTGLARFLRRKGVEVVEVDRQNRQARRSQGKSDPLDAVEAARAAISGRASGSGKTKDGAVEAIRVLVVAKRSARQARVKAIVQMRHLGFTAPDQLHSRLKGLTVTALVAESARFHPTRSPDPVTAATKASLSSLAHRIQSLEAEIAELDEKLEPLLIATAPDLLALFGVGPDTAAALLMAAGDNPERLRSEAAWAHLCGVSPIPAGSGKTSGHLRHHQGDDRQANSALWRIVMVRIAHDPKTTHYFERRVKEGRTKRDVIRILKRYVAREVYRHLPRG

SEQ ID NO: 225850 - protein, 343 aa, unidentified
MEYYVGLDVSLKQTSICVVDQSGSVVREGVVDSDPEAISVYVRSKAPGAVRIGLETGPTSTWLWTELKRLGLPVICIDARHAKAVLKMQINKSDRNDAIGIARIMQTGWFKEVHVKDIDSHTVRALLASRALLVKIKRDLENHVRGLLKNLGLVIGRAKFNVFAVRAEELIEGRPELIAAIRPLLEARNAVGEQVSELDRKVMKLARHDAQVRRFMTVPGVGPITALAFKATIDDPARFARSRSVGAYVGLTCRRHASGEVDWSGRISKCGDAMLRSYLFEAAGVLLTRVPKWSAVKAWGVKLVKRNGLRKAKVAVARKLAVILHRMWIDGTEFNWSKKEIAA

SEQ ID NO: 225851 - protein, 340 aa, unidentified
MPDGVRVVGLDIAKSVFQVHGADSMGERFSDGSSDAMMWSSSFASFRAAWFGLEACPGAHFWGRLLLSMGHEVRLIPAQYVRPYVKTNKNDAADAEAICEAVTRPTMRFVPIKEEMQQEILVIHRVREMLIRQRTQLINAIRGHLAEFGVIGPNRAHNIGLLTVLIEDETETRIPPVARHALRYLAEQLREVKTKLARFDSDLVAVARGSSACRRLMTIPGVGVVTASALVSSMRDPADFKSGRHFSAWLGLVPKRHSTGGKEQLGSISKRGNGYLRKLLIHGSRSIMRWRGRAWIWLAKLRDRRPANVAVVAIANKTARVVWALLRYGGTYGVPTRGAA

SEQ ID NO: 225852 - protein, 452 aa, unidentified
MPKTTASENLTRMNPGAAAIDIGSTMHMAAVNPESNGTPIRAFGTFTHDLHDLAAWFRCCGVTSVAMESTGVYWIPAFEILEQHGFEVILVNARYAKNVPGRKTDVNDAAWLRQLHSYGLLRGSFRPNAQVATLRAYLRQRERLVEYAAAHIQHMQKALMEMNLQLHHVVSDITGVTGMKIIRAIVSGQRDPDVLASLRDVRCHSTVETIRASLIGNNRDEHVFALSQSLELYDFYQVKMLECDRKLEAAIASMTTELEATLAPLPKIRTKTKQTNAPSFDVRAALYGLTGTDLTQIHSLGSSLALKLIGECGTDLRAWPTAKHFTSWLCLAPGNKISGGKVLSSRTRRSSSRAAALLRLAATTIGRSDTALGAFYRRLAGRIGKQKAVTATARKIAVLFYNALRFGMVYRDPGAAAYDERHRGRVIANLQRRARSMGYELTPMVCAKECVS

SEQ ID NO: 225853 - protein, 370 aa, unidentified
MSVYVGIDVHRKRSQVAVINQDGEVLANRNVPNGVETVLGVIGGLPAGTPAAFEAAYGWGWLVELLEDYGFAPHLVHPLRCKAIASARLKNDKVDAAILAQLLRADLLPEAWIAPPAVRQLRALLRHRVQLVRLRTLLRNRIHAVLADHGHDRPAGCWSGPGRAWIDSLPLPSVSREVIDDDLAMIDALQVPIDRLDWEVRQRARSDPRVKVLTQLPGVGPFIALVILAEIGDVTRFGSARKLASWAGLTPTVRGSDRTIRHGHISKQGSAWLRWALAEAAQNAKRSPQVAASYQAMARRRGRKIATTAIARKLLTRAWHLLNDAERTTVPQTATAPAPPDGTRPQTRRGRQAPGELANTHEPATPRSKI

SEQ ID NO: 225854 - protein, 356 aa, unidentified
MTVYVGIDVHKRFCQAAMMDDSGRILRELKFENTLEGAYRLVNLAKSINPNVKAVLEPSANYWIKLYDKLEDEGVEVKLSNPSRTKAIAEARVKMDKLDARTLAYLLRGDLVAESYVPTRKNRERRTFIRHRASLMKMRVEVKNRIHTLLDKYDLSYEYTDLFGKEGLEWLRSLTLPATDDQILKSNLQILEMLNEQIRNADIQIAKDAVDEHQAKLLMTMPGVDYYAAMILLSEIGDVKRFASPEKLVSWVGLAPQVHQSGETQWTGRITRKGSKRARWILTQCAHTARQHDPKMREFYERIERKHGSRKAIIAVARKMLSIMHVMLTRNEPYHGENRQLTQQKHKRLIKIANSA

SEQ ID NO: 225855 - protein, 380 aa, unidentified
MRFIGLDVHQKYAEGCEIGPNKEKRRFRIANTRQAWEEFAKTLDSNTRIVMEATSNAFWIHDILSGYPGQVVIANPLKTRAIAEARVKTDALDAQILAQLLAADFIPESWIPSKDEYQLRVLLHHRIRLGKIRTMLKNKIHAALIRNGIQSPRSDLFGKSGRKFLESISLPETEQIIVCSSLKLLDAVQKEMAALEADLFARAKENSNVKLLMGIPGISVLSALTILAEIGPIFRFSSPKKLACYAGLVPSVHQSGKTRYTGNITKEGRSTLRWILVQCAQRAIQSKGKLQSFYFRLKEKKGHKIAIVATARKMLHIIWAVLTRREEYRDIRRDLLERKLKNLAKQAQAYEVDTKELLRVIDCIEDVSEEETQSLLFETG

SEQ ID NO: 225856 - protein, 348 aa, unidentified
MKNYQMGIDISKEKLNICLRKGTHTVREEEIKNTVAAIKKCVKRIEKESGVTNDDLLVCAEFTGRYIYPLVCACNEMGLFLWMEDPTRIKNSFGVTRGKDDRVDARRIAEYAFRFSDKAVAYKMPDKTLVSLKNLLTDRDTLANDRKKYETQLRDQKGYMDAEDYRRKKRSWSAVVKTLDKQIALIDDEIQRLVESDEKIKHQTELLKTVDGVGDRIAVRMVVVTMAFTRFETPRQFNCYAGLAPFRYTSGKSIYSKSKVSQRANKQIKSLLHLAAVSVATHMKSGEYKDYYKRKTEEGKHPMCVLNVIRAKLVSRMFAVIKRDEAYQRDYKIFTPTEKNYQKTIANS

SEQ ID NO: 225857 - protein, 290 aa, unidentified
MNEITTIGLDLAKHVFQVHGVDAAGATVLRKQLRRAQVLAFFSRLPRCLVGMEACATAHYWARELSALGHEVRLMPAQYVKAYIKRNKNDAADAEAICEAVSRPTMRFVPAKTAEQQAAVLLHRGRERLVRQRTMLVNALRGHLAEFGVIAPQGLRNVGKLIAVIRDEEDARLPGLARQVLQVLATQIEQIEAAVMALEKQLMAWHKSNPVSQRLATIPGIGPIIATAIAAMVAEPSGFRSGREFAAWLGLVPRQNSTGGKNRCSVPLISCWLRGRPAFGLSKERPRNSD

SEQ ID NO: 225858 - protein, 265 aa, unidentified
MTKMYIGIDISKENLDVAIHESDKQWRFTNDLGGISNVCEVLVQLKPSLVVFEATGGYELPLYVSLEEAGLPAAPVNPRQIRDFAKATGKLAKTDTLDARAIAHFGAALHPEPRPLPENQEIKEIVARRTQLIQMMTAEKNRLRSARKRMKTRIEAHIAWLEKELEIIDKELREHINENPAWKEKDDLLQSAPGVGPVLSITLLAGLPELGMLDRKKIAALSGVAPLNRDSGTMRGKLLTIVNAIIRTRTRCRCTMLDISLAHSA

SEQ ID NO: 225859 - protein, 428 aa, unidentified
MEVVHECCAGFDVHKKTVMACVRRMLEKGRIERQVREFGTMTADILALGDWLSGLGVTHVAMESTGVFWKPIWNLLEGSFEILLCNAQHIKKVPGRKTDVKDCEWIAQLLQHGLLRASFVPERDQRDLRDLTRNRAQLVQDHTRVVNRVHKTLEDANIKLGSVATDIMGVSGRLMLESMIRGEMDPEKLAELAQRRLRGKIPQLKPALEGRLREHHRFMLEMLLDQLKSLEGLIRRAEVKIEEISCNSKLSVSGEENSKVPFDEAVRLLDTIPGINTVVAQGVVAEIGTEMGRFPTSGHLASWAGMSPGNNESAGKRRSGKTTKGNRWLKTLLVQAAWAAARTKNTYLQAQFRRLVGRRGKKRALVAVGHTILVMAYQMLKNRTSYAELGPDYFDRLDPQRTTRYLVKRLEALGHKVTLESRSQVHRF

SEQ ID NO: 225860 - protein, 440 aa, unidentified
MAVRRQEDEIFPNAAGLDVGASSHWVAVPARSSVEPVREFGAMTDDLNAMAAWLIACGVDTVALESTGVYWIPVFEVLEQRGLKVWLVDARQMKYVPGRKSDVQDCQWLQKLMSLGFLRAAFRPDAEVCELRAVARQRDILVTDQASWVQRMQKALVQMNIQLTEVLSDVMGLTGELIIRDIVAGERDPRALARHRHSRVKASTEDIIKALTGNWRDEHLFVLRQSLGMYDDIARHVAECDTKLQAELDNLGQKKIDLGKPPRSGSKQRLAFDKRQVLANWAGVDLTRINGLGLAAVTKILTEIGPDLSRFPTVKHFCSWLGLSPGTKISGGKVLSAKTKRSVNRVRQVLKMAAMSLSRCDSALGAFYRRLCARMDKPSANTAVAHKLARMVYFMLTRGEEFVDQGQQRYDEQQLARSIAALKRRAMTLGFVITPVAAGA

SEQ ID NO: 225861 - protein, 418 aa, unidentified
MSLLNRVFKYFVGIDQSKDFFDVSVKNQSKNILFTGQFKTNFEGFQKFYEKLLSFQHLSIQDDFILGVESTGIYHKTLFSFFLKKGFLILELNPVQVKNFAKGNSFRKTSNDRISASHIADFLFERHDKLAHYQNLGSDYCQLRELTRLVLNIDQQINIFKNKVKAAVQQMFPELPASTNIFSKTIIRLLTTFPSPGAILNMDKEAFIRQFNRFLPVRGRKPKITGSSIYSLAKVSIGYVNPQIGTVLTTNLSLLDAFLVQKKTILKSIKTFIKSHKDIQPQVDILCSIPGIGLPSAAMIIAEIGDINRFKSKNSLAAFAGLDPTTQTSGTSVNKTGRISRMGSSYLRKIMYMASLNASNHSDQFYNWKQAKKEAVRSGKKAAVCLANKLIKAIFSMLKNNSPFNPVLMFKHLKQKAA

SEQ ID NO: 225862 - protein, 412 aa, unidentified
MDRLVERCAGLDVHKDSVAATVRVPRKDGQRLQETRTFPTTTRGLLTLADWLASYGVTLVGMESTGCYWKPVYYVLEERFECWLLNAQHLRNVPGRKTDVADSAWICQLLEHGLVRPSFVPPKPIRELRDLTRYRKAQIEERVREVQRLDKVLQDAGIKVSSVAAETLGVSVRRMLDALVAGTHDPEVLAELARGRLRQKLPALQDALTGRFRSEHHVLLVSQILAHIDYLDETIATLSARIEHVIAPFSRERELLQTIPGVARLGAEVLIAEIGVDMSVFPSDAHLASWAGQCPGNHESAGKRRSGKPRKGSKWLHKTLTESAKAAARSKGTYLSAQYGRLRGRRGPGKATGALRHSILIAAYHLLEQKVPYQELGADYFDRRRSTEQRTRRLVRQLEQLGHTVTLQPLAA

SEQ ID NO: 225863 - protein, 357 aa, unidentified
MTTTTTAARTILALDLGKYKSVAYLYTGDPATATFLTFVTDCDRLHKLVAKHRPDAVVIEACLLAGWVHDLCHEVGLPCHVANTASEAWKFKHQKRKTDRDDALRLAQLFALGQLPTVTVPPPATRQWRALIAGRQRLVGRRVAVQNRVRAILVGQGLAAPRGAKAWTELGLEGIGQFAKPLADCGPDELWRGLLDLALTELRQVRQLADQAEARLDELAQASGAVQLLETVPGVGPRTAEAIVAHLHEPGRFDSGKQVSAYVGLVPRQYQSGESDRRGRITRRGPALLRKLLVECAWVMLRYNPWARAVYQRLSRGKARKKQAIVALARKLLVRCWAMLRDQTPWRDSPAAEAAPA

SEQ ID NO: 225864 - protein, 355 aa, unidentified
MSSEKYIGLDVHQATISVAVMDSQGKVVMESILETKASTLLEFFAGLRGSLFVTFEEGTWAAWLYDLLKPHVTEVLVCNPRKIPLLKQGNKSDKIDARKLAERLRLHDLKPVHHGETGIRMLRELARSYLTIVKDLSRVMNRLKALYRSWAIPCAGRDVYYTRHRSQWLEKIPEAGTRRRAEQLYQQLDMLQHLRQQARRELLAESRQHAITAKLRQIPSLGPIRSALAVASIQTPHRFRSKRQLWTYSGLGLETRDSGEYHFVQGQVRRRKKQATIRGLNKDYNHDLKGLFQGAATRASVKPGPFQEFYQRSLAKGIKPTMVRLTLARKIAAITLTLWKKGEDFDIAKLKSQAA

SEQ ID NO: 225865 - protein, 347 aa, unidentified
MKIIGCDFHPSYQQIAMLDTETGELLEFRLEHEKGEARRFYERLQGPVRVGMEAVGNSQWFEQMLAALGHELWIGDAGEIRRLEVRRQKTDRRDARHILDLLLDGRFPRLWVPSAEIRDVRQLLRHRQKLVEWRTQVKNQLQHLALNQGVQRKRKLWSKEGRAVLEQLPLQGWTGRRRAELLGMLDRLEEQIKELDTAVRAEAERRPEVRLLMTHPGVGPVVGLAYALTIGPPGRFSRGKKVASYLGLIPRENSSGGRQRLGAISKQGNTMMRTLLVEAAQNAARFDEPLRRDYRRLAARKHKALAKVMVARKLAVRLYWMLREQRPYVPPSVARRQGGSSHSVVEG

SEQ ID NO: 225866 - protein, 465 aa, unidentified
MTPRRDFIPKMYDPDSASLAAAVDTKLHILHPNAAGIDIGEAEHWVAVSPDRDPQPVRRFGTFSADLHALADWLIACGITTVAMESTGIYWIALFELLESRGLEVVLIDPRQAKRAPGRPKSDVLDCQWLQRLHTYGLLSGAFRPEEQVCVLRVYLRQRQMLISRAAEHIQHMQKALQQMNLKLTQVVSDITGVTGMAIIKAILAGERNRLKLAQLRDPRCRHSEADIAKALEGTWRAEHLFALRQALELYEVYQQQRLACDEQIEAHLKTFDDKSDGQPLPKPPRRKSAKANAPSFDARPLLYQMTGVDLTAIEGIDTGTALVILSEIGTDMSRCPSVKEFSSWLGLSPQARISGGRVLSSRVRPGAQRAAHALRLAANSLHNSQSALGAFFRRIKARRGTPKAITATAHKLARLIYSLLKNGSAYVHQEMQAYEAQYVERKVKQMTQQARALGYQLVPLNAEP

SEQ ID NO: 225867 - protein, 379 aa, unidentified
MHEDIRFVGLDVHKRQTVVAIADGGRDGEVRHYGAIETGRSAVGKLARQLARGGRPLRFCYEAGPCGYGIHRWLTALGHECEVVAPSLIPSRPGERVRTDRRDAVKLARLHRAGELTSVWVPDPTHEAMRDLVRARAVAVSAVRRARQQLSGFLLRHDRIYSRKAWTGAHRRWLAELKFEHVAQRIVLEDYIDAVGAAERRRDGLTGQVRELLPSWSLAPFVEALQALRGVAEIIAAIIAAELGDPRRFDSPRQLMAYLGLVPSEASSGEKVYRGGITKAGNRSARRALVEAAWTYRFPARRSKHLLARCQAASPAIQAIAWKAQLRLSARYRKLVSRGKLSTVAVTAVARELVGFIWAIARELPAIPHELASAVGSRR

SEQ ID NO: 225868 - protein, 298 aa, unidentified
MHSENIAAYIGLDVHKETLAVAIAAPERLGEVRYYGTINNEAQAVRRLFQKLQGLYGNILSCYEAGPCGFGLYHQLTAMNIKCQVIAPSRIPKSPTDRIKNDHRDAISLARLMRAGELTPVWIPDLTHEAMRDLIRARAAAKRDSRVARQRILSMLLRTDKRYAGKHWTGKHRTWLANQSFSQPSQQIAFQHYCQSLEQIEDRILQLDQEISRLLPEWSLCNLVCQLQALKGVGQLTAITLVAELGDFSRFSSPKQLMAFLGLVPGEYSSGNSIRPRGITKVGNSELRRLLYEAAWSY

SEQ ID NO: 225869 - protein, 391 aa, unidentified
MSMYFIGIDISKYKHDCCIISAADQKVVSKVTIKNNKAGFNELLTIIHSLANPADIRIGFESTAHYALNLELFLENSLLTFMEVNPVLISVYKKSKTLRRTKTDSVDCESIARWLMNVEYKPHSKGFYHAYSLKSLTRLRDKLIRQRSFYLVKITNVLDHTFPEFKPFFNERLSKTALYLLENYGSAGKMARMNSASYEKLRSLSRGKFSPQQFLRLKELAANTVGVNNSIFDVELNSLLSLYKSLVKEINTIEKEINKLIEEVHPHYMSVPGIGPLSAAVIYSEYGDISNFTNPGQMLAFAGIEPGINESGTESHGGKMVKRGSSQLRYTLINCCLPLIRFDMTFATYYAKKRGEGKPHRVAITHVAKKLIRVIYALERQDIDFNAQKLR

SEQ ID NO: 225870 - protein, 413 aa, unidentified
MDVLHPRCCGLDVHRSSISACILLREAGRVQKHQRRFGAMTQELRELAEWLRQFDVTHVAMESSGVYWKPVWNILEGQFTVVLANAQHIKNVPGRKTDQKDAEWIAQLLQYGLLRPSYVPCESIRDLRDLTRMRASLSQEASRISSRIQKVLEDANVKLASVATNVLGKSGRAMLEDIISGEDDPEHLASLALGHLRVKIPQLRLALEGKIRSHHRFLLRCLVDQIQFVEHEIGLLDERLEEIAQQRPELSQAVARWDTIPGIDRVAAWTLLAEIGDNMAQFPTAEHLASWAALCPGNHESSGKRLRGTTRQGSPWLCRMACQCAWAAARTKNTYLSSQFRRLAARRGKKRAIIAVAHTIIVIGYHLQKNQSNYQDLGGNYFDRIHSDGLKRYLVKRLQQLGHKVTLEPMEAA

SEQ ID NO: 225871 - protein, 413 aa, unidentified
MIFRWFVGIDWAAEKYDVSVLDASGKVIAKRIIKHSGSAIAELLDWLQEIAGGNPEAVAIAIETPRGAVVEGLVERGFAVFAINPKQLDRFRDRYTVAGAKDDSRDAFVLGDSLRTDQGCFHRVQLDSAQMLRLRELSRIQEELQVQENRLSNQLWEQLHRYYPQTLTLSPAANEAWLWDLIEMAPLPLQAGKLKPAAVKRLLGSRRIRRVSAEEVLEVLRAPALRLAPGAAEAASEHVLLLLPLLRSVHQQDEQVGKRIKRMLEELSASPRGDGTAQEHSDAAILLSLPGVGQSVGATMLAEASQPLAERDYHALRCYAGCAPVTRQSGKRRLVLMRRGCSERLRNALYYWSLGSLKEDWARQYYDRQRASGNTHGGALRSLGDRWLAVLIAMLKTGTLYDAARRGQQAKAS

SEQ ID NO: 225872 - protein, 465 aa, unidentified
MTAGKRLWRNRKERKEWARRLQSEDPGLEVVHPRAAGIDVGNSAHYVAVRPDRDPEPVRRFECFTADLHRMADWLQSCGVKSIAMQSTGVYWIPLYEILEERGFEVYLVNARHTKNLPGRKSDVQESQWLLKLHTYGLLSNSFQPVSEIRGLRTYWRQRGEHVRGAATCIQRMQKALTQMNVQLANVISDISGLTGQAILRAIVAGERDPRKLAALSHPSVHASPEEIAKSLEGNWRPELLFVLQQEVDMYDTYQKRIAECDQQLQKQLARLTGVTPPGKAPTPKPKAKPAAAKNAPRFDLSSELQRITGVDLTRIDGIDVMTAQTLLSEVGLDMSRWKTESHFASWLGLCPDNRISGDKVLARGTRRVVNRAATALRQAANTLIRSRSYLGAQYRRLRTKLGAPKAITAMAHRLARLVYRMLKYGQAYVDKGTAYYEERFRQQQIQLLRKRAAKLGFQVAEIPA

SEQ ID NO: 225873 - protein, 341 aa, unidentified
MEIDVLGIDLAKHVFQLHGADRRGRAVHRAKLSRSALFETVRTLRPRLVVMEACSTAHHWARRFQSLGIQVQLISPQYVAPFVKTNKNDRNDAEAIVEAASRPAMRFVTVKSIEQQDIQAAHRMRAILLRQRTALINQMRGLLGERGLAIARSPEAFKRAMPQLLSTSADELTSFCQTLLTELLQHLKAIEERIRLIEASIQSFMKQSSLCKKIAAIPGIGPITATAIVAAVGDARQFHNGRHLAAWLGLVPRQYSSGGKPRLQGISRRGDTYLRTLLIHGARAVLRYVKAKTDPQSLWLKELIGRRGYNCTAVALANKNARIVQALLSSDTSYVPRGMAA

SEQ ID NO: 225874 - protein, 462 aa, unidentified
MINVQEQREMVEKANRILSEMKSFTWRDLETQGKFKKNDKLSFISDDMLIIGCDIGSETHYARAIDTRGRELSRKALAFNNNAEGFQKAHDWAVQLAAAHDKKQIVLGLEPTGHYWFCLAAWMVSNGISVVQVNPYAVKQTKELEDNSQQKDDRKDPKLIANLVKDGNYGMPYLPEKVYAELRRLSMFREQLTEDRNRSMNRLHREMKIYFPEYKDAFGKIDGAFCMAVLKEAPFPEDILKLGAEGIREIWHQAKLRGRGYSRAAEIVKYAETSIGLKDGTAVGREAVRWFTEKIMELDEELAEIENRLNEKCKEIPHAENVLEIPGIGGKILSGILAEMGDISRFDDAKELQKLSGLGLVSCSSGKHKGETRISHRGRKRLRYWLFQAARSAVAHGEEYKWIHAHYTTRAGNALQKMQSLIVIACKLLRVIYTMLKTGKPYDPEKLLKDIRYPENVQTAAA

SEQ ID NO: 225875 - protein, 394 aa, unidentified
MSLCVGIDVSKEKFDACGIGEGGKKMFSVSCPMDRSGFDKLVVQLPTDKTSFLLGMESTACYHMPLFSYLTTHGYQVVISNPLLIAQYANRSLRKTKTDKRDALTIAQFLMQEKESLSVETCSPLIGELRDLARRREKLTDQVTALKSDMKRILSVTFPELEHLTGVFTKSTLRLLADFPSAHALRQANYSAIAAIVIPRSRGRKSHASVHALMTAAASSVGVTSPAKEMILKQEACLLLEVEEQIRETTKLLMSLRNERIRDDTEILCSMRGIGENTAVNFLVEMGGAIGIYKNDKKLIAAAGLDPSTYQSGTYAGRSKISKRGNRHLRRVIWLMTTRTITNNAIFRAYFFKRRTEGLPYKKAVLATAHKLIRVMYSMLTHRTCFVEGGINYS

SEQ ID NO: 225876 - protein, 416 aa, unidentified
MSRTVSSASSEEATIKYVCGVDIGSQSCAGCICRPDKSVVVRPMTFANAREGWQVWEEKLSLLDAPPSQILIGMEATSRYGENLYHELEQRGYVLRLLHPRQTHQFHERQGLRAKTDRLDAMTIAKVLLSGEARAGYVPSERVATYRELVRLHTQLSDEAASYQNEIQALIVMLFPEFTQVFANPCLSTALSVLTAFPNAQVLAEAGTEPLFQLLRAQKPAHYGRPTVQKLVALAKQSASSGRALAGRSVSLRILCDQLQHTRANLARLDAEIEQLLTNDPGVKGLQHVPGFGPKTVAVLRAELGDVQRFARTDEVIAYGGMDIEIKESGLWKGKAKLSKRGSGLLRRMLYMAALRSISLKGSAFGVYYQRLVARGLKKGSALMAVMRKMLTVAAYLLRHEQEEYDPHKVCGSGAG

SEQ ID NO: 225877 - protein, 309 aa, unidentified
MNHDQKVYCGIDVSKHHLDAWINGKPKRFSNTVKGVDALMAHAENVHFVFESTGGYERLAAWTLMAANKPASIVNPALVRHYAISVGERAKTDQIDARIITEFASHVHPEPAKKPSKRQRMLCAYVDRRQQLTEMHTADTNRLDTAGDPIFRKMVQKHLRWIKKEIETLEMKIAETIREDAHMYEASKRIQKIKGLGRVCAATLLAHLPEIGTLTRQEVAALAGLAPYCRDSGNTSFRRHIQGGRKRLRACLYMAAVCAIQHNPAMKEFYRRLVEENHRPSKVALTAVMRKLVIAANSSVKNPDFGLVT

SEQ ID NO: 225878 - protein, 339 aa, unidentified
MMIIGCDYHPSFQQVAFVDTESGEYGEHRLMHRAEAAEFYRGLRPGSVRVGMEATGHARWFERLLAELQHELWIGDPAAIRAQQVRKQKTDRQDAGLLLQLLRENRFPRIWVPSAEHRDLRQLLWHRHRLVQMQTRVKNQLQALALNEGLRRGKGLWSKAGREQFEALELAPWSARRRQDLLELLDGLHPRIQQLSLAIEQAGEQRAEVQRLMTHPGVGSITALAFVVILGTPQRFRCGKQVGSYLGLIPSEASSGGRQRLGHISKQGNALLRFLLVESAHALVRYEPQWRRQFLHLALRRGRAIAKVAMARKLAVRLYWMWRQGVDYQQLMKFGSHVE

SEQ ID NO: 225879 - protein, 438 aa, unidentified
MIELYNPFGNDVSYAACIGVDWGHGTNCFHLLAPGSKQVERIDVAADPASMNQFVRGLRKRFPEGAIGLVSEQSKGALVNLLLDYPFIELMAANPHASAKFRRSLHPSGSKSDPIDSSALLRMIFTHRDRMAILTRGDEASRRLDVISRHRRNVVGQRVEVSNRLHSLLLEYYPQALAMLGPDPWDSISLAFLRRWPSYSRLMKAKDPTLETFYYAWGSRSKAAIQKRLASRRASAALSSDPLLEELGELQLKDHVEQLSLLNKQIRELDKRLRAAFREHPDREIFRSLPGAGAAMAPRLAAAFTCDRHRFKSCSQLQAYVGIAPIKLQSNDTQYTFMRRFCPKFLRQSFHEWAGLSAQHSPWAKACYKMLLDRGKRVGEAKRALAFKWIRIIYRCWQDNQPYDEITYVKCLIKRNSPVVKKMKELGFIDEKNNILFA

SEQ ID NO: 225880 - protein, 407 aa, unidentified
MLFVGDDWAEDHHDVHLMDETGQLLARRRLPEGLAGVGAFHELVADHADEPSGVVIGIETDRGLWVQALVAADYQVYAINPLAVARYRDRHNVAGAKSDTGDAKVLADLVRTDRHNHRPIAGDSPDAGAIKVLARGHQNLIWSRNRQTNALRSELREYYPAALVAFEDLAHNDCLAVLAKAPTPAMGARLSVGQISAALKRGGRQRNLDRRAHEIRDALRGEQLSAPEPIVDAFAATTIAAVGIIAELNRQITKLERSLADRFEQHPDADIYRSLPGLGVILAARALGEFGDDPDRYANPKSRKNYAGTSPLTVASGKKRAVLARHIRNRRLYNTIDQWAFSAITTSPGCRTFYDQRRAAHDLHHQALRALGNRLVGILHGCLQHHELYNENTAWAHRQTAVTKEAA

SEQ ID NO: 225881 - protein, 314 aa, unidentified
MSHAFVGVDVSKDRLDVAVHPETSSWSVPNDEAGIEDLVKRLLSLHPARVVLEATGGYEMPAAGALGAVGLPVVAVNPRQTRDFAKAAGLLAKTDRIDAAALARFAEAMKPEIRPLPDAAAQELGALIARRRQVVQMLTAEKNRRQIAPKRLHKDLDRHVAWLEEALRRLDDELQKTIRNSPAWREKDDLLQSVAGVGPKTSAVLIAELPELGRLSRHEIAKLAGVAPMNRDSGRYRGERHIQGGRAMVRSALYMATLTAIRINPVIAAFYRRLRDDGKKFKVALTACMRKLLVRLNAMLRDGVPWREKSPQVT

SEQ ID NO: 225882 - protein, 359 aa, unidentified
MIVVGIDPHMKTHTAVAIDAVTGRNVGTRTVTGDRAGHDELLAWARGLGPDRYFAIEDCRHVSGRLERHLLPHGERVVRVPPKLMAGARSSARTYGKSDPIDAACVARAALREPDLPEAALCGPEHDVRLLVDHRDDLVGERKRIQKRLRWHCHDLEIGLELPPRVLDRYVWLDRLEDVLEALPETMRRRIALAELDRCRELTVEIRGFEREVRGLMRDLAPDLLAIPGCSAINAAHLIGQVAGASRFCDDAAFAMHAGCAPLPVSSGKSTRHRLNRCGNRKLNSTIHIMAVTQARMHPPAIAYMERKQAQGMSYREALRCLKRHLARIVFKTMQRAERLQTSAVISVPFGHDSVAIAV

SEQ ID NO: 225883 - protein, 449 aa, unidentified
MAKKKRKYRKLERSLPVMRPNAGGIDIGATEIFVAVPADRDTESVRSFPTFTQDLHALADWLQQCRVDTVAMESTGVYWIPLFQILEARGIEVHLVNAQHVHHVPGRKSDVLDCQWLQYLHSVGLLRASFRPEHAVCEIRSLMRHRENLVQMACVHVQHMQKSLDQMNLQIHHVISDITGVTGLAIVDAIVAGNTNPKELAKLRDHRIKASIDTVTKSLVGDYRPEHIFTLKQSLTAYRHYQKLIADCDQEVQQRVEAFQSNDDGPTAAADSSSATSPTAPSFDLHSHLERIFGVDLTAIPGFDVLRIQTIFSELGADMSPFPTDDTFCSWLNVCPKDGTSAGRRIRAPKVKTKNRVTQAFRMAALSLHNNKSYLGDYYRSQRARHGALKATKNAAHKLARIFYHLVKTRQPYDETVFAKLEARNQKHRLHKLQTLARQMGYSLVQANA

SEQ ID NO: 225884 - protein, 347 aa, unidentified
MRFYNQQHNYYCGIDLHARILYVCILDATGNKVLHKKIGADPDALLEILAPFQDEIVVGVECMHCWYWVSDLCLDYAFDFVLGHALYMKAIHGGKTKNDRIDSFKIASLIRGGNFPLAYVYPKAMRATRDLLRRRTKLVRHGAHLKAHVSNTFTQYNVPSPNLALRYPSSREDVRNRFNEPAINRNIDIDLNMIGVYTKELTHVECFIEKNAKQHNPKDYLLLQTVPGIGRILALTILYEIGSIQRFPSVQHFASYSRLVKCKAESAGKQYGTSGNKIGNAHLKWAFSEAAVLYLRGNEKAQKYLARLQKRMSKAKALSALAHKLGRCVYFMLRNNTVFDEHRFLPQ

SEQ ID NO: 225885 - protein, 352 aa, unidentified
MIVLGADMHKSSHTVAAIAAATGEVRDDKTVAVGARGFDQVLQWARALGRDRVWALEDCRHVSGSFERFLIARGERVIRVPTRLMANSRRSSRERGKSDRIDALAVARAALSEGLETLPTAELAGPELDIRLLVDHRERLVRQRVGLNNTLQWHLHDLWPELELPGSSLFYGKWGPRIARRLARTEQTMRVRIARDELRRIRELSQTIKALEGEIADLVAQIAPQLLNEPGFGPLTAAKLIGEIAGANRFSTDAKLARAAGLAPIPVSSGRTDRHRLDRGGNRQINAAIHRVAVTRARCHAETIEFIARKQTEGKTHREAIRCLKRHLARRIWQLLREPHPEPARPPHPANS

SEQ ID NO: 225886 - protein, 428 aa, unidentified
MNAKDDIRIKHFRQLKKEIRGSSEYVIVGIDVAKDKHNAFFGTATGKTLLRRLVFENNIEGFRKLHIRTEAIKVQHNLSKVVFGVEPTANYHKPLAEYLIKGGEHVVLVSGVAVSNNRESLDGRWDKNDTKDSANVADLISQGKCLYYDYPSIPLRDIRNLLSLKRRLKKQEHGTRVRIRNHLLAQYFPEFDRYFGKGCSESLSIVKWCLNPSMISGMGYEEFVQLVAPRVRTICQGKRLKAIWDLALESIGSKAGQALDFEAKLMVENLGQIKDSIHMVDKHIKDVCLGFPEYSYLLTIPGFGPDISSKVLGAIGNPFRFDNGKQVLKLAGYDLGANRSGKTSDSAVPVISKRGSAYLRYALYQAAFIASTSNRHFIMYYTNKLRGREREKGIKTKMRVKLAAKMLIIAWILMKKKESFDPEYLNIG

SEQ ID NO: 225887 - protein, 394 aa, unidentified
MPELLVGVDVAKDTSSAQGIDSNGKGRFSLTFAMDMEGFMQLWKAITEHSKNLSEVIVAVESTACYHINLYSFFTAKGVSTVVINPLLIANFAKLSLRKTKTDKKDAMTIAQFLLMHRETISQLSLSQDLQDFRDIARERESVGNLLTAHKVEIKRLLQSTFPELERLGDLSTRVMLEFIATFPSARLVKMARPKAIQKVLQRKGVGTRLTYTAEDLIQAAKQSVATISPAKEFILQGKVRTLQHLRERYEELTKILTEYCTSSMLEDFKIITSIDGISKCTATTFLAEIGCIGNYDSHKKLIAFAGIDPTVYQSGKFEGASRISKRGNRHLRRVIWLMTTCVIQHNVTFRDYFMKKRSEGQPFKKAVFATAHKLIRAIFAMLTQRTMFREVCA

SEQ ID NO: 225888 - protein, 335 aa, unidentified
MYYVGLDVHYRTSTYCILNAHGKERKCETVRGHWTKLLERLATIKGQWMICFEATCGYGYLHRELSRIAKRVIVAHPGQLRLIFRSKRKNDRVDARKLAKLLYLDEVPTVYVPNEEVQSWRELIEHRRRVVDRQTVCKNALRSLLRSHGLIAPKGLWTKKGLTWLRQLPMPTAASGLKRDLLLEELAEVRRGVRTLTRALDQMGQRHPGVILLRSIPGVGMRTAETIVAYIDDPKRFRRSAQVAAYFGLIPGQDASAGVNRLGHITKQGPGTARKYLVEAAWQGVYRSPRIRAYFERVLRGKKERRKIALVATAHYLLRCMHAMLVSGAFWREAA

SEQ ID NO: 225889 - protein, 420 aa, unidentified
MRNAGIHANSLLEVRRMYNAVGIDVSKSKSTVAVLQPGGTVIRKPFDVSHTSQNLNELADYLSSLDGTTKIVMECTGRYHEPMVKALSEAGLFVSIVNPHLIKNFGNNSLRKVKSDPADARKIARYTLDNWTDLRQYSGMDNTRTQLKTLNSQFSFFMKQKVAAKANLIALLDNTYPGVNKLFDSPTREDGSEKWVDYAYSFWHADCVRKIGLKAFTERYMSFCKKHHYIFQQDKPEKLFNASKELVAVFPKEKTYKLLIQQSIQQLNLASEHVERLRREMNELASTLPEYSTVMGIYGVGKTYGPQLIAEIGDVSRFTHREALTAFAGVDPGVDESGQHKSKSNRASKVGSARLRKTLFQIMTTLLQNAPEADPVYRFPDKKRSQGKPYYVYMTAGANKFLRIYYGKVKECLRNLEQTE

SEQ ID NO: 225890 - protein, 451 aa, unidentified
MSILFIGMDVHLSTVTASFVLDDATSPAKRISFPNNPSGANKLALRVRDICAQRGITDAQIGMETTGNLWVGLADVLRSHPVFDGLHIDVHSLNARQAAQIKKLFPEMSKNDPVDAAMIAEYLRFRRLPTPHLVDEHYLALQQLTRHRFHLVQSLAGEKNRFISHLFLKFSGFRQDKPLSDTFGAASSALLTEFLSVDEIAQMSIDEMIDLLKDKGRDRFIDPEKTATRIKAAAAKSYRLNSSLVDPVNTILAMTLENIRFFERQIKTIDKAIERQLRAFSYEATILASIPGIGPVFSAGIIAEIAGVERFDNDGALARFAAIVWKHHKSGEFTGDDTPMMHSGNQYLRYYFVEAANSLRLHNDEFAAYYQTKYREATKHQHKRACVLTARKFVRLAFNLLHKGMLYRTPQQRKEYQAANPLPEGTTPGELARHAARRRQAKRPVRIHIDH

SEQ ID NO: 225891 - protein, 343 aa, unidentified
MERYYYIGLDIHKKIIAYCIKAIDGCLIDQGKIGADRQSLEAWVKGLPGPWIGAMEATIFTGWVYDFLKPHAIALKVAHPAMLKAITAAKKKNDRADAEKIADLLRVNLLPECYMLSEEIRELRRILRYRNHIVRTAVKMQNKMSGLLMEVGATYSKKRLHGKKYFRELLERVDDIPPSVKELLQLSRSSYEMFRSFQKRLVETLRTNQLIHDRVHHLMTIPGVGEITALTWVLEIGDSGRFSSIRKAVSYCGLCSAQKESAGKEQRGPISKKRNKHLQTMLIEAAKLAPHWNEQLAIVHEQELKKGNRNRATLAVARKLVAYMLAVDRKGADFKLPSEIRAA

SEQ ID NO: 225892 - protein, 401 aa, unidentified
MGTQLDKAWVGVDVGKTHHWVCVVDAEGKTLLSAKVANDEAEIVASLASTGSLAGQLIWAVDIIGAPSALLLALLAQAGQSVRYASGRVVAAMSAAYAGEGKTDAKDAYVIAETARLRRDLSVIDTGTDLVRHLAVLTGHRADLIADRVRMINRLRDLMTSVFPSLERAFDYSSHKGALVLLTGYATPDRIRHLGQTRLTAWLRSRNVRGSAKVAARAVAAAKAQTVVLPGQDLTAGIITELANGILTLDERLKSLDTQIAATFAEHPQAAIIESMPGFGPFLGASLLVGANDLRAFPSAGHLAAAAGLVPVPNDSGRRIGNLHRPSRYNRQLRHVFYLSAQTSMMRAGPNRDYYLKKRAQGATHSQAVIALARRRIDVLWALLRENRTWTAAPPPLTQAA

SEQ ID NO: 225893 - protein, 373 aa, unidentified
MGVGRYAEAASPPEAAESLQEGSMRHIGVDLHKLAFTACFLEEDDSQHLATFPLTPEGLAAFRAQLVATDKLALEVGQNAYFFHDQVRDAVGEIQLVSPYQFAVIAKSTKKTDRHDARALARFLKLGCLPTVVMPDDRIRELRQLFTAREAFVKVSRQLKNMGHAALVRNGVTSRKSDFASGVGRRRLGLLQGLRPSDRRILDSVLRQLEAVEAELIELERAIIRAGKNLPGLKRLLQVRGLGLVAAIGVLSEIGDIARFASAKQLVSYSGLATAVHQSGGTERYGHITKQGRKRLRGFMVEAVLSLARNPAPNPLVDFYQRKKKEKGTGKAICATARKLLATIYVLLTKGLDYWFLEERLYQTKLRALAAAA

SEQ ID NO: 225894 - protein, 308 aa, unidentified
MPQPVVGCDLSRAFINTCDLPSGKTDRIANTPDAIGVWLDTLDHDVRIVFEATSGCDGELIAALAARCHPFSRVNPRQAREFARATGTLAKTDRVDARVLAQMGAALDLPATIPLSPARSRLGDFLRRRRQLVDMRKAEKLHRHSAGQPDIAQAIETMIDLLGQQIATLDRQIAGFIAEDQALAEQARLLTAVPGIGPTVLATLLGELPELGTLCRRKIASLAGLAPHARESGTWRGARRIWGGRRKVREALYIAALNASRRIPILTAMRDRMRAKGKAPKTILIAVARQLLVILNAIIRKRQPIALG

SEQ ID NO: 225895 - protein, 345 aa, unidentified
MKIIGCDLHTRYQQIAMLDTETGELMERRLEHENGEARAFYGAFVGPVRVGIEATGSTHWFEAMLVELGHELWVGDAAQIRALVVRKQKTDTRDAAHVLDLLLTNRFPRIWRPSLEERDLRQLVWHRQKLVWMRGAVKNQLHALAMGQGVCRKKKLFTVQGRQELEGLNLGPWASYRRQELLQLLDQLQQSLVKLDAAVEQQAQGQRAAVRLMTHPGVGPVTSLAFVLTIGPVDRFSRSRQLVSYLGLNPQEHSSGGRQRLGSISKQGNPMLRSLLVEAGHTAARFDAPLRRMYQRLKFRRGAAVAKVAVARKLAVRLYWMLRTSADYAQLVRMQGSPGRTLVGD

SEQ ID NO: 225896 - protein, 364 aa, unidentified
MLYLAIDQHRKQLTVNLRDEAGVVLLRRQVSTRWEPVREFFHELQERSAADGGFVTVVEVCGFNDWLLKLLPECGCREVIVVQPEKQSRHKTDRRDANTLGELLWVNRQRLLAGQKVQGLRRVQIPGAVDQDDRRLTSLRQSSGRELTRTINRIKAILRRHNLEQECPTKGLQTKGARQWLEALKLSAVEQLELNQLVARWDLLQTQQQELETRIKARQTQNPQAVILATLPGSGAYTSLALASRVGNVCRFPHPRSLANYWGLTPGCRNSGEVTQRLGSITKEGSRVARFLLGQMVLHVLRKDGAMRNWYRQIRRRRGSKIARVAVMRRLATIIWHMLRKQEGYQCGGPPRRKLRQVVVSAGG

SEQ ID NO: 225897 - protein, 360 aa, unidentified
MTVTPAPMQTMFAGVDTHKDTHHAAVIDARGHHIADREFQTGQTGDDQMCTWLAQWAIEQIAVEQTGTYGAGLTRSLHADGYRIKELNHPDLTVRAGHGKSDPVDAYMAAEAARTGRADVTPKDRTGIIESIRMIKAARASAVKSRTAALSQIRDFTIVAPLRDKLAGLSTRQIVTVVLTWRPNRNDLANPVQGAKLALRGVATRIRDLDAEINDYDTQLDTLTSQIAPTLKTLPQVGTMVAAQLLITVGQCPNRIHTDAQFARLCGIAPIPASSGKTHRMRLHRGGDRHANSAIHLVAIGRLRQHEKALAYRERRRTEGLSDKDIIRAMKRYIARELFHTLKTDLNSYDSTPHKASPTP

SEQ ID NO: 225898 - protein, 344 aa, unidentified
MDHFGGLDVSVKETSICIVDDTGRIVREVKVASEPEALLKVLENPAYRFKRIGLEAGPLSQWLFSALAEAGLPVVCVETRHMRAVLKAQINKTDRNDARGIAQMMRVGLYRPVHVKTLRSQKLRMLLTHRKLLQSKAIAIDNDLRGALRNFGLKVGMVGTMRFEARIRKLVEDLPDLAALIEPLLIVRRTLREQIVILHRRLLAIVRDDEVCRRLMTIPGVGPVVSLTYRATVDVPARFRKSKSVGAVFGLTSSKYQSGEVDWSGKISRCGDEMMRTMLYEAAQSMLHSKKWSWLKAWAMQIARRRGMKKAVVALARRLAVIMHRMWIDGTEFRWSREQAAAVA

SEQ ID NO: 225899 - protein, 354 aa, unidentified
MSKHITRDGGLTMGLDLGDRWTEGRVLDASGEVIESFRVRTTEPAMAARMSSYDPCRVVLEVGTHSPWVSRCVQRHGHETIVANPRRVRLIAENDSKSDGVDAELLARLGRVDPSLLKPIVHRGARAQKDRILIQARDGFVRARTQLVNQVRGLAKTMGTRAPSCSTEAFAHRVRETIPLDLFPGLETLLSTIESLTQTIREMDREVERVCRERYPETALLRQISGVGPITALCFVLTIEDPGRFAKSRSVGAYLGLRPKQHDSGEQQPQLRITKAGDRLLRRLLVSAAHYILGPFGPDTDLRRAGLRMAERGGKAAKKRAVVAVARRLAVLLHRLWVTGEEYEPLRDRSALAA

SEQ ID NO: 225900 - protein, 351 aa, unidentified
MSEKTGSHIAVVGVDIGKNSFHVIGLSSRGAIVLRQKWSRAQIEVRFANMPPCLVGMEACVGAHHLSRRLKALGHDARLMPAKYVRPYSKGQKNDFRDADAIAGAVQRPTMKFVATKTVEQLDLQALHRVRERLVSQRTGIINQIRAFLLERGIAVRQGQRFLRTELPGILASPADVLSPQMARIIEGLAADWRHLDERIDQLSNEIHAMAREDTGCERLICVPGVGPIISSAMVAAIGSGDAFSKGRDFAAWLGLVPRQMSTGDRTVLGPISRRGNRYLRVLFVQAAWAVLIRPGSWERYGLKSWVESAQKRLHRNVLAIALANKLARIAWSVLAHGRGFEANAIASSIA

SEQ ID NO: 225901 - protein, 313 aa, unidentified
MPVALSNPIVGVDVAKNELVIYQADSDLLEAIPNTKTSIKQWLKALLGPVSIAIEATNIYHLEFADLAYAAGCTIYMVGGYELKHYREGVKIRAKTDALDAKLLARYLKNEAEELRPWTPPSPLYRQLLSLFRRRAALVQARVSLVQSWSNEPLLKTAFAEQIKSMQRLETMIEKTINDQLKQAGLLGQLKRCLKVEGIGFLTGARLLTAFQRGEFSNADAFIAFLGMDLRVSKSGQKDGRRSLTKRGDPEARRLLHNAAMSASRTKAWKGFYEAQRARGFSTTQALVMLARKLARVVFALLKGQSEYQTKVS

SEQ ID NO: 225902 - protein, 344 aa, unidentified
MKHYAGLDVSVKETSICIVDEAGRICREMKVVSHPEDLLAVLCDPAWRLERVGLEAGPLSQWLFSGLAEAGVPAICIETRHAKAFLKAQVNKSDRNDARGIAQMMRVGLFQPVHVKTLASQKRRALLAARKILQEKALAMENDIRGLLRNFGLKVGIVGVVGFEQRIHDLVEGVPELADIMEPLLAARRVLREKFAKLHRKVLLLARDNEVCQRLMTIPGVGPVVSLAFISTVDVPARFRNSKAVGPSLGLTPVLNQSGESHRVGRISLCGDEAMRALLYEAAQVMLARVQKWSWLKAWAMNIAKRRGQKKAIVALARRLAVIMHRMWSDGTEFRWTREMAPTI

SEQ ID NO: 225903 - protein, 339 aa, unidentified
MKLYGGIDLHSNNSVIVLLDEEDQKVYQRRIGNDLKTILDALEPYGDSIEGLAVESTYNWYWLVDGLMEAGYRVHLVNTAAVKQYEGMKYGNDHTDAHWLAHLLRLGILPKGYIYPKEERAVRDLLRKRGQLVQMRTTNLLSVQTLITRNTGSSLSANKVKKLQSEQVAELLPCEDTALAVNSNLNIMQALQEQIKILEKEVQKKAKLKAEYAALQTVPGIGFILALTILLETGPVQRFAKVGNYASYCRCVGTTRLSNGKQKGKGNAKNGNRYLSWAFIEATNFAIRYNDNIKAYYQRKQAKTNRVVAIKTVAHKLARACYYILRDQVEFDLSKAFSA

SEQ ID NO: 225904 - protein, 457 aa, unidentified
MYRELHSLRQALREELKGTLPPLTGVEPDKMLETYLNQLTLYVGLDVADKTVTLLAMNANQEELGHLLDAPNTLHGYVQIGDWLESLRVRHHLRIMAVACETTGVFYWGVWDYLAQRPNVARVLYNPRTTEHMGEVLSKRVRNELVDALLLAEQLRLGSTPEVTLTENADLLSARLCSRAARDAAQTINRKKNQLRSLVRGYNPVISQVFPGQKFHHPAVYAVLQQYVFPNEFVTAGVETLTTILTEYSRSAFGTEQAQKLVDLCRGYLSRPVRPEVVRQRVQDLIEEITLTRKHQKAMLKAGYALIKDRPEAKVLKASTGAGISNTLALVSELSDIKRFPDGEHAASFLGLTTSKHISGTSIYHSKHITKQGSPNGRYAAVNMALHLAVRVPKYQAMYKAIKSRKPPRKGHFVALVAIARDFVTNVLYDMWRYDRPFFIKVEDYRQYRKDHPRPKS

SEQ ID NO: 225905 - protein, 412 aa, unidentified
MAVVMNQDSGFDIWCGLDVGKTGHHACPLDAAGRKVFDKPLPQDQKRLEELFDKLQTHGRVLVIVDQPNTIGALPIAVARSMGIQVAYLPGLAMRRAADLYPGNAKTDARDAFVIADTARTMPHTLRRVDAGEETLSELKVLVGFDEDLAAEATRLSNRIRGLLTQIHPALERVVGPRLTTKQGLAVIEQLGGPQTMAAASKSKLLRVISKAYPRGAQEFADAITTALAEQTVIVAGTAAAEQVLPQLAASLRQTLDQRHALAAQIEQVVDAHPLAEVLTSMPGVGVRTAARILLDVGDASQFPTARHLAAYAGLAPVTRRSGTSIRGEFPARAGNKHLKRALFLSAFAALRSDPTSKAYYDRKRAQGKKHNAALICLSRRRCDVLFAMLKNREPYRAPTPTREPSPLPLAA

SEQ ID NO: 225906 - protein, 417 aa, unidentified
MQVVRPICCGADIHKDIIVATIATSNQNGIAEYTQRKFCTQNYDLINLKSWLKEHNCFEFAMESTGKYWIPIFNVLEDEIKVYVVHPKYTKSIKGKKTDKKDSKWIAELFRHGILTFSFIPPREIRELREISRYRIKLVAMRTSERNRYQNAMTVSNIGLASILSDPFGKSSKAIMEEVLKSSSLSEGKIRSLLNKSAKKKAKEVFASLEGSRIEPDQRLKMTVSSEHMNQIDTHIDTLELDLVQRCLPYANLINLLIDIPGISYISAIAVIAEIGIDMSVFKSSKQLTCWAGLAPANNESANKKKSVRISRAGTYLKPLLIQCALSAIKSTSNPYYRIKYNTIKKRRGHKKAIVAIARMILVNIYAILSTGEVYNPCDFKEVTSPKPAKKEMTIENALFFLQAQGIDTSALVLNVS

SEQ ID NO: 225907 - protein, 377 aa, unidentified
MSKLRFVGLDVHAETIAVAVAEMGGEVRSLGTIPNKLESVRKLVGKLAPMGTLKCCYEAGPTGYVLYWQLTQLGVACEVIAPSLIPTKAGERVKTDRRDAEKLARCYRAGELTAVWVPDAAHEALRDLVRAREAAKKDPLRHRHRLGKFLLRHGKRPIDAGPAWTQKYVNWIRIHARFEQAAWNATVAHYLEEIDHIAERIVKLEQAIDEAVQQAAPEIRAVIEALQALRGVAQTTAATVVSELGSLSRFRNPRQLMGYSGLVPREYSSGNRTQRGAITKSGNAHLRRVLVEAAWTYQHRPNVQGRVLRRQKALALSDEAKKIAWKAQQRLHKRFTAMAARGKNHNQTVTALARELLGFMWAIAVDTEAQFQQTKAA

SEQ ID NO: 225908 - protein, 387 aa, unidentified
MLEQFDSHNATTVFDHDSTLVAALELSGKSWEVGAVVPGVARRPRRRLDPQDMAGLLRALDRWKSEAGAAGRTIERVVLTYEAGRDGFWIARYLQAQGIEVHVVHPASLPLPRRRRRVKTDRIDLDMLLRSLLAWLRGEPRVCSMVRIPSAAAEALRRPGRERERLVAERLELENRIESLLCLHAVAGFKPRLKKAMAHLEALCDFAGAALPEQTMAELRRLMARHRLASEQLRQIEAERDRVLTVARPDREERMIQLLVRIVGLGVETATLLVREALCRSFRDRRAIAGYAGLTGTPFRSGGMAREQGLDRSGNARVRRSLVQLAWRWLRFQPESALSRWFAARTGGAKGRIRKIMIIALARKLLVALWRYVETGQLPDGVRLAAR

SEQ ID NO: 225909 - protein, 342 aa, unidentified
MSKQPNPTQTTLFCGIDVSATTFIAALQRAGREGFEQRQFANSDGGHKQLIAWLLRHGTTVRVSLEATSVYSLDLALALDAAPNIEVAVLNPKRVHQFAKTLRRSKTDKADAIALAEYSMRMKFVPWQSPSPNALQLKNLSRYIATLRQEHTRLGNRLHAAQATHTTPLCVTRDLKRAMTQTQQRILAMTRSAVALIRQDLELKAKFESLIGIKGIAQTSAIQLLGELAGLDPSMTVRQWVALSGLDPEHRESGTSVHPRSRISRHGNPHLRRALYMPALVGARFDPHLKAFYQQLQARQKTKLQALMAVARKLLHAIFGIFKTATPYDGAKLFPNIQLITS

SEQ ID NO: 225910 - protein, 485 aa, unidentified
MLASIRGPLSDQRLPASQEVPEAATGRRASERLPMSTRNGTLSSANPQPQSSTAYDAGGRRPSEEEEVSGMEEQTKSAAGIDWAKDEHALCVIEEASGRKIFEGRFAHQEGGLTKLCRTLVEMGVERVAIERPEGVLVERVLDAALTVVAIHPNQLKASRPRFRASGYRSKSDSFDAFCLAELARTDHHRFRALTPDSDETKALKVLTRAREDLVATRVALANQLRSELEAFWGGAALLFSEIDSAISLAFLARYPSPADASRLGEKRLERFLANIRYSGAKSAPELLEKLRKAPQGRASEAEIEARREAVLGLVGTLKVLLERIKHLEDEIAKAVRAHPDGEIFLSLFRTNKSTLTAASLVAQIGECRERYPTNEVLAAAAGMSPVAVESGKRKVASFRKACDKRLRRALATLAESTRQHHPWAKDIYRRARDRGCDHAHAIRILGRAWVRVIWRMWQDGVPYDPALHGGFKRLRSGEGLPQGV

SEQ ID NO: 225911 - protein, 444 aa, unidentified
MAMRKREDEVFPNAAGIDIGASSHWVAVPAHLAELAGDEPVREVGAMTDDLNALAQWLVKLGVDTVALESTGVYWIPVFEVLEQHGLAVWLVDARQMKYVPGRKSDVQDCQWLQKLMSLGLLRAAWRPSAEVCVLRAVARQRQTLLTEQASWVQRMQKTLVQMNIQLTEVLTDVMGQTGEAIIRDIVAGERDPKVLAKHRDRRVKASEADIVRALSGNWREEHLFVLKQALAMYDDIDGHLAECDAKLDALLDERATTKVDLGPMPREGSKARAEHDIRQRLADWAGVDLTRINGLGVTVVMKLLSEIGPDLSRFASVKHFCSWLGLCPGTKISGGKVLSSGTKRSASRVRQALKMAAQSLCRSESALGAFYRRLCGRMDKPRANTATAHKLARMVYFMLTRGEAFVDQGQQRYEEQQRQRSVAALRRRAAALGYQINPVAAAA

SEQ ID NO: 225912 - protein, 343 aa, unidentified
MLTNNVIAIDLAKNVLQACHISVHGELLSNKPLSRQKMKEFLAKAKPSIVAMEGCCGCHYWGQLAEKHGHQVRIINPKKVKGYLEGHKTDHNDALAIANAAIQIGIKYSRPKSLEQQSMHSLESSRRFLSRSVVSLGQHIRGTMLGYGIANPRGEKGLKASVQTALDGETSIPANVVSVLSMLWNQYKELKAQLIAFEKEKNALTRQIEPCQRLMEIEGVGETTAAMLYTTLGDGKQFKNGRQASAFVGLTPKQHSSGGKVFMIGIDKCGGVKELRSLLYLGAMSYVGRLPEKPKTQKDAWLRSIIERIGFKKACIALANKVVRTAWAMLRYETEYKPVLLTN

SEQ ID NO: 225913 - protein, 416 aa, unidentified
MKSASNTLPDQAPQDLTAGLDWARDDHAVSIVNDRGREIARHTIEHTAAGLIELVAVLTRAGCQEVAIERPDGPVVDALLGAGVTVVVISPNQVKNLRGRYGSAGNKDDRFDAYVLADTLRTDRSRLRPLVPDAPETVALRRIVRARRDLVAHRVALANQLRAHLRLVFPGAVGLFRQIDSLITLAFLTRFPTQDKADWLTPTRLGRWLSSVGYSGRTDPAALHAHLTAAPRGAAGDQTAYTAITASSVALLTAMVAQIKALEAQISTQLDAHADQHIFTSLPRSGRVRAARLLAEIGDCRAKFPTPEALICLAGVAPSTRQSGKIRVVAFRWACDKQLRDAACDFAGDSIKANPWAADLYRRARARGHDHPHAVRVLARAWLTVIWHCWQDGVRYDPAEHRALQRILNQDQKRAA

SEQ ID NO: 225914 - protein, 416 aa, unidentified
MEMDREVVCGADIHKQFLLATILSNSGQKIQDRFDMNFEGLTSFRKWLLDHGCQKLAVESTANYWQPIYLIVGKDVEFVLANAYQIKHIPGRKTDVLDSEWIAELCLKDLIAPSRIFSEDERDLRAVTRTRENYVKMRSQIKNRIHQELESACIKLSSVLSDIFGKSGIHIIRGILKGLSIEDILDSIPSKKVKARKKEIQNAIRANISPVQVDLIGRLLDSVDFLNREISSIDKQIQVLISKRQEDLKIAMSIPGMGITSASTILAEIGNFADFKTGEQLAAYCGLVPSVYQSAGKLITGHITKHGSPHVRRMLIEVAHAISRTKADSRLKRFYFRIKRRHGAKVAIVALARKVICILHHLIVNQEMFEDEIANKSKREKPGRSSSSPVLVIEDAIQILVRAGYLVQKRSEQEGG

SEQ ID NO: 225915 - protein, 342 aa, unidentified
MDHYAGIDVSLECSSVCVVDASGKIAREGKVASEPEAVIAYFVSLQLSVVRIGLEAGPLSQWLYAAMKQAGLAVELLETRHVRTALETMPVKSDRNDARGIAQLIRLGWFRPVHCKSIGAQETRAVLTARKLVQSKLLDVENSVRGILRGFGFKVGKTTNRSFAGRVENLVVNHASLHMIAAALLSVHAVLLRELKAFDKQVRSMARVDVKAKLLMSAPAVGPIVALTYASAIDDPGRFTSSRRVGAHFGLTPKKYQSGETDYTGRISKIGDATVRTALYEAAHIMLIKPIKGCAPLKSWAMRIARRSGMKKAKVALARKLAVILHRMLANATPFNAAMAAA

SEQ ID NO: 225916 - protein, 348 aa, unidentified
MKNKSFVGIDISKNVIDVSIFREDTNIKMFPHEVFNNTRKGFGDMCSWLKKSRVVLSQALFGMEFTGCYSLDLEKFLTSKNYSFCMLSTRIVKHHPMGTIDKRDKNDSAKIADFLYRYDGTECAKPYKLPSKAMQQLKQLVNERKFLVEQRTNFMNRMQMFETKEDSAMYESYIKKLNHDIEKIDQEECELMSKEEDVFDTFQNLLTIPGIGFVNATNIIAITRNFTAFDTARQYARYVGVAPCSHTSGTSVKWRARPSAHCNGQVKADLSMAALRAVEYDVEMQMFYNRKLGGRKDSDTKRKALNAVKFKLIRRMFAIGKQKRKWEVLNTFDDRKNLHIEKSKASEL

SEQ ID NO: 225917 - protein, 375 aa, unidentified
MRDHSEAFVAFDTSKLRNAVAIAEAGRSGEVRFLGEIDNTAGATAKLVKKLAAKYGRLSFCYEAGPTGYGLYRQISQLGHDCIVAAPSLIPKKAGDRVKTNRRDALGMVTQFRAGELTAVWVPDPRHEAMRDLTRARGTAVEDLRRKRQHISSFLLRLGLHYAGKKTWTKTHMKWLASQKLEHAEQRIAFEEMLLAVRQAEERIARLEEAIRAVVPDWSLAQVVDALMAMRGIDMVSACAFLAEIGDLSRFRSPRELMAYLGLVPSEHSTGDTVRRGSITKTGNRRARRILVECAWSYRHPPRVGKKKQDKVAASPRGVREIAWKAQHRLYGRYRALTRKGKPKTVVVTAIAREFAGFIWAINREIATAGVAASP

SEQ ID NO: 225918 - protein, 339 aa, unidentified
MAIQTKKIVRELKSLFAGIDVGAEELILVVRKNGISCKSQKFANTPADRARLVKKLVNMPGIIVCLEATGVYHFDLSIALHDAGVALMVVNPKSSHNFAKVLMKNSKTDAVDADTLAQYAERMDFVPWTRPSDEKIALRGFARRIDTLTRQKAAAKNNLHALSASQETPKAVLRDVKLAISQLEKRIACLGKEALDLIEKHPDLERVFQLLTSVKGIAQTSAIALMGELLLLPAGLSHREWVKFAGLDPRAFDSGKSVHKKTRISKVGNRHVRSALYMPALSAKQHDPHVKAYFQHLVDNGKLPLQALCAVMRKLLHAIHGMLKHDKPFDNTRFYAIPA

SEQ ID NO: 225919 - protein, 335 aa, unidentified
MEKYDLIIGIDISKEKLDACFMPDPSVKDFQFFVVSNATKGIKKLLSLIRKREIDFKSVLFCFENTGVYGLPLTCFLSDAGVDYWEVPALEIKRAKGISRGKNDKIDSRDIAFYAHTHKHKMKLTKMPEKDILELRLLFSEREKLLKAIKLFDSTKELEGFIDKKLSRSVLSVNKRTLRQLNRELKQVEQKMKELIKSNPVMTRQNELIQSVCGVGPQTAVYIILATKCFTTFSNWRKMACYSGIAPFEYRSGSSIRGKTRVNHMADKKMKSLLTMCALSAKKHDMEIALYYKRKVEEGKHPMLVMNAIKCKVLSRIFATVNRGTPYVITHQFAA

SEQ ID NO: 225920 - protein, 316 aa, unidentified
MEIAPIFIGIDVSKARLDVAMRPSAEKLSVSNDEAGIQALVKRLSELKPVLIVLEATGGLERSVSGTLGSAQLPVVVVNPRQVRDFAKATGQLAKTDRIDAEVMARFAEVIRPPLRPLPDEVSLELRALIARRRQLIEMMVAEKNRLSAASKAVRKRIAAHIRWLETELDRADKDLDHSIRQSSIWQEHEDLLRSAPGIGPVVSRTLLAELPELGRLNRKQIAALVGIAPLNCDSGTFRGRRGIWGGRATVRAVLYMAALVASRRNSVIRDFYKRLRDKGKAPKVALVACMRKLLIILNAMIKHKTRWSEIIPQTS

SEQ ID NO: 225921 - protein, 410 aa, unidentified
MTKEDFIYVGIDLHKETHTAVMIDCYNQKLGEITFPNRPADFPKLVIKVKKCNTDAKEVVYGLENAYGYGRPLAVWLIDKGYFVKDVNTAISHRQAKHRGAMYRKSDSDDAEAIALATLNMLDKLPDACPNDAYWSLGQLVHRRDNIMKQRTRLVNQLHEQLCIAYPSYKQFFNDISRPTALYFWEHYPSRKYLKGKSVEDLRTELVPVSHNRCSTKNCEKILDAVASDKVKNNAYQDARDMVTLSIVSDLQHYDSQLAEVDKMLEQMYKMLGCTLTTIPGVNVITAVKILAEIGDIKRFGNANKLAQFAGIAPLHLSSSGKGKDVATKQGNRRLQATIYFLAIQMVQVSSKGTPRNSVVRAYYEKRKAEGKTSQQALICISRRLISIIYGMLKHGTEYRMPVVESAGEK

SEQ ID NO: 225922 - protein, 451 aa, unidentified
MKKKKISLEVVNPNAAGIDIGSRSHWVAVGQNAQDVKEFGVYSQDHKELCEWLQKHKVTSIAMESTGTYWQNLFSSLVVFGFDVILVNGRQTKNIKGKKTDILDCQWIQKLHTLGLLSSSFLPDSTTAIIRTYSRHRQNILKQSSSIILKMQKYLRLMNMRLDVVVSDIVGLTGTKIITAFLNGEKSGEKLSAFRHYNCKKPQSEIAKALQYNGRNDYFFALKQEWETYHHLQNQITEVDKQIKEHLSKVIDKDDNKRQHIATKKPHKRKNKNTIRGVDMNQMAYQYFEGVDLMAIEGVNDATVMAIISEIGLEGIKKFENAKQFTSWLRLAPNNKISGGRVLSSHLPKGSNRLKIAFRRAANVIGNLKEGYLNDFFRRINYKKGRVTAISATARKLAVIIYNMLSKGEAYKPPTEYLFLDQKRKLKLVKRIKKNIAKFGIQPEDVGFTTT

SEQ ID NO: 225923 - protein, 406 aa, unidentified
MTSVFCGIDWATDHHDIALLDQAGTLLAKLRIDDTPAGLSQLLDLLAQHGDSPENPVPVAIETSHGLLVACLRATGRPIYVINPLTAARYRDRYALSRKKSDHLDAKVLANILRTDPAEHRPLPADSHLAQAITVLARAHQDAVWDRVQTGNRLRSHLREYFPGFLPVFKHFREGLASPVTRTLLAAAPTPTQASQLTRPQLRAILKRAGRQREITGEVERLHALLREPQMHQPPVVEQAMGTKTLALLKQFDAACASADDLEAATTTVFATHQDAEIITSFPGLGPLTGARVLAELGDDHTRFTSPRALKAYAGSAPITRSSGRKTTVRARHIKNQRLASAGYIWAFAALTASPGARAHYDRRRAAEDRHVSAQRNLFNRLLGCLHHCLTHRIPYNEQTAFPNTA

SEQ ID NO: 225924 - protein, 342 aa, unidentified
MQSMYYIGLDVHKKTISYCVKDGSGQIHAEGAISATRFDLDRWMKTLPQPWTAAMEATLFTGWIYDHLRPHAAALKVAHPLMLRAIAAAKKKNDRIDANKIADCLRCDFLPECYMASTQIRERRRAVRYRNLLVRQAVQLKNKIAVLLMEAGVSYNKQKLHKVGYFRELLATNKDIDEGLRPLLRLCRETLVRLGKTESALVRSLGRDPLLAERVERLMTIPAVGPVTALTWALEVGDVQRFSSIKKAVSYCGLCGAEKSSADLVKRTPQRNKHLQAVLVEAAKLAPRRNADLALLYDKEKPKGNANCATLAVARKLVAYMLAVDRGQRDFVVAENQAPAAA

SEQ ID NO: 225925 - protein, 399 aa, unidentified
MFYCGIDIAKYKHEASVIDMSGKALSNSITFANDRQGCEKVLAIFEKSEITPDNIVIGMEATGHYWLSVYTFFLELGYTVKVINPIQSEAFRKMYIRQTKNDSKDSYIIAQIMRFGEYSATSLSEENIIALRQLSRYRLALVDACGDCKRRVIALLDQVFPEYDKLFSDTFGKTSSELLLNCPTPEDMLAVSTRKLTNILNKASRGRFGKEKAEELKDAAKNTFGIAFAKDAFSFQIKQLMQQIIFTEKQLSELEEQIANLLHETNQYITTITGIGDVLGAIIVSEIGDINRFERPNQLVAFAGLDVTIKQSGEFSGTKNRISKRGSPYLRRAIWLAAQRAAFCDPILSEYYQSLKARGKHHLTAVGAVARKLCNIIFVILKENRPYFPTPPKKSQNLS

SEQ ID NO: 225926 - protein, 370 aa, unidentified
MSVRRILAKTIDTDLEYEAIGIDLAKNCVSAALLTTDGEVVCIDRLDYSELEKSAQVLCPTTFVMEPCTEMNYLVQKLEAWGHRCLVIGGKNVQNYVENHYSGQKTDLNDAQALAFLAQDKQLRTIKAKDIEQQKYASLTTLREQYIKQYRQTIVSLKGICQAWGLNISKGISGKAQLKDLIENHAAFPEELRESLVDMVTHAQTAQKALNKITKTLEVLAKNDKVCQLIQTIPGLGTICSCRLRATIGDIKRFKNPKDFPAYYGLVPRSIATGHNEKKGKITHRGDRTMRSLMVQGAGGVINMATKGKLKSKQLTKWILKKQKEKMPWGKLVCAVAAKLLRIVRAVLISSKPYNPKIAGVAKCSLSKGT

SEQ ID NO: 225927 - protein, 371 aa, unidentified
MGEYSEAFVAFDVAKIKHAVAVAVAEGGRTGEVRFLGEIENREGPIERTVKKLAGRYGRLRFCFEAGPTGYGLYRQLRALGHDCMVVAPALIPKRPGERVKTNRRDAVTLERLHRAGELTGVWVPDAVHEAVRDLVRARQAAADDLRRKRQQLLSFLLRHGRIYSGSGHWTLAHRRWLANQAFEHAAQQIVFQDGIDAIEDAIARLRRLEEQLVTIVPSWSMAPVVEAYQAMRGASFLVAVTFAAEIGDVRRFDNPRQLMSFLGLVPAESSTGDTVRRKGLTLAGNRRARRALVEAAWTYRYPARVSETLRARLEGLPKAVRDIAWKAQVRLCARYRRLSATGKKLPVVVAAIAREMAAFLWAIGREVAPG

SEQ ID NO: 225928 - protein, 349 aa, unidentified
MSEPYAGRQIVGIDLHRRRSVLVRMTEAGERLETVRISNDPEYLREVMTRAGEAPEVVLEACYGWYWAADTLAELGATVHLAHPLGVKMFSYRRLKNDERDAADLADLLRMGRLPEAWIAPPATRELRGWVRHRAKLVGLRSNLKCQVHGILANAGITVPMSDLFGASGQRLLATADLATESRSRIDSLQRMITALDFEVELFAKLVAGRLRTHPGYQAIQQIPGVGPILAAVFVAEIGDITRFRRPEQLASWAGLTPKHHESDTTVHRGRITKQGSRLVRWAAIEAVQRLPGHTRIGQVRDRVAARRGRNIGVVAAARELTELVFYGLRDHRVHALAVHSPARTPLLA

SEQ ID NO: 225929 - protein, 351 aa, unidentified
MRKIAYLGMDVHSNHCVLGDMDAKGNFRGAQTFCTSEQSIIKALQDVKATEKYLTLEEGNLAYWVAQVAAPYVTEVIPCDPKENALIYKGSNKNDKVDTKKLCRLLRLGELKRVYHPETDERAIFKAAAQHYIDLRDQQISLKQKIKAMYRHWGVIDVAGEAVYSPKKRDNYLCQIKHLAIRNEISRLYYLMDQTESMQQRALKAMKQLGRKYPEIKQFQKMPGIGEVLSHIFDAFIQTPHRFPDKHKLWRYSRLGVTDRSSDGKPLGFKRLDRSGISELKSLTYQAWMSALRSDNEVKRFYKNSLERTFSRVHARLNTQRKIIATMYGMWKRGEPYNPKLFLDSPQSGVD

SEQ ID NO: 225930 - protein, 306 aa, unidentified
MTIGVDVSQATLVWCTLETHPADLPNTPAAIRTWLASLPAETTVAMEATGRYHRALADLAYAHGCRVLVLNPCDVHHFAKSRAPRATNDPVMARVIAQYAATTPHLLPYAPAPAFVESVRSLMRLRAGLVQQQVRLRHQLRAAPDLAESVAPLRTALRRTIQQVTQQLTAYVRTEATFARLLAIPGVGELSAAYLRSLLATHAFATSDAFVACLGLDLRIKDSGKLKGTRALTKRGDPEARRLLYLCARSAVRQPGPFRTLYEREKAKGLGSIAAAVVVARKLARIAWSLDAHAANYDPARVLTQG

SEQ ID NO: 225931 - protein, 367 aa, unidentified
MKKISTVAAKQSKNFREQKLTIGLDLGDRSSWYCVLDEAGEVVLEQKLGTTPKAMKEVFGKMPRSRIALETGMHSPWVSRVLSELGHEVIVAHARNVRLIGESRRKDDRFDARTLARLARIDPQLLAPVKHRSAQAQAHLMVIRARAGLVRARTSLINTARGLTKSYGERLRGCSPRSMNVKKAQSLSPELQAALEPLLGAIESLSERIYEYNQKIEKIAKESYPRVARLKQVKGVGTLIALTYMLTLEDPQRFRKSRDVGCYVGLQPGRRNSGQSEPQLHISKEGDPYLRTLLVQGAHHILGPFGADSDLRRWGLKLAERGGKNGKKRAVIATARKLAVLLHRLWVSGEAYEPLRHSGQVRLPAAA

SEQ ID NO: 225932 - protein, 343 aa, unidentified
MQTIATIGLDIAKSVFQVHGVDAAGQLVARRQLKRRHLLAFFAKLPPCLIGIEACASSHYWARELQAAGHTVRLIPPAYVKPYVKRQKNDAADAEAICEAVTRPNMRFVPIKTVEQQGCLVLHRTRHLLIRQQTATINSIRAYLAEFGVVAPVGRRGVEHLLATIADANDTRVPEVARACVATLGVQLQRLKAQILELDRRILAWHRSSEASRRLNHIPGVGPVLATALVASIADPKAFRSGRDFSAWIGLVPKQNSSGGKDKLGNISKRGDRYLRSLFTAGALAVIRYAKIHGTKHRPWLVALLARRPTKVAAIALANKLARIAWALMTKGSRYRQPAALMV

SEQ ID NO: 225933 - protein, 391 aa, unidentified
MIYVGIDVAKDKHDCFITNSDGEVLFKAFTIKNNLDGFDELYQKIESVMEDASKVKVGLEATGHYSYNLLGYLIDKSLPTYVINPLHTNLYRKSLSLRQTKTDKVDAHTIASMLMSDVNLKSYSDTSYHNEELKSLTRYRFDKVKERAKLKTSISRLVCILFPELEKLVPTLHQNSVYELLYEFPGAKQVANAHLTRLSNLLETASKGHYTKETSIAFREAARTSIGSNMPAKSLELKHTIKLIRELDSEIEEIENEIKVIMDEINSPILSIPGISYRMGAMIIAEIGDFSQFDSPDKILAYAGMSPSTYQSGQLDNCYARMEKRGSRYLRYALFNATAYVCLWDPTYKAYLAKKRAEGKHYYVAMSHATKKLVRLIYHLERTGQQYQKAI

SEQ ID NO: 225934 - protein, 346 aa, unidentified
MKKYSRFIGVDLGDRFSQVCVMDESGAIVEEARVGTESVALEKFFKKLGEGKVALETGTHSPWVSRLLEKLGFRVYVANARKVRLISKNLRKNDRLDAQLLARLVRFDPELLAPIYHRGAQAQSDLAVLQARDCLVRVRATLINTVRGLIKASGGRVAACAAESFVKRAAAAIPELLRPALDGLLTTISELTARIREYDAQLARLCEDYAETKLMREIPGVGPITALAFALIIEDPHRFRKSREIGAYLGLIPRRDQSGGHDPQLRITKAGSGLMRRLLVNAAHYILGPFAPPSALRDWGLTKAGSGNKAAKKKAIIGVARKLAVLLHRLWTTGECYEPFLNVAVA

SEQ ID NO: 225935 - protein, 408 aa, unidentified
MRLFAGDDWAEDHHDVELMDVAGRVLAKARLPEGIAGMTRLHAMVAEQLGDAGPDEARVLVGIETDRGPWVAALAAAGYEVFAVNPLQAVQYRKRHAVPGAKSDAGDAHVLAGMVRTDAHQLRPVAADSAQAEAVKVVTRMHKTLIWERTRHTQRLRHALRGYFPAALDAFEDLDAAGTLELLAKAPDPASAAKLTISQISAALKRARRRGITGKAAAIQAALRAGHLGQPTVVTAAYAASVRALAAILVTLNEQITALQGQVEDHFGQHPAAEIILSQPGLGPVLGARVLAEFGDDPHRYASAKARKNYAGTSPITRASGKKKVALARFVHNDRLIDALMAQAFSALKSSPGARAYYGKQRARGAEYNAALRQLANRLAGILHGCLKTGTLYDEATAWSHHSEKIAA

SEQ ID NO: 225936 - protein, 369 aa, unidentified
MGKYSEVFVAFDVAKKKHAVAVAEGGRSGEVRFLGDVENSPLPIERTIKGLADRYERLHVCFEAGPTGYGLYRQVQALGHDCMVVAPALIPKRAGERIKTNRRDAVTLARLHRAGELTGVWTPDAAHEAVRDLVRAREAAADDLRRKRQQLLSFLLRHSRIYSGGGHWTLAHGRWLANQKFEHAAQQIVFQEGIDAIEDALQRMRRLEKQLTLIVPDWSMAPVVEAYQAMRGASFLVAVTFAAEIGDVRRFDTPRQLMSFLGLVPAESSTGDTIRRKGLTLAGNRRARRALVEAAWTYRFPARVSDTLRARLEGLPKPVRDIAWKAQVRLCARYRRLSATGKKLPIVVAAIAREMAAFLWAIGREVAPV

SEQ ID NO: 225937 - protein, 419 aa, unidentified
MNQQPHHPGLFIGIDWADQKHDCYVIDRDGKGFHQEIAHSPEDINSWVGEMLQLADGEPIAIMLEQSRGPLIHALMFRENVLLFPINPKQLFRYRESYPGGGKDDPTDAKYLARMLRERITTLTAWQPDDENTRLLAHLSQQRRKMVNGQTKLRQQLIAQLKSYFPLVLDFFRTVRQQPLLLSVLSRWPDPRQLRRADRRLIRRLLRDHCVRNEERQDEIIERIRSAQLLTRDDALITPAAMAVKLLVSQLQQSHKTIKEFDAKIAEAMQQHPDAHLFTSLRGAGPALAPRLLCAFGSQKDRWKDADSLAAFSGIAPVTRKSGTKCQVRRRYACPKFLRQTFHEFADSARLYCPWTKARYRMLRDRGTKHHAALRKLARSWIRILFRVWQTGTPFDCDRYLAKLKQRCPEIIPYLAQEN

SEQ ID NO: 225938 - protein, 324 aa, unidentified
MNKSKQFYGIDISKDVFDVVDASEKHHQFKNDPSGFKAFGKMLNENSHCVMEATGCYYQRLATWLFSQSIDVSVVNPLSVKRFIQMRLKTSKTDKLDALMIRLYGESEQPKLWNPPSKLIAEASELHKLIELLVRQRVALKNRLHALKAKGITRSPVLISVRRQIRNLSNEITELELKLEALIKEYEPDLLTRLCSIPGIGKRTSIYLIVLTHGFEKFESSRQLISFFGMNPIIRESGSSVRGKSRISKTGDNHIRNLLFMCAFTACEHNKSCREIYQRITAKGKSKKLALIAVANKLLKQSLAIAKSGLYYDENFRSVCVNLG

SEQ ID NO: 225939 - protein, 349 aa, unidentified
MIIGCDYHPRYQQIAIMDTATGELVERRLEHENGEARAFYASLPKPSRVGMEATGYGQWFERMLAEQGHELWIGHASEIRAGVVRKQKTDARDAAHLLRLLLEKRFPRIWIPSPAERDTRQLLRHRYKLVCFRVSVKNQLHGLAMSQGVCRKKKLFTAKGREELEKLSLGPWASRRRQELLAMLDQLDPAIEELDRAVQREAESRGDAVRLMTHPGVGPVTALAYVLTLGPVARFQRSKQVVSYLGLNPKERSSGDKQHTYSISKQGNTMMRWLLVEAAQTTVRFDPELQRVYRRIKFNKGASVAKVAIARKLAVKLYWTLRATASCAQMAPMQGSSRGTLVPNPGSSF

SEQ ID NO: 225940 - protein, 459 aa, unidentified
MTKRKKMEMEIINPNAGGIDIGSKSHFVAVGQSIEDVKEFGVYAEDLTSICLHLQSYGITSVAMQSTGDYWQNLYVALINHGIEVVLCNGKFTKHAKGKKTDVKDCRWIQKLHALGLLTSSFLPDETTEILRTYCRQRNNWIDLSSSASHKMQKYLKFLNFRLDVVVKDVCGLTGLKIIEDICNGNLDPESLAGHRHYNCRKSKEEIAKALHGNNRKDYLFGLKQEYESYNFFQKKIKDCDREIERLVKTELKKDPAKLKLTTTEKPYKRINKNAPEIKDFNQVAFRYFGGIDFMAIEGVSHATIMSLMSEIGLEGFRKFITSKAFCSWLRLAPNNKISGGKVLSNRIPKGSNRLKIALRQAANAIGNLKDTHLSYFFHRVAYRKGRQAAVSATARKLATIIWTMVTKKVPYKPPTEYLFLDQKRKQKVMQRIKKNIVKFDLKPEDVGFGNSLNMSINI

SEQ ID NO: 225941 - protein, 390 aa, unidentified
MERPMQKLNDLSRSLTALEPDGTLIAVIEMSLSSWLVAGIVPGVERQPLKKLAVDESTLLKLLYRWREEAEKAGRRIEHIAVAFEAGRDGFWLARWLKACGIEAYVIHASSIAVSREHRRAKTDRLDTELLKRSFLGWLRGERDHCKMVAIPTIKDEDAKRPNRERDSLIRERSRIVNRMKAAFVRLGIRGFNPKLKRAAGRLDGLRTPEGEPIPPNTSAELRRDMERRRLVSDQIRQIEEARLERIEQAPSDGPHAMVRLLARVIGVGIETADMLVHEVLSRNMRDRRAVARYAGLTGSPDESGRKRREKGLARSGNARVRRGMIQLAWRFLLHQKDSALTRWFRARTENARGIRKPMIVALARKLLIALWRLVREGVVPDGVVLRPAQ

SEQ ID NO: 225942 - protein, 428 aa, unidentified
MKFNTQNAKIAAITEKTLIIGIDVGNETHYARAFDWRNYEYSPKPLAFNNDEEGFETFLTWANELKTKHGKTEIIPGMEPTGHYWFNLGRFLQDNGMKPVHVNPHHVKKSKEFDDNNPSKNDRKDPKVIAGLVNEGRYTHPYITTGIYAEIRSFTEMRRQTQSEITRLKNRIARWFSIYFPNYKDVYGNTWAVSGLMILKQAPLPEDIAELGIEGVNKIWRDAKMRAVGIKRAKTLVEAAKHSVGCHEAKEAARIEIRLLLSDYEMYVERETELMELIEAAMNEIPYVENVLAIKGIGMKTLTGFIAEVGDIGRFDDPRQIQKLAGFAIVKNESGKHKGESHISYRGRKHLRYILYEAAVSVVAHNSEFKLIHHYYTTREQNPLKKMQSLIAIACKLVRLFYMLLTTGREYNPSKMMGDIKHPELKAA

SEQ ID NO: 225943 - protein, 462 aa, unidentified
MIRHPRPLHPADGPATALAVVHPHAAGIDIGATEHYVAVPASDDPHPVRRFGACTADLEALADWLAACGVTTIVMEATGVFWIPLFELLETRGFEVRLVDARQMRRIPGRPKSDKDDCQWLQRLHSYGLLAAAFRPDEPVCVLRSFLRQRHMLLTYAAQHIQHMQKALTQMNVKLQHVVSDITGVTGLAIVRAIVAGQRDPVELAKLRDDRCKHSEPEIARALYGNWRAEHLFALKQAVELYDFYHKQLVACDRKIETQLQQFEDKSGGQDLPPKARRSRRGGNRLAFDVRGPLYRMAGVDLTVIEGIEESTALVLLSEIGTDMSLWPTEKHFCSWLGVCPNHRISGGRVLSRRTKPCANRAATALRLAAYALHRSESALGAFLRRLKARVGAPKAITATAHKLARLVYSMLKHGTAYVTQGMEEYERRYKERVVKNLSRRARELGYTLVESAQPAVEPTPT

SEQ ID NO: 225944 - protein, 425 aa, unidentified
MKITQTAQIIKGKFAMDVSVDVHKDTLNCFFETEGKEYYDEFSNRNTVIQRKLTAYHQVATEHGRKTLRIICEPTGQYQNKLFRTARKMGFLTCFVNTESVAKFRVIETNDTGKTDIKDPRVIRTLGRLEKTIKHRHLDNEYLVLRKLNRVYDDTERAIISLKGRINKLLVELFCDYAFKKDFLYSTSGLALIEKYQCNPYRIVKAGYKRFRKAMKKAAPRIWEQSLQRLWNDAQSSVLNELPEEYVETLQKHLLQLYQDYLQQAARREEITERMIRLLKRLRAKDPNIPPATRGVINDRNLARLLGETGPIRDFANWRLLMRYAGLNIRMRQSGRYSGLNKITKKGRVLLRKILMGIALPLVQRNRIYGEYYHKKKDVDKMAGNKAMTCVARHFLRKFYGWYKSGEAFNRERFFTCKTQYRKAA

SEQ ID NO: 225945 - protein, 343 aa, unidentified
MQSITTIGLDIAKSVFQVHGVDAEGNVVLRRQLKRRFVLAFFERMPPCLVGIEACASSHHWSRELKALGHTVRLMPPAYVKPYVKRQKNDATDAEAICEAVSRPNMRFVATKTPEQQSGLMLHRTRHLFIRQQTAVINAIRAHLAEFGIVAPVGRSGVEQLLGVVADSNDKRLPEVARACVAALGAQLRMLKTQILEFDRRIMAWHRSNETSQRLDKIPGVGPALATALVASVADPKAFRSGRDFSAWIGLVPKQHSSGGKDKLGSISKQGDRYLRSLFTAGALAVIRYAKIHGTKHRPWLTSLLARRPTKVAAIALANKIARMAWAMMAKGERYKEPATLAA

SEQ ID NO: 225946 - protein, 352 aa, unidentified
MSSRINELTKGAEIFAGVDLHKSRWHVTIRTKEVELCSVSIPGCWESLRKILDRYEDHEIFVVYEAGYFGFWLYDELRTYGADCTVTPPSLVPGEYGNRVKTDRRDSRKLAHLLAKGMLKRIWVPSEQERGHRQVIRRRRQLIGDRVRIQNRIKSELQFYGINVGQTRGKWSKVYIENLRLIRFKDRWMQDSFERLLDEYEFLSAQIVKQIRPLKELSETALYQKRVKILQNVPGIGLIAAMEILLELQDVSRFRRAKELAAYVGLTPSQYSSAEKVRMGRITGIGKSDLRGTLIEVAWFLIRKDAAMREKYERIKTRSGAKRAIVAVARILLLRTRRMLLDGQPYALGLIK

SEQ ID NO: 225947 - protein, 395 aa, unidentified
MYPLSIRVAVDVGSTCHRVAVGLPDGKLLDEFDISHNAGGFKEFFHHIESLEKRHQLPVAVAMEGYNGWARPLDGQILRHGYRLYSVNNLKLARYKEIFPAPAKTDAIDARRILELFRLSEHLPLAKNALHEVAPTPVENDQLKRYTRRRKQLVWERVRVINRLQSDLHAVCPGLMAITGEADNIWFLNFLTCRDKLTKLANLRRSSLLAIPGVGKTYAAQIQAWQAQAQFATDAEWVGEMILQDAHRILALGKDIKALDLKIAGIAAQSKLAQTIGSIPGFGKTSMAEIAGEVGTLERFKSETGLAMYMGMSALDNSSGKKNGVKTPRHVNTRAKAAMMVAVARHIAYVPMSRAYYDKKRAEGKQHNQAIRALGRHLVRVIWSMVKQGKKYEVR

SEQ ID NO: 225948 - protein, 340 aa, unidentified
MEKASMIGLDIAKNVFEVHGRNAAGAVVLRRSLKRSQVEKFFVKLSPTVIGLEACGSAHHWARVLGKLGHEVRLMPPAYVKPYVKRNKSDAIDAAACCEAVGRPDMRFVPVKTVEQQAALSLHRSRDLLVSQRTQLGNALRSVLSEFGIVAGKGKAGLARLVDELRAGTLDLSADAVAAAMTLADQRAALEAAADALEWRITAQAKADEKAVMLKTAPGVGPLSAHATLATLPDPSLFRSGRDFAAWLGLTPRLNGTGGKTRTGRITKQGNQPLRRLLVLGATAWVSYAKAHPEKASPWLRGMLARRPSKVVAVAQAARTARILWAMLTHNQPYRAPAVG

SEQ ID NO: 225949 - protein, 298 aa, unidentified
MASVAQFAPIHLGLDVHRDTISVGILGPDQQVPEVDRIPHDEPSVRRLVGRLGDPRLLRACDEAGPTGFELARLLHRMGVRCEVIAPSLIPKAPGDKVKTDKRDCRRLARLHRAGELVCIRIPTIGEEAVRDLCRTRADMVADRTRARHRLSKFLLRHGRVWRGGATAWTQAHERWLLAQQFDEPALAATYGHYRVVLESRDAHLDAIEADLASWYDRPPFAEQVARLSAYRGVTRLGALTLAAEVCDWRRFARASQFMGFCGLVPSEYSSGQRTVRGHLTKAGNAHLRAQLVESAWS

SEQ ID NO: 225950 - protein, 313 aa, unidentified
MSQNNTHILHVGLDVAKSSLQLDLAHTQHALPNDAKGHAQLLKLLTAHPGARVICEATGGYEKPVVRALHAAQVPVTIVEAGRVRHFAKAKGLRAKTDPLDASVLSQYGRTFNPEATPAPSAQQSRLAELATRRLQLIDTRTAETNRAEHYSEPACVKQSRQLVRLLEKQIGACDAQIQTLIAADAVLKTKAERLDAIPGVGQVTAATVLAQLPELGQISDQAAAALVGVAPYNRDSGNQSGVRSIAGGRKTVRCALYMAALSAVRHDAILKAFYARLRAAGKKPKVALVAAMRKLVILMNRLLKNPKFQLAN

SEQ ID NO: 225951 - protein, 334 aa, unidentified
MKSDTVHIGVDVSKEKLDIYVPAKKEGSRPVTKEVDNSVAGFRELRDLARKAKATVCVEPTGGYELELIAFMHKFDVPVAYTDALRVRQFARAEGSLSKNDAIDAALISRFADKIGVRVLEAQEVEAVELKRKAKFRQTMVDSRTAMINRLETEIDPEMKALLKEQIRLAGRIIDKAERLCLDTVKKNDRMNSLKERFTAIGGVGDLTAISILSSLPEIGTLPDGKLNRLVGIAPEEKQSGTKEWQRRIWGGRKDVRNALYMAAVASIKWNAILGGYYRKKRAEGHPHKWAIVPTMRKLLSLLNRIARDPGFIPMPEPESTKQNANVGRRKKAA

SEQ ID NO: 225952 - protein, 409 aa, unidentified
MRYYVGVDWADAAHAICVVDEEGGRVTTRTVAHSAEGLSEWGRELDEWRAQAIELWAAIERPEGRVVDFLLDHGVVVYPLNPKALDRARDRFRQSGAKSDPFDARVAADFLRTDQGHLTALQPSSAAAQELKYLTEDCQRLIRQQTRLLNQLTATLKAYYPRALEVAELPTALARAFLAAYPTPEALSQLTERQWQRWARAQHVSASRTAELWSVLHAPQLPVPAHVVRAKARLMRTLVAALEPVLAAVGSYREAIDDFFAGMPAAATARTLPVGDRGLLVPTLWARLGDAPGRWSSFRHLQAQAGSVPVTERSGRQHRIHFRYACDKTLRYILDHLAFRSLQSSDWARAYYDQQRARGHGHRQALRALGAKWLKIIFVMWRDDVAYSEEHHLATIARQQLRCSVPKMA

SEQ ID NO: 225953 - protein, 367 aa, unidentified
MENIHYVGMDVHKETIQFAVYNSNDRDPILEKETINDLAVIKRFFEGIKSPDGIRSCYEAGCLGYSLHRFLESIGIKNMVVSPGAVPISPRDRSRKNDRYDAQLLGRMLRDQRLTPIYVPTKDDEAVRDFLRFREDLKKEIMHARQRLLGFLMRHHIKYDIGKDHWTDRHHVWLRGLRLEDPMLQLTLKSQVTGLDQLILNKAEADQEVQHIAARPQYAPAVKRLIGLKGVDVLTALSFIVEIGDFKRFSNAPSFMNFLGLVPREHSSGNSHLLGRITKCGNVHLRTLLVEGCWCFRFKSRGSKRLATRRVGLPADLLAYCDKASRHLEGLFRNLVLEKKKSSQIAVVATAREMSGFIWGIMTERTA

SEQ ID NO: 225954 - protein, 368 aa, unidentified
MNKSLRFVGLDVHKDSITIAVAEEGREPAYVYGKILNDWEILKRALRRLGAKSSLRCCYEAGPCGYGLYRKMKEAKIECVVVAPSLVPVQSGNRVKTDRRDATKLAHFLRSGDLTEIFVPDEEAEALRDLERAREDAKNAERAGRHQLGKFLLRHGRHWNKTNWTRNHLDWIRRQKFEHQAQQRVLTDYLKTVEDATERERQLTKDLAELVKETKLYPLIRALQAFRGIQLITAVTIAAELVDLQRFSSPRQLMAFLGLVPSEHSSGENQRRGRITRAGNGHVRRMLIEAAWSYHYQPNMSKAIRKRNEGVAPGVQRLAWKAQKRLHKRLYHLLRKGKSGQKAITAVARELAGFIWAVGQQPAWLAEE

SEQ ID NO: 225955 - protein, 350 aa, unidentified
MELHAIGIDLGKTVFHLVGLSRTGEITVRKKFSRTQLLRFTANVQVHLIGMEACPGSHFLGKALREQGHQVRLMPAQYVKPFVKTNKNDYIDAEAIAEAVSRPTMRFVPIKTDDQLDMQSLHRVRERWIMRRTAVVNQIRGLLLERGITVRTGRCHLDAALPNILEDGSTSLSGALRFLLIELRQELEQLAGHIEQAETLIQRAAQQSEACQRLDAIPGIGPLTATALIAAIGNGEAFRKGREFSAWLGLVPREHSTGGKQKLLGISKRGNCYLRKLFIQGARAVLQFRDKQCSGLRYWLAELSSRSHYNVVGVALANKLARMAWAVLARGEAYRPPLLADMNGLQMAPG

SEQ ID NO: 225956 - protein, 397 aa, unidentified
MIAVGIDISKAKSTVAVIDSDGTVLASPFTMAHTQPEMETFVTYLKGLGEPTTILMEYTGHYHYPVLKKLQDEGFPVCIVNPYQMKKYGDVEIHKAKTDKKDALRIAAYALEKSYKLVPYSSMEQKYEDLKFLSRQYSQRITYVAKLKVQLIALLDQTMPGITRILPLNSRNPEKCALLLFIKRFKSFDEIQRIGKARFLASYDVLAKKASERSASSKGLSIYELAVDSITTRGENPYIWLSQNQCVDLLSATQNAADEIISQMRNIAETIPEYKVLRAMRGVGDRLGPIILAEIGDIRRFHSGKALNSYAGNDAPPYQSGQFESRNRHISKRGSSTLRKACYEVMQALKLTKPQDDPVYLFMLKKEQEGKPFNVAKMAGVNKFLRIYYARAMELYK

SEQ ID NO: 225957 - protein, 443 aa, unidentified
MNEQPSTHVRGPRGQAFADLVRGIAPEQLLCVSLDISKYFHVVMIHNGLGEIVTPTFDIDIYQTGFDQLGQAIARAKATTQAQVVLVGMEPTSHYFENLARHLLQQAQPVKLINSFAVKQNREQHLMRREKTDQIDVAAIGDLLRRGEGTPYHPATGVYLQLQQLDRVRLGKVRLASILKNQIIAHLDRIFPGLLILDAAAQQRYTPLFNTDFWHCQTLQDLIRICPNPHDLITLTPVQLVQAFHAQHCRLGPATAAKIIAQAHKTLLPDAELAAIRCELLRHDLALLETVQTHLAQFESRLAELVAQTPYHIWANLQGLSVVQVASLAAAIGDPANYTDAKQIFRRSGLVSGRNDSGNHQRKGKGNSILKTGDVYLRRALMSATATLILHQPVLARYSKQLQITKPAGVARVATARKTIGILWAVLRDQASQTLITCKGTDM

SEQ ID NO: 225958 - protein, 310 aa, unidentified
MDMKAVGIDVSKDRLDVHVWPDGIAFAVARDGKGLAELIERLLPLTPDLVIVEATGGFETVVAAALAGAGLPLVVANPAQIRHFAQAAGTRAKTDPIDAAMIARFGHDMKPDVRPLPDEATQLLADLVARRRQIIEMIVAERNRERRATVRRIKKSIARLVRALEKELAEIDAEIDAGVRGSPAWRDKEDLLASVPGVGPVVARTLIAELPELGTLDKKKIASLAGLAPYTRQSGQWKGKSMIGGGRKSVRCALFLAALVASRHNPVLKAFRDRLRAAGKPKMVALIAVARKLLTILNAILRDQKPWQPA

SEQ ID NO: 225959 - protein, 345 aa, unidentified
MNNMYYIGLDVHKKTISYCIKDASGKIHQEGKIGATRGELNSWMRTLPQPWTVAMEATIFTGWIYDHLLPHAAQVKVAHPVMLRAIALAKKKNDCLDASKIADCLRCDLLPECHMVSSEIRERRRTLRYRHLLVRQMVQMKNRVSGLLMETGVSYNKQRLHKVGYFRELLSSNEEIHPSIRPLLKLSRETIVRLQKTEYALVSSLQRDPLLVERVERLKTVPGVGPITALTWALEMGDVSRFRSIKQAISYCGLCGDERSSAEKVLRTPLSKQRNKHIQRVLVEAAKLAPREDHHLALVYESEKQKGNANRATLAVARKMVAYLLAVDRGKREFVSAEEHRGAAA

SEQ ID NO: 225960 - protein, 367 aa, unidentified
MKKISTVTGKQSRNISQPKQTIGLDLGDRNSWYCMVDEAGQIRVEQRVRTNAKGLQEVFGAMPRCRIALETGTHSPWISRLLHGLGHEVIVANARRVRLIGESRKKDDRLDAQTLARLARIDPKLLCPVKHRSAKAQADLTVIRARAGLVRARTALVNTVRGLAKSYGERLRGCNVRNMNPEKAAGLSPELQAAVQPLLVALESLSEQIAAYNERIEHLALESYPQVALLKQIKGVGTLIALTYLLTLEDPHRFRQSRDVGCYLGLQPGRRNSGQSEPQMHISKEGDPYLRTLLVQGAQHILGPFGVDCDLRRWGLKLAERGGKSGKKRAIIATARKLAVLLHRLWVSGEVYEPLYNSNQREMPAAA

SEQ ID NO: 225961 - protein, 358 aa, unidentified
MAVPTIAQLEPIRVTVGVDTHKDSHMAVAKDHLGRHLGQTTVATTPQGYRDVLAWAECYGEVEAWGIEGTGSYGSGLSRFLHGTDQAVIEINRPDRKARRLKGKSDPIDAEAAARAVLSGEASAVPKSADDRVEMIRALRGARSSAIKARTQAINALKALVVSAPAELREQLRSLSAIRLVHTCSRLRPGAIVHPTAATKLALRSLAGRYEALDAEIKILDPELLRLTAEAAPTLVELVGVGPDVAGTLLVTAGDNPERLRSEAAFAHLCGVSPIHASSGKTVRHRLNRGGDRRANAALYRIVIVRLRYDARTMEYAERRTAEGKSKTEIIRCLKRYVAREVFAVLTDSSQKKIAVAA

SEQ ID NO: 225962 - protein, 394 aa, unidentified
MLALFKELVMEDCSNETKQCEYFTESREVTTDRFSCFIGVDLHKTTVTLRAVDPSEEIISSLRTHTQCVNKIEKWINELPEPKWMAVEAVSFTEWFIDRYRDCVDRIDIADATELARRRGKRRKTDRNDALDVAVRLVRGNCPLGYIADESLMYLRKLGRHWRQLSKILTRSKQCMRSILDAANIHGPKISGATAQAWILGHGDLLKDVQRESLANFIDVISLLERQRETLRRKIIFANRSEEFSARIAMLKSIPGINDVWACIIAAEVGPFDRFPNADTIEFWAGLTPDNKESAGRTQSGRITKAGSQTLRWALCQAAVALCRSDVRQDAVKQRLVKRAGKVKANVAMGRRLLRIIYAMMRDGTLYERSEPTDRLKRNIKKTRYVKRNKREVA

SEQ ID NO: 225963 - protein, 341 aa, unidentified
MKNLFIGVDFSKEKVDVAILFADGLVETAARVFNEFKTTVSGYRQLVKWVEQNSCGIDSSLWLFCGENTGDYSKGLCNFLYGKGYDMWLENAKSIKDASGLRRLKSDRADASMIAEYAMRNYDKAVMYEPLSESLTQLRELFLYRQMIVRHRCSFQVRRGEKRLTMEKSPVKTMISQSGRHIVSELNKEIEKIDKRIADLIKSDEELTEVFTIVTSVPGIGTQNAVCLMVYTDNFRRFNYDSRKIACYYGLALFGKDSGTSVHSDPHVHYMANRQIKAMLTQAALAAVNFNPIMARYYMRLVERGKKKQVALNNVKNKLVHLVTAMVRNRQTFTPEYKISA

SEQ ID NO: 225964 - protein, 395 aa, unidentified
MKANELQVAVDVGARMHRVAVGNGSGQLVAEFDLAHTAAGLAGFFTRIERLRGSRSAPVAVAMEGFNGWARPLDRQVLEHGWRLYNVNNLKLARYKEIFPAPAKTDAIDARRILELFRLRGDLAIARGVLQEIVATTEEAERLKRLTRRRRQLVNEKVRVLNRMHSDLQAVCPGLLEITADADNLWFLSLLGAREDIRRLAGLRPTSLLALEGVGRAYCTKIQAWQREALFSHEAEWAGPMIVADARRVLALKREIAALDQLIEPLIDGCETARRLRTIPGFGPTCSGELAGEIGAIERFATEASLALYLGMAVLDHSSGTHTGTKRPRQVNARAKAAMMTAVARHMEQVPSSRAYYDKKRAQGKAHNQAIRALGRQLVRVIWSMLKHQRDYEVR

SEQ ID NO: 225965 - protein, 343 aa, unidentified
MSGVVTIGLDLAKSIFQIHGVDDAGRTVLRRRLSRHELVPYFAKISPCLIGMEACSAAHHWARELSRFGHSVRLIPPQYAKPYVKRNKTDAADAEAICEAVARPNMRYVPIKTLDQQSVLSLHRVRALFVRQRTAAINTVRGLLTEFGIIAGKGIGRIGELRHRANEADGEVLPDEARAAITEVFEHIDALTERIDATEAKIVAWHKSSEASQRLASAPGVGPITASAIVASVGDARQFRSARHFAAWLGLTPRLHASGGKEHIGRISKGGDRYLRALLIHGARAIVGTSFRKDVPPRLWLKQLLTRRSVNVAAVAVAHKTARALWAMITREEGYRRIAVQAA

SEQ ID NO: 225966 - protein, 417 aa, unidentified
MLAVVVSDVEVEDEYKFERRMFGSNPEQLRSLAAWLLEQEVEEVVMESTAQYWKPVWEALERHWKPLRQKKEGASRRSGTLHLAQAQSNRGRRGRKRDFPDAERLVKRLVARELILSFVPDTEQRLWRTVTRRKYQLTRDRVRLQNQLESLLEEVHIKLSCLVSDLLGVSAQRMLKALADGETNPAALAALADRKLRATPEQLCDALGACTDLKPVYRRLLKMVLEQLQFLDQQIGQLDQEMAMLLNQHQDAVTRLAEVPGLGVDSAQQIIAEVGPTAATFPSAKCLSSWVGACPGDDESAGVNYSHRSPKGNRHMRRVLNQTANAAARTKGSIFEIVYRRCVPRLGHNQAIGAIAHRQCRLIWLILRQGVRYEEQGPAVTKQSKQRRTARMVRQLRALGYRIELPNPQHSSSAQVQ

SEQ ID NO: 225967 - protein, 359 aa, unidentified
MPRSVPTNTEVITLGVDTHKDIHVAVALDGLGRRLGTLSVPAIPAGYENLVNWARGFGPLERAGVEGTGSFGAGLTRFLQEAEGIEVFEVIRPKRRDQYRSGKSDPIDAEAAARSVLAGTAIGQPKDADGEVEMIRTLRITRRSAVKARAQAANQIQALLVTAPEGLKSELCELSTARLIEKASRLRPGATLSDVEAATKFALRSVARRYQHLSKEISELDERLNRLVSEVAPQLVAVEGIGTDTAASLLIAAGDNPERLKNEAAFAHLCGAAPIPASSGKTVRHRLNRHGDRDANRALYVIAICRMSRDKRTRAYVERRTKEGKSKKEIIRCLKRYIAREVYRILASLSLNKPPVPVP

SEQ ID NO: 225968 - protein, 376 aa, unidentified
MIATTRPTVSVNESRLFVSFELSAKQWKLAMTSGFSVEPWVQGLRAGDLKKLAQLLTRGRARFGLPADTPVVSCYEAGRDGFWIHRALTQMGVTNQVIDSASIEVSRRARRAKTDRLDALKLVRMLVRYWAGERQVWRTVHVPSEADEAARHGSRERTALVKEQTRIVNQIRGWLATWGATVPRRRTGRWWARVETWCGDALPCPLQERVARAEARRAVIADQIAALDTAQRAVTATAAIDSPAWRLVQLKGVAAATASMLLEEGLVWRDFRNRRQVGGILGFAPTPHQSGDVAHDQGISRAGIAPLQAISIQAAWNWLRWQPSSPLALWFARRFAQAGKRARRIGIVAVARRLLILLWRYATTGAVPAGAQLKAA

SEQ ID NO: 225969 - protein, 426 aa, unidentified
MAVVMIGVDPHKASHTAVAVNAAEQSLGQLRVRASAVQAERLLAWAHAWPERTWAVEGAGGLGHLLAQQLLSAGERVLDVPPELAARVRLLATGNINKNDPNDARSVAVAALRSADVRQARRDDHAAVLKVWSKRYRDLGRMRTQVACRLHQVLCELVPGGVPGEISAGQAVRLLASVTPAGAVEAARWELAAELTEDLRGLDARIRQTRTKAAAAVRAAGTCLTGLFGVGPVIAAAVIGDVRHVSRFGNRDRFAAYNGTAPIEVSSGGRKVYRLSRRGNRRLNHAIHMAAVTQIRYRHTKGRAYYDKKLAEGKTPKEALRALKRQISDAIFACLQQDARRAAAAAKSPGGQPGNHSATRAAGSHPEHRLFGQATPGPATHPTTPAAPVPAQLPSRASERLSPGPGAARPRSGARRASSTRPRASR

SEQ ID NO: 225970 - protein, 345 aa, unidentified
MDIMYYIGLDVHKKTISFCVKDASGQVHQEGKIGATRRELDRWIETLPQPRTIAMEATIFTGWIYDHLRPHAQQVKVAHPLMLRAIAAAKKKNDRIDANKIADGLRCDFLPECHMASTEIRDRRRTLRYRQLLVRQMVQMKNRVSGLLMETGVSYNKQRLHKVGYFRELLSSHEEVHESIRPLLKLSRETIVRLQKTEYGLVSSLERDPLLADRIRRLRTVPGVGPITALTWALEVGDVSRFRSIRQAISYCGLCGAEKSSADKVMRTPLSKQRNKHIQHVLVEAAKLAPRQDHDLALVYETEKQKGNANRATLAVARKMVAYLLAVDRGKRDFVPAEVHRSAAA

SEQ ID NO: 225971 - protein, 391 aa, unidentified
MVCVGIDVAKDKHDCCILDSDGMVRADCFTIPNNMDGFKQLLQTIRNCTKKSDKIKVGLEATGHYSYNILGFLLDNGLPTYVINPLHTNLYRKSLSLRKTKTDRVDARTIATMLLSDVDLKSYTDTAYHNEELKSLTRYRFDKVRERAKLKQSVSRLVTILFPELEKLVPSLHIASIYALLSEYPGAKQISEIHLTKLTNLLATASKGRYGKDKAIQIRDAARTSIGSVMPAKFLELKHTIKLIRELTSEIDEIEVSIQKIMDELNPPILSIPGVGIQSAAMILAEIGDFSNFESPDKILAYAGCSPSTYQSGKLTNCYAHMEKRGSRYLRYALYNATKYVCHWNPVFAEYLAKKRAEGKHYNVALSHATKKLVRLIYALQKSGKAYLVAA

SEQ ID NO: 225972 - protein, 312 aa, unidentified
MMQQTFIGVDVAKGWLDIHHPERKSQRIENTPKGARAFAHQTAKEGAWVIFEASGGYDRVLREALEEAEVRFSRVNPRQARDFARAMGVIGKTDQVDARMLSELGARLNPPLTEPLAASRKALQAQTVRRRQLVDLRKQEDTRLKQTADPDVRADIRSLITVLERRIAKIEKEMVRLVKADQELAEVNDILQSAPGVGPIVAATLISELPELGRVDRRAIAALAGLAPVARDSGKRSGPRAIEGGRPAVRTILYLAGLHAARASSNFSGFRKRLEGAGKRPKAAIIATARKLLVTLNAMIASGQKYAPQVPR

SEQ ID NO: 225973 - protein, 504 aa, unidentified
MDWFEFVWRASEVSHRGKRKPVPVDKSAPEVIPDAEHELVIERVVAVDVAKAAGKVCVRLPGKAGRRFSRVWDVPARTGAITDLGEQLVESRIEKVTVESTSDYWRIWYYLLEAAGLSVQLVNARDVKNVPGRPKTDKLDAVWLAKLTEKGLLRPSFVPTTEIRRLRDYTRLREDLTHERTRYWQRLEKLLEDALIKVSVVASRLDTMSTRDMIEALIAGERDPQRLAELARGKMRAKRSELITALDGRFDDHHGELARLLLNQIDALAAQINTLTGRIEDLIAELPEAGAVDHGGSEDTDITAPGAADRSHAAPQPARGAHEPTGSAPCRVDPAIEAECARLGAIERLDEITGVGEHNAQVIIAETGLDMTRFPTPAHLVAWAKLCPRTIQSGPVTRGGRTGKGNPYLKGALGQAAAAAARTDTFLGQRYRRIVKRRGKLKALVAVARSILVIVWHLLADPLARFHDLGPDYHARRINIERRMRNHIAQLTALGYRVTLEPAA

SEQ ID NO: 225974 - protein, 463 aa, unidentified
MRFERAGQLLPLAPGSPGGTALAGYQRTAGRAGNVEEVTDEPLYRDRVCGIDIGKAEMYATIRVPSDKDPARRAQETRGFATTRQGVLALADWMRSWQVPCAVMEATGDYWKGPFYRLEAEGFECVLADARQVKNLPGRPKRDPSDSRWLATCFERGSVTSCFVATPEFRIIREHTRYRRDLTAERTREKQRAEKLLESAAIKLSSVITDLHGITGRDIMDHLIAGERDPRVLAQLARGRARSKIAELEAALEGAEFFTSELAALLARMLARIDQLGADIDEVTVVIEALLAPYEEQLQQAESMPGWGRRSAQDAIAETGADMSRFRTGAHLASWAGRTPLDNQSGSRKGKAKSKKGNRYLGAVLGETAVSAGKTQTREGARYRRLSRRRGKAKACVALGSTQMKVYHKLLSNPGMRYEDLGADYYDQQADARRQLRALEKRARDLGYTLIPDLTGCPEIACP

SEQ ID NO: 225975 - protein, 388 aa, unidentified
MNKIIYIGMDVHSTNFTLCSFEPGYGFEADKIFGQTQIKEDIFNSTVKYINKLKSMRPDVDVVCGYEAGCLGYNLHRKLKAKEIESVILAPTTMAVSRNCSKKKNDYRDAITIAKCLASSAYKAVYIPDDKDEDVRDFIRMRDDHKTALKQIKQQLNAFCLRHGHHYDKTKWTGLHLNWLRKLELSKLQRETVEEYLATYETLTSKIAALDIRIEDIASEERYAEKVNKLKCIKGIKTHTALSFVCEIGDFNRFKSADKFAGFIGLVPGECSSGNTERMLGITKAGNRHLRRLVVEISNTYRRGTVGRKSAALKERQKDMPKDVVAYADKATNRCQRKYQRMMFKGKNSNQAVAAVARELCCFIFGMMTGHHSRTAQAEASVYRSELD

SEQ ID NO: 225976 - protein, 334 aa, unidentified
MEKVTTLGIDLAKSVFSLHGVGEKGQVMLRRTVRRDQLVKVVAGIAPCLIGMEACSGAHEWGRRFQEFGHTVRLMAPKFVVPYRKSGKNDGNDAEAICEAVSRPSMRFVPVKSAEQQALLAMHRVRQGFVVERTATINRLRGLMSEFGVVLPLRSIMVRRQGAAAAENLPELARRAIGDLLDQLRVLDERIHGYDREIEAQAKLCEPAQRLMKIRGIGPTTALAIVATVGNAREFKNGRQFAAWIGLVPGQYSTGGKTRLGHISKRGDAYLRNLLVQGARSVLHTAAAHRDPISRWALELQPRCGYYRTLVAIANKNARIVWALLAKNESLRTA

SEQ ID NO: 225977 - protein, 438 aa, unidentified
MIDAEIERCAGIDVGKTFLAVCVMTGPLKEEPHTEQRHVGTNTAELEGLRDWLKQQGVTHVVMESTGSYWKPVFNVLEGSVKVYLANPQEVKNRKGHKTDDKDCWWLAHLLRHSMIGPSFIPPRAIRELRDLTRRRKRLLGDATAEKNRVQKVLEDANVKLGNVLSDVFGISGQLMLEALLEGKAPPAEIAQLAKRKAKQRIPEIVQSLEGHRMSDHHRQMIRYSLKHLQFLEEQIAEMDAAIVAKIEEAKLVEEWQLLQTVPGIQERSAASILAETGADMEQFPSPQQLSSWAGVCPGNNRSAGKNKSSHTTGGNPWLRSALTECAWAAAATKNSFLNQKFWRITSKRGGKKAPALVAVAHTMLVLIYQVLKTHKPFTDRHAPPLDERQKQRMIRHHIRRLGKLGIAVSRSIVVAPEGNKRSRRCRSRLATNAPASD

SEQ ID NO: 225978 - protein, 394 aa, unidentified
MGIWVGIDIAKEVHWATGIDDRGQVVLDQQVANDPDAIDALIRTLDALADQPVIGLDLLGGIATLLQAMLGQAGFRLVHVPGLAVNRARQATSGGQHKSDPRDARVIADQVRTRPDLRPITADTELNLEIRLLVGRRSDLTGEQTRRIARLHELLSGVHPGLERALDLTTKTGLSLLTRWVTPAQLRQAGRDQIRAQLASTARLPSRRLDTLADQILAAANAQQLALPGEQLAATLIAELAHEALACRDRLARLDRDLAQLLDRHPDAALICSLPGMGATLCAEFIAQAGPLTRFRSADALAAAAGLAPVLRQSGKVRYNRRPTGGSKALKRVFYQSAFCSLRAPDSKAFYARKRREGKPHHQAVIALARRHIDVLWAMLHTRQAYQPGHTRAA

SEQ ID NO: 225979 - protein, 397 aa, unidentified
MIAVGIDVSKSKSTVAILNGDGSIRAKPFDVHHVADELHALVDYIKRTSEPPTILMEPTSHYHYPLLKAFQEAELPVCLINPYQMKKYGDTELRKAKTDKRDSLRIAQYALEKSYSLIPYTPQDQKYEDLRFLSRQYSQRISTLTVAKVQLLSLLDETMPGITTILPLKSRDPDNCVLLRFIKRFKSFDVIRKMGKTRFLDSYQVLIKKTKDRFAGSKGLAIYEFVLNSVTTRGENPLSAMTQDQCVDLVSTSQKAADEINLQMRIIAETMPEYKVLRSMAGVGDRLGPIILGEIGDIRRFHSGKALNAYVGNDAPPYQSGQFESRNRHISKRGNPALRKACFEVMQALKLTKPQDDPVYLFLLKKEQEGKPYNVAKMAAVNKFLRIYYARAMELYK

SEQ ID NO: 225980 - protein, 349 aa, unidentified
MEAYDGPQIVGMDLHRRRSVLVRMAEDGHKLSTARIANSPARLAAEIKRAGLHPKVVLEACYGWYWAADTLTAAGAEVHLAHPLGVKAFSHRRVKNDELDARDLADLLRMGRLAEAWIAPAEIRELREITRYRGKLVQLRTSCKDQVHGVLAKLGIEVTCSDIFGAWGTQWLDELVLPQPYSWKVASLRQLTGWLSAEITVLEQVTADLLAGHDAYRAVQQLPGIGPVLGAVIVAEIGDITRFRHPARLCSWAGLTPRHYESDTKVVRGRITKQGSRPLRWALIEAVQRTPAGTPVRQARDAIIARRGPQARNIAKVAAARKLLTYVFYAMRDGHVRALDTPAAEHEAG

SEQ ID NO: 225981 - protein, 463 aa, unidentified
MGHEPEAEHNPDAFRNNQLSPPTGMSTRECFGFSHPASIACLTEEEFTLQVLYPRCCGLDVHKKSITGCCLWFDAEGQRQQEIRKFGTHTTELRRLAVWLRQHEVKHVVMEATGSYWRPIWNVLEGEGFEQTLANPQHMKAVPGRKTDPHDAHWIADLFQHGLIAASFVPNQQMRHLRDLTRMRTKVTEDRARVINRIEAVLEDANIKLSSVVTDIMGASAQAMVKGLLRGERDTAQLAELAQGRMRAKRPQLQTALEGNLQPHHVFVLQRLLMQSRFLQQQREAIERQIKRRLDPEMRQAIAFWDSIPGVDEDIATILVAEMGIRSDQFADGAHVASWTAICPGNHESAGKRKSGKMREGNRWLRGALTQAAWAATHTKGSYLSALYRRIAARRGSKRAIVAVAHAILISAYYMWKKKQAYHELGDNFLDTLKPEKTADRLLKRLAKLGYAVTVTGFPSPAA

SEQ ID NO: 225982 - protein, 344 aa, unidentified
MVERFVGLDVSQRSTSICILDGQGARVWRGKCATDPAAIEEIIRLRAGGATRIGLETGPLTPWLVHELRSRGLEVVCLDARQARAALALRPNKTDANDAEGLAQILRLGWHRSVHVKSYDAHRVRAALGARMQLVNMVTELSNHVRGVLKVFGLVVEGARGGVFADRVETLVADRPEVAAVVGPMLDAWRGLRRQVAAYDVALRAEARGRREVRLLMSVPGVGAITALAYASAVEDPARFGSSRSVGAHFGLTPRRHQSGEVDRTGAISRWGDGLVRTYLFEAANVLLGRVKRWSALRAWAVRLAQRAGGTKARVALARKLAVAMHAIWRSGEPFRWTAEPRAA

SEQ ID NO: 225983 - protein, 358 aa, unidentified
MVDKVTEAAVVGGVDTHKDLHVAAVVDQNNKVLGTQYFSTTRQGYRQMLAWMTSFRTLKRIGVECTGTYGSGLLRYFQSAGLEVLEVTAPDRMERRKRGKSDTIDAECAAHAAFSGIRTVTPKTRDGMIESLRVLKTCRKTAISARRVALQIIHSNIISAPDELREQLRNMTRMQLIRTLGSWRPDASEYRNVTNVYRISLKSLARRYLELHDEIADLDVMIAAIVDELAPELIKRNAIGYESASQLLITAGDNPQRLRSESGFAALCGVSPVPVSSGKTNRYRLNRGGDRAANSALHIIAIGRLRTDAKTKEYVARRVAEGHTKMEAIRCLKRYISREVYTLLRNQNRRINSIPITA

SEQ ID NO: 225984 - protein, 343 aa, unidentified
MYYIGLDVHKKTISFCVKDAAGRVHLEGKIGSTRRELDAWISTLPEPRMIAMEATIFTGWIYDHLLPHAEKVKVAHPLMLRAIAAAKRKNDRIDAGKIADCLRCDFLPECHMASTEIRNRRRVLRYRGLVLRQAVQMKNRVSGLLMETGVSYNKLRLHRMGYFAELMSTNEEVSESIRPLLRLCREHIDRAIRLDTTLLRSLEQDPLLSDRLRRLRTIPGVGPITALTWALEVGDTSRFRSIKQAISYCGLCSAEKSSADKTMRTPISKQRNKHIQQVLVEAARLAPRYSDELALLHEKERQRGNGNRATLAVARKMVALMLAVERRNTDYVPAAEFRRTVAA

SEQ ID NO: 225985 - protein, 352 aa, unidentified
MAKIKFDALMSVGIDIGKDTFHIVGFDIDGQLVLRQKIKRLALVATFEKLPQCIVGMEACLSAHFVSRTLRGLGFEPRIIPAIYVKPFIKGQKNDYNDAEAIAEAALRPNLPTVPEKSQDQLDLQALHRVRSRLVSRRTATINQIRAFLIEQGITVRKGLRALKNSFEAILEERKDEISQRMRSILIGLYGDWMWMDDRIDTVSKEIERISRTEENCVNVMTIPGIGPMISTAMVAAIGTGDAFNRGRDFAAWVGLVPRQYSTGGRTVLGRISKRGSRYLRMLFVQAAKVIMMRPHRWPDFSFGEWLARASERMHRNKLAVAMANKLARMAWSILRHKTAFDAPRDEIAVGV

SEQ ID NO: 225986 - protein, 342 aa, unidentified
MHSVTTIGLDIAKSVFQVHGVDAAGKVVIRRQLKRRYVLAFFEKLASCLVGIEACASSHHWSRELQALGHTVRLMPPAYVKPYVKRQKNDAADAEAICEAVTRANMRFVATKTPEQQSCLMLHRTRHLFIRQQTAVINAIRAHLAEFGVVAPVGRRGVEELLDVVATSSEERVPEVARACVSALGVQLRMLRAQILEFDRQIMIWHRSNETTKRLDEIPGVGPALATALVASVADPKAFRSGRNFSAWIGLVPKQHSSGGKDRLGSISKQGDRYLRSLFTAGALAVIRYAKIHGTKRPWLTALLARRPTKVAAIALANKIARMAWAMMVKGERYKEPAALAA

SEQ ID NO: 225987 - protein, 367 aa, unidentified
MLSERMCVGLDVHARSVVACMIDDEAGEIRTLRLSPKTPHIVDWIRNLPGPVAVTYEAGPTGFGLARALDAAGVRCVVVAPSKLERPPGDKVKTDRRDAERLARLLRIGELPGVRVPTETEEAGRDLVRAREDARGDLMRARHRLSKLLLRHGLVWDQSAWTGAHDGWLRSLRFDRVGVRLAFEEAYETVLVSHARRDRLDRAIETMAADPLFAPTVRRLCCLRGVATLTGFGLTVEVGDWRRFTGATIGSYLGLVPSESSTGTRRAQGAITKTGNSHARRLLIEAAWHHRKPYRPSRELLRRRAEQPPQVWARAEQGNRRLHRRWERFDARNKRSTVSAVAVARELAGWCWSLATLEDTALPTRSA

SEQ ID NO: 225988 - protein, 369 aa, unidentified
MKTPKVIVGLDVHKNTIVAAVLPAEGERVTETVRFENQPQAMERLATRVARRGTVEFVYEAGPCGYEVQRQLAGLGYRCAVIAPGLTPVRPGDRVKTDRRDAEKLARLYRAGELTEVRVPTPAEEAARDLVRSREDAVADRLRARHRLAKFLLRQGRVYRETKAWGVKHRAWLKSQQFEWAPLQQTFEAYVRALEETEARLQTLDQQVEELAHHDFYRTPVQYLRCLKGIDTLSALTLTVEAQEFRRFERAPAFMSFTGLVCSEHSSGDTVRRGSITKVGNAHLRRVLVEAAWCYRHGPFISRQLRERRQGCPTPVVQIARKAQERVRRKFWRLLHRNKPPQVAVVAAARELAGFVWAMAQQFPVAPAV

SEQ ID NO: 225989 - protein, 377 aa, unidentified
MKKELYLGLDVHKDCIPTAVAEEGRKGEVRETGALSNDLHAVEKWIGRLRKAHGKEVILRACYEAGPCGFGLARRLKQLGVECEVVAPSLTPTRSGDRVKTDRRDARKLARLLRAGELTPVYIPDATDEAIRDLCRARTDAVDDRRRSRHRLKGFLLRHGYRYQGKSSWSAAHERYLRELVLPHPAMKVILEEYLQSIGAAGERIGRCEAAMGVLLEQWRLAPAVRALMAMKGFQTVAAMILVSELGEVHRFSHPRQVMAYLGLVPTENSSSDRRRQGHITKCGNAHARWLLVECAQHYATPPKVSKELSRRQEGQSHEVRAISWRAQNRLHRRYTRLLARRLQRNKAIVAVAREMCGFIWELLRTQDCYQASSPSL

SEQ ID NO: 225990 - protein, 344 aa, unidentified
MDHYAGIDVSLEYSSVCVVDASGKVVREAKVVSEPEALIGWFGSLGLRLARIGLEAGPLSQWLYAAMKQAGLAVELLETRHVSDAFKAMPVKSDRNDARKIAQLMRLGWFRPVHCKSIAAQEIRAMLTARKLLQSKLLDLENSLRGILRGFGLKVGKTTRTNFAGRIEELVKGHPNLQTIGQALLRARAVLLAEFNGFEKRVRAMSRLHDKARLLMSTPAVGPIVSLTFACAIDDPSRFTSSKQAGPHFGLTPKKYQSGETDYTGRISKHGDASVREALYEAAHIMLTKPIKRCSGLKSWAMRIARRAGTNKAKVALARKLAVIMLRMLKDNVPFNPAAKPATA

SEQ ID NO: 225991 - protein, 321 aa, unidentified
MAQTCSKLESHAVVVGIDVSKDHLDAAQYPSGDLIQTSNDTKGLRTLLRWIGRQHAVHVVFEATGPFHRQLESRLAKAGIPFSRINPRHARKFAEATGKLAKTDRVDAMMLARMGALLEPRTSTICNELQSALQELASGRRNLTRDRTALLNRQQNLQLSLLKRLTRYRLRQIEAQIAAIDQAISELISTDESLSRKRTILVSIPGIGEATVAMLIADIPELGTLENGQVAALAGLAPVTRQSGKWQGKSFIRGGRIHVRNALYMPALVAMRHNPDLRSIYLSLTDKGKHAKVALTALMRRLVILANVLLRNDRLWEPRHT

SEQ ID NO: 225992 - protein, 407 aa, unidentified
MQVLYPRCAGLDIHKDIIVACVRCVSAPEHREVQSFCSTTKGLLALSDWLAVHGCSHVAMEATGVYWKPVWHVLEGSFELVLGNAAHIRNVPGRKTDVNDAMWIADLLAHGLIRSSFVPPAAVQELRDLTRTRKQLTREIAQHCLRIQKVLEDANLKLASVLADVLGGSGRAILKAIISGEDDPVLLAALAQGHARRKTSELREALRGRVTSHHRAMLALHLQLIDALEHALTDLDAAVGLALTPIRQHVQLLRTIPGVGDLTARVLVAEIGVDMTRFPDSAHLISWAGLCPRNDESAGKRRSTRVRKSGTWLKTALVTAAWAAVRTKNSYLFAQFNRIKARRSSKKAIIAVAASMLTAAWHILRNGVEYADLGADYFTRHDMQSTVKRLLKRLTDLGYPVQPASSS

SEQ ID NO: 225993 - protein, 344 aa, unidentified
MKITTLGIDLAKNVFQIHGVDEFGKVLVKKQLKRDQLAAYLVNLPPCLIGMEACGGAHHWARKLMGFGHTVRLMAPQFVKPYVKTNKNDAADAEAICEAVARPNMRFVPIKDVAQQSVLSLHRVRQGFVGARTAQANQIRGLLAEFGVIVPQGIAHLYTRVPELIEDASNEMTGPFRLLIQRLLDHLKELDKQVDALEAQIVQWHKHSQASLKLAAVPGIGPITASALVASLGDAKNFENGRQVSAWLGLVPKQHSSGGKDKLLKISKRGDTYLRTLLIHGARSVLYREQSKADSCSWVKGVATRRHHNIAAVALANKNARIAWALLTREKGFDAKHVSLRVAA

SEQ ID NO: 225994 - protein, 388 aa, unidentified
MDKTQQFRWFLGIDVSKETFDACCINRKGERLFSLSTSMNRKGFEELIKPFSSLSIPQESLLVGMESTACYHINLYSFLVSSGYTVIVMNPLLISNFVKLQLRKTKTDKKDAYVITQFLLLNRDSLSQTIVSSDISDLRDLSRQRESLVDQMSSTKSEIKRLLTITFPELEHIAGVFTKSMLRLLCQYPSAASMRQVKRSKIAKILIPGSYGKQTDASVDRIVKAAQVSVGTASPTKEILLKQKASILIQLEEYLQELTEVLMELCQAKIQEDMDILTSMKGIGEKTAMNFLIEMGGDIKQFESHKKLIAMAGLDPALYQSGKMDRKGRISKRGNRHLRRVIWLMTTKVIQFNGRFKQYYMKRIKDGLPYKMAVLATAHQGNVRNVDE

SEQ ID NO: 225995 - protein, 341 aa, unidentified
MKVSTLGIDLAKNVFQLHGVDHEGHTILRKKLTRAKFVQFVIQLEPCLIGMEACSSSHYFARLFTRYGHEVKLIPPQYVKPYVKTNKTDAADAEAICEAVTRPNMRFVQIKTEEQQAVLALHTERGILIRERIACANSLRATLAEFGITIAAGQSHLTRELPAILEDGENGLSPFVRTSIYRQSKHIRELEEQVKQVEEALASWYRTQEACQRMAKIPGVGMLTATYVVAAVGNARQFSTAKQFASWLGLTPKEHSSGGKQQLGGISKRGDGYFRYLLVHGARALTAWVNRNGAVEKNSWLQGLLERKHYNVAVVAMAAKTARIMWSMLSHNTEYQPRQLA

SEQ ID NO: 225996 - protein, 345 aa, unidentified
MNIATIGIDLAKNVFQLHGVNGHGKVVLRRQIHRGQMRGLFINLPPCLIGMEACASAHYWARTLESYGHRVRLIAPHFVKPYVKTHKTDATDAEAICEALSRPNMRFVPIKSIEQQSALSLHRVRQGFVRARTAQACQIRSLLAEFGLVMPPGIANIPKQVPKLLQVAARELPAPFCRLIERLLAHLKELDRQARELEAQIVDWHERSEPSRRLAKIPGIGPITASALVASISDVRSFKSGRQLAAWLGLVPRQHSSGGKPTLLGISKRGDRYLRTLLVHGARSVIVRARKRDDEKGSWLKKLLERRHVNIATVALAHKTVRTVWAMLAHDREYCANYQSPPVAA

SEQ ID NO: 225997 - protein, 247 aa, unidentified
MPEAVFIGIDVSRDTLEIGSSTASSTWQYANNSDGIEAMTAELAKLAPALVVLEATGGYEFEAACALQAAGLSVAVVNPRQARDFARAMGTLAKTDSLDARMLAAFARVLHQHPQRERFIKQLPDAQLQRLQALVLRRRQLVTMLTAERRRLTLAHASARPSIEQTIKFLKSQIDDVEHDCADHVRTHHAELAQALSSVKGIGPATVATLLAELPELGSLCRRRIAALVGVAPLNRDSGQMRGQRTI

SEQ ID NO: 225998 - protein, 415 aa, unidentified
MLKIVYPICCGLDVHRDFVYACIATTVNGVTTYKSHRFSTFTKGLRELLSWLLASNCKDVCMESTGKYWIPVYNILETDCKIVLAHPKYVKAIRGKKTDKKDAKWIADIFKHDLVSGSFIPPADIRQLRDLVRYHAKLTNFTTGEKNRAQNCLTVSNLKLDSVFSDVFGKASSKIISHILASPSEKLSDVSAFRTKGMKATDEEILEAVDGEIYPEQAEKLRIIRDHMSSLDLCKANLQSLILSTAEKYIPEIDLVCTVPGIATFSAISVIGEIGVDMSVFPTSKHLCSWAGLTPQNDQSAGKKKTTRISRAGAYIKPLLVQCALAAVKSKNKHPEVYNRYSALKKRRGHKKATIAIARMLLTAIYNILKKHEPYNAEIYRKSDAPPEHRNVSVEEAIFILQRQGYLISSPVSIE

SEQ ID NO: 225999 - protein, 346 aa, unidentified
MLHAGLDLSRKRLDFHLLDERGETVEIGTAPPDADGLRGLATRVGRHGQPLRAAIESMTGARFVHDQLELHGWEVEIADAVKVKGLAPLACKTDRIDAWVLAELSRLHLVPAIWLPGPYVRAERERARFRLHLVRHRTMLKQRVHATLLTHGRPCPVSDLFGVRGRELLARLCLPEPWAGTVEASLRLIDELEREIAGCEAELKALGAEHRYVPLLTTIPGIAWVLAYTIAAEVGDIARFASPAKLAGYTGLCPRVYQSGESDRRGRLSKMGPRYLRWALIEATTHASRHPAYRERYERTRQRLGKQRGPRVAQVDLARRLAEAIWHMLTCNRPFAPAGATAPMTA

SEQ ID NO: 226000 - protein, 360 aa, unidentified
MIVIGADTHKATHTCAAVAAATGQFAGELTVTARKLGFAELLAWGRGLDAERVRAIEDCRHVSGALERFLVASGEKVVRVPPKLMGQSRRGERSAGKSNPIDALAVARAALREGPETLPAAHLDEGALELKLLLDHREDIVKARSQDQQRLRWHLHDLWPELELPAGCLDRPIWLDRLARKLARAEQSARARVARELVVEIRRRARRAKELEGEIAALVSRRAPELLELKGCGTLIAAKLVAETAGAARLGSDAKFARLAGVAPVPASSGKRVRYRLDRGGNRQLNCALHRIAVCQGRVHPPAREFLERKQAEGKSRREALRCLKRHLARRIWRLLIDSEREISKTTVDTQRGTLAAHLR

SEQ ID NO: 226001 - protein, 328 aa, unidentified
MKYLGVDVSKDKLDCCLLRDAADTKRKTKVVANSPAGLATLAYFVEKEGILPDELHVIMEGTGVYHQLAAETLSDAGMTVSIANPAQVKDFGRGMAVRTKNDTKDSFVLARYGALLKPAPWVPPPPAARQLQAYIAREDAIKKDIEREQNRKEKSVVGRAPADVLASIDETIGFLNTQLKAIRKKIDAHIDRHPDLKDDMKLLTSIPGVGPETGHHMLSVMHTHQFHSAEQLAAYLGLVPVERQSGTSLHARPKLSKAGPKRMRAALYMPAVSALQWNPHIRALKERLAAKGKTPMAIVGAAMRKLVHLCFGVLRTRTKYSPDHAHPA

SEQ ID NO: 226002 - protein, 411 aa, unidentified
MDKVYDKCCGIDVHKKLIVACFRKGSKQELRNFGATTRELLELANWLQNGGCEMVAMESTASYWKPLYNILESSELKAMVVNASHMKAVPGRKADTKDAEWIAELLQHGLLKASYIPDKQQRELRELVRYRKSLVSERTRELNRLQKMLEGANIKLSGTVSDINCMSARNILEYLLTGEFFDEAKYDEMYKQKIIAHNLKASKEQLIDDLNGVMTPLQRRMMKELLSHLDELNVHINNLEDEIDNFMKPEEKKATQAIQDVTGIGKNSSQAIISVIGTDMSRFPTAGHLAAWAGLCPGNNESAQKRKTGKMRKGNALLRSTLVVCAHSATRNKNSYFYAQFMRISSHRGKKRAYVAVAHSMLIAIYHILKDGVVFKDLGADYYNQFNKERKINAYLKKLKALGWEVPVVAA

SEQ ID NO: 226003 - protein, 427 aa, unidentified
MNNVVTIRSGKSGEVKEKRLIVSVDIAGAKHTGYYRCPDGSDITPFDFANSTQGFNLFWKRIEKARKDNGLKKIVVGYEPTGPYAEPLAHFLSKKGVNLVQVNPMHTKRLKELQGNSPLKTDPKDAKVIADIIGLGHALTVVIPQGAAADLRRLSLARERALARCNALNNQLQDLVYITFPEFIQVMRGIRTKTARHLLFFFTTPCAIAELGPDKLADIVKQVSRGKIKRDRGKQLWLAAKNSVGIQEGLESIALEMKELLSLIDCCEQFIAKLTINMEVKLIEVPYSRYLLSLKGVSTITTAGMIGEVGDFKRFKTIREIIKYAGLNLYEISSGKQQRGDKRISKRGRHLMRKLLFFASLSMVKKGGIMHRKYRDYLDRGMPKIKALVAIMRKLLILMFALVRDANVYIENYQEQQKIQYQLKEVA

SEQ ID NO: 226004 - protein, 344 aa, unidentified
MNPFSYYVGLDIHRKSTSYCVLLPDGKLVREGKVASTREDLEAWARTVPGPWCGGLEATICSHWIYWRLKPYAAEMKMGQPAKLKAISEAKRKNDTLDARTLANLLRCDLFPACYVLSPEHEMLRRHLRYRSFLVRMEVMLKNKAAGMLIESGVLYDTRRLHGKKYFHALLDELDTTQLLDRELKQLIEFGRAELERLKAVDRGILGRLLSDPLLSERVARLRSIGGVGEVTALLWALETGDPARFPNEKHAISYCGLCAAQRESAGKQQRGPLSKQRNAALQTGLLEAAHLAIQHNPELKLIYEAQCAKGPKNRAILEVARRLVRRLLAIDRRHAAGLATTAA

SEQ ID NO: 226005 - protein, 415 aa, unidentified
MEVITAVGIDVSKGRSTVATMRPGGEVVTIPYDVEHSADELQKLVRVLTALDGGVRIVMEHTGAYYLPVATVLLEAGLFVSVVHAKLIHDFGNNSIWRGKTDKKDAVKIANYALTNWTSLPQFHQQENTRQEIKKLNRQLSLYTKMEVALKNNLIALLDQSFPGVNKVFPPAAKANGHEKWIDFAERFWHRDCVCGVSRSAFSESYRKWCKKTNSLWSADKVDKVYDHARVQVATFPKNDTTKLIVTQAVSQLNSLLETVFTIQNEMNRLASSLPEYETVLAMPGVGKILAPQLVAEIGDVARFHSKRALTAFAGLDSPPYQSGQFESKERKISKRGSPHLRRALFRVMTMLLLNQPEDDEVYQFMCKKRAEGKHYYVYMTAGSNKFLRRYYGKVRECLLEQTATITVDEPNHAS

SEQ ID NO: 226006 - protein, 372 aa, unidentified
MLHDTTVFVGLDVHKDSITAACVGTDPADPVVDIGTIGTQQYAIDRLLKKLTGRGRPRFVYEAGPCGFWLQRYLRGKGQDCVVAAPSLIPKKPGDRIKTDRHDARNLALALRAGTLTAVHLPTPEQEAFRDVVRAWQQSKRDITAARQRLKSFLLRHDIRYTGRATWNAAHRRWLAELVLDSAVQQIVFQELVDAIAERERRRDRLEQELDTLAPSWTGFPLAQALLAFRGIQKTVAFTLIAEAGDFARFSRPTQFMAWLGLVPSEHSSGDTRRQGPITRTGNRWARTLLVEAAWAYRYSPKVSAIIERRAQDIDPVIRELAWKAQLRLTRKFRRMTARGKHPNLVVTAIARELAGFLWDAARLVESTRDQN

SEQ ID NO: 226007 - protein, 463 aa, unidentified
MWRSDMSRAKKKQSPGTRKKNRKVLEQINHHAAGADMASEEVVVCVGEGVDEEPIRTFGTTTAQLNKAGEWMLSCGIDTVAIEATGVYWVPAYEIWQEQGLKPVLVESNSIHSLNGKKKSDFIDAHWLQLLHTFGLLRPCQRAERSMIELRGYMRRRREVTEASSACIQHMHAALTLMNVRLDQAVTDITGLTGMRIIREILKGERDPLVLAQMRDERCLKNEQEIAEALTGHYRAEQVFVLDQAVQAWDFHQQQLRQCDQQIEKVLQTLPSKADRKNLPKARRSAGKPRKNELRINDGRTLLYERLGVDLTLIDGLQVITILTVISECGIDLSRFPTYKHFCSWLGLCPGTRRSGKRVLSSRSRRTTNRAATALRLAAQSLHRSQTALGAFYRRIKARLGPEKATTATANKLAKLIYLSLTTGRVYIDPGPDYFDSANQLNALKQLRRRASKLGYQLTPIAA

SEQ ID NO: 226008 - protein, 518 aa, unidentified
MFFHAGLCPGTYRLMNVRSMGVQCGRFPLVRNLLPVGETGFGTRQWACLVSVVASRWVGLFPLKCVEHADATILKGDIAMKALPVLDELATGIDVGSERLHVSIGGEAPRVFGTMSCDVEALVAWLRERGVRSVAMEATGVYWMHLYAALQGAGLRVLVVNARHVRNLPGRKTDMADCQWLATLHAHGLLRSGFVPAADIRRLQDYLRLREDHVSMAAAHVQHMQKALERMNVKLHDVISDLTGASGMRVMRAIVAGERDPARLLELCDVQIKKHKAERVVESLRGNWQAEHLFALRQALSAWDFYRAQIEECDQAIKQVLHELNGPPDDEGARPARHKPGGTNTPNIPGLHRMLVALCGGRDPTSVPGMADHSLLRLIGEVGTDLSAWPTEKHFGAWTGLAPATAQSGKRRKNQARQRNRVGQLFCAMARSVGNSTHSAFGGAYRRLKARRGGLVANKALARKLAIMFWRIMVHGLEYVEHGLKQYEARAQLSEQRLLAKLARKHGLQLVATPTAAT

SEQ ID NO: 226009 - protein, 431 aa, unidentified
MDTQQFEVIRPKCAGLDVHKKSVVAAVCTSDPVTLTASYKTKVFNTTNSDISALRDWLLAQDCRDVCMESTGKYWIPVFNILEPHMHVILTHPKYVKAIKGKKTDKRDAKWIANLFRFDIVKASFIPPADIRALRELSRYRLKLSYMRTAEKNRYQNSMTISRIRIDCALTDPFGLSATRIMDYLLSGEPFDEEKCRSLIDRRVKASKDEVMDTIHGYHILEEQKFKMTHAKAHMDFINKSIDEIEAELFLRSRQYDVQVKRIATVTGITELSALFILSEIGADMSIFESDRHLCSWAGLTPANNESANKKKSTRCSKAGQYLKPLLIQCALAAVKSKKEPYFAIKYQRLSKRRGKKKAIIAIARMMLTSIYHMLSDNEDFHPDDYEATINPPKQKPVVLTLDNTLQFLREQGADPETLKLIQQQCAAQAG

SEQ ID NO: 226010 - protein, 356 aa, unidentified
MPRSSRGCKDKTMNPFSYYVGLDIHRKSTSYCVLLPDGKLVREGKVASTREDLEAWARTVPGPWCGGLEATICSHWIYWRLKPYAAEMKMGQPAKLKAISEAKRKNDTLDARTLANLLRCDLFPACYVLSPEHEMLRRHLRYRSFLVRMEVMLKNKAAGMLIESGVLYDTRRLHGKKYFHALLDELDTTQLLDRELKQLIEFGRAELERLKAVDRGILGRLLSDPLLSERVARLRSIGGVGEVTALLWALETGDPARFPNEKHAISYCGLCAAQRESAGKQQRGPLSKQRNAALQTGLLEAAHLAIQHNPELKLIYEAQCAKGPKNRAILEVARRLVRRLLAIDRRHAAGLATTAA

SEQ ID NO: 226011 - protein, 337 aa, unidentified
MDYFAGLDISMDETHVCVLDREGVVVYESKSESTAAAIAIELSKAPSCRRIVFETGRMAPILFHGLSQLGLPVVCVESRQAYQALKSLATHKTDRNDARGLAHLARTGFFKPVHVKSLRAHALRSLISARKKLVGQRVTLENQIRGLAVVFGVRLPRALTAAFIDNALKASEGIAGLSAAMRGLIAARTAVMTAVAAIDADMRRMTRASAACRRLMTIPGVGQLTALAFVAAIDDPSRIRRSRDVGAYLGLVPRRYQSGEVDYVGSISKCGDRRVRTLLYEAANVMLTRYKGQLKLKDWAFAIAQRSTMRKARVALARRLGIIMHAMLRDETEFVLA

SEQ ID NO: 226012 - protein, 482 aa, unidentified
MKKGNIYLSRSQELLGLFQDAGSGAKVMCVPIDYAKKDHVVMFCNGYGDILRKPFSVKNSPEGVKYLTQQVVSSCRHRAINRKHVFFGGEDPNSYVENFVNALRSQGWLIASVSARDAKKQRANLQASTDRLDLMGIAVMLLNRRANCCPAQSGIYRNLRTLVRHRRKLVVMRTEISNRIHTVVDRLFPGFLNERNAGIVPFSKSSLWLMEKRFSVRQIRRRNRAKLIEALRRYGTYEPEKKAAKLQEYAAQVLSTPPEYIGTWQLSLAQHVKHYRCLQGNIEQSEKEIALWLAQTQGAFLTSVRGIGIVLGAGVTAETGDPNEQKPVNNLVSYAGIIPRVKQSGGSEGKIYVGHVAKRCNRILKDYVVSSAVHLGLHGPPELMADYKRRDAAGQHADFGIARRYLRMAMCLMRTSQVYMPLCLRSGKVKREERASYYLTMWPYLREKWKKLGALEAAFAKDRPLGQWRDMVQELYEIKLTL

SEQ ID NO: 226013 - protein, 358 aa, unidentified
MGKFIKEIRTMSAIGLDVADVWSDWAGLDESGKVVRRERVKTTESELRSVFAAIEPTTIAIEVGTQSAWISRVLSSSGHTVVVANARRVALIHRNKRKNNRIDAEFLARLVRADKELLFPIQHREERGQADLAVLRSRDVTVRSRTKLINHVRGTCKTFGVKLPRCSAEVFVVRSSELVPATLHSALSDVLALIAEMTAKIKRYDSTIAAMIKRYPAAQRVGQITGVGPLTSLAYVLTVEDPHRIVRSRSAGAYFGLVPGSDDSGEKHQQRRITKEGDRFCRRLLVNAAQYILGPFGAKVDSDLRRHGEAIASRGGKNAKKRAVIAVARKLAVVMHHLWVHNEDYVPLFNTAQKLVAA

SEQ ID NO: 226014 - protein, 343 aa, unidentified
MNISRIGIDLAKNVFQLHGVDRHGKAVWKRRLKRDQWLKVLLDQAEPGCEIGMEACGGAHHWARELQSRGYTVKLIPPQFVKPYVKSNKNDANDAEAICEAMSRPNMRFVAVKSVVQQDIQATHRIRSELMTQRTAKSNQIRGLVAEYGLVAPLTMHALRTAIPCWLEDADNGLTDYFRSLLHGLQADLVALDGRVLDLDRQIEKLANSNEVTRRLQQLRGVGPMVATALVATVGNAEQYHKGRQMAASLGLTPRQYSSGDRHRLFGITKRGDVYLRTLLIHGARAVVSQAKHKDDRLSRWVTGIAIRRHPNVAAVALANKTARMAWAMLRNETDYDPDFAMS

SEQ ID NO: 226015 - protein, 383 aa, unidentified
MNKHSMIFIGLDTHKEFHEVAYCEEQRGAVPVHYGRIPSSKVSVKKLIRQFESKYPGATLHVVYEAGPCGYWIYRLITSLGHCCYVVAPSLIPKKPGERIKTDRRDALKLVRSLKSEDLTPIYVPEPDEAVRDLSRAREAAMKDLKEAKYQLKALLLRNNIRYEGTANWSKKHLRWLTELILPHPAQQIVLQEQLQTIEERIRRLERLDNELTHHVHQWRYYPVVKAVQAMRGVRLLVAVGVVAELGDLHRFDHPRKLMAYLGLVPSEQSSGGKRHLGAITKAGNGRARRLLIEGAHSYRYPANVSTELQLRQEGLPKDIVDIAWKAQLRLCKRYQRMSKKGKHYNLIITAIAREMAAYIWAIAKEVVLTPVNPKLRLSRVPA

SEQ ID NO: 226016 - protein, 368 aa, unidentified
MKDYTGKTIFVGMDVHKKTYSVTAICDGIVIKRDTLKADPQSLISYLKKRFGSGKIKTAYEAGFCGFNLHRNLEAAGIENVVVHAAGIEVSNTKVKTDKRDSLKIAAHLSEGKLRSVYIPTVEQEDNRTVTRLRNTFSKERARIGNQIKSLLFLHGLIPADNKKKVSLKWIKGLSQFKMTPGVRFSIEAFAKMWLEFNAKIKEIDIEIKKQAVKDKTIDEMYQSVSGIGCTSARILANELGDLQQFKNEGQLFCYIGFTPSEHSSGEHTRQGHITKQGKPIVRKILVQAAWVAIRHDKGLQEIYERIAAKSGAKRAIVAVARRLIGRIRACFRTGELYKAQKVERATLKFNKISQSKKQRTHKNELVA

SEQ ID NO: 226017 - protein, 361 aa, unidentified
MTETMTWVGLDVHARSTHAAAIDAGTGELKRARFGGGPQEAVSWLSELGQPVRAFYEAGPTGFALYRAGRAAGLEIEVIAPGKTARPRADRVKTDRKDAELLARLGLAGQLSPIAVPSEFVESARHLMRAREQLRGDLLRARHRVSKLLLQHGRVYGEPTTWNRRHRQWLGRQRFEHEATELALIDLLAAVDGMVARKEALDERLARLATDERLWQTVARLRAFRGLDTLTALALHLELGGDWERFSSPRKLFSWLGLTPSLEQSGESKAQGSITKTGSRYARRLLVESAWHYSRNPAIGATLKNRQLGQPEHVLQISWRAQHRLHRLWHRLKRRGKPGNVATVAVARELSGFLWAAATAP

SEQ ID NO: 226018 - protein, 338 aa, unidentified
MKVVTIGLDLAKHIFQIHGADAEGRPLLRRRLRRSQVTRFFANVPPCVVGMEACCGAHYWSRVIGRFGHTVRLIAPQFVKPYVKSNKNDANDAEAICEAVSRPQMRFVPAKSVEQQDIQSMHRVRSRLVSSRTQLANQIRGLLSEYGIILPQHVSQLRRGLPLILEDGTNELTVFSRRLFASLYDELLSLEEKIEAIDEQIGAVYQASEPCQRIAAVEGIGPLIATALVAALSDGKTFKNGRQFAAWLGLVPRQHSSGGKARLLGISKRGDPYLRTILIHGARSVVYRAGQKTDRRSLWIADKQRRLGTSKACVAVANKNARIVWSLIARGEVYRRAA

SEQ ID NO: 226019 - protein, 570 aa, unidentified
MVVVGTDAHKYSHTFVATDEVGRQLGEKTVKATTAGHATAIMWDREQFGLELIWGIEDCRNMSARLERDLLAAGQQVVRVPTKLMAQTRKSARSRGKSDPIDALAVARAVMRETDLPLATHDETSRELKLLTDRRDVLVAQRTSAINRLRWLVHELDPERAPAARSLDAAKHQQALRTWLDTQPGLVAELARAELTDIIRLTGEINTLAQRISARVHQVAPALLEIPGCAELTAAKIVGEAAGVTRFKSEAAFACHAAVAPIPVWSGNTAGQMRLSRSGNRQLNAALHRIALTQIRMTDSRGQAYYQRLQDAGKTKRAALRCLKRRLARTVFQALRTVHQPSSEHTQPAAACHRSYCSSHLGEPPRLTDMTQKTRIQPLPPKRAGLLIRALYRIAKRRFGEVPEPFTVTAHHRRLLIANVVHEALLQRASRKLPPSVRELAVFWTARSIGCSWCVDFGAMLQRLDGLDVDRLTDIDNYATSSKFSDDERAAIAYAEAMTADPHSVTDEQVADLRARFGEAGVIELTYQIGVENMRARMNSALGITEQGFNSGDACRVPWAAPDVPSAESR

SEQ ID NO: 226020 - protein, 344 aa, unidentified
MDRLFCGIDFHKNFCTICIISFDGKFKETSNKEPETVLKYLANKKIELITIEASTGVHDFVSKLKSSGHKVKIINPSRFRSVGVGGKKTDKKDAELLAEFAKLDLTPGVHHKSLKARELKSLLVMREFTIQQRVSLSNHIRGILREFGIPINTGKDNFCSDALEAINRIENGFLRNTLIDLFSKFKELLVMEKEIDEKLKNMGDIEEKNRYKTIPGVGDVVSLTFMATVDDVSRFKNSKHFASYVGLVPREDSSGGKQRMGSITRSGPEMLRRNLIHGARSILKHPLKNTEKDPTILWAQHLKSRIGMNKATVALAHRMARILFVIALNKTSYGEYPVKINKAA

SEQ ID NO: 226021 - protein, 350 aa, unidentified
MLIIGCDFHSRFQQIAMLDGQTGEVIERRLEHATGEARAFYAALPGRARVGMEATGYAQWFEGLLAGQGHELWVGDAAEIHAARVRKQKTDSRDACHLLDLLLQDRFPRIWVPSPQERDVRQLLRHRHKLVCSRTSVMNQLHALAMGQGVCRKQKLWTAAGRRELESLALGPWASRRRRELIEMLGRFDASIQELDQAVIQEADRHPAAMRLMEHSGIGPVTALAWVLTIGPIERFEKSRQLVSYLGLNPRESSSGGKQRLGSISKQGNSMLRSLLVEAAQTASRFDPELRRHYVRLKFRRGRAVAKVAIARKLVVRLYWRLREQVSAAPPARTQGSPGNFLMELSPSTK

SEQ ID NO: 226022 - protein, 414 aa, unidentified
MAVMIGIDPHKGSHTAVAVGAAEQPLGKLRIRACPAQAEQLVAWAAAWPERIWAVEGAPGLGRLLGQQLVAAGERVLDVQPKLAARVRLLHTGNTGKSDPNDALSVAVAALRSPANREVIADGHAVVLKVWAKRHRDLSRAYNQVACRLHAVLCELVPGGVPEQITAGRAEKILAQIRPADAAGTARCELAAALLADLRHLNGQRREVKKKLAAAVKATGTTVTTVFGVGPVIAATVIGDVVTVARFPARGHFAAYNGTAPTEVSSGPAEDLPAVAARQPAAQPCDPHGRDHPDLTRPQRRPRLLRAEDRRREDPQRSPALPETADQRRHLRTLARRRARRGPGRATGEPLCLRAAGSHPGHRLFGQATPRPERQPTSHTQRSRRQCHRQRSSEQDPQNHLTTAEAKRIRSAWR

SEQ ID NO: 226023 - protein, 342 aa, unidentified
MTAFVSFVGVDIASASFMACIGTTPWKITVKPARFENDEDGFVSFLGWLKEHNLKAENTVVCMEATGVYSEGLAYFLYASDYTVAVEPPLNIQRKFPLNASKTDELDCQHIAEYASRYQDKLSFWQPRAEILEQVKVLLTTRQHFSVQLTGHKNALHAISRKKVSSELAKCSHQNMIEQIVKAIKEIDKEIRRLIDSDPTFKQTLLLLLTVPGIGLQLAAHLLILMQETLDPRVLASFIGISPIKHESGSSIHSTPTSRHFGPPTLRKLLYLAACSVRTHKKPFQKYFFRKVAEGKHRKLVLNNIQNKILKIACAVVRSHLPYIPNYAPVNPLVLQKTLTAS

SEQ ID NO: 226024 - protein, 343 aa, unidentified
MEHYAGIDVSLESSSVCVVDAAGRIVRESKIASEPEALIRWFGGLGTEMTRIGLEAGPLSQWLYAGMREAGLAVELLETRHVRNAFKAMPVKTDRKDARGIAQLMRLGWFRSVHCKSLPAQETRALLTARKLVQSKRHDVEMSLRGVLRGFGLKVGATTPRTFEGRVRELVSGHPTLLAVAEALLVVRATLGDQLQRLEKRVRSVARDDIRTRLLMSAPGVGAIVALTYVAAIDDPARFKSSKATGAHFGLTPKKYQSGETDVTGRISKIGDAGVRTALYEAANVILTRPVTGSSLKSWAMRLAGRAGMRKAKVALARKLAVVLHRMLADGTKFIADKAAAVA

SEQ ID NO: 226025 - protein, 406 aa, unidentified
MLFVGDDWAEDHHDVEVQDETGRRLAKARLPEGIAGIARLHALVGRFLPEDVDAAEVKIGIETDRGPWVAALVASGYQVYAVNPLQSARARQGSDVSGAKSDAGDAHVLADLVRTHSHQLRMVAGDSKEAGAVKVLTRMHQSLIWDRTRQVQRLRSSLREFFPAALQAYEDLDSPDVLELLTKAPEPSSAVRLTRAQISAVLKRAHRRDRDTKTTAIMAALRTEHLTQPPVIAAAYGATVRALAALVATCNEQITALEGPVEACFGQHPDAEIYLSQPGLGPILGARVLAEFGDDPTRYDGARARKNYAGTSPITRASGKKKVVLARYVRNKRLADALHHQAFCALSGSPGARAYYDALRDRDIGYNAALRQLGNRLVGILHGCLKTRTCYDEATAWDQHTQRVAA

SEQ ID NO: 226026 - protein, 317 aa, unidentified
MTSFLGVDVGKSDVHATLLIDDRTWSKSFPNAKAGLTQLAAWLRNRKVERVHACLESTGGFEEALALDLHERGHVVSVVNPARIKAFAQSELLRTKTDAVDAALIARFCRAHLPEAWVPPAPEIPALQALVRRHAGIQDMLFTESNRLGAARVDSAVERSLREHIAYLEAEMQRVVDEITALINRYPPLRAQRDLITTIPGIADLTAARILGEMPNISEYRSARAVAAFAGLSPREHQSGNLRGRTRLAKTGNARLRRMLYLSATRHNPVLNALFVRLVAAGKPKRVALAAVMRKLLILAYGVLKTNRPFDPAYSNA

SEQ ID NO: 226027 - protein, 351 aa, unidentified
MGKIITDFSSVTTVGLDLAKHVFQVHCVDASGRVVVANSVRRNKLLEFFDSLPPCLVGLEACGSAHHWARELVKLGHDARLMPPAYVKAYVRRQKNDAADAAAICEAVTRPSMRFVPLRSLENQAALMHHRVREMLVAQRTQVLNAVRGHLAEIGVIAAQGPKNARDLAKLITADEATLPWLVRAALAPLVRQLDRLDEEIGLADDAIKAMAKVDESARRLMSIPGIGPVTASAIAASVQDVSSFSGSREFSAYLGLTPRQNSSGGKERLGRVSKMGNRYLRKLLVVGAHAVLYNRKGHDDALRTWVSKLMETKPFKLVAVALANKLARIAFAVMRDQTPYSAKPFSPAQA

SEQ ID NO: 226028 - protein, 350 aa, unidentified
MEQISRIGMDTSKHLFQLHGVDAAEKPVLRRTLRRRDMITFFERLAPTRVAIEACGASHHWARLLRGFGHEVQLIAPQLVKPYVKRGKNDAADAEALCEAMSRPTMRFVPVKTAEQQAALMLVKLRDRLIRNRTQLVNAIRGYAAEFGIAGAKGIAHVTTLLARLQADVTLPALARELFAMQAGEYAQVQAKIAVVEAKLLAWHRADPCSQRLAGVPGIGPIGATMLTMKTPAPQAFRSGRQFAAWIGLTPKDHSTAGKARPGVITRAGDEGLRSVLVVGATALIRRVREGRCRDGDRFAAWVAKLLERKPPKLVAVALANKLARVAWKLMITGEAYAVKPASTGAASAL

SEQ ID NO: 226029 - protein, 421 aa, unidentified
MRGLRAKRVKMVKEGTLIATVDIGVANNTGYCTTLDGRSTKSFRFDNTKEGFEKFWYMTVASKNRFGCNEVLVGYESTGPYAEPLVHYLAKKQVKIVQVNPMHTKKMKEVNDNSPLKTDDKDPRVIADIIRLGRALSIVVPEGDAASLRRLNNARERHVGEQTALLNQLQQLVFLIFPEFKTVLKNMKCKTAQHILKRYTTPERIGTLSKEGLGEEMRKRSMGKFGIKEAESLIGLARETVGIKEGLAGIFMDIRHILMQLEAEVRFISEIEAQMGATLKRIPCSLRLLSIKGLGTVSVAGLIGEVGDFSKFSTQSEIMKLAGLDLYEISSGKRKGQRRISKRGRSLLRKILFYAAIQMIRKNGIMYDYYVRLTGRGMERMRALIAVSRKLLRIIHAIVRDNRDYVGQYQTPERRVIKMAA

SEQ ID NO: 226030 - protein, 352 aa, unidentified
MQYVGIDWAYRRAAWCALREGGEIGGEGLVPADEDGLAKLALRLGGDVRACVEMMSGAVWVRDRLQAAGWEVEVADARKVKGLAPLACKTDKVDARVLAELCRRDLVPAVWLPSLDDRALRERLKRRMQLVRMRTMARNRIHGLLTQWGLKLSTTRLRQRDAMELLEGRGMPEVWRCSVAEALAVIDLLDERLAPLERELRPLAKADSRVARLETIPGIGSLLGLALAAEIGDIARFQSARKLVAYAGWAPKVRQSGQSSRTGPLSKAGSKTLRWAAVEAAQQAWRESNPWHRLYLETARRQGKTNAGKAAVARKVLIAVWHVLSRNEPFKPCRRHGGADPVPASSHFHLAA

SEQ ID NO: 226031 - protein, 343 aa, unidentified
MQSISTIGLDIAKSVFQVHGADAAGQVVIRRQLRRRHVLAFFQKLPPCLVGIEACASSHHWSRELQALGHTVRLMPPAYVKPYVKRQKNDATDAEAICEAVTRPNMRFVPTKTVEQQSCLMLHRARHLFIRQQTAVINSIRAYLAEFGIVAPVGRRGVEQLLEVVADKADYRLPEVARACLAALGSQLRALKAQILEFDRRIIAWHRSSATSKRLDAIPGVGPALATALVASIADPKAFRSGRDFSAWVGLVPKQNSSGGKDKLGSISKQGDRYLRSLFTAGALAVIRYAKIHGTDHRPWLTRLLARRPTKVAAIALANKLARMAWAMMARNERYIEPAALAA

SEQ ID NO: 226032 - protein, 281 aa, unidentified
MTDVSKERPKTTAGLDLGDKYSYLCLIDQQSGEVIEEGRLRTTPEAFRRRFASEQPMRIAIEAGTHSPWASRVLEECGHEVLVANARKVRLIYTNKRKTDEIDAENLARVARLDPKLLYPLKHRGEDGQAHMALIRSREALVSTRTQLVNHVRGAVKSFGARLPKCPARSFHKRASEHIPEALLPALGPILETIGSLTQRIRDYERKLETVCQEHYPETELLRQVEGIGALTALTFVLTLEDPYRFEKSRCVGAYLGLVPATDQSGIEILRNASPRRVMRC

SEQ ID NO: 226033 - protein, 372 aa, unidentified
MKTKTTKSLTPAVVPTPTAPVPAGGFTLGLDLGDRSHYVCVLDATGQVLHEGPLPNDRVALAVLLTKYPAATVALEAGTHSPWISRYLTGLGATVIVANPRKLHAISRHERKCDRRDAAMLARLARADVALLHPIKHGSAQAQHDLLGLKLRDALVRTRVNLINTVRFTLKSLGHAVNNPSSEAFHKNILTAVPADCLPVVQPVLAVLAVLTDQIKTLERDLVARSKRDYPVTQRLQQIAGVGPLTALCFVLKIGEPARFGRSRDVGPYLGLCPGRDQSGGTDKQLRISKCGDGLLRRLLVSAAHYILGPFGPDCALRAYGQHLAGTSAREKKRAVVAVARKLAVLLLSLWKHGTDYEPRVPAAPTLVLTPA

SEQ ID NO: 226034 - protein, 367 aa, unidentified
MSHIIYCGVDFHARQQTICCLKTETGEFTSHELKHDPKEALRKFYSELGGPVIVGLEASGYTPWFEQLLEELGHQVWLGDATEIRRRARRRQKNDRRDAELILELMCHDEFPRIHRPLPQSREILRMLRYRHKLVKLRTIVKNSLQALSIQAGLSLQARLFTRQGTQQLQAMMLSPVMGQQRQQWLELLQELNQRITETERWLKQQALSDPRISLLRTHPGLGLLSSLGIVHTLIPVSRFPNTRKVAAYGGFDPMERSSADKKRYLGISKAGSRLLRFLLIEATQTAVKTDPELKRFYHRLVQRRGKPKAKVAVARKLLIRSFIMLRDEINYAEFQQRAIAARLAREFARPNVPVPLIGQPASPAKG

SEQ ID NO: 226035 - protein, 350 aa, unidentified
MIIIGVDYHPSDQYIALVDTETGEYEERQLNHSEGEAQKFYRELAARGASVRVGIEATGYSRWFERLLAELGMELWIGDAAKIKTKRVRKQKTDREDARLLLRLLRENNFPRIWVPSPENRDLRQLLWHRHRLVQMRTRIMNQLQALAMNEGQRRKKKLWSEAGRAQLEKLPLAAWAARRRKDLLELLDRMNPSIEELTAAIEREARKWPEALRLMTHPGVGPLTALAFVLIIGTVERFQCGKQIGSYVGLIPCEDSSAGHQRLGHITKQGSSLLRFLLGEAAQAAARCDADWRRRYLHLAMRRQRNIAKVAMARRLGVRLYWMWRKGWEYAEWVKFGSHAGQLGIGNGV

SEQ ID NO: 226036 - protein, 351 aa, unidentified
MIIIGVDYHPSFQQIAFMDQETGECGERELNHSDGEAERFYRELKERGVSVRAGMEATGHARWFERLLAELGFELWIGDPAEIKTKRVRKQKTDREDARLMLKLLLENRFPRIWVPSPENRDLRQLLWHRHRLVQMRTRIMNQLQAVAMNEGYRWKKKLFGQQGRALLEKLSLAPWASRRRKELLELLDQLDPKIAELTAAVEREANKRPEVVRLMTHPGVGPITGVAYVLVIGTPDRFPCGKKIGSYTGLIPCEDSSAGRQRLGHISKQGNTLLRFLLVEAAQAAARCNADWRRRYMHLMMRREKRIAKVAMARKLAVRLYWMWRNNWQYSQLVEFGSNAGKLGIVHGMK

SEQ ID NO: 226037 - protein, 418 aa, unidentified
MEVLHERCAALDISKRDVKACVRAPNPRRKDARMQQVRTFASMTNALLALRDWLLGEQVSVVAMEATGDYWKPVYYLLEDAGFELMLVNARDAKGLPGRKSDVSDSIWLCQLTECGLLRASMVPPAPIRRLRDLTRYRTVTIRERSREAQRLEKVLEDACVKLSMVASDILGVSGRAMLTALVEGERDPETLAGLAKASLRNKHDALVESLTGRFDDHHAFLCQIILRRIDDLSAVIAEVSGRIDTELAPFHDAVEHLVTIPGVDRKAAAVIIAETGADMSRFPSAGHLASWAGVCPGSHESGGIRKSGTTRQGNKPLGGALGTAALSAARTKNSYLSARYRRIIAHRGKQRAIVAVEHSILTAVWHMLTNNIDYQDLGPDHFTRRNPDRVLRRITQQANSLGYTVRFDPITPVAATS

SEQ ID NO: 226038 - protein, 360 aa, unidentified
MFTERTSVGLDVHARSVAAAAIDGVTGELFQARLTPSHEHIQAWLADLPGPVAVAYEAGPTGFGLARALDAAGIRCVVAAPSKLQRPSGDRVKTDARDAVHLARLLRLDEVTTVTIPTPATEAARDLVRAREDCRGDLMRARHRLSKLLLRQGIVYSGGKAWTGGHEVWLRRQRFDAPATAMAFESDFEAVLAVRARRDRLDAAITALAADSEFTPVVHRLGCLRGVSTLTAFALAVEIGDWHRFTGNTIGSFVGLVPSEHSSGSSRIQGPVTKTGNGHARRLLVEAAWHHRARYAPGTTMRERWELAPAAARARGDQGNRRLHHRWVVFNERRKRHTVANVAIARELAGWCWSLAVMDD

SEQ ID NO: 226039 - protein, 347 aa, unidentified
MLIIGCDFHPGFQQVAIFDNRMGEIEEKRLQHRAEGEQFYRSLAGQEVRVGMEACGHYPWFERLLAELGIELWFGDAARVRASVVRKQKTDRRDAEHLLDLLRQDRFPRIWVPSLEVRDVRQLLVHRHKQVQARTRTKNQLQAMALSCGVQKKYKLWTKAGRAELEQLPLLPYAAQRRKRLLEALDGLEAEIVELDRRVQDEASQRREAVRLMTHPGVGPVTALAMVLTLGPAERFESGKQVGSYFGLIPSEDSSGGKQRLGRISKQGSSFLRFLLVEAGQTAARYDPQLKRFYRRLAVRKNRGVAKVAVARKLATRLYLMLREEWTYAQLCQAVMQVSPSHSVAGE

SEQ ID NO: 226040 - protein, 404 aa, unidentified
MWYAGIDWADTHHDALVIDEQGHQVGSLRVDHTPQGMSKLNAFLEQIIGTAPKEQMACIIETTHGLLIAHLLEAGWPVYPVNPRTVDRRRSASGAKTDTIDAYLLAKTGRADFADLHRLTPDSEKVAELKLLTRDQDALIQTQTRLVNQLTACLKAYYPVALELFTKVQQHTTLVFLQTYPTPQAAESASTDQITQVLKKAGHPNPLGVTPKIVDRLQQPHLQADAVITRTKSRLMLVLVGQLLPLIEQIAQYDKEIATLFLTHEDHEIFASLPRAGQRLAPRLLAEIGDDRKRYQDASSLQALGGTSPVLYQSGIYSKAHRRLGCIKPLRNALHQFAWQTTQSEPWARAYYHRKRAEGKSHTVAIRALANVWVRIIFAMWIKRTCYEAMTFEQAQQQHARRAA

SEQ ID NO: 226041 - protein, 343 aa, unidentified
MKLSYVGVDLAKSIYQLHGVDHHGKAVWKRRLRRGQWLQALVDKVEPGCEIGMEACTGAHHWARELQSRGYTVRLIAPQFVKPYVKSNKNDANDAEAICEAMSRPHMRFVTVKSVDQQDIQATHRVRSELKAHRNAKANQIRGLVAEYGLVAPQTLLALRRAIPEWLEDAENGLTHYFRSLLHGLWDDLLALEDRLKELDKEIEKIARSNDVAKRLQQLRGVGPIVATALVATVGDGAQYKKGRQMAAALGLTPRQYSSGDKHRLYGISKRGDVYLRTQMIHGARAVVSQAKHRDDPLSRWVTDIAKRRHPNVAAVALANKTARMAWAMLRNESDYDPTVSAC

SEQ ID NO: 226042 - protein, 354 aa, unidentified
MKRTTKYVALDVHQAMTVASVREENGRVIARTVVPTEAPALVEFFRGMRGAVHVVFEEGTQAQWLHELVAPLVDRVVVCDQRGRSRHGNKGDQVDADQLSELLRRGGLRAVYHGSPPQAALKELTATYRNLVEDGTRVMLRLKALFRARAIPTRGTQVYQPGARARWLAQLAERGARFRAEALYAELDVLRALRPPAKAAMVAEARRDPAWPVLRAIPFLGPVRVALLLATMQTPWRFRTKRHLWAYTGLAVVTRSSDDYRLVAGQPVRRRRAPLTRGLNRNHNRLLKDVFKGAATAATARPGPLQDFYQGMLARGMREELARVTLTRKLAAITLRLWKKGERYDPTQLTIPAR

SEQ ID NO: 226043 - protein, 391 aa, unidentified
MICVGIDVAKDKHDCFILSSEGEVLADVFTIPNNAEGFGILLQTIRRCTRPADKIKVGLEATGHYSYNILGFLLDCGLPTFVINPLHTNLYRKSLSLRKTKTDRIDARTIATMLMSDVDLKSYTDTSYHNEELKSLTRYRFDKVRERAKLKCSVARLVCILFPELEKLVPTIHMASVYALLSEFPGAHQISEAHLTHLKSVLSDASKGRYGREKAVEIRDAARNSIGSRMHAKSLELKHTIRLIRELDAEIEEIESEINSIMGEIQSPITTIPGISTRMGAMILAEVCDFSNFDSADKILAYAGMSPSTYQSGQLTSSHSHMEKRGSRYLRYAIFNATRFVCNWDPAFAAYLAKKRAEGKHYNVAISHAAKKLVRLIYAMEKSQQPYRQAA

SEQ ID NO: 226044 - protein, 367 aa, unidentified
MKKLTTTMMQETLNKYDGRLTVGLDLGDRSSFYCVLDGTGDVLLEQKVSTTPKALNEIFGAMPRSRIAVETGTHSPWVSRLLSELGHETIVAHARSVRLIGESRRKDDRLDAMTLARLVRIDPRLLCPVKHRSAEAQADLTVIRARAALVRTRTMLVNAARGLTKSYGERLRGCNARGMKPKAAQDLSPELKYALEPMMQEIESASERICQYDQMLESMARNRYPEAERLKQIKGVGTLIALTYMLTLEDPYRFRKSRDAACYVGLQPGRRNSGQSEPQMHISKEGDPYLRALLVQAAHHVLGPWGVDSDLRRWGMRLAEHGGKRGKKRAVIAVARKLAVLLHRLWVSGDRYVPLRPGGQATLPAVA

SEQ ID NO: 226045 - protein, 375 aa, unidentified
MEGAPMLDTTTFIGLDVHARSIKAVSLDVMTGEVRAATFGYDAGAVAEWVRSVDPRARCVYESGVTGFDLQKRLSGLGVDCVVGAVSKMIKPSADRRRKNDRNDAEFLARMLSVGNVVEVWVPDDECEAARDLTRALEDARDDLSRSKQRLSKFLLRHGLVFDERTPTGRRKGNWTRAHWSWIESIRFAERADNDVLAYYVDAVRRAAEEKARLEGLVEAEARKPRWRKRVDSLRCLKGVDTASAADLVFEAGEFSRFRNARSFAAWVGLTPSEHSSGESDRRGAITKAGNKHLRKTLVEAAWHYLTCSGRPKDLAKGQAPDRGARRHAAKGVRRLVERREALLARGVHGNKANVATARELACWVWAVGLMAEEA

SEQ ID NO: 226046 - protein, 397 aa, unidentified
MIAVGIDVSKSKSTVAILNGDGSIRAKPFEVHHVTDELQALVDYIKKTSEPPTILMEPTSHYHYPLLKAFQEADLPVCLINPYQMKKYGDTSLRKAKTDKRDALRIAQYALEKSYSLVPYTPQDQKYEDLRFLSRQYIQRISTLTVAKVQLLSLLDETMPGITTILPLKSRDPDNCVLLRFIKRFKSFDVIRKMGKTRFLDSYQVLVKKTTDRFAGSKGLAIYELVLNSITTRGENPLSAMTQDQCVDLVSTSQKAADEINLQMRIIAETIPEYKVLRSMAGVGDRLAPIILGEIGDIRRFHSGKALNAYAGNDAPPYQSGQFESRNRHISKRGNPALRKACFEVMQALKLTKPQDDPVYLFLLKKEQEGKPYNVAKMAAVNKFLRIYYARAMELYK

SEQ ID NO: 226047 - protein, 396 aa, unidentified
MLYMGDDLHSKQMTVEVRNEAGDVVVRRQVSMRPAKVEEFLEQLHQIGDGKYVVLMEVCGFHDWLVRRLKADPYCQGVFLIQPEQALKQKTDRRDASRLSEILWVNRERLPAGQSVQGVRCVYQPTEEERQDRQITSQRQRLGRRRTQTINQMRHILRRNNLEWERPTKGFQTQKVKRWLKTLALEETERLEMDQLLEQWELWDRQIAQCEERMAQRFSRSVAAQLLATIVGVSCYMALAIASRIGDVRRFPRGRSLANFFGLTPGSRSSGERQRQGSITKQGSQLVRFLLGQLVVHVLRKDAKLRGWYKGIKKRRGSKIARVAVMRRLTGILWRMLSKQEAYRYEGATEPRRPDPASPSEACVLPDRAALLAASPASAASQRSAGQVPVPHLCSE

SEQ ID NO: 226048 - protein, 351 aa, unidentified
MKSSNNQIKGENLFVGIDLHKHRWHITIRTADVEIFSNSIVGRWDNLRRILDRYKGCRIHAVYEAGCFGFWLFDRLNNYGVCCIVTPPSLVPQEHGNRVKTDRRDSRKLARLLAKELLKFVCVPSEEERFHRQVIRRRHQLVGDRVRTQNRIKSELYFYGIDLPAVRGKWSQVYFTNLQRIKFKNNWMQQSFNQLLEQYEFLCAQIAKQTQLLKRLARLPLYRDRVRILCSIPGIGILTAMEILLELQDISRFRRAEQLAAYVGLTPSQYSSADKIRMGRITGMGKNTVRSALVESCWHLIRKDKAMRRKYEQIKARAGGKRAIVAVSRKLILCIRRLLLDNRPYVYKPVC

SEQ ID NO: 226049 - protein, 423 aa, unidentified
MTESSDYESVQVFIGVDVGKDTHHAVAINRSGKRLFDKALPNDENKLRSLISDLKQHGQILLVVDQPATIGALPVAVARSEGVLVGYLPGLAMRRIADLHAGEAKTDARDAAIIAEAARTLPHALRTLKLADEQIAELSMLCGFDDDLAAQTTQASNRIRGLLTQIHPALERVLGPRLEHPAVLDLLQRYPSPEKLASLGEKKLAAQLCKLAPRLGKRLAADIAQALAEQTVVVPGTNAAAVVLPRLALQLITLRKQRDEVALEVEQRVIAHPLYPVLTSMPGVGVRTAARLLTEVACRAFASAAHLAAYAGLAPVTRRSGSSIRGEHPSRRGNKALKRALFLSAFAALRDPLSRAYYTRKMSQGKRHNQALIALARRRCDVLFAMMRDGTFYTRRGHNMLDNLIGAPPSGNWRTVAQTIFRH

SEQ ID NO: 226050 - protein, 384 aa, unidentified
MHQATTLPERTCSRGDCATLLVSLELSRSTWVATALAPGSGKMSKYTLVGGDGHKLLDLLARLKSRAEQRIAAPVKVVAIHEVGLDGFWIHRLLEANGVESHVVDPASIAVPRRHRRAKTDAIDGETLLRTLMAWQRGEPRVCAMTVPPSPSEEDRRRISRERATLLQERVRHTNRIRGLLFGQGITNYNPLHKNRRENLEALRTGDGRSVPAHLKSQILREIDRLELVLRQIGEVETERDQMLQLAQPSSPAALLMRLKGIGAEFATVLYLEGLFRQFENRRQLAAYAGLAPSPWKSGSIDQEQGISKAGNPRLRTTMVELAWMWVRYQPASALSCWFRQRVGSERGRTRRISIVALARKLLIALSRYVTHGEIPAGAVMKAV

SEQ ID NO: 226051 - protein, 412 aa, unidentified
MDTMYRCCAGLDVHKETVAACVRRVDSAGRVTREIRTFGTMTGELLKLSDWLMAEGVEAAAMESTGVFWKPIWNILEGSLKVILVNARHIKNVPGRKTDVKDCDWIAQLLQHGLLRPSFVPDRPQRELRDLTRQRSQLASEQSRVSNRIHKTLEDANIKLSSVATDILGVSGQEMIRALIAGQEDPEQLAELARRRLRNKLPELREALRGHLSEHHRFMLRQLMDHRTYLDRQIAAFEQRIEELMRPFQEAMRRMMTMPGVGLRVAQNVLAEIGVDMSRFPTDQHLSSWAAMCPGNRESAGKRKSGHTNHGNRWLRTALVQAAWAASHSKNTYLSAQYRRLAGRRGKKRAIVAVGHTMLVMMYHMLKDGVDYHELGHDYLDKLQPRRLTRYLVKRLESLGHEVILKSADQAA

SEQ ID NO: 226052 - protein, 421 aa, unidentified
MKIVHPVCCGIDVHKSFLVATIVSVTKVRTLSYKKERFSTFNKDLLRLKHWLIENSCYDVCMESTGKYWVPVLNVLEPELRVVIANPKWVRAVKGNKDDVKDSKWIGELFCFGLVRSSFIPEKEIRILREFTRYRYKLVNMRSSEKNRFQNGFTVCNIALDSVVSDMFGKSAGQITNYLLTDKNPTAQHCSTLLHRSLKKKAVAVVASIEGFQLTEEQKFRMLQIRHHLEYLDAAIQSVDEKLDQMTAPYAAAIRLLCTIPGMKRESALTILSEIGTDMAQFVSSKRLCSWAGLTPGNNQSAGKKKSVRITRAGVYIKPMLVQVAHAAVTSTSRPYYKVKYENIARRRGKKRAIIAVARMILTAIYHMLKTGEVFCPTDLRQIDMPEELKQTYRLRKIHNAIHLLKQQGVLSESFVASTYT

SEQ ID NO: 226053 - protein, 433 aa, unidentified
MTLINFVAANQKYYAFNLLSVFIMVFWSVQYLLQHLLVQTQLSDQLLQPLILILQLPQTPQFRHARSGKFFLPVNGMDYLLPLRLTVRNVLTRRITMNIVFLGIDLAKNVFQLCGLSQAGKPVYTKRTGRKELLQTLANIPACLIGIEASTGAFYWQREFEKLGHKVKVISPQYVKPFVRGQKNDGNDAQAIAVALMQPTMQFVPPKSPEQQDIQALHRARQRIVNHRTATVCQIRGLLLDRGIPIGSAVSRARRAIPLILEDAENGLSSRMRRTIAELYDLFNDLGRRIHFFDKEIETVFRQSEACQRIAKVKGIGPKTATAVVAIGKGTEFKNGRHFAAWLGLVPRQHSSGDRRVLMNMTKKGDKHLRTLFIHGARAVVRVATNNNDGHMNQWVNQLKERRGFNKTTVAVANKNARIIWSMLRNDTGYQVV

SEQ ID NO: 226054 - protein, 346 aa, unidentified
MRFYNRPHTYYCGIDLHVKTMYVCILDSAGQVLVHRNVPSTPAAFLEVVVPYREGLVVAAECMFTWYWLADVCAAEGITFVLGHALAMKAIHGGKAKNDRIDSHKIAVLLRGGMLPQAYVYPAAMRSTRDLIRRRLHLVRKRGQLLAHIQNTRAQYNLPVFGRKLAYRANRDGVVEHFPDPSVQKSIAVDLALIDQYDALVIDLDLTIVREAKRHNADAFHRLRSVPGIGKVLALTILYEIHDITRFDRVQEFASYARLVKCQKQSGGKTLGTGGAKMGNVHLKWAFSEAAVLFLRHTEGKKLIAKIEKQHGKGKALSILAHKIGRAVFYMLSRGTVFSMEKFLAA

SEQ ID NO: 226055 - protein, 341 aa, unidentified
MQITTMGLDLAKNVFQVHGIDAAENVVVRKQLRRRQMLEFFKALPPCLIGMEACATSHYWARELTKLGHEVRLMPAKDVKAYIKRNKNDAADAEAICEAVRRPTMRFVQIKSAEQQGQLMQHRARDLLMRQRTQVINAMRAHLAELGIPARQGREGLKELVAIVADDDDTRVPVNARASLMVLAAQLQALQTLIGSIEKRIIKQHRVNEASQRLESIPGIGVIGATAIAATVADPKVFRSGRDFAAWIGLVPREASTGGKHKLGPISKQGDRYLRRILVVGACAVLKLARQKPEKYPWLTQLLARRPFKVVAVALANKMARMAWALLANGGTYRAPRIAAA

SEQ ID NO: 226056 - protein, 434 aa, unidentified
MDILSKIYPNSAGIDIGSEKVYVSVEGQSVRNFRTFTASYKELSAYLKECSITHVAMEATGVYWITLYDILEADGFDVTLVNPSDSKNLPGRKTDVQDCQWIQQLFSYGLLRKSFVPEDIVRKLRVYTRMREDKLQMASTHVQHMQKAMILMNIRLPEVLSQTHGASGLAMIEAILAGERNPEKLLGYCTTSLIKNKGKDILLALEGNYKEEYIFELQQAYDGYMFYLNQVSKCDTETGKILEEYNSSSNKNYRDNHPIKPIRHNKPKINHLHDLLLGIHGANPTTLPGLTDYSLMRLTAELGNNINQWPSVKNFVSWLGLAPGKHQSGKMNKRSKKKPATRAGQIFKQAAQSLILSKQPGLGAFARRLKARKGSGIAIKATARKLAELYYRIFDKGMMYVETGIAKYEEKIKQQQIMFLHKKANELKMQLTEI

SEQ ID NO: 226057 - protein, 316 aa, unidentified
MTDAAVFVGIDISKTRLDVAVRPTGSAFTVSYDETGITTVVQRLRPLSPVGIVLEATGGLEVLLSGALATAGLPVAVVNPRQVRDFARATGRLAKTDALDAQILAQFAEAVRPACRPLPDASTQQLAALITRRRQLVEMLTAEKNRRGSAPRVMRTNIQQHIEWLQQHLAQLDQELTTAVQASPIWREHDELLQSVPGIGPVVTRTLLAELPELGTLTHKQIAALVGVAPLNRDSGTFRGKRRVWGGRATVRAVLYMGALVAARHNRVLKAFYQRLRQAGKAPKVALTACMRKLLTMLNAMLKHRTSWREIAIAVA

SEQ ID NO: 226058 - protein, 350 aa, unidentified
MTEAYDGRQVVGMDLHRRRSVLVRMTGNGRKLETVRIDNSPAALRAVVARAGSSPRVVVEATYGWYWAADVLEAGGAKVHLAHPLGVKAFSYRRVKNDERDCADLADLLRLGRLPEAWIAPPQVRQLRELTRYRIKLVRLRSSAKDQVHAVLAKLGIPVPCLDLFGTFGSAWLDGLRLPQPYVGKVASLRQLTSWLTSEISALDAVIADFLGSYQPYHAVRQLPGIGPVLAAVAVAEIGDISRFPSPGHLCSWAGLTPRHRESGTKVARGHITKQGSPLLRWAMTEAIQHQPAATPPRELKDRITARRGSQAKNIAKAAAARKLLTCVFYAMRDGHVRSLAAPARALEAG

SEQ ID NO: 226059 - protein, 342 aa, unidentified
MKITRVGLDLAKDVFQVHGVDAEECVMVRRQLKRRQVLAFFARLDRVEGCVVGMESCCGSDYWARELIKLGYDARIMNPAFVKPYVKANKNDARDAEAICEAVGRPTMRFVAVKSLEQHDLMLLHRQREQYVKRRTALANQIRGTLGQYGIVVSKGLGLLRRALPRLLEDAGNSLSATAREAYAESYQELCELDEKVARLDGKLEHLAHQDPRCVRLMSIPGIGPLTATAWVALLGDGAQFEKGRQCAAFLGLVPRQHSSGGKERLLGISKRGDRYLRTLLVHGARAALRTAGTKEDRRSRWVREVAATHHANVAAVALANRNVRTAWALLRSGETYQMVAA

SEQ ID NO: 226060 - protein, 360 aa, unidentified
MFERAPSIANPLGDSPVNYYAGIDVSLESSSVCIVDATGEIVKEVKLESHPDALVKFFKAFGHPLTVIGLEAGPLSQWLYAGLTKAGFVTSLMETRHVKAALSATTVKTDRRDARGISQLLRMGWFRPVHAKSAESQEVRALLVARKQLQHKLRDIELSLRGILRGFGLKVGKVTDKTFEARIRELVTGHPMLEQIAEAMLAARATLLEQFNKLHKAVLKIVRQDKVCRCFMTTPSVGAIVAITYKSALDDPGRIKKSKNAGPLFGLTPKRYQSGETDITGGISRVGDEMVRTALYEAANVLLSRVTRFSALKRWGLEVAKRRGMKRAKVAVARKLAVILHRMWIDGSTFRWSKTEAAFA

SEQ ID NO: 226061 - protein, 394 aa, unidentified
MIYAGVDIAKTDHVIGAVDERGAEMCRPMPFKNTEAGLERAVAWLEGLAGSPSDVVVGMEATGHYWMACYSFLVARGYSVAVINPMQVKAVRKLKKLDKVKNDRIDAWLIAETLRIGQYDETRLATDEVASLRSLSRYLQSLRGMAAELKTQCVCLMDAHFPEYAGIFSDMFGAGSRAVLSKSPLPFELARRRADSLARDIAEASRRGGKSAGYAAKIKAAARSSIGVRLGQEAASFQVKSLIRQIEFADSECAKVEARVRALLDEVEPLVLTIPGVSYATGAQIVSEIGDVSRFRNASALVSYAGLNSSVSQSGQFDSGGGPITKHGSPYLRRALWLAANRARQYDPGLRAFYDKKRAEGKPHRVAVTAVARKLCHIVFAVMRDQVPYDPGRE

SEQ ID NO: 226062 - protein, 438 aa, unidentified
MSNKVIFNLDELFISVGIDVGADFSWMSIALPNQQFVGKPYKILHNSIDSLTTAVSKIKEAEELYSLESRIFLESTGIYHYPLFCYLRDKGFNCSVINPIITKNSTNINIRKVHNDRFDSKKAALVGLKPDLKVSLMPSDLALNCRNLCREYYDLMDNRSAYVNKLQGELRMAFPQYLGIFSKVTINTSLTLLETYTSPSAFLKADKQEIIDIIKSTARFGLTYAQNKYNAIIQAATDANQFGYIIDSNIKRIRLYISFIRKYDEEINSILESLHELVDANEDSDFVKQIHLIETFKGAGFLSAVSIMGEIGDFSAFSKPKQLFAYFGLDPAVKQSGKFEGTKVQMSKRGSAIARRVIHTLTLQSISISRNREAKNPVLREYYLKKCDSKPKLVAMGAVSHKVCNMIFAILIDNKPFKIIAPQEHIKQYNSAKCDIAA

SEQ ID NO: 226063 - protein, 404 aa, unidentified
MKGPIVSIDVSKGKSDYQAFKNLNVKYAGSRSIKHTKEGFDEIVNLVREMEKKLETEVCVVYEATGVYHRVLKKVLEDNNIKQFIINPLLSAKTRKNDSLRCPKTDKLDPKSIAKTYYSHSLHNSHKQETIYHELRELSRYYEDILVHIRKDKVAFRAQLDIVFPGYDTLYDDLYGPVALAVIEKYPHPEMLQKKKINTVSKVIQSKTCHRQAVSDTMADKAIEYSKTIYSGCDKDDIEVLILQRLIKKLNEDMAEAERTISEMIKLAQELPDFSIIKSIPGIGDNLAARIIAELGDMTRFKKKNELVAFAGLDPRISESGQNDGDHMHITKKGNKRLRCLLYLAVTCSIRLKRDDNSIKDFYIKKKQQSNPMCSKAAKTACASKLVRIIYSMCKTGELYQYNK

SEQ ID NO: 226064 - protein, 367 aa, unidentified
MVRDWCSSPWLAASGRSIAGSRPLYLSHSTHVVVLDADGRVILETMEPTEAAAIIRLVQSLSGPLRVTFEESTQAAWLYEVIRAYVTEVIVCDPRRNKLLEDGSKADKVDALKLAELLRAGLLRSVYHGHEATRQLKELVRAYETLSNDTLRTMARIKAIYRGRGIRTPGRGVYQPKQREQWLQTLTEPGIRQRAAWLYEQLDQLQPLRRKAKQTMLIESRAHRAVSLLRTIPQLGPVRAAFIVATVDTPHRFRTKRQFWSYVGLAVVTHMSSEYEMKAGRVVRCRKPISTRGLNQNCNRRLKAVFIAAATSASNRNAYGSFLNKRQENGMRPEMARLTLARKIAATALAVWKKGEAFDPKKLNVTT

SEQ ID NO: 226065 - protein, 312 aa, unidentified
MTPIICGVDVSSKKLDARIGREGRFARFDNNPEGVAALAGFCREQGVALVVMEATGGYEKKPFALLWSHGVKAALVNPRSVRRFAEAMGRLEKTDRIDAGMIAWFAEAKGIEPTPPASEIQGRLAALVVRLGQLTDLKTAQNNQRRLVEDPTVRKGFDGLMLLITRQMCVLERQIVELIDSDPLWSRLNQAFRSIKGVADRTVARIMAQLPEIGMISGKAITKLVGLAPIARDSGKTTGKRAVRGGRSGVRATLYIIALGVCRFDADFAAFRDRLVAAGKPPKVVRAALAHKVLVRLNAKAREVRMSLAQAV

SEQ ID NO: 226066 - protein, 361 aa, unidentified
MGNEDGAKPQVGLTIGVDVGDRFSQICVLGADGEVVEEARIRTTPATFGQWFGSATSSRVVLEAGTHSPWISRLISESGHETIVANPRRLRLIYQNDRKSDRVDAESLARLGRLDPRLQCPIKHRGAEAQADLALLRSRDALIRARTLLINHARGSSKAVGARLPKCSARSFHQKAAGHIPEVLADSLSPELETIGRLTAQIRALDRRIEEMARAKYPEIAALRQVFGVGPVTATTYVLTLEDPGRFPRSRAVGCYVGLRPRQADSGDQKPQLRITKAGDEALRSLLVCAAQYILGPHGPDSDLRRWGLALAERGGKAAKKRAVVAVARKLAVLLHRLWETGEIYEPLRNARMRGEMGPAI

SEQ ID NO: 226067 - protein, 417 aa, unidentified
MEVVHVHCAGMDVSKKDAKVCVRHAGAGRRKTVETVTTWSAMTNQILAMRDHLAAEQVTCVVMEATGDYWKPFYYLLEDLPGVEVMLVNARHVKTLPGRKTDVADATWLAQLGAHGLVRGSFVPPEPIRQLRDLTRARTAITRERGREVQRLEKLLEDAGIKLSAVASDIMGVSGRAMLEALIAGDRDPIKLADLAKRRLRSKIPELTEALAGRFNEHHAFLARVHLDLIDRHTTAIQQLTSRIEVVMEPFQGFHDLICTIPGISTLTADIIVAETGADMSRFPTAKHLASWAGTTPGNNESAGKVKSSKTRPGNPYLQGALGAAAMACAQNSRTYLGARYRRITSRRGPQKANVAIQHSMLIAIWHMGTTGTLYHDPGADYFTRLQPDRAKRRAISQLETMGYHVALTASQPSRLG

SEQ ID NO: 226068 - protein, 369 aa, unidentified
MFAAYKPAKMEVKALIYVGIDIHKKRCQSALMDETGKILEQIPFTNTGDGVEYLIQRIKPYGEAKAVLESTGNHWLKSYEALEKADIHVSLSNPLKTRAIAEARIKTDKIDAKLLAHLLRANLVAQSYVPDKATRDRRALLRHRSSLVKTRTEIKNRIHNLLDKYDLQPEYTDLFGKQGIEWLRSLQLPSIEKTILQSNLELLEALNSQIDKINLEIASIAVDKDDVKLLMTLPGIDYYAAMVIANEIGDVTRFLEANKLVSWAGLAPSTRQSGNHVKHGTITKQGNKTLRWILIQATHNACRNDERLRSFYQRIARRRGGNKATVAVAREMLVIIYHMLSRKEPYRGVDNELYQSKLKRLERIGNSSL

SEQ ID NO: 226069 - protein, 337 aa, unidentified
MSMGMVHVGLDYHEDSIRVCVLRRDGRELVNRDVPNDARSVRSLVRRFGRPQGIAIEACCGAADFAAELHQQTGWPVRLAHPGYVKRLKQGPDKSDHDDAWLLADLVRVDYLPEVWLADAATRQLRRLVRYRQGLIADRKNIKLRMRALLREERLWCSTARAWTEDWKEWLKTAALGEHSRWVMDQELRRLERLEEDIRAVEQRMESATAEDQLTQRLLEQPGIGPITAVTLRAEIGRFDRFHSGKQLARFCGVTPCNASTGRRQADAGLVKAGNRELRALVIQAAQRLPRHVEKWSTLKQRLTRTKPANVATAAIANRWLRWLYHQVLTIRELAAA

SEQ ID NO: 226070 - protein, 350 aa, unidentified
MSKYNKRCYEGKNIYVGVDVHKKSYSVSCICDGVVVKKDTIIANPARLVEYLQKYFKGAKAHTAYEAGFSGFYLHRYLIEHGIKNIVVHPASIEISARDRVKTDKRDALKIAQQLADGRLKGVHVPDERREHSRSVTRLRNKFMEQRKRLGNQLKSLLAYYGLMTTDTRTISKKWIKEVLELEVPEEVKYCLKTYAGEWQHIDDKLKEMLKKLSEQAAEDKAIDDMYRVVPGIGALSARILANELGDMRQFGSAKKLYGFTGLTPSEHSSGEHRWLGHISHQGRSILRKILVQVAWFLIKKDQKMRLFFDEISKRAGKKRAIVAVARKLIGCIRASFLTGEVYVINKGMI

SEQ ID NO: 226071 - protein, 430 aa, unidentified
MSPGESPVRRFGVFTGELDKLVEWLQSCGVKTVAMESTGVYWIPPYQKLEAGGLEVVLANARHLRQVPGRKTDVKDCQWLQRLHSYGMLQGSFRPAEEYCRLRSLMRHRENLVAGCVQQVQYMQKALDLMNVRLHQVVSDLNGETGLRILDAILAGERDPKKLTSLRDERIKRSTPPEMEAALQGDWREEQLFILQQARETYRFVETQLARCDAQIEKVLQQIVVVAPRGPSLEPPPNPTAAPTPRKKKERGPHKTGHGLKRDLRAELQRICGVDLTQVIGLNVLSVLIIISEIGVNMSRWRSAKAFCSWLGLNPGNKISGGRVLSSRTPHVVNRVSLLLRTLATAVGRSETWLGIFHRRMKARLGPAGANTATARKMACLIYHLLKYQEQYIDVDTLIYAEKIQRIRLNKLRKTAHELGFELLPIKEAA

SEQ ID NO: 226072 - protein, 391 aa, unidentified
MINIGIDVGKFKHCATVLDDSTGEVLIKPFFLTNDRKGFDILYSKTKQFIHRKHSVGMEDTGHYMINLTNYLLDKKFTVKYINPRATFLRRKELGISAKNDRKDALLIAEMLSEKRFWRSISVRSIENSKFRDITRLYHQLQEQQNQDMNRLQRALDIVFPEVNSLSWTRYSKAYMKFLSTYPSASSIALEDIRNLRKALKTEGRGRQCKVTAEEIRELAKCSVGEDNISIDLEVTSIIAIINTREEQIRMLEKKIEEFSHKLNSPIISIPGISHISGMTILAEIGDINQFQNTGNLISFAGMDPLVYQSGKYDAAHMPISKHGSRYMRKALYQAVFTVCKYSPTFHDYYTKKRNQGKSHRCAQGHCARKLLRVIYKLLSTNSLYDQNHIQ

SEQ ID NO: 226073 - protein, 417 aa, unidentified
MNTEKEIVCGADIHRDFLVATMISRSGLKLQEQFGMDQDGLLAFRSWILDHRCLRVAVESTGNYWYPIFCILESHVEFILANAFQIRNIEGKKTDRLDSERIAIYCLNDLIKPSRIYPKDYRELRSITRSREALVNARSKLKNQIHQLLAVCCIKLSSVISDSFGKSGRYIIELLLEGKTIEQIISGIPSKRVKKKADELRKAIRNGLDPVQILLIKTNLDAIDYLSEKIKLLEAEIAIKVKPFEEDLNIILSVPGIGLISAATILAEMGDYKDFQNADKLAMYFGIVPAVYQSAGKLRTGKITKRGSKHMRRILVQVAKAISKTKKSSKLKRFFMRVYTRSGKKNVAAIALARKVLCIIYHLLMKREDYQEPEVKKNKPKIPSCVSSLSTMDIDEMIKTISQAGYLVKKGLKEGCG

SEQ ID NO: 226074 - protein, 533 aa, unidentified
MARRSVAKVSWQEHVAGRAGRLLNGALLPVKKFGLRISVHNIGDVAVRKSCYDPVRKIARKRILRLWTCDSRFSRVEDSMSQRKKRSKGFKAIELPRQLQHVNLNAAGIDVGSDRHLLAVPEGRDVVSVREFGAFTTDLEALADWLTKCGVTTVAMESTGVYWIPLFELLERRGFEVKLVDARRVKNVPGRKSDVLDCQWLQQLHTYGLLAGAFRPSDEVCVLRGYMRQREMLVQTSSMHIQHMQKALQQMNLLLHNVVTDITGVTGMKILKAIIAGERNPKVLASHRDQRCQNSAATIAKSLVGNYREEHLFALKQAVELYETYQAKIVDCEAAIASYLGTQPKRTDDEPPANEKGTRAKDCVRGEVDMRAQLFQLTGVDLFSISGFGADTLLTLAGEVGFEMTAWKTEKHFSSWLSLSPGTNKSGGKVLNSKTKRSANRAAAAFRIAASSLARSKSALGAFYRRIKARAGAAKAVTATARKLAVIYYSMLKNGTTYVEVGQAAYEKKYRQRRLKGMQKQALAMGYQLVPIS

SEQ ID NO: 226075 - protein, 412 aa, unidentified
MSVVQFTQVLSRGCGMDIHKKVVVATVQGEGICKETRSFDTFTRSLTQLRERLVSLGITHVAMESTGVYWKPIYNVFEGFIPHIWIVNARHIKNVPGHKTDKNDSEWICQLLMAGLLKPSFIPPKAQRELRDLTRYRRKLIQSVSANKNRIIRILEDGNIKLSSVLSDTSGATAVKLIDMLCDGKQITLSDIESVRHGRCQHTKEEMLEACTGCLDEHKVYMLGKIHECNASLKEYILDFDKRIKDVLSSYHDAIERMCEIPGIQNRVCEDLVAEIGLDMSNFPTSAHLCSWAGMCPENNESAGKKKSGRTNHGDKQVKETLVEAAWAASRAKGTFFMERFNRLAPRKGSKKALIAVGHSLLKCIHYVLSTGGRYKELGDNYVPNKKEQKRKEYLKKELQKLGYSVKLSKED

SEQ ID NO: 226076 - protein, 352 aa, unidentified
MRTITTIGIDLAKKVFHVHGVDADGKVVVARKLRRKDVLAFFTKLAPCQVGMEACGSAHYWAREIAKLGHSVRLMPPKYVKAYVKRGKTDAGDAAAICEAVTRPSMSFVPVKGLEQQGLSMLHSARSQLIGQRTQLINAVRGHLSELGIIAARGLLGLAELAAIVRNESDQRLPAIARTALMILVVQIETISKELTKLDSMLRKENKASELGARLETIPSVGPVIGSAFRARVTDAALFKNGRHLSAWIGIVPENDSTGGKVKQKGLSKKGDRYLRSLLVNGAMAVVRQAQKRPDKYPWVTRLLGRVSNKQAAIAIANKTARIAWVVMVRGGIYEAGHRAAHYRAQACAVTG

SEQ ID NO: 226077 - protein, 338 aa, unidentified
MKITTVGIDIAKSVFHVFAVNKMGALVKKKQLKRNELLTFIAQLEPCRIVMEACGGAHHWAREFQKLGHEVKLIAPQYVKPYVKGNKNDYNDAEAIAEAAQRPNMRFVPIKTQEQQDIQALHRLRERTVKERTALANQIRGLLAEYGIVIRLGITAVRKALPEILEDGENGLTPRGRACFAQLRDELVEIDATCARYEQQIVQVNQEYEVCRRLDKVIGIGPITATATYAAAGTAKEFRNGRHFSAWLGLVPRQHSSGGKDTLLGISKRGNAYLRTLFIHGARAVLRTAATKQDRFSRWANALHARRGHNRACVAVANKLARIAWVILAKGEAYRPAV

SEQ ID NO: 226078 - protein, 391 aa, unidentified
MVCVGIDVAKDKHDCCILDSEGTILVDCFTIPNNMDGFKSLLQTIQDRSQKSDKIKVGLEATGHYSYNILGFLLDNDLPVYVMNPLHTNLYRKSLSLRKTKTDRVDAKTIATMLLSDVDLKSYTDTAYHNEELKSLTRYRFDKVQERAKLKQSVSRLVTILFPELEQLVSSIHGTSIYALFSEYPGAKQISEAHLTRLANILVKTSRGHYRKDKATHIRDAARTSIGSVMPAKSLELKHTIKLIQELTSEINEIEDAIRKIMDELKPPILSIPGMGFHSAAMILAEVGDFSNFNSPDKVLAYAGCSPSTYQSGKLTNCYAHMEKRGSRYLRYALYTATKYVCYWNPVFTEYLTKKQAEGKHYNVALSHATKKLVRLIYALQKSGKAYLAVT

SEQ ID NO: 226079 - protein, 307 aa, unidentified
MAQQMSVLGIDIAKQGFHVVGMDDSGHVVLRKRLARSTLLTFMANVPPLRIGMEACGSAHDWARRFREHGHDVWLIAPPFVKAYVKSPKHDARDAEAICEAVTRPTMRLVPIKRVEQQDLQALHRIRERLIKARTALVNEICGLLNEYGIVLPQRIAKFRALIVDKLEAEQAKLTMLSTEVFWHLYDEFLAVEKRLAYYDEKLAAIGQAHPECQRLQTIPGIGPVSATALIAAIGDVTQFKNGRQLAAWLGLVPREHSTGGKPRLLGISTRGNLYLRKLFVHGARATLRWVDTKCDDRSRWLRALIA

SEQ ID NO: 226080 - protein, 353 aa, unidentified
MRKIAYLAMDVHANHSVLGEMDFNGNFKGNQDFSTSEQNIIEALSAIKAKEKYLTLEESNLAYWAAQVSSPYVTEVIPCDPKENALIYKSSIKKDKIDTRKLCRLLRLGELKRVYHPENDDRAIFKASALHYIDLRDQQIALKQKIKAMYRHWGIIDVAGQAVYSLEKRHDYLSQVKQLHIRNQLNRLYSLMDETESMQNKALKTMVALGRKYPEIKKFKKIPGIGDISAHVFDAFIQTPDRFTKRSKLWRYCRMGVTDRSSDGKPLGYRRLDRSGISEIKALIYQAWMSAMKGDNEVRQFYLNSLQRTHSRVHARLNTQRKIIAVMYGIWKKGEAYNPKLFLGSDEIVALYD

SEQ ID NO: 226081 - protein, 391 aa, unidentified
MTDYVGIDVAKRQHKVSMMKENGDLMSKPFSVSNNREGFETLQERLAELEEPVDIGLEATGHYWLALFDYLTRAGYSVHVLNPLQVNAYQRSGIRKRKTDKIDATWIADFVRIGGAHPGPGPDAMPAYLQLRQLARFRMSLSDQVGDAKRRILGVLDRIFPEYESLFSSVFIISSRRLLAEAVTPQEYAEFDLDELAQLLKQSSRGRLGLSKAQEIQTAARRSIGVTFLADAARVQIGCLLAQMEFLQQQVAEVDAALEQLVQELPDQYLTTIPGIGPVNAAVILGEIGDVQRFASIEKLAAFAGIDPSVYESGQFKASQAHMSKRGSPHLRHALWLAAGIARQHDPDLRAYYQKRLAEGKPYGVVMGAICRRLLNRIYAVLREQRPYVVH

SEQ ID NO: 226082 - protein, 372 aa, unidentified
MEKYCGLDVHKGSVFMCILNENNEKYEEVFGTLTPELERLRDALVDHGVGQVAMESTSIYWYPVWRVLETDFDVKLVNPLFIKQLPGRKSDVKDAEWIATVLMKGLVRGSFVPPGIIQQLRMYNRKIINLSKDLRRSEQGMDLVLQRCNMRLSNYLSDIGSKSMRKVAQSIAQGDFRPAHLLGLVHKRIITKHSAATIHAALCGHFTPGDLDMLKLTMQEIDFLENQISFCKARLLENCRDYFGLQMELMVTIPGVQEHTAASIISEIGTNMNFFPSASALVGWAGLRPRNDQSAGKIKGRKTLHGNKYLRLMLVQSAWGASRTKGSPFMARYQRLRKRMHHNKALIANARKLLVVAWNILAKKEPYFAKAT

SEQ ID NO: 226083 - protein, 340 aa, unidentified
MEHIAAVDLHSDNGYYGIIDPKGKRIYQKKLPNALPVVLRELEPFRETLRCIVVESTYNWYWLADGLMENGYRVRLANPAKFEKYNDLKYTDDKTDTFFLTDMERLGILPTGYIYPKEEREVRDLLRRRMLLVQQRTSHILSFQALLSRQTGSSLGSNAIKALDLEDIEEVLPQQGSYVKLSGQTNLAIIGFLTGRIKLLEKLVLKNARLRPEYEKLKTIAGIGIILALTIMYETGDIGRFAGVGNYVSYCRCVKSNHMSNGKKKGEGNRKNGNKYLSWAYVEAANFSRRHCEEAKKYYQRKLAKTINVVATKALGAKLCRGAYYVMRDQVDFDVKKMFG

SEQ ID NO: 226084 - protein, 523 aa, unidentified
MAAKFKSKRARKSRSHSVHKPLGVIHPRVRAVGPEHFAFVCVDCAKSRSKMMVADFFGWVLIEPTIIEHDRFQFEAVLKQVRDTLKRHGIKDQTAVIERTGRYHGPVQRAFVKAGIEVRILHPYTTKQYRQPADPGNKTDDTDLSAIHRAAVNGFGLLEHEPDPIYVHLQLLARHRRRLVHKNVMLRQQMLEHLHSYMPGYSSCFKDIFDSELLLWVPKHMGSAAEILQAGVEGLDQRLRKANVRSHRPTLKKIVAWARSAPSADEPVSLHRRFFTEFDTVRLATLQLIGAVESDLVEPLSQTPYVLLLSIPGINVVSAAEFAGEMGPIEYYAMPRAITGRAGLCPSRYQSDEVDHPNGPLVRLANHDLRRAILIIADNLIRCNEHFGVLVAGWRLKNADARDIRVRVGSRFCRIAFHMVSGRMTFRHPCTQQRDYVLKKLIQFALGHAIAPDQLLRNLDAAAVQLPPSDEREEAESLAKELAQVRNKRGSGPKAIGEILPAVLVKLGVHLISSSESGEAELT

SEQ ID NO: 226085 - protein, 286 aa, unidentified
MTHFAGLDVSLEETAICVVDATGRIIKEMRAASEPCALIAALTALGLPLERIGLEACSLTAWLHDALRAAGLPAICIETRSANAAMKTMPNKTDRNDARALAQIMRTGWFRQVHIKLRQSRLWRSLLVARRTVLNEMRAIENVVRAILREGGIKLGTPARAAFAGRVRELAGDDPLILPLVTPLLAILATMLEQLDRLTRQVRVIVRDEEVCRRLMSMPGVGPITAPAFRATIDRPERFRHSRDVGAHLGLTPSRYQSGETDIQGKVAAAAMNSPAPRSTRPHTPC

SEQ ID NO: 226086 - protein, 386 aa, unidentified
MRDTTFIAQEYDVFAGLDVSKKSIAATFTSHHGFIRSLQMPYSVEYLLNHVRKHFADQKIAFVYEAGPTGYGLYDGLAAHGYSCMIAAPSMIPRAPGNRVKTNRLDSRGLSESLRGGQLKSIHVPSAVYRELRHLTQLRDTMVRQAAAHKQRIKALLLLEGIDFPLAAAGSQWTLRVKAQLRKLSCSGSVRFKLDQLLDSLEFTEKQVLSSTKEIRRFCREDAELSQSIAYLMSVPGIGWIVASQLLARIGDWREIDNVRQLGSFLGLVPTENSTGDRVDRGSITRLGDGRLRSKLIEAAWSAIRQDTELREFYRSVCRRNPRGRGARIAIVAVARKLSTRIYAVLKNQRPYIIREQVHSAPLTQEETSPQGTTRRCAEPGETDNS

SEQ ID NO: 226087 - protein, 354 aa, unidentified
MKILALDLGKYSTVFCDYHSDSGEHTLGEVKTTPQAIHDLIVGKEPERVVMEVCAIAGWVVDIARVLGVETETANTTHDAWRWKNVRKKNDREDALKLAKLSAMNQLPKVHIPSREVREKRCLIQYRQRLVGQKVGVQNAIRAILSREGITTVPKGKSVWSKEGLRWLRTQAKPLGKIVEMTQLWRGQLHVELRMLAAITRSLAYVEKKLDRLGACDRRIRRLQTIPGVGPRLAEAVVAFLDEPKRFKNSKHVGSYAGLTPKQYQSGQTERQGRISGEGNKLLRSLLVEVCWASLRYNSWARATYQRLLRGGRSRKKIAITALARKLVVTCWAMLRDEQDWKGPTRGSIQGTAA

SEQ ID NO: 226088 - protein, 375 aa, unidentified
MVLLDNRHYEEEVSMSTITIGVDLAKSVFSVCEMDAGSHVLRRQDLRREPFGLWLAQLPAGTVVAMEACSGAHHWARRCLEYGVEPRIIAAQFVKPFRKGSKTKNDRADAEAIATAAHQGNMRFVPVKSVDQQVRLSWHRVREGYKTESLAIGNRIRGLLAEFGVIVAQSDVALRRLLADLDAQAGLPTEFKELLCDLAAHWSQLREHFDACDARIEAHARQDERCVRLRAVTGIGAITADAAVATVGNAHEFKQGRQMAAWLGLVPTQHSSGGHARLGEISCRGDGYLRTLLIQGARSSLQRAKAVATDKATPEQLWIRSLDGRMPFGKVIVAIANKHARQIWVMLAHDLHYDPCACLNHPMHQQTHAAQAAQQ

SEQ ID NO: 226089 - protein, 390 aa, unidentified
MKNRSDLNQSYAAFDQASTIACVVELSSKSWLAAGTVPGVKRQPLKKMPAANTGEGLLALLGRWRAEANKAGHEIKRIVVAVEAGRDGFWLARWLRDRGVEVYVIHAASIPVPREHKRRKTDRLDTQMLMRALLGWLRGEVGHCRMVQIPTLEAEDARRPAREHDSLVRERTSLINRLKSALVYLGITDFNIKLVKAGQKLAGLRTPNGEPIPPNMLAELYRDLERLAMVRKHVKAIEDARVKRLKEKPNHGANPLVLMLAKVFGLGLETADLLVHEVLTRNLRDHRAVGRYAGLTGSPDESGKTRREQGLAKAGNWRVRHSSLELAWRWLKWQKGSALAQWYRERTAGGGAIIRKKMIVALARKILIALWRYVTTGELPAGVVLKPVAL

SEQ ID NO: 226090 - protein, 352 aa, unidentified
MKIIGCDFHPSFQQIALLDGETKQRVRKKLDHASGEAEQFYRSLQGEAVKVGMEACGNTRWFERLLEELGHELVIGDAARIRAAEVRRQKTDRRDADHLLELLESGKFPAIWVPSAAERDLRQLLLHRHKLVQMRTRIKNQLQHVAMNEGLQKKRQLWSERGQRWLKELSLPPWTERRREDLLRLWQGLEPAIEELSRAVEAQSEQDERVRLLRTHPGVGPITALAFVLVIGDVQRFSRSRQLASYLGLIPSEDSSGSKRRLGAISKQGNTLLRTLLVEAGQSAARLDPELRRAYQRLCHKKQHTGIGKVMVARKLAVRLYWMLKTQQPYAPARMPSSPSHPVSVRKDHSSL

SEQ ID NO: 226091 - protein, 342 aa, unidentified
MKIIGCDFHPSFQQIAMVDTETGEHTEKRLTPGEAVEFYSQLSGKVVVGIEASGNTLWFERLLTKLGQQMRMGDAGKIRAMELRKQKTDRRDAELLLKLLLEDRFPEIWIPSLEMRDARQLLVHRQKLVGMRRQVKNQLQHLALNQGVQRKRKLWSQKGRQELKELPLTGWTARRRDDSLRLLDELDQAIAELDVAVEREASNSPVARLLQTHPGVGPVTSLAYVLTLGKIERFQHSRQVVSYLGLNPAENSSGGRQRFGGISKQGNPMLRSLLVEAGQSASRVDMELKRAYQRLKQRKHSAVAKVMVARKLTVRLYWMWRTQQPYTVTRMQGSPSHPVVAA

SEQ ID NO: 226092 - protein, 341 aa, unidentified
MEHTTIAVDLAKSVFQVAVSHRPGHLDEERRLSRDRFLAFFAQRPPATIVLEACGSAHYWARQLQPLGHAVRLLPAHYVRPYVRRNKTDRTDAKGLLEANRNEEIHPVPVKTIEHQAIASVHRLRSTWLATRTARLNTLRGLLREFGIFIPTGSQRVVPRMRALHEDPAVPPLLHATLAAACDEIERLESNMRAVERQLAALADDMPDVQLLQTVPGVGLITATALVALVTDIRRFPSGRHFASFLGLTPREDSSALRRRLGAISKQGDVYVRMLLTHGARSLVWHAKAAGRPTSLQQWAMQTELRRGRNVAAVAVANKLARIVWAVWVQQRPFAADHRLG

SEQ ID NO: 226093 - protein, 313 aa, unidentified
MANQVTKITLGIDVSKDQLDIYNWQTRQAIKLPNQPSDIKAWLKTLHGPVRIAIEPTSHYHMVMVDEALALGYKVYLINPRQLKHYREAVNVRNKTDPLDAWLLARYLEHEVDQLRPFKPRDPRAQRLWRLILHRATVVKSRQQLQQSFADVQVSIRGVLSQLQNLLVRIDRKILTLIRELGWWSDYRSCLSIPGIGPGNASALVAAYHRGCFAGSDAFISYLGLDVRIRESGYFKGRRKLTKRGEPEVRRLLFCASHPARHYHRFAEYYQRQLDKGLCKIAARVILARKLARIAFTLMRNEETFIKEEKHIA

SEQ ID NO: 226094 - protein, 471 aa, unidentified
MNNHRRRPGKHRRHRPGKPRTSPSVLDRINPNVAGIDCGSAEHFVAVPPDRDPCPVQSFRTFTGDLVRLADWLVACGVMSVAMEATGVYWIPVYDILEARGLNVLLVNARHIKNVPGRKSDVSDCEWLRELHSVGLLRGSFRPTATIVALRTYLRHRQTMIEDASTYIQRMQKALVQMNVQLPLVVTDITGVTGMSILRAIVGGQRDPERLAECRDPRCQASKAEIIEALTGHYQADHLFVLQQNLALYDACQQQIAACDRAIEAHVQILVATVEPPSTPLPPARARTGLKNEPAFEIRSPLHQLTGGVDLSQIEGIAPYSALKLLSEIGTDMTRWSTEKHFTAWLTLAPKNRISGGRLLSSKTQSSANRAAQILRMAAMSLGKTQTALGAFYRRLALRIGKPQAITATARKLAVLVYRALKGELVYRDPGADAYTAKQRTRIVRHLRQRAGSFGFDLVNRETGEIVSAVS

SEQ ID NO: 226095 - protein, 347 aa, unidentified
MTIVEAVPGITGGVDTHLDKHVAAALDPLGRLVGTESFGADAAGYKALLDWLEEFGQVTKVGVEGTGSYGVGLTRFLRKKGVEVVEVNRPNRQSRRNNGKSDPLDAVEAARAAISGRASGAGKTKDGPIEAIRVLVVAKRSARQARVKAIVQMRHLGITAPDQLHSRLKGLTVTALVTESAKLRSTRSPDPVTAATKASLSSLAHRVQSLDQELVELDEKIESLLLATAPDLLARFGVGLDTAASLLVTAGDNPERLHSEAAWAHLCGASPVPAGSGKTAGHYRRHDGGDRQANSALWRIAMVRIAHDPETTAYFDRRVKEGRTKRDVIRILQRYIAREVYRYLPRG

SEQ ID NO: 226096 - protein, 431 aa, unidentified
MKNRTNQRIEEVTTGTLIVGVDIAKSVHWARFVDYRGIEYGKAISFKNERNGYERIVAKINEIRNMRTLRYRIETVMIGMEPTGHYWKPLANYMINKGYRVVGVNPYHTKKSKELDDNSPTKSDNKDAITIARLVKDGRFFDPYLPQEVYGELRGLSNARVSVMKRNSAVKNTIIAIMDEYFPEIWTVFKCLLTGKASRQILRKCPFPAFILEMGEANILTEIKQAVKKTVGMKKVRHLIKIAEESIGVQNGLEAAKMRLGWLLDELELLEKQLIEVEQAMECALIKTGYAEQLLGIKCVGIVTAASFLGEVGDPLRFQNARQIANYAGYNLVEDSSGKSKSGTIISKRGRKQLRSLLYQMAFTMVGKNIEMKALYLHLTTRKVNPLKKKQALVVVSKKIITIIYSLLKKQDVYKPELVLGTVRKEMLMAA

SEQ ID NO: 226097 - protein, 376 aa, unidentified
MTQTDVQYPTIHLAIELSRSAWLVAARLPGVEKPSLHRIEGGDTAALLALAAALRARAAARLGTPVRVACCFEAGRDGFWLHRLLTAEGIAAYVLEPTSILVNRRARRAKTDRLDALGMLRVLAAYLGGDRQACSMVRVPTPEEEDAKRPHREREELVRERVRLENRIAALLATQGVRERPSLRSWERDLAALRTGDGRPLPPHLRAELDRLRRRLVLTLGLIRELEAERDAALAAGPRDAAGRKIAALCRLRGVGANFAAVLTREVFYRAFDNRRQLAGYVGLAPVPHQSGEADRDRRISRAGNARARTTLIQLAWLWLRYQPDSAPARWFRDRVGALRGRTRRIAIVAMARKLLVALWRYVETGLVPEGVEVAA

SEQ ID NO: 226098 - protein, 311 aa, unidentified
MSEFIGIDVSKARLDVAAHSGSSFAVENTEADVGRLCEQLKALAPELVVMEASGGYERLCVAALAAAGLPVALVNPRQVREFARATGVLAKTDRLDARVLAHFAAVVRPPVRPLPDAQHQVLEELLARRRQMVAALVAEKNRLGLARTRLVKRTVREAVSTYERLLELIDRELDELIKASPLWREKEDLLRSFKGIGPVSARTLLAELPELGLLNRKQIAALVGVAPIARESGSWRGRRSIWGGRGQVRAILYMATVTAMRANAQIRVFYLRLRQAGKPGKVALVACMRKLLTILNAMVRTHTRWQQPSVA

SEQ ID NO: 226099 - protein, 436 aa, unidentified
MEEVSDEPLYRDRVCGIDIGKAELYATIRVPSDNHPARRAAETRSFPTTKRGVLALADWLRCWQVPALVMEATGDYWKGPFYRLEAEGFDCVLADARQVKNLPGRPKRDPSDSAWLAACFERGAVTPCFVAAPEFRVIRLHTRYRRDLTDERSREKNRAEKLLESAAIKLSSVVTDLHGVTGRDIMNHLIAGERNPKALAQLARARARRKISELEAALDGAEFFTPEHAALLTAMLDRIDRVNEEIARLTEVIDRLLAPYEEQLQQAESMPGWGRRSAQDAVAETGVDMARFPDGAHLASWAGRTPLDNSSGKRQGKAKVKKGNRYLGGLLGETAVAAGKTQTREGARYRRLSRRRGKAKALVAVGNTQLKVYHALLSHPGTRYQDLGPDYYERRASTSRQIAHHVGKLGALGFEVTLCRTPGPDPEPGQAATPAA

SEQ ID NO: 226100 - protein, 338 aa, unidentified
MKLYAGIDLHSNNSMVAIIDEQDRVVLQKRFANALQQILLALASFKQQLLGVVVESTYNWYWLVDGLMQSGYSVHLAHPAALVQYQGLKYSADEHDARWLAHLLRLGILHEGYIYPREARAVRDLMRRRMQLVQTRSAQVICMQTQFTRSTAKSPPSNALKRMLPDEIEALLEERNVASGVRANLEVVRTLNREIARLEREVSEQVKLAAQYEPLLSIAGIGRILALAIMLETGAIERFAGVGNFSSYARCVASKRLSNDKKKGEGNSKCGNKYLAWAFVEAAHFAVRYNPRIKRFYERKAAKTNKVVATKAVAHKLARAAYHVMRERVPFDEARAFA

SEQ ID NO: 226101 - protein, 344 aa, unidentified
MKKIITVVGLDLAKSIFQVHGIDAEGEVVTRRKLSRSRVLEFFASLEPCLVGMEACATAHHWAREIGALGHEVKLMPPQYVKPYLKTQKNDMADAEAICEAVTRPTMRFVPIKSVDQQALLVLHGVRDQWVRMSTKIINTIRGHLAEFGVVGAKGRLGVEAILMMLEDRQDDRLQALARQCLRPLADELRRVKREILETDRRIAKVHKSSALSRRLETIPGVGPVIATRVIAEVSDPGSFKSGRAFSAWVGLVPKQHSSGGRDRLGRITKKGNPQLRRLLVAGAMSMIIRARQLGFTRHPWLVRLLERKPTKVAAIALANKIGRMIWALMVKRERFNPAKLMPT

SEQ ID NO: 226102 - protein, 455 aa, unidentified
MQPYYLGIDVSKGYADFVILDAAKNPVIQNFQLDDTFQGHCFLYEKLQTFFKERSEAVLYAAVESTGGYENNWFSSLVKFQDSLKLKTARLNPTGVHANGKAGMARIITDKISAHNIAEYLISHPEKVNYEHQDSLASLRKQWSFIQMLTKQCTQLLNQLEALIYSANPEMLIFCRDGVPGWVLHLYKRYPTAALLAKARPSSVAKIPFISIERAQLLVENAQKSVASATDSITGQLITATAKQIMHLKETIKMQTAIIAQNCPVPEVALLKTFSGIKDYSAIGLMLEIQTVQRFSSVKKLASFFGLHPVFKTSGDGSAGFHMSKTGRKEPRRILFMVALTAIRTNALIRNLYQEHVAKGMCKMAALGLCMHKILRIIYGMLKHNKAFDSAVDIANRQKMPVKQKCRQDKNRRFQAFDAKAPVSRRQNLKRRERESSQNVNNVQSGIDTLVPIPV

SEQ ID NO: 226103 - protein, 319 aa, unidentified
MAQNDLVVAGIDVAKDKVDVCIRALSLRRTFASTAEGRRELASWLRRQKVGKAVMEASGGYERDWAKALRDAKIEVRIVDPKRVRSFAQSAGRLAKNDTIDAEMIAWFAETFDEARGQAYDATREQLHQMVSARQALKDMQAKLENQGEHAMPAAIQRMHARILKTISVELVKLEAAISAMIQATPHFAELAEIIESVPGIGRTTSAALIAAMPELGRANNKIVAALLGVAPYDDDSGRRRGERHIKGGRRRTRNVFYMACLGAATQHNPVLKAFYDRLVAKGKEKKVALIACMRKLISILNIMIERRQKWDASRYALS

SEQ ID NO: 226104 - protein, 347 aa, unidentified
MRFYTQQHRHYCGIDLHARTMYVRIIDQDGTILVEKNILARPGPFLDLIAPYRDDLVVAVECIFTWYWLADLCHQEGISFVLGHALYMKAIHGGKAKNDRIDAGKIAALLRGGMLPRAYVYPREMRATRDLLRRRLHLVRHRGRLLAHIQNTNHQCNHDAFAAKLTYKANREGVAERFDDPSTRKSVEVDLALIGHYDGIIRDLELFIIRMAKQHDADMFHRLRSITGVGKILALTIFYEVHDISRFETVQQFASYSRLVKCSRESAGKRMGTGGAKIGNVHLKWAFSEAAVLYLRANPTGQKYLARLTGKHGKGKALSILAHKLGRATYYVMTRSRNFDGKKFLAA

SEQ ID NO: 226105 - protein, 369 aa, unidentified
MKKDTIFVAIDDSKRTLVMGILRPGIDAPELRTLPNEPRHVRRVFARLTREGPVRVCYEAGPSGYDLFRQLTALDVPCQVMAPALTPRKPGDRIKTDRRDAAKLVRLFRAGELTPITVPDETGEAGRDLLRCREDVQEDLLRWRHRLGKFLARHGRVYREGRNWTQRHWTWIRRQRFDLPALARTCEEYRCAVEQLLARVADLNREIAALAETAPYREPVGWLRCFRGIDTLAAMTLLAEIGDFQRFAHPRQLMAYLGLVPSEHSSGDRTQRGSITKAGNTHARRILVEACWHYRHPPRLGAALARRSQGQPQSILAQAWKAQLRLHRRYRHLVGHGKRPPVAVVALARELVGFLWAALTHPDPVALAA

SEQ ID NO: 226106 - protein, 416 aa, unidentified
MSFALSEALFFTGIDWAAETHAICVMDAGGKIAAEFTIEHSADGIAAVIRRLARYGDPGDMPVAIERPDGRLVDLLLEAGHPVVPVKPNAIKTWRDGEVLSGAKSDAGDAAVIAEYLRLRAHRLRVVAPYSDETRALRTVVRSRGDLVDMRVAATNQLSALLDAHWPGARAIFADVESPISLEFLTRYPTPAAAAHLGEKRMAAFCVKHGYCGRRTAAELLTRLRSAPAGTSREALTEALRDAVLAAVGVLTALNASVKNLDRSVAAHLGEHPDGAIFTSLPRSGQVNAAQVLAEWGDARQAYEHPDSVAALAGCTPVTRESGKHRAVHFRWACNKRFRVAITTFADNSRHASPWAAKIYNDARASGKDHPHATRILARAWIRVIYRCWIDGVPYDPAIHGAAAALASQATEQIAA

SEQ ID NO: 226107 - protein, 313 aa, unidentified
MSQEEQQIVVGIDVSKARLDIAAGDEEWPVTNDLEGIGRLISRLQTLNAGLTVVESTGGLERLVVSEMWAAGLPVALVNPRRVREFGKSIGLLAKTDRIDARLLVRFGEAVKPDPICLPSEEEQKLSALMTRRRQVIEMLTMEKNHLCSSHPAAKESITKIKTVLQQELDELDHQIDDFIDQFPIFKKKNEILRSTPGVGKVTAAILLSDLPELGTLDRKKIAALVGVAPFNNDSGRFRGKRRIKGGRPSVRTVLYMATISATKFNPIIRTFYEHLVLQGKAKKVAIVACMRKMLIFLNAMIRDMQRWRSSIA

SEQ ID NO: 226108 - protein, 428 aa, unidentified
MMKTEDIRLEEFRQLRNEIRGSTKHLLVGIDIAKEKHNAFFGTATGKTLYKRFVFDNSREGFELLEAESDAIMLQNKLSQIVFGMEPTANYHKPLGEYLIRRGYNVVLVSGNAVKNNRELLDGRWDKHDMKDSANVADLISQAKFLYYEYPCTEVRDLRGLLSLKRKLKRQEQGLRIRIRNSLVAQYFPEMDRHYGSHEQENLAIVRNCLSPAQIAGMEYNDFFKTVVSRQKGLRQHKHLYRIWQLASDSIGCEAGDAASCEAEVLVTQLRQTREAIEQVEKEILKLCYMFSEYEFVISIPGFGPDITSKVLAYIGDQYRFEKASQVLKMAGFDLCASRSGKPSDKAVPVISKRGRSDLRYALYQAAMVASTRNIHFIKYFTAKLRGREKERGIKTKMRVKLAAKMLVIAWTLMIKKESFNPDYLTGE

SEQ ID NO: 226109 - protein, 429 aa, unidentified
MNSNTQNAKIKSITEKTLIVGIDIGSETHYARAFDWRNYEYSKKPFSFNNDDEGFKAFSLWVNEIAEKHGKNTVIPGMEPTGHYWLNLGAYLQEQGMKPVHVNPHHVKKSKELDDNNPNKNDRKDPKTIAALVNEGRFSYPYIPTGIYAEIRSLSNLRIQTQEEISRIKNRIARWFSIYFPEMKDVYKKPDAKSGMMVIKKAPLPADIKALGVDGVNQIWRDAKLKGAGLKRAKTLVEVAERSIGNTEAPGSARIEIRMLLADYEVYSKRMDELMVEIEKKLSEIPYIDKLLEINGVGIKTVSCFVAEVGDIRRFDNPKQLQKLAGYAIVSNDSGKHNGESRISHRGRKRLRYALYEAAISVIGKNPEFKSIHEYYLTRTKNPLKKMQSVIAIACKLIRIFYMILTKGNDYDGQKMLQDIVRPEIAVAA

SEQ ID NO: 226110 - protein, 331 aa, unidentified
MDNQIDLKYYIWRYSHALCGIDVAKNKHDVTALNVSGKTVLKPLTFSNNKAGFELLDLSLRQLNQDYLIALEDTGHYAFNLLNFLHEQGYKVYTYNPLLIKEFAKSLSLRKTKTNKKDAHGIALKLLSDPNREQFQHDNRQVELKILTKHIHRLKKKQSDWKVQYTRCLDIIFPELDKIVGKHSEYTYQLLTCYPNPQKRLEAGFDKLIEIKRLTASKIQDILSVAPRSIGTTSPAREFEIIENIKHYKRLIDKAEKCVNDLMAELNSVITTVTGIGNRLGAVILAEIRNIHAFDNPAQLQAFAGLDSSIYQSGQIDLAGRMVKRGSPHLR

SEQ ID NO: 226111 - protein, 318 aa, unidentified
MTASQPIFVGIDIAKRHLDIALLPEQRCWRVSHDDQGIEELVRSLKAQNPACIVLEATGGLETTLASTLAAHRLPVCVVNPRQVRDFARALGQLAKTDRIDALVLARFAQRVQPEQRPLKDEETRKLQALIARRQQLQDMLVAEKNRLSGAPKPIRKDIKAHIQWLQQRLRDTDNGLKETIKHSPVWREKDELLQSVPGVGPVFSWTLLSCVPELGTLDRRKISALVGVAPLNRDSGRFQGQRHIWGGRAAVRRILYMATLTAIRCNATIQAFYQRLRAAGKKAKVAIVACMRKLLTILNAMVRDGRRWQETEPQTSA

SEQ ID NO: 226112 - protein, 443 aa, unidentified
MARPGMILISEVADAPDIMGISKPAGLKSPRGEVKIMNPLFVGIDVSSKNNVTYLMKPDGSKHSSFSVQNNLGGAKLMSEKIVLAMETMGLNDVVIGLEATSIYGDSLVYALREDRRLGRYQRKLHVLNPKQVRKFKESYPDLPKNDWVDAFVIADHLRFGRIGKEVYMDDYRYKSLQTLTRARFDVVQNLTREKQHFANYLFLKCCGMAQDKDIANSSATTIALMERFETVDELAYADLDELTKFIDETGRNFADPAAKAKAIQTAARNSYRLPITVNNSVNQAMAVSIATMRALGKQIKVLDKAIEQQFEIIPNTLTSIPGIGKVYSAGIIAEIGDIHRFSSQASVAKFAGLVWTQHQSGDFEAQHSKLIKSGNRYLRYYLLEAANSVRRCDSEFRRYYDLKFKEVNQFQHKRALALTARKLVRLIYRLLMDNRLYIPPES

SEQ ID NO: 226113 - protein, 369 aa, unidentified
MLRPRQQEKLARGAKDEEHAMSHKLNAGIAVIGIDIGKNSFHVVGLDRRGAIVLRQKWSRGQVETRLANLPPCLIGMEACVGAHHLSRKLTSLGHNARLMPAKYVRPYSKGQKNDFRDAEAIAEAVQRPTMKFVATKTAEQLDLQALHRVRERLVSQRTGIINQIRAFLLERGVAVRQGLRFLRAELPRILATPRDVLSSRMVRVLEGLADDWRRLDERIEGLSSEIEVLARRDAGCERLMSVPGIGPIISSAMVAAIGAGDAFSKGRDFAAWLGLVPKQISTGDRTILGKISKRGNRYLRVLFVQAAWAVLIKPTSWDRHGLKSWLEAAKKRLHHNVLAIALANKLARIAWSVLAHGRTFEASKMQAA

SEQ ID NO: 226114 - protein, 396 aa, unidentified
MAAIWAGIDAGKTHHHCVAIDETGRRLLSRRVANDEPELLELLADVMDLADEVTWGIDLAECGAALAIATLLNHGQPVQYISGRVIHRASESYRSEGKTDAKDAAVIADQVRIRRDLRPLRVSDDTVTDLKILTGRRMDLVSDRTRTVNRLRAQLTGVFPGLERTLDLTNIGPLTLLTGYQTPAAIRRIGTKRLESWLRNRHVVRPDRLAETAVQAAERQHTTLPGEKLTAELVHTLAQEVLSLNRQVTELDKAIETRFRDHHAFDVITSVPGLGIILGAEFLAATGGDMKVFGTADRLAGFGGVAPVPRDSGKIRGNLRRPRRYNRRLQRVFYISALFSIRHCDESRRFYDRKRSEGKRHTQAVLALARRRVNVLWALLRDGRCYELTPPSALTA

SEQ ID NO: 226115 - protein, 357 aa, unidentified
MAALSIADVPANVTVGVDTHKHSHVALAKDGLGRHLGQLEVGTDLGGYADLLAWAHGFGPVVTFGIEGTSSYGAGLTRFLLAQGQAVIEVLRPVRRDRRFGSKSDLIDADAAAGAVLSGKATAVPKAGDAGVEMVRALKIAKQTAIKARTQAVNAVKGLIVMAPDPIREQLRNLKTPALVRTCSAYRVDGASDPTSAIKLSLRSMCRRYVVLDQEVRSLEKELDALTIRLVPQLRQLFGVGQDVAASLVLAAGNSGDRLRSEASFSMLCGASPIPASSGMVRRHRLNRGGDRQANAALHQIVVVRLRYDEATRAYFSKRKADGKSKKEIFRCLKRYVAREVYRTLVDPREEAVRSVA

SEQ ID NO: 226116 - protein, 445 aa, unidentified
MRKKNKPATQVRPEPRPNAAGIDLGATVHYVAVPPDRDANPVRFFGTQTGDLHALADWLIACKITTVAMEATGVYWVPLFQILEDRGLEVCLVNARHVKNVPGRKTDVQDCQWLQYLHAVGLLHASFRPPAAVCAVRAFVRHRDSLVRTGCEHLLRVQKALDQMNVQLHRAVTDITGETGQKILEAIIKGERNPEALAQLRDYRCKKSVAEIAAALRGDWRPEHLFTLRQSFEAWQYHQKLIAECEAELRKQLDGLADQTKEAAPPPARRDKRCDAQTRQHLFEKFGVDLTAVDGVNVQTSYMFLSEVGPDLSKFPSADHFASWMGLCPDNRKTGGRPIGVSTRAVANRLATALRMAAQSLHRVESPLGDWFRRMKAKLGAPGATTAVAHKLARVLYAMIKHRKPFDPARLGNPVLRRARKENALRRAAEELGYTLQPLQAVAVS

SEQ ID NO: 226117 - protein, 441 aa, unidentified
MAAFVAVTKRWSAPMSKQNDLSRCLVALEQDATLIVVVEMGQASWRVAGIVPGLDRYPLYPLKKLGADRDALLQLLHRWRNEATKAGHAIDRIAVAYEAGRDGFWLARWLRSQSIEAYVIHPSSVPVSREHRRAKTDRLDTELLKRAFLGWLRGEPKHCSMAAIPTLEDEDARRPGRERQILVEERTRILNRLKANLARLGIRGFRPNLARAPSQLGALRTPEGVAIPTNTLAEMRRDLDRLRFVKQQIKEIEKTRAERLAKAPNERRYVAARALTRVVGVGVETADMLVQEVFSREIRDRRALARYAGLTGAPDESGQRRRERGLAKAGNARVRRGMIELAWGSSRAPEGQPAERMVSEANGGRAAGRAQDNDRRTGAQVPYRAVAARRDRRSAGRSSASPGGVATTELLQLERHRDGRAADDGPRRRQPDVDYGLRAAV

SEQ ID NO: 226118 - protein, 343 aa, unidentified
MAIIRVGVDIAKSVFHVHGVDRQGKCCWSGKYSRAKWVDQIRKKVPQEAEIAMEACASAHYWSRVLMRHGYMVKLIAPQFVKPYVKSNKNDAADAAAIAEAMSRPHMRYVAVKSVDQQDIQALHRVREELVKQRTAKANQIRGLVGEYGIVAPIGIHTLRKAIPCWLEDATNGLTDRFRLLLAGLQEDLIFIDQRVVSITTEIEQHAVSDPVANKLLALRGIGPLSASALAGIIGDGKQFRRGRDFAASLGLTPRQHSTGGKDRLLGISKRGDSYLRKLLVHGARSVVRHAQNKEDNLSHWINELKKRKHVNIATVALANKTARIAWAIITGDGHYDDKRVAA

SEQ ID NO: 226119 - protein, 342 aa, unidentified
MGEVSTIGLDIAKSVFQVHGVDAGGVVVICKRVSRVKVLEFFAALPPCLVGIEACPTAHHWSRKLQTLGHTVRLMPPSYVKAYLKRSKNDANDAAAICEAVTRPSMRFVPTKSEQQQSALMLHRSRQLLVRQRTMLSNAIRGHMAELGIISAKGRHGTAELLEIITKEDDRIPTVARVSLAVLARQYAVVTAEIGTIEKHIHALHRSSQESRRLEEIPGVGPIVATALVAEVGDWTAFSSGRSLTAWIGLVPRQHSTGGKDRLGRISKQGNRHLRWLLVAGAMAVIRYARQHGTKRLWLVRLMGRRPVKVAAVALANKIARMAWAMMVRGERFSEPKLLPAG

SEQ ID NO: 226120 - protein, 321 aa, unidentified
MKTVLGIDQAKKKFDVALLRNGKYKSKVFENNPAGFSSLLTWLSKNGVEVVHACMEATGNYGEALAKFLHEAGHSVSVTNPARIKAFGQSELLRTKNDKTDAKLIARFCEKMEPTLWQPSPVEVEYLRGLGRRRDALINMRTQELNRQETSNQTVNSSVQTVLECLDKEIEQISKLIKDHISKHPGLKHKQDLLNSIPGVGPSTIEAILSEINAFEGFETIEQVVAYMGLSPKEHTSGTSVKGKSAICKIGNSRLRKALYMPALSAIIHNPIVRALYDRMKAKSKNGMVIACACMKKLVHLIYGVIKTNKPFNPAYTLKTA

SEQ ID NO: 226121 - protein, 463 aa, unidentified
MSFPELHRASGVVRNLTTAMTPTLAVLDPLAAFVDVGSEQMHVSIAGGPPEVFGTVTTELHRLRDWLKARSVNTVAMEATGVYWLPLYGVLEAAGFKVTMVNGKQTRNLPGRKTDMKDCQWGATLHAHGLLHAGFVPPAHIRRLQDYLRLRTDHVSSAAASGQHQQKALERMNVKLHDVISSLVGASGSKVIEAILAGEHDPDRLLALCDVQIRQKKADRIKESLRGTWAEEHLFALRQAVENWQHYQRQIAACDQRIAAVLREINGPDQPAGPAAKAPPIKRAGVNAPQIEGLHGLLVKLCGGKDLTVLPAHTDYSLLQLIGEVGTDLSQWPTEKHFTAWLGVAPGSHQSGKRKGSVRRKRNRAGRLFCVMARGLARSKHIALGGFYRRMSGRRGGLVANVALARKLAVLFWRVMVKGLSYVEAGLKQYEETVLETKRRALCRLAKQLGRVVLPSLAELQTV

SEQ ID NO: 226122 - protein, 344 aa, unidentified
MQHYVGLDLSVKETSVCIIDKAGKVIREVKVATKPVPILAVLTEEALAIERIGLEAGPLSQWLYSALAEAGLPVICVETRHMKAALSAQINKSDRNDARGIAQMMRVGLYRPVHVKTLASQKRRMLLTSRQLLQAKALDIENDLRGTLRNFGLKVGMVGTVKFEARIRELVADHPDLAAIVEPLLIARRVLREQLGVLHRQLLEIVRHDEVCRRLMTTPGVGPVVALTFRATVDVPSRFSNSKAVGAAFGLTPCRQQSGEIDRMGGISKCGDALMRETLFEAALVLMTHSRKWSWLKAWGMKIARHRGMKRAIVAVARRLAVIMHRMWVDGTEFRWTRKEAAAT

SEQ ID NO: 226123 - protein, 395 aa, unidentified
MKKVCGLDVHKDTIFLCILAENGQKVLKEYSTLTPDIMLMLGLIKQEQVQEVAMESTGIYWIPVWRILQGQVSLKLVNPYFIKQIPGRKTDVKDAQWIATVLQKGLIRGSYIPEKHIQELRQYERRYVRLCERMTRIEQEIDRQLHRCNIRITSYATKVGSKSVMNVVQGIIKGENTEDELIRHIHGRIVNKDKEKVKASLIGIISDADRFLFKQCYQEHELIIQQQQECVEHMERMCEQYYKKELELLCTVPGIQRLSAMTIIAELGVNLKTFATAAALTGWAGLRPRNDESAKKIKSRKITNGNKYLKRTLVQCAWAITRTKKCWLSGKYADLAKRRSQKKALIAIARKLLVIIWHILSKNEVYKEYTPYISQQQKEKKLKYLQNQILQLQQK

SEQ ID NO: 226124 - protein, 406 aa, unidentified
MSMNAVGIDVSKQKSTVAILHPGGEVVTSPFDVPHLSGCFQPLVQHIRALNGQTRIVMECTGRYYEPVARQLSQAGFFVCAVNPQIIHGFQGQDNTLRRVKTDKADSIKIARYTLDNWVNLKQYTLMNELRTQLKTMNHQFDFYMKHNTAMKNNLSGLIDLAYPGANTYFNSPAREDGSQKWVDFLDTYWHVDCVRKMSCNAFTLHYQKWCCRKKCNFSCLKAEEIYETAKELIPVLPKDDFTKRIIKQAIQQLNAASQTVEQLRILMNETAAKLPEYPIVMAMKGVGPSLGPQLMAEIGDVARFTHKGAITAFAGADPGVNDSGDYSQKSVHVSKHSSPTLRKTLHQVMDVLIQTKPDDPVYLFMDKKRTPSKPYYVYMTAGANKFLRIYYGRAKEYLASLPVSE

SEQ ID NO: 226125 - protein, 433 aa, unidentified
MLKINYMSTLFVGIDVSSKSNMVYAMDFEENKYFSSSFGNNQPGADELAGMIAQCMKRHSNLASIIVALESTSVYSVHIANFLSTSEILMPFKPYVFCVNPKATSNYRKSYIGMEKTDPTDAFLIADFARVGRTKKLEPWRGGQFIALKRLTRHRMHLAECITREKTYMVSNLYLKFSELQLLEGDDKPFGNIYGTTSSAVLTEFLSPQEIIDLSEEDLLAFLAEKSRNRISDISRTSELLRKAARDSYRLDQCMYEPLNISLASSFNCIHAYQKEIKLIEQAIEKCINGMNPNALIILQSIPGIGPVWASGILSEIGDITAFHSSDALAKYAGLYWPKGDSGDFTSEDNKMSKAGNPYLRYYLGEAANSIRKHIPEYAEFYARKYAEVTKHQHKRALALTSRKFVRLVFGLLVKNQLYTGEKLEAEYNIESN

SEQ ID NO: 226126 - protein, 359 aa, unidentified
MPVYVGIDVHRKRSQVAVIDEGGEVLANRNVPNGVQPVLGVIGGLPPGTPAAFEAAFGWGWLVELLEDYGFDPHLVHPLQCKAIASARLKNDKVDAAILAQLLRADLLPEAWIAPPQVRQLRALLRHRIQLVRLRTLLRNRIHAILADHGHDRPGGCWSGPGRAWLASLELPAVSREVIEDDLALIDALQVPIDRLDWEVHQHARSDPSVKVLTQLPGVGPFTALVLLAEIGDVTRFGSARKLAAWAGLTPTVRGSDRTVRHGHISKQGSVRARWALCEAAQTAKRHPDFAASYQAIARRRGKNIATTAIARKLLARAYHLLTDAQITAPAPAATTPAPAGAPTDREGVASPGRARKTA

SEQ ID NO: 226127 - protein, 397 aa, unidentified
MYLNVGIDVSKNKHDACILNENGEQIGKFMKLTNTKTSLDKFLEQIKLISEKNGAEVRIGLEATGIYWYSLFSKISDDHKISIYNPTQIHAFAKVNVRGSKTDKIDAKTIANMLMFGNAPQTNYSDKQRLELREYVRFHWKLTNNKTNLKKRFKRNLHLVFPGYDQVFKDVFTKTSREILSQSPTPDDILEMGEEKLLELMKKASRNHIDKEKARELIVKAEDTIPSEILKESSLFELQIMMDMIENLENHIDTLENRIFAIWDKVKDKHYIQTIPGISEFRAAMIWAEIGDIENFTHPDQIVAFAGLDPKVRKSANREVIGGPNKRGSSTLRWALGWAVQESKNVNPVLAPYFEKKIAEGKHYNTARCAASKKLIRIIWSVEKNKKPFQIPSNLKS

SEQ ID NO: 226128 - protein, 385 aa, unidentified
MGTQAKVTQMGLDCHKNFSRVSARDEHGRVAWRQRLEHGDRRALREQLRAWPAGRPVVLEGTFGWGWLSDELREAGHEPHLASSRKVAAWREARGLAKSNKVDADLLSELWSEQQRWWEVWLAPPEVRDQRELLRYRMTLVRMQGGIKNRVHATLHRHGILHGFSDVFGTAGTKFLQQLATDDTLHESTRVTLAGYLELLGQVRRQIAAATRQLKGQVRKSTEGERWRSLPGVSWVLAYTMLAEVGRVERFKDGRHLTSYSLLVPIADDSGDEDADATPIGRHVGHIGRRTLKWAFIAAARGAVRKSPYFRAIFDRRTDGGKRDRGRGYIAVARELCRVGYACVKQGRDYQEQRPKQTDRQNNEVADLLVRTCVGPDRPLAAAVV

SEQ ID NO: 226129 - protein, 349 aa, unidentified
MTTVPSRPGAVTGGVDTHADIHVAAACDPLGAVLGTDSFPTTPVGYRRLLAFLVSFGPLTSVGVEGTGSYGSGLARHLADAGVAVIEVNRPNRQVRRRHGKSDTVDAIAAARAVISGQATTAPKAHDGAVEALRALQIVHRSARKSRTQALNQLHALIVTAPEPIRAQLRGLHRPQLLATCQAYRPGTGDDLVSVTKYALRRLAIRILELTAESAEVSKRRRRLLNQTAPELMAIIGVGPDTATELMLVAGDNPDRLSSPAAFAALLGASPIEASSGKTVRMRLNRGGDRQGNSALWHIVISRMASQPATKAYVERRTKEGLSTPEIIRCLKRYVAREVFNALPREALA

SEQ ID NO: 226130 - protein, 528 aa, unidentified
MPYQVRTSRREHRKSKSNSRKRQTVQKPNGVIAPRVKKVGGERFAIVCVDPAKHRSEWMMADYFGNLLIEQQTVEHRAAFFKLAVARIREAQEEHDIQDTIVVVERTGNYHLPPKRAFAKAGFETRVVHPFATKQYRMPADPGIKTDGNDLNAQHRAAVAGFGLCEFELESPYRELQLRARHRRNLVEKGAAMACQIREHLHLSMPGYASMFDRLFERPTALAIAARCDSPAKVIELGQARLSQHLRKNKIRHQVRTLEKVLAWAAQVADDNVQDGPMHHAIWTDLHELYQHFQRQITALERELAGDLVQTPYVRLMAIPGINVVSAAELAGEMGPITRYANANAITGRSGLYPSRHQSDQTDHDSGPIIRQANRRLRCVLMRIADNLSCHCNYYRGQAGVDEARGIDKRSSRVKIAKRFSRLLLACVAGDEPMRHPCFQQPDSILEKLRHFHHEHETPLDRLLADLETAVGQLPYNTRSREAEIVAQVLGEHAHRRAGVTTIGALLPAVLARLGIQTTNEKENRDRS

SEQ ID NO: 226131 - protein, 346 aa, unidentified
MVMLGVDAHKATHTVVATDTNGRELERMTVRAVDAGHLEALAWAAKWPARTWAIEDCRQFTRRLERALLGAGEAVVRVAPRLMALSRRSGRQRGKSDPIDALAVARAAIREPDLPRAHLDGPERELRLLLDHREDLVEERTRTQNRLRSHLYELDPGAEPPTRTLGRHRTLDRLRDQLRELPGTVARLARELVERIDGLNHSIDALEVEITALVEPMAPTLLSIPGCGALTAAKIIAETADVRRFHSAAAFAMHNGTAPIPVWSGNTPRHRLNRGGNRQLNCALHRIAVTQLRWDGPGRRYFERRIAGGNTKKKALRALRRRLSDVIYRALRADIAASAPSAELAA

SEQ ID NO: 226132 - protein, 342 aa, unidentified
MNDTMIGVGLAKNVFQLHGASMTGDVKYRKKLSRGQFLRFMSEQSPALVVMEACGSAHYWARELVKLGHAVKLIAPQYVRPFVKRQKNDATDAEAIVIAARQPEMRFVEPKTADQQARAVLFRARERIVHQRTELVNALRAVLYEYGQVIPQGIGHIKRIEAILENAEIGLPEIVQEECRDLLAQIGEKTARIEEKARKLAELSRRSGAARRLQTMPGVGPLTALAVEAFAPAMQSFRCGRDFAAWLGLVPRQFSSGGKERLGRVSKAGQADIRRLLIIGAMARLSWAGRKPPVQGSWLSRMLAKKPRMLVAIALANKMARTIWAMLMKQEEYRDPALAMAA

SEQ ID NO: 226133 - protein, 320 aa, unidentified
MSDSLVIGLDVDSKELVPAVVDCKAGDRIPNTKAGIAKWLKTLPPRCRIGMEATGKHHELVARMAGQAGHVVYVINPRLIKSYAKATGARGKTDAMDAQVIARYVKKESDRLREYVPRSNEQQQMHDLLRKRQTLVETRARLEQSFEVTKSAPGELAGILQAMASTLSELESQLQQLGRDGEHGALYKRLLTIPGIGPAVAAHLVYYMTRWPLANANAWIACTGLDPRPNESGGRTGRRRLSKQGAPVLRQMLYMAAMGLKRCRGGQPLYDDLSGRGHSSTAVFNILARKLARIAWGVFKSGKDFDPALLKVGQARFLQA

SEQ ID NO: 226134 - protein, 346 aa, unidentified
MEHYAGIDVSLELSSVCVVDAQGKIVKEAKVSSEPGALVSFFKGLGFPMKRIGLEAGPLSQWLHAGLAQAGFETVLLETRHVKAALSAMTVKTDRKDARGIAQLLRMGWFRAVHAKSIGSQEVRALLVARKQLLGRLIDVELSIRGILRGFGLKVGPVTRKEFEARIRELVMGQATLERIADAMLSARAALKAEYEKLHKAVLAIVREDAVCRRLMTVPSVGPLVAITYKSAMDDPNRIVKSKAAGALFGLTPKKYQSGEKDVTGGITRTGDEMVRTALYEAANVLLSRITRFSKLKRWGMDVAKRRGSKRAKVALARKIAVILHRMWVDGTTYRWAAAEPIATQA

SEQ ID NO: 226135 - protein, 410 aa, unidentified
MERVLERCCGLDVHKKTVAACIRIPGKKKGQREQEVRTFGTTTRELLELRDWLEANGVTHVAMESTGIYWKPIFYVLEGAFSCLLANAAHIAQVPGRKTDVKDCVWIAQLLEHGLLRGSFVPEAPIRDLRDVTRYRKGLVQERTRVSNRLHKVLEDAGIKLASVATRVLGASGRAMMEALVAGTTEPAVLADLAKGRLREKLPALREALAGSFRAHHAFLVSQLLAHVDYLDEAIQGASVQIETLMAPYAAEIERLDTIPGVNRRTAEVLIAETGADMSRFPSAKHLASWAGLCPGNNESAGKRMAGTVRKGNRWLRTALVEAALSASRSKDSALAARYRRVMRHRGHKKAVIAVAHAILISVYYMLSRQVPYQELGPDYFDRRHAERARRRAVQTLERQGYRVTLEPAA

SEQ ID NO: 226136 - protein, 344 aa, unidentified
MVERFVGLDVSQRSTSICILDGHGARVWRGKCATDPAAIEEAIRLRAGGATRIGLETGPLTPWLVHELRGRGLEVVCLDARQARAALALRPNKTDANDAEGLAQILRLGWHRSVHVKSYDAHRIRAALGARMQLVNMVTELSNHVRGVLKVFGLIVEGARGGVFADRVEALVADRPEVAAVVRPMLDAWRGLRRQVAAYDVALRAEAKGRREVRLLMSVPGVGAITALAYASAVEDPARFGSSRSVGAHLGLTPRRHQSGEVDRTGAISRWGDGLVRTYLFEAATVLLGRVKRWSALRAWAVRLAQRSGGTKARVALARKLAVTMHAIWRSGEPFRWTAEPRAA

SEQ ID NO: 226137 - protein, 423 aa, unidentified
MEVLHECVAGLDVHKDSVVGCVRTVSGDKTTREHRTFDATTDGLLALLEWLTSCRCELVAMEATGVYWMPVWRILSDGAFKLIVVNAAHIKAVPGRKTDMKDSTWLADLAAFGLLKASFVPDEEQHELRALMRTRKQLVREQTRHVQRIQKTLTEANIKLDSVISDIMGRNGRRMIEAMITGVRDPRKLAALADQRLKATPKQLYDALHGRLTDHHRFLLQLHLGQWDTLDATIKGVDREVATRVFRMDTEVTADKANFSDLIDQLVTIPGVSRLSALTILSEIGTDMSRFATAGHLVAWAGMCPGQNESAGKRKRTRLRKGAPWLKTMLVQCAWAAKRKKDSYYKAQFFRLQSRRGPQKAICAVAASLLTAIYHMLKDGTIHQDLGSGYFDQRPPEIKVKRLVNQIAKLGFEVTLQPIAKAA

SEQ ID NO: 226138 - protein, 459 aa, unidentified
MERKMKLGMDVVNFNASGIDVGSRSHYVAIGQELEDVREFGVYAENLTELCQWLLDSGVTTVAMESTGDYWQNLYVELISFGFEVVLANGKFTKNAKGKKTDVKDCRWIQKLHTLGLLTGSFLPDLTTEQLRTFCRQRGNWIDLAASATHKMQKYLKLLNFRLDVVVKDVCGLTGMKIIDDICKGNLDPQSLAEHRHYNCRKPKEEIARALHGNNRSDYLFGLQQEFDSYKFFQKKIADCDKEIEHFIKRELKEHPERSKMKTTEKPYKRINKNAPQIKDLNQIAFRYFDGVDLFAIEGLSHSTVLTIMSEIGPQGFKKFGSSKQFSSWLRLAPNNKISGGKTLSNRVPKGSNRLKIALRQAANAIGNLKDTHLSDFFRRVAYRKGGHSAVSATARKLAVIIWNMVTKKNGYQPPTKYLFLDQKRKLGLINRIKKQIDKFELKPEDFGFTKNLNINNLI

SEQ ID NO: 226139 - protein, 424 aa, unidentified
MIAAAVERCAGIDVAKEFLKVCVMTGPLTGEAHVERRRYGTTVAELEKLRDWLVQEGVTHVVMESTGSYWKPVFNVLENAVKVYLANPQEVKNRKGHKTDDKDGWWLAHLLRHAMIHPSFIPPRPIRELRDLTRRRKKLIECGTAEKNRVQKVLEDANVKLGNVLSDVFGVSGQAMLESLLNGEPDPEKIACFAKRRAKQKIPQILEALQGHQMNDHHRQMIRYSLAHMQFLEEQIASLDRDIVEKIREAGLERAWELIQSVPAVLENSAASILAETGADMAVFPSRQQISSWAGICPGNNRSAGRNKSSRTTGGNPWLRSALTECAWGASSKKGCYLKEKFWRLTSKHAGKKAPAVIAVAHQLLMLIYDVLRTGKPYEPKQPPLLNPAQQERLIRHHVRRLGKLGVKVKSAFQVARNSQKQSA

SEQ ID NO: 226140 - protein, 317 aa, unidentified
MSEPLFIGIDVAKDTFHVASCPATINISMPNSSTGIHNLLKSLKFHSIALIVMEATGGYERPIVAELLQADLKVVVASPRQVRDFARGIGEFAKTDPIDARVLARFAQVVQPKPKPQFSPKTDELSDLVRRRSQLVDLRTQELNRSQTIRHPKVRKSVQKMLKTLDYQIAELDEIIQQHIKADDNLCQKDEILQSTPGIGPQTSAVLLSQLPELGQLNRQQIAALVGVAPYDFRSGRYAGQSHIRGGRKDIRCALYMSVLSAMRFNPVIHRFANRLLAKGKLSKVVSTACIRKLLIILNTMMRNKTLWHPEKILKNP

SEQ ID NO: 226141 - protein, 404 aa, unidentified
MNNVAGVDVSKGKSMVSVLRPFGEVVTKPFAVGHTGSELKELADYLKSLDGETRVVMEHTGRYYEPVARFLHEEGIFVSAVNPKLIKDYGNNSLRKVKTDKADAKKIARYGLDNWAELRQHTPMDTIRMQLKTLNRQQGLYSKTKTMMKNNLIALLDQTYPGVNNLFDSPVREDGSQKWVDFATAFWHVDCVRSMSLAAFTERYCKWCKRHGYNFSQSRAVEIHTDARDLIAMLPKDALTKTMLRQAIDALNAVSRSLEHLKAETLTLAAQLPEYPVVMAMRGVGDSLGPQLMAEIGDVTRFTHRNAITAFAGVDPGADQSGTYEAKSTRASKSGPPELRKALFLVMDCLLKTMPQDDPVYRFMDKKRAEGKPYLVYMTAGANKFLRIYYGRVKEYLASRENAD

SEQ ID NO: 226142 - protein, 343 aa, unidentified
MEHYAGIDVSLECSSVCVVDATGKIVREGKVATDPGALIAWFSTVKLKLVRVGVEAGPLSQWLYPELKKAGLAVELLETRHVRTAFKTMAVKTDRKDARGIAELMRVGWFRPVHCKSMNAQETRVILNTRNLVQSKLKDIEASARGMLRNFGLKVGSTTRIRFAERIKTLVEGHPTLEIMAEAVLAVHAVLLQQFKTLEKRVRVMARHDEQARLLMTTSGVGPIVSLTYAAAIDDPARFKNSKTVGSHFGITPKRYQSGETDITGRISKIGDKSVRLALYQAAHIILTKPVKSSVLKDWALRLAKRIGMSKAKVALARKLAVIMHRMLVDGTVFNPAEGAAKA

SEQ ID NO: 226143 - protein, 324 aa, unidentified
MEVEAVYVGIDVSKARLDVAVWPGAERFSVANDPRGIAELVEKVTALEPQAVVLEATGGLEALAASELHAAELTVAVVNPRQVREFARSLGRMGKTDRLDALVLAQFAQSAHSNERLPKLRLPDAAEAELKALVTRRRQLLGMLTAESNRRERAPKVIRRSIVASIRALKRSIKEIEQQVREVMSDSPVQQAKAVLLGAVPGVGPQLTATLLAELPELGNLGRRKIASLVGVAPHPHESGKFYGRRRCWGGRATVRTTLYMAALSGVRFNPALRACYQGLLGRGKSRKLALVACMRKLLLILNAILRDSASWNPHHQLDFQHSR

SEQ ID NO: 226144 - protein, 346 aa, unidentified
MMVIGCDYHPSWQQICWLDTLTGETEEKKLEHASGEAEKFYRSLPGPALIGMESTGNCQWFVEMATTAGHEVWIGDAAKIRASEVRQQKHDRGDAALILKLLLEGRFPRIWTPSGEQKDLRQLLLHRYKLVRMRAQVKNELQHLAMNQGVTKKRKLWSKAGEIVLRELPLKPWASRRREDLYKVRKMFNEWIALLDTAVVEAAEKDEKAKLLMTQPGVGPITSLAFVLTMGDVSRFPRGKQVASYLGLIPREYSSGGKQRLGSISKQGNRFMRMLLVEAAQSVVRYDAGFRNEYLHRCHKKAKGVAKVAAARKLAVRLYWMLRTNTAYPEIVRVESSPRVAVVGAS

SEQ ID NO: 226145 - protein, 446 aa, unidentified
MSTLPISPAEPAWAAFAAIDWGSQNHAWSVVPAGGGPVQSGKFENTPEAVELWVAVLRRQFPGGPIAVALEQKRGAVIYMLSKYDHLVLYPVPPAMSASYRHAFAPSGAKNDAGDAALLLDLLRQHRDRLRPIWQDTPDTRLLRFLVEQRRKLVQQKVRVVQQLTDTVPQYFPQLRTWFGALDTPLVAALVSRWPTLRDLQRAHPGTLSRFFTQHHCRNERVMADGFQLIYDAISATNDEVVVEACTRNTTAFISLLKVLGEQITALEKRIAEVTAEHPDAPIFASFPGAGAATVPRLIAAFGTDRNAWQSAADLKRLSGIAPVSISSGKSTYVGIRRACPKFLRQTFHEFAGQSIPFSEWAKLYYQHHLREDKARHHLAVRALAFQWIRILYRCWKDRQPYDERIYLEAQRRRNSPLSGKLAGSTPLAWVSEAGFQKLAKQPSST

SEQ ID NO: 226146 - protein, 344 aa, unidentified
MESYVGLDVSLKRTSICVVDRTGKVLCEGTVNSTPEAIVEFVKSKAAGAVRIGLETGPTSTWLWTEIKALGLPVICIDARHAKAVLKMQINKSDRNDAFGIARIMQCGWYKEVRVKGLDSHAIKAVLVSRALLVKIKRDLENQIRGLLKNLGLVIGQAKMNVFVVRATELIEHRPELVAAVEPLLKVREGVEKQITDLDRKVMRLARNDVQVRRFVTAPGIGPITALCYLATIDDPTRFKRSRSVGAYVGLTSRRYASGEVDWTGRISKCGDPMLRSYLYEAAGVLLTRVAKWSVLKAWGMRIAKRSGLRKAKVAVARKLAVILHRMWVDGTEFKWSSKEEVAT

SEQ ID NO: 226147 - protein, 343 aa, unidentified
MQTITTIGLDIAKSVFQVHGVDAAGQVVIRRQLKRRYVLAFFQKLPACLVGIEACASSHHWSRELQALGHAVRLMPPAYVKPYVKRQKNDATDAEAICEAVARANMRFVPTKTSEQQSGLVLHRTRHLFIRQQTSVINAIRAHLAEFGIVAPVGRKGVEELLHVVADPADNRVPAIARACLAALGAQLRRLKEQILEFDRLIKAWHRSNEMSMGLDEVPGVGPVLATAVVATVADPKSFRSGRNFSAWIGLVPKQHSSGGKNRLGSISKQGDRYLRGLFVAGALAVIRYAKTHGTNHRPWLTTLLTRRPTKVAAIALANKIARMVWAMMAKGERYKEPVALAA

SEQ ID NO: 226148 - protein, 355 aa, unidentified
MNSLGIDVGKKRCRAALKDERGDVIREFFFSNNNEGISALIQSASHYGKCTAVVESTGNMWIRIHDTLEENGIDTILANPYKTKIIAEAKIKSDKLDARILADLLRADLVYESYVPTKKFREKRSLVRHRISLVRNRTILENKVHSLLDKYDYKSDLTDIFGKLGIIWLKTLDVSNIDRLIMNTTLAAIENINIQIDIISKELAKYGWDSDYVKILLSITGIDVFAAMLIATEIVDVRRFCTPWKLVSYAGLAPSTRESSGKTKTGRISKQGSPWLRWILVQCAMTAVRYDQRLKSFYERLKSRKGNAKAIVATAKEILVIIWYMLTRRELYRHMNKDRYEQKLSRIKKIKESAA

SEQ ID NO: 226149 - protein, 395 aa, unidentified
MYRLLVGIDVSKERFSVAGIDSVGKEAFSQAYTMDSRGFEELLKTVRSHCEEDSKVLMAMESTGCYHINLYSFLSSQGIRTLVVNPLLISNYAKLSLRKTKTDKKDAMTIAKFLLDHHKEISQLSISQDNQDLRDLSRERESLSHLISATKVEIKRVLRTTFPELETVGDIYTGMMLRLIQEYPSARLVRAAKLKGIAKLLKEPRRGNKLTYTAEDIYRAAKTSIATVSPGKEIILRGKVATLLHLQERLEEITKLLTELCQSTRMDDLDILQSIKGVGPNTAAPLLAEMGSIENFSSHKKLIAFAGLDPSVTESGQYIGASRLSKRGNRHLRRAIYLMTTSVVSWNTWFKAYFQKRKAEGMAPQKALFATAHKLIRVIFAMLSQRTYFKVKEAN

SEQ ID NO: 226150 - protein, 345 aa, unidentified
MGEVSTIGLDIAKSVFQIHGVDRDGEVVIRKRVSRAKLLEFFGSLPSCLIGIEACPTAHHWSRKLQALGHTVRLMPPSYVKAYLKRSKNDANDAAAICEAVTRPSMRFVPIKSEQQQSGLMLHRSRQLLVRQRTMLSNAIRGHMAELGIISAKGRNGTAELLKIIANTGNSDCIPAAARLSLDVLARQYVAIAAEIGVIEKRIHAWHRSCAESRRLEEIPGVGPIVATALVAEVSDWKAFSSGRNLAAWIGLVPKQHSTGGKERLGGISKQGNRYLRWLLVAGAMAVIRYARQRGTKRLWLVRIMERRPIKVAAVALANKIARMAWAMMVRGEHFQELKLLPARA

SEQ ID NO: 226151 - protein, 342 aa, unidentified
MKFNQLTTNFVAGIDLHKTSIAIHILGKNDILLYQKTIKKNMRRGLKRILQKYKGDITVCVETTYNWYWIADLCLELDVPFEITHAFYAKKKMIGKNKNDRIDAAGLAGMLLHEELPVAYNYPPEMRATRDLLRLRCSLKKMRTGRLQHHSCVEDQYLMSEISLEEAGYNKDTIKDITRNMGVDEQCIDFLTAQIKGLEKHILTRAHVHDKDALARLKKIDGIGDILALTLLYEIHTVKRFGSQQKFSSYCRVVNPQCESAGKRVGTGNKKAGNKYLSWVMQEIVTYSCRYNKRIGEYFKKLERKKGRKHARRILAHKWAIAIYNILKKRIDFDIDKFLKNA

SEQ ID NO: 226152 - protein, 428 aa, unidentified
MEVIHPRCAGVDVSKKDAKVCVRVQGSGRRGTSTTITTWGSTTGEVLALGQHLLGEQVSCGVIESTSDYWKPFYYLLEESLPVMLVNAKAARNVPGRKTDVSDAAWLADLGAHGLIRASFVPPAPIRVLRDLTRARTTITRARTKEIQRLEKLLEDAGIKLSAVASNIIGVSGRAMLEALIAGERDPVVLADLAKLRMRAKIPALTEALRGRFSAHHAFMARLYLDRIDAHAADIARLDGRIEEAIAPFRSVRELLMSIPGWSQIVADVFIAETGADMSVFPTAAHLASWAGVVPGCNESAGRVKSAATRPGNRHLKAALGVAALSAARTKDTYYSARYRRIAGRRQPVSSRKNKSRGSSIAGMIALVAIEHTMLTDAWHMLVNGAFYRDPGSDYYTRHQPGRTKTRAIKQLETLGYKVTLEPLTQVA

SEQ ID NO: 226153 - protein, 329 aa, unidentified
MNNVTTIGIDLAKNSFSVHGVDSAGAVVLRKTVSRARLMGLLIEQPPCVIGLEACSGAHEWARRLQRFGHTVKLMAPRFVAPYRKNGKNDGNDAEAICEAVSRPHMRFIPLKTPEQQAVLCLHRVRQGFIEERTATINRLRGLLAEFGFVLPQSSTAIRHGVGELLQRLPPHAGRALGDLLQHLHALDARVREYERSIAAHAREHRAAQIALQRQGIGPITASAIVASVGDGREFKNGRQFSAWLGLVPRQHSTGGKQRLGHITARGDPYLRTLLVMGARSVLQRAVGKDDPLSRWALAVRARRGYHRACVAVAAKNARVLWAMLAHSA

SEQ ID NO: 226154 - protein, 397 aa, unidentified
MSTVQRVWVGVDVGKAHHWAVAVDHEGRRLLSRKVANDEEAILAMIAAACELAGEVRWAVDISSRLSALLLALLVSHGQQVVYVPGRTVNRMAGAFAGEGKTDAKDARVIADVARMRSGFRLLTTSPEMIHELALLTSCRRDLVSYRVRMINRLRELLVGICPALEREFEYKSRTGLVLLTGFQTPAALRRIGVKRLTDWLVRRKVRSAADIAERAVMAGRAQQTVLPGEARAARLVADLAQQILDLDERVKQLDTEITEVLAGDETAEIIQSMPGMGPLLTAEFIARTGDLSSYRNAGHLAAHAGIAPVPNDSGRRLNNLHRPTHYDRRLCRIFYLSAQTAMSRPGPSQEYYRRKRDEGKSHVQAVLSLARRRVDVLWAMSRDRRRYTAVPPAMAA

SEQ ID NO: 226155 - protein, 404 aa, unidentified
MWYAGIDWANDHHDALVIDEKGHQVGSLRIDHSPSGLSKLNTFLEQVIGSQPKDQMACIIEITHGLLLAALLEAGWPVYPVNPRTVDRRRSASGAKTDTIDAYLLAKTGRADLADLRRLTPDSEKVAELKLLTRDQDSLIQMQTRLVNQLTACLKAYYPVALDLFGKLQQKSTLLFLQTYPTPQAAQAASCEQIQQLLQSCRHPQAKAVASSIVEQVHQPHLQADAVTIRTKSRLTLALVSQLLPLIEQIAHYDKEIDTLFLTHEDHEIFESLPRAGQRLAPRLLAKIGDDRTRYQDASSLQALAGTSPVLFQSGMHAKAHRRLGCIKPLRNALHQFAWQTTQSEPWARDYYQRKRAEGKSHTVAVRALANVWVRIIFAIWFRHLTYETATFEHAQQQHARPAA

SEQ ID NO: 226156 - protein, 345 aa, unidentified
MLIIGCDFHPGFEQVAIFDKSTAEISYRRLQHPGEARAFYASLAEPALVGMEACGYTQWLERMLAELGHELWLGDAAQIRASVVRRQKTDQRDAQHILNLLLEERFPRLWVPTAEQRDVRQLLLHRHHLVRSRTQVKNQLQAMALNQGVQKKRKLWTQAGREQLQKLALPAYTAARRDECLQRLDYLNQQIRQLNEKVEAEAEKRADARLLMTHRGVGPQTALAFVLTMGEVERFANAKRVASYVGLIPSEYSSGGKQRLGRITKQGSPLLRFLLVEAAQTAARYDPTLKRVYARLCLRCSRGQAKVAVARRLATRLYWMLRSGKNYAQLTASGAGKPVSSRGAA

SEQ ID NO: 226157 - protein, 350 aa, unidentified
MGMLCGLDLHRGQITYDALIEETGEIWRGRIWSPDRARFRRWLEVYVAEKANGTPVTFAVEGCTGWRYAVEEISRAGYEAHLAEPAETQAARGRKKRAKTDWSDSRLQRELLARGELPESWIPPTCVLEWRERTRLYKTLADERRMWAQRIHAELFQHGVALPEGEIRSEDTRKWLSSDEVELSEAARQRIATAYRVIDALEAEIVSLKRQLCRFASRQPACRALANAHYGVGPLTAVITWAELGDCQRFSRSMQVVRHSGLDVTVHDSDGRGPGGHLSREGPATLRWALFEAGMSAAKITSPDHDYYQAVKRRHDGKLAAIAVARKLARRCYHTLRAMDPELVYAMPPD

SEQ ID NO: 226158 - protein, 359 aa, unidentified
MNYVGIDYHKKYSHVTAVNEEGQVLQSRRLDNDAMIFQEFFRELGGKSQTVLEASRTWGVLYDLLEDMEEVDSVTLAHPLKVRAIAEARIKTDKIDATTLAQLLRADLIPAAYIPGKETRLSKEMLRQRMFLVRMRTRLKNRMHVLLDRQHVQGPQGTDVFGKKGMKYLKELELTGVDGAILREDLQLLEVINKLIGDAEEETRKRLFEDERVRLLDTIPGLGPILASVIALEIDNIDRFSTAKKLSSYAGLVPSTYSSGGKTYHGRLLPMSNKWLKWALVEASWSAIRTSGYCRSFYDRVKRRKGSHTAAVALARRLAEIVWHVLKERRIYQERLPRIERKPTSLPSTFSSPRDSSIG

SEQ ID NO: 226159 - protein, 350 aa, unidentified
MLHAGLDLSRKRLDVCLLSEHGELVEEFAVPPDADGLRGLVRHVGDHGAPVRGVIESMTGARFVHDTLEHLGWEVLIADAQKVKGLAPLACKTDKIDARVLAVLSERDLVPAIWLPDPRVRAEREQARFRLHLVKHKSMLKHRIHSTMLSFGHPCPVSDLFGVEGRELLERLQIPDPWRQTVDASLQLIDDLERQIAQINRDLKASGAEHPYVPLLLTVPGIGWVLAFTIASEIGDITRFPSAKKLCGYTGLCPRVNQSGEKDRRGPLTKQGPKYLRWAMLESTMHALRHPAYAERYQRNKKRLGRQRGARVAQIDIARKLTEAIWHMLTNNQPFAPTPASGGAAFRLAA

SEQ ID NO: 226160 - protein, 403 aa, unidentified
MNAVGIDVSKGKSTVIALAPGGKLLARPFEVLHTKSGIKELISFVHTLGADTRIVMEHTGRYYEPLLQWLAASDLFVCAVNPKLIKDFGNNTLRKVKTDKADAKKIARYALDNWVDLRQHTGMDTTRTQLKTLNRQFAFCMKQKTACKNNLIALIDQVYPGANAYFESPARADGSQKWVDYVSTFWHVDYVCAMRLSTFTERYRKWCHRHGYNFQPDKPALLMEKAKDLIAMLPMDKTTKMLVQTSIAQLNVLSKTVEALRTQMIALAEQLPEYPVVIDMNGVGPTLASQLIAEIGDITRFPRRGSLTAFAGVDPGAKQSGTMQVKRNKTSKAGSPHLRRALFQIVSGLLMRSPDDPVYNFMDKKRSEGKPYYVYMTAGANKFLRIYYGRVREYLASLPKEQE

SEQ ID NO: 226161 - protein, 436 aa, unidentified
MKKIRKNAAGIDIGAKKVFVYVEDQKVESFFTFTEDFEKLCSYLFKHKVKTVAMEATGVYWYVLYEILEEAGIDVWLVDGGQTKQVPGRKTDVKDCQWIQELHSHGLLRRCFVVKKDIKELRSYHRLREDHIRSAATRVRHMQKALTEMNIRLTEVLSQVHGASGTRMIEAILDGERDRKVLLNMCDRRIVKNKKDDVLKALKGKYTGSGLFALKHAYEGYNFFQKLIYHCDKEIEKIIHRMGNGKKDEDLPVKRKRIRHNKPNIENMGANLLEIFQGKDAATISGINDYSWIQLLSETGTDLSKWPSEKHFTSWLGLSPGQHWSGKMRRNRRKKGNPKTGQIFRQIAQSILNSKKIALGAFGRKLRARKGPGIAIKAVARKLAEQYWRLMVKGVDFVEYGIKNYEEQIIARKRKSLEKLALELNMDITNSQHLTL

SEQ ID NO: 226162 - protein, 460 aa, unidentified
MAKKNTTSSKSKSKARKNVLERINPNAAGVDIGANFHLVAIPEDRAEENIKKFGPFSSDLHRLADWLTEHQIQTVAMESTGVYWIPVFQILEQRGFEVKLVNAAHVKNLPGRKSDVSDCQWIQQLHTFGLLNGSFRPKDEVCVLRTFLRLRDTLVKDCSSHVLRMQKALTEMNVQIHRVLSDITGYTGMAIIRAILAGERDGLKLAQMKHPQVKASTERIVKALEGDYRTEHLFALQTAVALYDAYQLKITECENQIEQQLEHFETKLDFEKILEQSGALKARSAKVRLGLQRQAYLASVCGVDLTRLPGLSTLAVEVIISETGLNMDCWKSERHFCSWLKVCPDNRISGGKVLSSRSRKTKNRAAGMFRLAAQGAMQSKTAVGAFIHRLRARLGAPTAINAGANKLARLFYRMLKFGQDYLDRGTEFYEQRQRDQQLQYLQKKAAQLGLHVVALPETPK

SEQ ID NO: 226163 - protein, 319 aa, unidentified
MNCIGVDVGKQELVTYDGVEHRTFPNDRSLDEFSRYAQRRKDLLVVYEPTSTYSRRLEAFCRTDRIVCCPLNPRVIPHLRQVSCRRSKTDETDAELLYRYGIERGEKEAGLLFHDEVVQSVSAHLAYYRVIQKARVACQGLMEALKEDPAASDELIAELEGEIAVMKEKEARHLEEAQELIAADEAGTCQLEALLTIPGIGPITAVTLIVMFRKYVNASRRQMVALAGLDPVLFQSGTSVHKKSRISKRGNREVRKRLYEATLSAARYNPSIKGIYQRLKEEGKPDKVARIAAARKLLLIAYAVYKSGKRFRLLNECQS

SEQ ID NO: 226164 - protein, 397 aa, unidentified
MIFRDRIGEWNPVSLTGAVQDRQEADVMKMSIGVDLHKTQFTICCLSEDRKVQRTEVYVTTDQGYKTFMTRMSHWEQKGYDITAAVESTGNTRYFRNRLVEAGIEVRIVNTSRFKIVTESVKKTDKHDARTLAEFLEKDMLPESVICSQASEDIRRVLKSRSVLIKALVSLKNQVHGLLLGYGIETRKGQLQSKKERQRILIGLEDHRSYGNAARAVKPLLSTIDQIASEVKEIEGVLSDLVSHDEDVALLQSIPGVGLITAASIRGYTDDINRYDSAKKYAAYAGLVPWVQNSNTTVHHGHITRRGPKELRTAFVQVVMGMVRLKSKTDEYRIMETYQTMKHNKGTGKSIIATARKISTIVYALLKHRQSFDPLKMVSAKKHTEVKRTARQYVVAA

SEQ ID NO: 226165 - protein, 326 aa, unidentified
MTVIVGIDIAKDKFDVCLLNEASKAQQGTFANSKQGINQLHQWLKKHGAKQAQVCMEATGIYGDLVAETLHSRKYEVSVVNPARIKAYAQSQMRRNKTDALDAALIADFCRTQQPTLWTPPPPEWKELRVLMRHLDDLKQEKQRASNRLDVQDSAQAVIQHLQEQVRLLEEQIQHTLRLIHDHIDRYPELKRQRDLLDSIPGSGDLTASYLIAELGDISRFQDVGEVVAFVGLNPCQHQSGKRKATHGISRMGRAALRAALYMPAVVAKRCNPRLEAWANQLSQRGLTGKQLIVALMRKLIHLAYGILKSGRAFDPHFGDERFATP

SEQ ID NO: 226166 - protein, 431 aa, unidentified
MGKRKYRAVQVKDVLVSQLIETLGSGRCVVAIDVAKEDFFAAVMDESEKVLVTVKWTHPAQSPEFMSLVAGLAVGRTLDVVMEPSGVYGDALRSRMCADGYRVFRVSPKRSHDMAEAYDGVPSWHDAKSAAIIGKMHLDGASEPWPVASDHERRLSAALRVLEVHYKEVQRNRNRIEGYLARHWPEVTHIIDADSATLLELLIEYGGPSAVAADADGARSLMRRVGGHFLAQSKIDGVVDSAVRSFGMEQIDGEVEMVKAVAAECRRQQRASNKARRRVEELSLSEGASRHMAPVVGKTTAAVLTASVGEATKYKTAAAYEKSMGLNLKEKSSGKHKGALRITKRGPGVARMFLYMAALRLIRSDTVVRAWYAKKVKRDGGKTKNKAVIAVMRKLTRALWHVARGAEFDSTRLFDVRRLNLQSTTVAEALR

SEQ ID NO: 226167 - protein, 426 aa, unidentified
MRSVALDVHRDFCEVAIKDESGLRLAGRVKTSPRELELFAGSLAPDDQVALEATGAALQIARVLEPHVGRVLIANTRKLRAIAESKVKTDKVDAATLCELLAAGFLPEVWSPDEWTRALRRRLQRRAKLVRSRTRAKNECHAVLARNLKGRPPMSDVFGKQGRRWLAALQLPADERETVECCLREVDFLDAEVGLIERELARQALSSEAIRRLMTVPGVSLVSAAAFVAVAGDVHRFSSPKQLVSYVGLDPRVRQSGEAPARHGRISKQGSAEARHMLCEAAWVAVRTPGPLRAFHERVRARRGAQIALVATARKLCVLFWHLLTREQDYAFGRPSLTRRKLRALELKTEEGWRHGRYSGPRVHETKKQREHEREFAEQIETAYRRFVQDWRPKPTSGAGATRGRASSKPTSGKQRGRASVPNSAL

SEQ ID NO: 226168 - protein, 345 aa, unidentified
MKKIIKQVVGVDVAQKELVVCMGRLYADLSIELIAHKVVRNQAKGFASLLEWVKKLKDPLVELRYVMEATGVYHESFAYFLHQQGQPLSIVLPNKISNYFRTLEVKTITDKTASEAIARFGLERKLDDWQPPKPIFKKLRQLTRERDQLVQSRTVAKNQLHAERSQAEPSKSSITRLEKQIALFNKQAQEVQSEIKELVSQEAELKKSVTLLCTICGVQTLTAATVLAETNGFELIRNKRQLTSYAGLDVKEKQSGTSVKGKAQISKRGNKYLRKCLHMPALSAIRHDPKYKTLYARLVSKHGIKMKAAVAVQRKLLEMIYTIFKTQIPYEKNYLKKLESSNAAP

SEQ ID NO: 226169 - protein, 420 aa, unidentified
MTQKNSSKIISVVHPICCGLDVHKDMVSACIIITEPDGGETFIVQEFSTFTDDLFKLKKWLLNHGCPIVAMESTSVYWRPVHNVLEDTLQVILVNARHVKNVPGRKTDISDSMWLASLLRIGVLKASFIPEKHIRQIRELVTLRKSYIQTLADYKRRVHKLFETANIKISSVVSDLFGNTGRNLMNKLIDTDIEIKIEHVEACAEGSLKRKVPELFRSIQGFFEAHHRFQLQRMMQTINHLEGEIEAIAKRLDDIMLTHQEMIDQLDQVPGIDKKTAQSIIGHIGDTLTAFRSDKALASWGGLCPGNNESAGKRKSGRSPVRNHPFKELMIEIAWAAVRTKGSYYKDKYHRLKTRRGAKRAVVAIAHRITKAVYHIIKHGKSFVDLGEAYLMSKSKEKRIKALTLKARYLGFNLVPLEAN

SEQ ID NO: 226170 - protein, 420 aa, unidentified
MKTWTEITHYAGFDWARDHHDIVIVDPQGNITTEFRIAHTLAGWQQFREKIQGYGAVAVAIETSQGAAIDQLLQSNVTVYPVHPLSAKRYRERKAPSGNKTDHLDAWALADALRVDGQGWSMLQPLDPLTQTLRLFCRDEMVLIEHRTALVNQLQQALSEYYPAALEAFDDWTRPSCWEFIIHFPTPHQLVKAGKRRREQFLHVHRLWRPETVNKRLEIFARAEQFCGSEPVTAAKSFLALSLAKLLCTLEHQLQEYRKQIQALFEQHPDHDLFGSLPGAADKLAPRLLGEIGGDPDRFESVAVLQMLAGTAPVSFQSGQIHKVRIRYQCQKVLRYVVHLWANSCRKSCSWAQVYYRQKRAEGKSHACALRCLGQRLLKILHAMIRTRTRYNAELHARNQQAHGSWVLKLVTKQAPLGSE

SEQ ID NO: 226171 - protein, 434 aa, unidentified
MKVMYERVAGIDVHKKMIKVAVRSPGARPWTRKTEVLTFSTFYGVLRQMARDLRERGVTHVVMEASGIYTEPVYYALLEEDFTEVLVVNPAHVKGVKGHKTDARDSARLAELLECGLLQGSYIPPPELKEVRDLTRLRTKKVQARTSDIQRLGKTLESAGIKLGSVASEITGKGPTAMIEALIDGERRGAVMADLAIGRARAKMADLALALEGRFTDHHAMMCRLHLDAIALHDAGIAGLDARIAAAAAPWRRETGLLKTIPGFGDIAAWTWIAEIGPAPHEWFPSGGKLASWAGLAPGNYVSAGKRGYGRTSEAGTYIKPALVQAAWSAVKSRGRIQARYNRLVRRMGGEKNPAAKKKAIVAIAHTLLKIAYSVLRTGTPYQEPGADFYSRRRQPAYRQSWLEKQLQELYPGCTVTVTVTEGPPPPGHVPEAV

SEQ ID NO: 226172 - protein, 414 aa, unidentified
MLFVGDDWAEDHHDVELMDAAGRRLAAARLPEGVAGITRLHEMIGAQLGEDAGAGEDAGAGEVAIGIETDRGPWVSALVAAGYTVYAVNPLQAARYRERHGVSGAKSDKADAHTLADMVRTDAHQLRPVAADSPQAEAIKVVARAHKTLIWERTRHTLRLRYVLREYFPAALEAFDDLAAPDTLELLAKAPDPASAAKLNRSQIRAALKHARRRDIDMKTTRIQAALRSQQLGRAPVITAAYAATTRSIAAVLATFTEQINTLRGQVETHFGRHPDAEIILSQPGTGVLLGARVLAEFGDAPGRYADAKARKNYAGTSPITRQSGKRKITHARFVHNDRLVDALMSQAQSALLASPGARAYYDKQRARGLDHHAALRQLANRLVGILHGCLKTRTLYDEATAWSHHNQDQRRAA

SEQ ID NO: 226173 - protein, 418 aa, unidentified
MIPQENRIWIGVDWGDRAHTVCVLDDAGAVLLKKVVPHSPAGLRDMTGAVSALGPVGGAAIEDAQGLAGQALLAEGWPVYCINPKLSYAWRKAWSVSEAKTDGRDAHMLADGLRQQHARLRPVPAVPAAIRGLALLCEDERKLIAQRTALVQQLQAALKRYFPEALAYFDNWTSPSAWDFVLTFPTPESLARATTRKLMGFFKTHRLAPTPARQAQIKDRARALDWHVAPEVVEVKARLAQTTAKLLRTLQSQLDEYRKVIETAAAAQPQTALVASLPGAGAKLAPRLLAHILPILDQCASADSLMMLGGVSPVLFESGKHKRVRMRHACQKGFRATLHLFAAQSACWCAWARAFYDLARQRGQSHALALRNLARKWLKILFRMLKTNTPYDEELYLKQLHLKNPALTKYMDSAKAGG

SEQ ID NO: 226174 - protein, 267 aa, unidentified
MTITTIGIDLAKNVFAVHGVDQNGKTVLVKSRVTRAALPGLIAGLPPCVIGMEACFGAHYWARLFRQYGHEPRLMAAKFVSPYRMAGKSGKNDAADAQAICEAVRRPHMRFVPVKDESQQAMQCLHRTRQGFIEEKTATYNRLRGLISEFGVIAPQSTDALRHMVSAQKNSLPLQVQQCVDDLLEHVDRIEANITEYDRILSRIAKTDHRSQRLMKLKGVGPTTACALVACIGNAHDFKNGRQLAAWLGLTPSQYSSGGKSKLGKSR

SEQ ID NO: 226175 - protein, 363 aa, unidentified
MLILGLDLGQSKSAWAQMDTATNEYKEGWVTMEDAALLRLLERCHPQQLVIESGPLAARVHDLARAHGIAVLVADTTAEAWCWRNVKRKTDRDDALKLVRLAALGQINPVHMPAPAVRQLRALLEYRRAMTAEQTRCKNRIRATLLTVGRRLPAGRTGLRRRLAVASWSAAARTTLRAELRPLAECAVEELWRGVAYTELQHLMDVEARLAEVSEKLAALAKHDPAVARLDAMPGVGPLTAQVLVAVLDQPRRFRTRRQVAAYGGLVPRRFQSGQMDRSGRISKRGSPLLRWALNQAAWAAVRGSSEVRAFYLRMGGSSKKRRKQAIVAVMRKLLVIGWALLRDGTRYQADRLRGRRQPAQAA

SEQ ID NO: 226176 - protein, 450 aa, unidentified
MDLFLYFDSFDWYEVTQTTAFRLLLVISLLTLDVSIHVITQPDSLWKTTAPNFFKEVSLMPLFFVGIDISKYKHDCCILSAADQTVVSRFVFPNNADGFHELLSRLNSLSTPEDIRIGFESTAHYALNLELFLEKAQHSFMEVNPVLISKYKESTTLRRTKTDRVDCESIARWLMTVEYKPHSRGFYHSYSLKSLTRLRDRLVRQRSFYLVKLTNILDLTFPEFKPFFGERFSKTALYLLETYGSAERMARMNSSSYEKLCSLSRGKFSPQQFLKLKQLAVNTVGVSNEILEAELTCLLSLYKSLEKQISSMEAQILTLINDIHPCYMSIPGIGPISAAVIYAEYGDISNFSSPAQMLAYAGLEPGVNDSGTESHGGRMVKRGSSQLRYALMNCALPLIRFDMTFAAYYAKKRAEGKPHRVALSHVVKKLVRVIFALERQRTAFNVQALR

SEQ ID NO: 226177 - protein, 352 aa, unidentified
MPRTSSVHAVTTIGMDMGKNTLHMIGLDSRGAIVLREKVSRGRITSRLANLPSCLIGIEAGLATHYVARELAALGHDVKQVPPTYAKPFRQAHKNDFRDAYSVAEAVQRPTTRFVPAKTDEQLDLQALHRVRSRLVSERTAVINQIRGFLLERGIIVRQGLRFLRQALPDILAKRTDVLSPRMVRIVADLASDWRQLDERIEPVTDEIETLAKSDDGCRRVMTVPGIGPIISSAMVAAIGNGAAFARGRDFSAWIGLVPKQMSTGDRTILGRITKRGNGYLRTLFVQAAQVILLRPASWPKHSFGVWLARAAQRLHRNVLAAALANKLARIAWTVLAQERSYEARITKAAAQ

SEQ ID NO: 226178 - protein, 374 aa, unidentified
MASPFDVIHNGTDLQKLVDLIKALPGESKVVMEYTGTYFEPIAQYLHNNDIFVSVVNALLIHDYGGNSLRKVKTDKKDALKLASYALDRWIVLEEFVPAEEQRKTLKLLNRQYNQTIKIQTMMKNSLISLIDSVFPGLDKLFKSPDRESDGHEKWIDFLKSFPHRDCVAKLYLSVFKTKYKSWCSKNKYNYLESKAEEIHAHAKSVIAILPLNDSVKLLITQAVTQLNTILETVSAIRKEMDRLASSLPEYDTVMSMYGVGKVYGPQLMAEIGDTRRFKNRRAITAYAGLDAPAYQSGQLDVSSRHISKRGSSALSKVLFQITEIFILNKPDDEPIYQFIDKKRSEGKHYYSYRIAAANKFLRIYFAKVNQVLN

SEQ ID NO: 226179 - protein, 370 aa, unidentified
MAKRSMFVGMDVHQESIDVSLAEEGRDGEVRHYGVIPGDLEAVAKVVRALRAPSRRLRFVYEAGPCGFGIHRYLTAPGEECVVVNPSSMPKRSGDRIKTDRRDGDALARLHRAGELTAIYIPTPDDEALRDLVRAREDAVGLSTQAKHRLKAFLLRQGRRYPGRAGWTRPYRRWLADLSFPLAPQHIALQEYRDTIDETERRVERMTDQLRQLTPAWRWAPVVDALRALRGVSFVTAVGLVTEIGDIRRFTHPRELMAYLGLGPSEYSSGPSVRRGGITKAGNPPARRLLAEAAWAYQSVPRIGRQMLYRQEAVSKTVCDIAWKAQLRLTSRFRKLVARGKAKPKVATAIARELTGFVWAIAREVPPPPA

SEQ ID NO: 226180 - protein, 413 aa, unidentified
MRNLLEVCCGLDVHKEILVACMLKGGIEEEPEPIIKEFSTLLSGLDEFKSWLIEHNCHDVAMESTGVYWFPIYNVLESIFYEDGPMNIIVANPHHMKNVPGKKTDIKDSQWIATLLRAGLLAPSYIPPKEIRELRDWTRYRDVLIKELVGHKNRIEKHLQQCDSKLSSILSDIFGMSGYELIRKLCEKGKLTALDVKGCLHGTLRAKSDEVQQAVAGRLSAHDRLFLTNLVKVMEHCRKEIEEAEWHITVYAQKYEPALQLLETIPALQRRASTIIVSELGVDFSMFPTAGHLCKWAGLCPGDNESAKKKKTMRITKGNPRIKSVMVQCAWAATRCKNFFLRDWFYRLRARRGTKKALIAVARKLLAMVWHILTTGEIYEETRYEKTKKNQEDRRKQRLKTEAAKLGFKLVPA

SEQ ID NO: 226181 - protein, 430 aa, unidentified
MKSNTQNAKIEAITEKTLVLGIDVGSETHYARAFDYRGIEYSKKPFKFSNTEAGFVTFKEWILDLKERHEKDKVVPGMEPTGHYWFNLGKFLQDNEMKPVLVNPHHVKKSKELDDNNPTKNDRKDPKVIAGLVREGRYMIPYLPDGVYADLRTASNIRFQLQAELTRIQNRISRWFNIYFPEYKTVYGKPDAKSGILILKAAPLPEDILTLGIDGVNQIWRDAKLRAVGKARAKTLIEAAEHSVGSKEGAVAARMEIRMLLEDYESRNTRLQEVMVLIEELVRKIPMAEKLLEIKGVGIRTVSGFLAEVGDISRFNNPKELQKLAGLALVENSSGKHKGETTISRRGRKRLRYLLFEVAMSLVAKNPEFRELHNYYTTRRLNPLKKMQSLMAIAAKLIRVFYAMLTKGVDYDPKKMVNDIKRPAVYLQTA

SEQ ID NO: 226182 - protein, 342 aa, unidentified
MKTITTIGIDLAKNSFSVYGVNAQGKPVLQRTLTRVGVVRFFANLPKCLVGMEACASSEYWARTIQSMGHDVRRIHPRYVKAYLLGAKNDANDAAAICEAVQRPNMRFVPHKSPEQTDIQCVHRIRQGFVRSRTALVNQIRGLLGEYGIIMRQGVSTVRKRLPELLADEANELSPIMRQNLNSLYESLCFFDNQILSQEKILRAIARENEACKRLMQVPGIGLLTATILLSVAGVASHFKNGREFAAYLGMTPRQNSTGGKTKLFGISKRGDSYIRTLLVHGARAVLYSLITGRTPQARQNTWLAELVARRGTNRASVALANKTARIAWSMLAQGTEYKLAA

SEQ ID NO: 226183 - protein, 357 aa, unidentified
MRDRITYVGLDVHKDGIVVAIAEGGRRGEVREYGRIANTPAALELRFCYEAGPCGYGIQRQLSALGHECTVVAPSLIPKRAGDRVKTDRRDAASLAKLHRAGELTAVWVPDPGHEAMRDLVRTRLDAVRALRRARQQLSGFLLRQGCHYGRPAWTKLHRRWLAGLKFEQAVHHIVLEDYIAAVEAAEARRDRLTAQIEAMLPDWTLAPVVAALQTMRGMALVNAATLIAELGDLSRFGNPRQLMAYLGLVPSEHSSGASIKRGGLTKAGNSAARRLLIEAAWTYRFPARVSRELRLRQEEQPRVIREIAWKAQLRLCARYRKLARSGKPPNVVTAAIARELAGFIWAIARRVPPAAG

SEQ ID NO: 226184 - protein, 371 aa, unidentified
MKTGSKLSEDEIQLYNAFVASKKAQPVAVDLAARVFQVCYIDKDTGRLYNRKLSRADFFKFITEQKDKVIWGFEACGACNFLARKVAEHGHDSKIMPAASIKSFLGIDKSDKIDAMGIFRALITPTIREIKPRSVGNQMLLWLFTAREQLNKQMVQTINVAHAILYEFGTVADKAYTKNVKVLKDGFAEMRDKYRQLPEYLHIELTLNAVEEQLDALSKKLEQIDDRLETIGKTDSVCRALCSIPGIGPKTAVAFVAYAGDISRFPSSRHFCSFIGVTPRITGTGGKIITIGLRKSGIKTLKRMLYMCAFSYFGNSVRRGVMSSWLKSRLNRKGYSKRKIICAIMNRLCRIAYSVMKNGKTFEPGRCSMIA

SEQ ID NO: 226185 - protein, 423 aa, unidentified
MGYFIGLDVSDASTNVCILDKTGVIIKKFMTATDPTSLDSVFHQLNMPIDKIGLETGPKSNWIVRELRKKGWTVVLQDSFKMAKLIETKVNKTDDNDAHLIAETTLAGSLIPGFLNMGVHLKSPESEDIRTLIRTRQAILRQNIDIYNRVRGILKAYGKAIPVANPGAFSRVVSKAIEGMSFEVQLSLSSLIQPYDANIKLIDAMDKHLSILADRDETVQRLKTIPEVGNITALYLRTTIDDPLRFTDSRSVGAYFGLSPLQYSSGEKQQQGKISKRGDEIARSLLIGAANRILRPSAKPNALKTKGQELMKRCGKGKATVAIARKLAIIIHRIMVNKKTYIEKVQYLPKNKKDPIKLTIEEIQRLASLAEKTGYVEFRSAQHIKKLTTKFDSFNQSGSVNTNKLSRRFVNKHKRHKKESVCC

SEQ ID NO: 226186 - protein, 424 aa, unidentified
MELLHPHCAGLDLHKETVVACVRHMADGKVTTDVKSFQTTTHELMELSDWLSSQGVTHIAMEATGVYWKPVWHILSDGEFALILANAAHVRNVPGRKTGVPGDRSSSLGWRTDVNDAVWLADLMAHGLIRASFVPDEPTQQMRDLLRTRKQFVRERSSHTQRIQKTLEDANIKLDSVITDIVGLSGRRMIEALIGGETDPEALAALAHGRIRATKAELEAALRGRVTAHHRFMLRIHLNHLDALNTTIADIDKEVDGNVEPFRVAIEMLTTIPGVSSLAAEVMVSEIGIDMSRFKTEGHLISWAGLCPKNDESAGKRRSNRMKKGAPWLKTTLIQCAWAASRTKASYLQAQYLRIRSRRGPKKAIGAVAASILTAAYHMLKDGTLYQDLGASHFDHRDKGKQALRLVNRLQSLGFTVQITSMAA

SEQ ID NO: 226187 - protein, 394 aa, unidentified
MQEVWNVPATTAAILELGDRLVCQGVTRVVMEATGTYWKPYFFLLEARGLDCWLVNARDVKNVPGRPKTDKLDAVWLAKLTERGMLRPSFVPPKPVRQLRDLTRLRTVLNQERARHKQRVEKVLEDAQIKLTSVITDLFGVSGRLMLAALIAGEHNPHTLADLARGNLVRKKTALAEALNGKFEDHHGFLCQTLLDSIDHLTAQIARLTEQITTVVRDLPGPEGTSALRPGPSLVERLDAIPGVGITTAHVLLAELGPDMGVFPTADHLASWAKLTPRTTQSGAKRGASPTGRGNPWLKGALGEAATAASRTDTFLGARYRRIVKRRGRKKALVAVARSILVIAWHLINDPDTEYSDLGSDYHQRLIDPNRRTRDLVRQLKALGHDVALTPATA

SEQ ID NO: 226188 - protein, 391 aa, unidentified
MRFVGIDVGAERHYLAIVDETGAVLQKPYAVSEEAAGYRQLRELLGQPEDCLVAMEATGHYWRNVFTFLVAEGFSIALLNPLRARRFAEEDLARTKTDAIDALGIARFAAQKRPVSTASPEPAVEHLRELVRMRERTVLQLGDRVRHLHQAIDLTFPEFTRYVRGLDTELATAILSRYPTATALRRVSPKKLAMVCFDGRRRIGAILALAIIAAAKVSVAQHHDDPYKLQVRYACEDIVTLRQRARDLEREIEQKLDAHEVGKLLTTIQGIGPLTAACIIGETGDPARFRSAAALASYVGVVPRLHQSGKRKFSGRVGIPLGNARLRRALWMPVLVAIRINPWLGAYYRRLRAAGKRPKVAMIAAMHKLLTAIYSVAKNRRPFVARLSVDL

SEQ ID NO: 226189 - protein, 470 aa, unidentified
MSKGSGMTRGDRRRNARRERLRAVLPRDGAVIGIDLAEDKQAIAVIDHDVRVLARKTVRVKAFRLGEALDWAVGQARAKGFSLVTVACEPTGPRWLQVQRLCAERGLPLVCIQPLVSHIAREQQDYTTHKTDEADCVLIARLAVELHCYLPEELDETWAHLRHLGRRRAQLITSATASAQRIRDFLSVAWPTVTETCAQPLESVTWLAALQVVTSRCGADPGRLAAMGEEAFTALVRGAVPGWGGQKGWGTICRRIFAALTETEGVVVSSRRGLLRRCADELGDLQRTRAQRRAVEADMVAVLEELGLSRLADIPALTAVGAAAILAETGDPRRYDSSSSVVKHAGLSPSDNASGAFYGEAHISRRGRPGLRLTVWRAVWPMLRFNPVMAAKYQAMTSAADDAAQAAASQADAGSRQVSAAAAAARARRARARVACAASLLRWIYSMVAHDTSWDPDVASGAASCPAEAA

SEQ ID NO: 226190 - protein, 347 aa, unidentified
MLYVGLDLSRKRLDWHALLAEGERFDAGACPPDSDGLAHLVHRVGAVQRPVLAAIESMSGARFVHDQLELAGWDVRIADAQRVKGLAPLACKTDRIDAWVLAELARRELVPEVWLPDPAVRAERERARFRLFLVHKRTSLKNRVHALLFQHGLQAPVDDLFGAGGRRFLARTPLPEPWRSTLTASLHLIDTLEEQIAALECELRRLGAEHRYLPLLLSCPGVGWVLGSTIAAEIGDIRRFSSAGKLVSYTGLCPRVRQSGEVDRRGALSKHGPPYLRWALIEAAHNAIRSYPAYRARAERTRARLGPKRGTAIAAITVARSLAEAIWWMLTRNEPFAPAGASVPLTA

SEQ ID NO: 226191 - protein, 333 aa, unidentified
MKDLSTFQHFVGCDVSKDTLDFAIHQRGRDSRTFEHIRVQNSPDGFRAMRKWLRSFKIAVRDAVIAMEHTGSYSAALAEWCFKKGVTFVLLHPLDVKNYGARGRNKTDKDDSQFIADYAYTMREKLEPSEPESPVIKRLRQLRNERQMAVRSRTAYINLSKALPDEANKKRVGKIIVMLEAQVRLVEAEIKKVVESDEAVCRNYRLLVTIPGIGLVNAITAIVATGNFTRFQTARQYAKFCCVSPLARQSGTSVNQGDHVSKAGHNEIKATLTEGARSAIRHDRQLRAYYERKRAQGKSHGCVLNAVKFKLICRMFAVVTRQAPYVDTDKYLS

SEQ ID NO: 226192 - protein, 318 aa, unidentified
MVTGIDCSKDYFDVVLLDGNRKVFEGRFANNPKGFQELLPYIQHSHVVMEHTGPYYFSLACFLCESHVRVSVVNPLIIRRFSQTKMNRAKTDRKDALTIAEYGTMYQPPLWSVPSEKIQEIRQLETFLKGVVKRKQVLMNQFHAFEHGGNFIGYIRERMESQIEGYDQEIQQIEAKIQALIQEAFPDLHRNLTSIPGIGPKSSVLMIVTTNGFQDFESHKQVISYFGLAPRIYESGSSVRGKASICKMGMSSVRAVLYMAARAARLHNKSCKELYERLRTAGKAHRVAMIAVVNKLIKQAFAIAKSGEVYRVEKGLAE

SEQ ID NO: 226193 - protein, 365 aa, unidentified
MWEAPVKRQRMSDGLDVHARSVLGCALDGDTGEVFQRRLCPDHREIVGWLGELPGPVAVSYEAGPTGFGLARALAAAGITCEVAAPSKLIRPAGDRVKTDARDAAHLARVLHLGQVTAVTIPSASQEAARDLVRARDDCRGDLMTARHRVSKLLLRQGIVYSGGRAWTGDHERWLRAQRFDNPALQLSYEAAFDAMLACVDRRRRLDSAITAMAADSEFTPVVHRLGCIRGVATLTAFGLAVEIGDWHRLTGRTIGAYVGLVPSEYSSGDTRAQGGVTKTGNGHVRRLLVEAAWHHRSRYRPGAELRRRWDLASPAARARGQAANRRLHNRWTGFDARQKRPVIANVAIARELAGWCWSLAVMPD

SEQ ID NO: 226194 - protein, 339 aa, unidentified
MKLYGGIDLHSNNSYIVLMDSGGTVVQRSRVGNEMGLVLRSLAPNREQIDSLAVESTYNWYWLVDGLKAAGYAVKLANPSAMQQYQGLKYSDDRSDARWLAEMLRLGILPTGYIYPEAQRPLRDLLRQRSFLVRQCTSQLLHTGNILSRNQGRKTSRQQMRQMTVADAQQLFPDRERTLAVESSLRVIEVLEQQIASIEKQVLGRIKPEAGFQNLQTVYGIGPILAMTIWLETGDITRFHQVGDYASYCRCVASTRISNAKKKGENNSHNGNPYLAWAYVEAATYAARFYQQASRFVERKTAQVNRTLAIKALAHKLARACYYVLRDGVVFEPTRLLGS

SEQ ID NO: 226195 - protein, 333 aa, unidentified
MQYPTIGIDTAKDVFHIVLADPAGRPVKKVKLKRNKLAAFMATQPASKVFLESCAGAHHWARKFAGQGHRVEQIAPQFVKRYRDGDKNDFNDGQACIEAGLRPTVRSVGTKSLEQQELQSLQRARTLALGQRNALGNQLRAMLTEFGIVVARSIGALRRRIPEILEDGDNELTDGMRRLVAEEFERWKGLAERVEELKGRIERGSRSDAKMKRLQKELDGVGPLSAAALWTAVANPKAFARGRQFAAFAGLVPRQHTTGDRPRLLGIRKGGQNELRALLIHGARAAIRHLGDKTDPKSMWLRALVERRGKNRAAVALANKNARQAWAILCQAA

SEQ ID NO: 226196 - protein, 395 aa, unidentified
MFFLGIDIGKNKHVASVLKDDGKAALKAFSFANTTDGGNSLIVKLESIGANKGNLIVGLEATGHYWLSLYSFLRDRGFHQHVINPIQTDGWRKGVEIRKHKTDKIDSVLIADLIRYGNFIETNLPDESTLSLKNLTRFRTYLVNSISDLKRKIICVLDQVFPEYQNIFSDIFGTTSKEILLRYSSPAELEDLSVDVLASLLSELSRKQIGVEKANELTNAAKSSFGIRFCRDSFSFQLRLMLEQIKYIESQIKETEAEINKIMGKVSSQITTIPGIGEILGAVILGEIGDINKFDNQRKLVAFAGIDATVKQSGEFESTNNKMSKRGSSYLRRALYQAALVACVGRKPDPVLSKFYRKKIAEGKHHNVVIGAVMRKMCNIIYSVLTNDRPYEVRE

SEQ ID NO: 226197 - protein, 401 aa, unidentified
MGGVIIGMDPHKASATIEVLDGRERVLGGGRYATDRDGYRAMRDAVARWPERIWAVEGSAGIGRHLAQRLIADGEAVVDVPAKLSARVRVFSTGQGRKTDVTDAHSIALVAARTLDLAAVAGDGAVAALRLLADRHDELAAHRVQTVTRLHRLLLELVPGGGPVFLSALQAKALLATVRPRDVAGRTRRAMAAELLADLVAADRRLKASEKRLREAVTATGSQLMGLYGLGPVGSARLLADIGDIARFPTRARFASWNGTAPIDASSGQQVRHRLSRAGNRRINRVLHIMAIVQIRHDTEGRACYRRTLAAGKTPTEALRCLKRRLSDVVYRQLAADMLQAGHPFPDTQHEADPGGHVGAALQSSAAGLNPIAGTSDQSLPGPATSHATPARRLRRTPSLT

SEQ ID NO: 226198 - protein, 319 aa, unidentified
MGKVIGIDLGDRKSHYCVLNEDGVVIEEGSVQTTPAAFSKHFVDVESSLIALEVCGHSRWTSRVLRECGHEVVVANPVRLKLIHKSSRKSDRVDACALARLVRVDPQLLAPVQHRSEEDQNTLAILRARDLMVRTRAKLVNCVRGMVKSTGARLPVCSTTSFAGYARQATPAELRLAVDPLLEQIQSITNLIKRYNRKIANIAATKYPATQTLQQIRGVGAVTALGFILTLGNSVRFVRSRDAGAYLGLRPRRYQSGESNPQLGISKEGDGFMRRYLVTAAQYILGPFGPDTDLRRWGESLIARGGRGAKNRAVVAVAR

SEQ ID NO: 226199 - protein, 426 aa, unidentified
MSESEVPGKELQFSALVGIDWADQKHAWCLQAADTTQRENGEVEHTPEAIEAWVGQLCRRFNNRPIAVAVEQVKGALVFMLSKYGFLHLFPVPPTMSAKMREALYPSGSKDDPRDADLLLELLLRHRDKLRRLSPDSEATRRVQNLVDERRNLVDEKTAQMNRLTHQLKVYFPQMLEWFEQLDTELVCALLERWPTLEELQKVPPPRLRTFFHKQRCRCPELIERRLVGIRQAIPAIRDRAVIEAKSTVVKVSAQLIRSLVRGIADLDRKIEEAAAAHPDFFIFESLPGAGAVLAPRLLAAFGSQRERYASAEEVQTYSGIAPVMKRSGKKKWVHFRWACPKFLRQSFHEWAGHSIAHSQWARSYYQQQRKRGKGHHAAVRGLAFKWIRIVFRCWKDRAVYDESRYLVTLAKRNSPLAAVPGGTML

SEQ ID NO: 226200 - protein, 350 aa, unidentified
MSTMPDPVVYVTGGVDTHRDTHTAAVVDHLGAVLATATFPTDTAGYRRLLGWFESFGTLTAVGVEGTGSWGAGLCRHLEAAGVEVREVMRPNRQARRRHGKNDATDAVSAARSVINGDADGAPRGGTGIVESLRLLKVARNSAVKQRTAVANQIHAIIVTAPEPLRATLKPNTIPQIVTTAAGYRPGDPTDPYQAAKTALRALARRHQHLTTEIKQLDVDIRPLVETAAPTLLNEPGIGIQTGADLIITAGTNPDRLDGEASFAALCGSSPVDASSGLQQRHRLNRGGDRQANAALHRIIIVRLQHHQPTRDYMTRRLAQGRTKKEIIRCLKRALARHVYHHLTNPPPTT

SEQ ID NO: 226201 - protein, 338 aa, unidentified
MKAYAGIDLHSSNNYLGIIDDNDKRLYGKRIPNELSRVLMALEPFKDRLVGVVVESTYNWYWLVDGLMEHGYNLHLANPAAIKQYGGLKHTDDKWDSFWLAHMLRLNILPEGYIYPREHRPVRDLLRRRLLFVRHRTAHILSLQSMITRNLGFKMSNNEIKKLKETDAENLFDSPNLVFMAKNSLSAIDFLKKIIRSIEKEVKSQVKLRKEFVLLQTIPGVGNILALTIMLEVGDIHRFAKVGNYSSYCRCVKSQRLSDGKKKGENNKKNGNKFLAWAYVEAANFAARYNTKAHSFYQSKKAKTNGIVAIKALSNKIARASYYIMRDQVPFDEGMLFK

SEQ ID NO: 226202 - protein, 450 aa, unidentified
MNSTVLPASVQPNIDCNYIGLDVHSDNVVVCVRRNILKVGGELQGKTIKLKKVSICDSQDSLTQLLSEYADGQQHVMTAESTFNWYWLADIAEEHGWNFRLADPCTVSQANIKAANDETDAQYLAERLRMGSLKSTTVLPRALRGARDLTRHRMRVMQEVSEKKIRLSNLYHNHCAHPLHGKQLQDLQFAYEENGIDAVLASGISGNGSELIIADLLAGLHDAQMRLERIEAQVYERLDQIDTYREGRLLLKNSMKGCGDVLSAVIITEIGDISRFRTMGEFVSYCRLAPASKLSNGKSKGQGNAKNGNAYLSWALTELATLMARYNKSIQHYLERKVKKTGLRVIGIRALAAKLARCVYQVLRKKEAFDLLLAFGGSHPQEPSASRAKTEESSQRKTATKSSETKVTGMTRTVVTDKKKIPGKKPALAVTQTQRLKSAVGQKTACYATD

SEQ ID NO: 226203 - protein, 323 aa, unidentified
MTEFVGIDISKESFDVYFEHEGNGNYVKLNQTEEDYKVLVHLIGLDRICVMEATGNYHLKLAHHLYQSGIKTVVENPLKIKRFSQMHLQRTKTDKADSHLIFDYAETILQPQEVHSWIPDEGDIGALKQYDTVRQQLIKQRTSLTNTEEALAGITEINPEVIQVLQDMVKAVKKAIETLDKGMLKVVTEHHGDSFELITSIPGVGVKTAVMIICLTNGFRKFQYDQVKQFISYIGMSPRTFTSGTSVKGRAHITKVGNGRVRSLLYMCSWTAKKNNQQCADLYKRLAEKGKPEKVIKVAIAHKLIRQIFGVIKSGQPFSNEFA

SEQ ID NO: 226204 - protein, 369 aa, unidentified
MQNRTCVGLDVHARSVWACTVDDESGEMRTSRISPKTAEIVKWAQALPGEVEVAYEAGPTGFGLARALIAAGMQCHVLAPSKMERPSGDRVKTDKRDCEWIARLVRLGELPVVVIPSEGQEAARDLVRAREDVRGDLMRSRHRLSKLLLRQGIVYEDTAWTAAHGKWLRSQSFDKPGVQFAFDEAYDTVLTTLARRDRLDKAILTMAAEPAWAPVVARLGCLRGVGTLTGFGLAVEIGDWHRFTGNSIGSFLGMTPSEHSSGGSRSVGSITKTGNGHARRLLVESSWHHRKPYRLSAEMIRRRDGQSPLVRARADQANRRLNQRWRTFDARKKRPTVAAVGVARELAGWCWSLAVMDGEKDNSAMNRQR

SEQ ID NO: 226205 - protein, 342 aa, unidentified
MDQVSTIGLDLAKYIFQLHGADRAGAVVFRKKLRRGQLLAFLATLPPCTVALEACGSAHYWGREIAKLGHTVKLIAPAYVKPFVKRQKNDMADAEAICEAAQRPTMRFVALKSANQQAAAVVFRTRDLLVRQRTQAINALRGHLAEFGVIAAKGPVHTSKLIAALEDPASDLPQAARGILAVLVEELRSLDERVGVLDREIARHAKESAVARRLMTISGIGAVTAAALTALAPPAQTFRRGRDFAAWLGLTPVQRSSGGKERLGKTSKMGERSLRRLLIIGASAVARWAARKGVPAGSWLGRMLARKPPLLVRVALANKMARIVWALLAKGGVYRAPVVAAV

SEQ ID NO: 226206 - protein, 341 aa, unidentified
MDHYAGIDVSLECSSVCIVDANGKIVREAKVASEPEALIGWLRSSGVSLVRIGLEAGPLSQWLFAAMQKAGLAVELLETRHVRNAFKTMPVKTDRKDARGMAQLMRLGWFRPVHCKSMGAQETRTMLAARKLLQKKLRDFEASLRGTLRGFGLKVGETTSKRFAGRITELVAGHATLEILAEALLAVHATLLRELSGFEKRVRTMARHDPKARLLMTTPGVGTIVALTYASAIDDPARFKSSKQVGAHFGMTPKKYQSGETNYTGRISKIGDSGVRTALYESAHTIMTKPVKGSALKSWAMRLAKRVGMKKAKVALARKLAVIMHRMLVDGTEFDFAAAAA

SEQ ID NO: 226207 - protein, 343 aa, unidentified
MNQPYHYIGLDIHKRTVAYCEKRADGKLVASGTFSTAHPSVLEWAKERSMPWVGGMEATLFAGHLYDVLKPFAMDLQVGHPLRIQAISSAKHKNDRKDAKTLADLLRCDLFPQCHMASPLVRELRRILRYRNFLVRQAVRMKNKTTGLLMEVGAVYDARRIHQHGYFEEFLGTLDEVPHSVVELLKTSRVGLEMFQEAQKKLVKALLEHEHLGERVSRLMSIDGVGEITALTWALELDEPSRFSNMKQTVSYCGLCSGQNESAGKSKSGPLSKQRNPHLQTVLIEAAKLAPRWNAQLARVHAAELERSGNRNRATCAVARKLATYLMAVDKSRRPYEERTPAR

SEQ ID NO: 226208 - protein, 408 aa, unidentified
MEVLYQEAAGLDVHKDTVVACARLARGREVTRHVETFGTTTSELLRLSEWLRGHGVTHVAMEATGVYWKPVWHVLEGQFTLLLADAREVKNVPGRKTDVNDATWLADLLAHGLIRGSFVPPQPIQELRDLTRTRTQLMRERSQHIQRLQKVLEDTNVKLANVVSDILGVSGRAFLEAIIGGESDPKRLAELRDPRLRASKKELAEALEGRVRDHHRFLLRLHLSQIDGLDASVELIESRIEEHLAPFADLVRRLKTIPGMGEAVIPVVIAEIGADMSVFPTAAHLVSWTGLSPKQDVSNGKRRSTRTKKGKWAKTALVQAAWAGVRKKEQTYLIAQFNRIRSRRGAKKAIVAVAASMVTAAYYIIRDGTEYRDLGPDYFHRRDHKAHAFRLVQRLQNMGYVVNLQSAA

SEQ ID NO: 226209 - protein, 344 aa, unidentified
MEHFVGLDVSVRETSVCVVDETGKLLKEAKVPTEPEVIASLLAKGGYVCKRVGLEAGPMSQWLYAELAAAGLPVICVEAQHMRSALAAQRNKTDRNDARGIAQMMRVGLYRPVHVKTLQSQERRLLLTARKLLQAKLLDIEADLRGTLKNFGLRVGVVRQGGFRARVRELIDGRAGLSAVMDALLVAHEALQTQYNVLHKRLLDLVRDDPLCRRLMTAPGIGPVIALTFQATVDVPTRFPKSRLVGAHFGLTPKRYASGETDHSGRVSRCGDAMMRTALFEGAQALLICTKKWCSLKAWGMAIARRRGTKRAIVAVARKLAVILHRMWLDGTEFRWGKETLAAA

SEQ ID NO: 226210 - protein, 382 aa, unidentified
MQASRKSTPTAGHCGTIFVAIELSQKTWLITVHSPDRDQFSRHRLEGGDHAGLLALIEKVRARATQQLGSTPRVVSCYEAGYDGFWLHRLLEAAGISSLVFDAASIAVEQRSRRAKTDRIDGELLLRTLMAHLRGEPRVVRIVRVPSVEEEDARRASRERDRLITEQTAHTNRIKSLLRLLGMAVGNPRRRDWLAWLKRQRDWQGRPLPPHLLAEAQREHARLMLVREQLAALEQVQAAQASAVPAPMAERRDLLQRLKALGPAFTATLVNELFYKDFRNRREVASYCGLAPSPWQSGGIDREQGISKAGNRRARHKAIELAWLWLRHQPNSALSHWFRTRTANAGRRAKRIAIVALARKLIVALWRYLTAGLVPEGATMKA

SEQ ID NO: 226211 - protein, 429 aa, unidentified
MSYRIAGIDVHKKILAVVVSDVEIESEYQFERRMFSSNPEQLRSLAAWLVEQKAEEIVMESTAQYWKPVWETLERYWKPLCEKREGARRRSGTLHLAQALSNRGRRGRKRDFVDAERLVKRLVARELTLSFVPDAEQRLWRTVTRKKYQLRRDLVRLNNQLESLLEEAHIKLSSLVSDLLGVSARRMLKALADGETNPAALAALAHERLRATPEQLCDALGACTELKPVYRRLLKMTLEHLQILEQQIGQLDQELATLLHPHQDAVERLAEVPGFAVDSAQQIIAEVGPAAATFPSEKCLSSWVGACPGEEESAGVNYSHRSPKGNRHMRRLLNQTANAAVKAKGSIFEIIYRRCVPRLGHNQAIGVIAHRQCRLIWLILHQGTRYEERGPAVSKRSRYQRTWRMIRQLRNLGYRIELPNPQASQAQSQ

SEQ ID NO: 226212 - protein, 311 aa, unidentified
MDDVFIGIDVSKEYCDVAVIPDGTRGRFTNDEEGQEAVAAFILPLKPGRIVIEATGGYEMGVVRVLADNQLPVVAVNPRQVRDFAKATGRLAKTDSIDAEVLAQFAGAVKPEVRPLPTKEAEMLRALVARRRQLVQMITMEKNRLEKSPPFGSKDIRNHIYYLTEALKKVDRDISRTIRKSPLWKEKETILTSTPGIGPVISCTLVAALPELGTLNRKEIAALVGVAPFNRDSGKYRGRRTIWGGRSHIRSVLYMGMLSAIRFNPVIRAFYQRLLKAGKARKLAITACMRKLLTILNTMMKNKTTWAEARS

SEQ ID NO: 226213 - protein, 400 aa, unidentified
MRTVFGIDVSKASSEVAILVNGERVHGYTMPNDIIGFSRLLMDLKTVSNPEIIFEATDVYSRRLQAFLEENSYDYTRLNPLEAKKQLDGLRVRKTDKIDAEKLASSQFVLSRKPTYVQEEVYQNLHDLSRFYQNLTEDIVRTKNRLHKVLQVAFPEIENLLSTPTGEQYWNLVSIFPTKHWVLELSEVELKEAIRNSTSKRISENRVGNLTEKLVGLAKQSYAGISKTSPMVEEVKYDAQELIRLTNRREQVLQQLIALAEPLPEYKILLSIPGIAETTATSIIGELGDIRRFKSANQINAFIGIDLKHYESGDFLGQEHITKRGNPYARKILYKCIHNIASASHTNPCHIADFYEKRKRQSQTTSTKPHTIASIHRLIRTIYYLKMHNKLYDYSLAQSH

SEQ ID NO: 226214 - protein, 354 aa, unidentified
MTRSTKYVALDVHKEATAATVRNARGKVIARSVFSTKEEVFVEFFQGMRGSIHVTFEEGTQAQWLHDLLVPLTDRVVVCDRRGESQQGNKGDQVDSDELSERLRRGGLRSVYHGTPHLADLKELARAYQNVTEDTTRVMQRIKALFRARAIRADGTRLYNPVNRATWLAKLPDRGARFRAEALYIEIDMLRELRSKAKAAMVAEARRDPAWAVLRTIPFLGPVRVSMLLAVLRTPWRFRTKRNLWSYAGLAVRTYTSSEFVIVHGRPVRRQRRPMTRGLNQNHNRVVKNIFKSAATAASARPGPLQDFYREMLDRGMDEALARVTLARKLAAITLRLWKKGEPFDPELLTVQVR

SEQ ID NO: 226215 - protein, 367 aa, unidentified
MAKFLIVGADVHEEYVMTKWCVDQGKASKSSFRMTESGQSKMIAMLHNTARTAGVKEIVFAYEACCMGFGLYDRLTDASITCHVLAPTRIEKSNKQRRSKCDEKDAQQILEILKGHLLAGNSLPDVWIPDHQTRQDRTVVRRRLELTKKSTRVKAQIRMTLKKADVKRPKDLSKGWTKAFRQWLRDICDLEEGVLQYGEILALESYLRELRFLEDEIQLQDDNVEVLSRDERYLEACQALCEMKGVSTLTAMVFLTEVGDMSRFSNRRQIAAYFGLSPSSYETGENSDRKGHITKQGSERVRKVLCQAAWCRSSDDAAYARVLARNQKKKKVALVALMRRTAIKMWHIARDAQQQNGSFAELSRAET

SEQ ID NO: 226216 - protein, 362 aa, unidentified
MLGERTSVGLDVHARSVVAAAIDGVTGELRRARLTPSHDHVRSWIAELPGPVTVTYEAGPTGFGLYRTLTAAGVRCVVAAPSKLQRPSGDRVKTDAKDALHLARLLRLGEITPVAVPSLEQEAARDLVRAREDCRGDLMRARHRVSKLLLRQGIVYSGGQAWTGAHEAWLRRQRFDTAATTMAFESDYEAVLTVKARRDRLDTSIGQLADASEFTPLVRRLGCLRGISTLTAFGLAVEIGDWSRFTGNTIASFVGLVPSEHSSGASRVQGSITKTGNTHARRLLVEAAWHHRTAYRPGKTMHDRWELAPPAARARGDAGNRRLHQRWISFTLRKKRPVIANVAVARKLAGWCWSLAMIDDMD

SEQ ID NO: 226217 - protein, 371 aa, unidentified
MTDNSTFIGMDVHKNSIDIAIAQTGRKGQVRHYGKIDGTLSALDKVVRKLVSKGNRLRFVYEAGPCGYQIYRHLTAQGFDCSVVAPSRIPKPSGKQIKNDRRDALMLARLHRAGELTAVYVPLAEDEAIRDLTRAREDAKGDEKKSKQRLLAFLLRSGIRYTGRASWSQAHMRWLSDIKMPHRSQQIVLQEYIGTLNQCKDRVKRLTDQIQQLLPEWQLFPVVQALQSMRGVSMIVAATTVAEVGDLKRFQSPAELMSYLGLVPSEHSSGQKTRRGSITKTGNGHVRRVLVEAAWAYRLPARVSRVLLKRQEGLPQSICEIAWKAQLRLCSRYRHLWAKGKIKPVIVTAIARELCAFMWAIANETKVPAAV

SEQ ID NO: 226218 - protein, 321 aa, unidentified
MSTKNETCFVGVDVSKASLDVYRPDTRARVQFDNSQDGTEELCKKLKRKKVRTLVVMEGTGGYEKMLLHQLENFGIEAAVVNPRRVRDFAKGIGIDAKTDPIDAEVILRYGQVVQPAPIACKSEHEKKHRALVDRRDQLLGLINQENNRLKQTWDEDAKQSIRTVLDCLKNQLKQIDSELAKMLKVDEENTRLIEILDSIKCVGPVLISTLITSLPELGKLNREQIAKLVGVAPINRDSGKKSGKRFIGGGRAKVRRVLYMSAVVGIRHNPVLKSYYAHLKSKGKESKVAIVACMRKLLSIMNTMVRNDELWRERSKGGAL

SEQ ID NO: 226219 - protein, 355 aa, unidentified
MKERCKKPRKGPVKQDLYGAVDLHGDNGLYCLINERDERVFQQRLPNDLKTVLKALEPYRDRLVKGLAVESTFNWYWLVDGLQEHGYAVQLVNTTKVQTYSGLKQTNDKTDAFWLAHMQRLGVLPTGYIYPREQRGVRDLLRRRMLLVQQRTAHVLSFKSLVERETGGHITANRVKALEVGEVNQWVGGDAAVLMGQTNVRMIECLDEQIGRLEQAAQDRIRLRPDHERLQQIPGVGRILNLVIMLETGPIERFAGAGHYVSYCRGVRAEKLSNERKKGENNRKCGNKYLAWAWVEAANFSLRYSRPIKAWYQRKLKRCGGKAVVALKAVAAKLAKAAYYMLKKKEAFKLEQVFG

SEQ ID NO: 226220 - protein, 314 aa, unidentified
MGYETLIRRAHVMMRKNTLKSLPTDTEFRVVGLDLAKSDVSVAAIPVDDNTPSLVDRMTYADLLDWAGKISPTLFAMEPCNGYSLLCLQLENLGHEIKVISGWTVSMWINTHLSGQKTDLNDAIALARLAVSDAELTPIRHKSITEIRIQTVQAVRQQLMSQRSKSIVSFKALAQQWGIPCAAGHRNLKKLRESIEAKVDLITRPVANAMLFLLDAVKSLDRQIGQLNQTLQELVMSDERGRLLQSVLGVGTQISARVITVVGNIERFNSPRSLVAYVGVAPRNFITGHKISPRKSMATVLTSAQRPGQNQSSG

SEQ ID NO: 226221 - protein, 401 aa, unidentified
MSTRQARIWVGIDAGKGHHWAVALDADGETLFSTKVINDEAQILALIETAGERADEVRWAVDISGRASTLLLALLVAHDQNVVYVPGRTVNRMSGAYQGEGKTDAKDARVIADQARMRPKGFAVLDTPPELVSTLRVLTNHRADLIADRVRLINRLRDLLVGICPALERAFDYSAAKGPVVMLTEYQTPAALRRVGVKRLTTWLERRKVRGAGTVAAKAVEAAQSQQIALPGEKRAAKLVRDLAHQLLALDERIKDNDREIRETFRGDDRAEIIESMPGMGPILGAEFVAIVSDLSGYRDAGRLASHAGLAPVARDSGRRTGNHHRPKRYNRRLRHIFYMAAQTAMMRPGPSRDYYLRKRSEGLIHTQALLALARRRVDVLWAMLRDKRLFTSAPPVTQAA

SEQ ID NO: 226222 - protein, 353 aa, unidentified
MDKYIGLDMDCKKTVGYAIVPGQSESSATFGPDIESIRRYFRQESKGGYRIHAVFEISGQAGFLYDILLDDVASLHVANPSKMTWIYRTAKKNDRIDARKMAVLLSINELPEVYMPSKEVRQWRQTILHRRAIIQKVGQVKNRIRAALKSVGYSKPEVRGSWWTCVNRLWMGRLCHEQVDVDSLWRLHLRNLLDELDLLETQRDRVTDYLDGYLAKQSAGKLLMSIPGIGPRTAEAVLAYTDDIERFGNYKQYCAYFGVTPKLDESGSFRRLGHISKQGPGVVRWVLCESSWKVTRYCPGLKAFYERVMGGQAGRKKIAIVAVMRKLLCIMRAMLLTGELFNERLIQNALQAA

SEQ ID NO: 226223 - protein, 391 aa, unidentified
MIYIGIDVAKDKHDCFITNSDSEVLFKAFTIFNNLDGFNDLYQKIESVMDDVTKVKVGLEATGHYSYNLLGYLIDKGLPTYVINPLHTNLYRKSLSLRQTKTDKVDARTIASMLMSDVNLKFYSDTSYHNEELKSLTRYRFDKVKERAKLKTSVSRLVCILFPELEKLVPTLHMASVYALLSEFPSAKHVATAHLTRLTNLLSKSSKGRYGKDTAITFRDSARASIGSNMPAKSLELKHTIKLIQELDSEIDEIENEIKIIMDEINSPILSIPGINYRMGAMIIAEIGDFNRFDSPDKILAYACFSPSTYQSGQLDGAYAHMEKRGSRYLRYALYNATKYVCHWDPTFAAYLAKKRAEGKHYNVAISHAVKKLVRVIYHLEKTKQQYIKAA

SEQ ID NO: 226224 - protein, 418 aa, unidentified
MSKIRRKPKIVNSNTLLVTVDISKDKHTGYFRCPDGTEVMPFEFSNDRSGFTKLYQMIESIKYQKQLTEVILGFESTGPFAEPLVHYLKGKDVKLVQVNTAHTKKLKEVYDNSPGKTDRKDPKVIADLVELGRVLNVVIPEGICAELRRLTHARERYIKTRNMLVNQLYDLSYIIFPELGQIIPDFQSKTAQYLLRHYPTPQLMKKMSPTRLETILRKVSRGRYGKEQAERLYQVSIHSVGIREGLFSIVEEIKNILKAMDLQNRFIDKCEEDISRNLVQIPLSRELLLIKGIGEITVAGVIGEVVDFTNFTSTNEIEKYAGLNLFEISSGKHQGQRRISKRGRSFLRKVLYFAALNTIRKGGAFHEKFQQYQDRGMPGNKALIAIARKLLRVMFAMARDQKEFKEDYHHTLTNSEAA

SEQ ID NO: 226225 - protein, 430 aa, unidentified
MSKSNFLSVGIDVGSAFSFMSIVHPDGTLIGKPFKIIHKDVDSLERALLAIRKAEESYSLKSQTFLESTGIYHFPLFCFLIESGFDAFVINPLITHSIRNMGIRKVKNDKLDSIGIAKLGLSPDLSVSVMPEKLILELRALTRNYYSLTDIRASYVNQLKTQLHTVFPQFLSVFCDVTGKTSMMILESYPTPDKLLRAHRESLIAKIAKVSRKGVKAATEKYEKLICAAKSAKVFGCKLESVFFNIQTTLTLIKGMDAATASVMDRIGALVKENRSEKFIYQIEWLDSIPGIGFLSAVTIMCEIGDFSVFKSPKQLFAYFGMDPEVKQSGKFNATQVHMSKRGSRIARRAIFAAALASIRKKRNGEAINPYLYDFYQKKASSKPKMVALGAVMHKINNYIFAVLRDETVFSLRSPEEHCNAYWAPVALTA

SEQ ID NO: 226226 - protein, 349 aa, unidentified
MMRYVGLDVGKARCRATLMNQKGDVESEFFFENNSRGISNLVSALTNEDKVVMESTGNLWLNIYDALDHRNIRVVLANPLKTKAIASAKVKTDKVDARILAHLLRTDLVAESYVPPRNVREMRALVRHRLSLVKMRTMVKNKAHAITERYGYRCEYSDMFGKAGMEWLRALELRELDQLVLENHLSLIESINAQIKRVDEAIRKRASQDEDVRLLLSMTGIDVYTALLLRSEVGPIARFPDYKKLVSWAGLAPSVHQSGNVEYHGAITKRGSSMLRWAMVEAARVAVQHDERLGAFYERVRARRGDQKAAVAVACKMLKIVWFMLTKRETYGYANGRLYGEKLKKIGVE

SEQ ID NO: 226227 - protein, 392 aa, unidentified
MIYAGVDVAKANHVIGAVGDDGQPLCKSMEFKNSDAGFERCSAWLEGLAEEPSDVLVGMEATGHYWMALFARLAAEGYSVCVINPMEVKAVRKLKGKSRVKNDRVDALLIAETLRIGEYVETKLASDEVQSLRTLTRYRQAIKEEAAQVKIRLTCVMDSYFPEYAGVFSDMFGSASLAVLEKSPMPSELLRRKAPSLASDISKAARRQIGQAKASELKAAAKSSVGITLGLDAASFEVRSMVSQVRFLEERASEVEGRIEELLMGIEPLVLTIPGVSLATGAQIVAEVGDVSRFRSAAALVSYAGLNSSVSQSGQFDSGGGPITKQGDPYLRRAVWLAANRARQHDPALKAFYDKKRAEGKRHRVAVTAVARKLCHIVYAVMRDQVPYDPNR

SEQ ID NO: 226228 - protein, 331 aa, unidentified
MIIKETVGIDISKSTFDAYLHNTRKYKQFSNKPKGFISFMKWVEKCTGRTFNEIGICFEHTGLYSLPLAIYLHKIDVLYSMVPAMEIKKSLGLVRGKNDKVDAQRIAEYAYLRRGTLEPYKLPSTQILKLQKLNSLRARMIKQRAGYKASLSEYKALLIRKNNLILFQEHERMIIHLDKVIKKLDNEIQNIIDQDEQLSQHSKLITSVKGIGPVLAAYFLVTTNCFSSFSDGRKYACYAGVAPFSYQSGTSLNSKAKVSHMANKRMKTLLNLAAGSAIQSDPELKAYYKRRIEAGKSKMSTLNIVRNKLINRVFAVVKRGTPYVPLYQFAA

SEQ ID NO: 226229 - protein, 342 aa, unidentified
MKIMTVGIDLAKNVFQVHGVNEHGKTVLRKQLKRDQVATFFAIMPQCLIGMEACGSAHHWARKLRSLGHDVRLMAPQFVKPYVKTNKNDVADAEAICEAVGRPNMRFVPIKDIEQQAVLSLHRVRQGFVKARTAQANQIRGLLAEFGLVIPQGIAHIAKRVPEFIEDERNELPGSFRMLVQRLLEQLKGFDHQVHEIENQIVAWHRANENSRKLAKMPGIGPITASAMVASLGDAKSFKNGRQVSAWLGLVPKQNSTGGKTVLLGMSKRGDSYLRTLLIQGARSMICAAQRKEISDSWLGRLLKRRNANVAAVALANKNARIIWALLAGDREFRSDYTTVVA

SEQ ID NO: 226230 - protein, 334 aa, unidentified
MEKITTAGIDLAKRVFALHGVDGAGRVGLRKTVRREQLMQTVAALPPCLIGMEACSGAHEWARRFQELGHTVRLMAPVFVAPYRKSGKNDGNDAEAICEAVSRPNMRFVPVKSAEQQAILALHRVRQGWIAERTATINRIRALLTEFGVVLPNCAQHVRRGAMAAAEALPALACRALEDLRSHLGTLDERIGAYDRELEAQARASEAAQRLMQIRGIGPITAVAIVATVGNARDFESGRQFAAWLGLTPRQHSSGGKQRLGHISRRGDAYLRCLLVQGARSVLYTAVRHHDRLSRWVCTLRARRGDHKTLVAIAAKNARIAWALLAKNQTLQTV

SEQ ID NO: 226231 - protein, 332 aa, unidentified
MSVYVGIDVHRKRSQVAVVNEGGEVLANRNVPNGVMPILSVIGGLPAGTPAAYEAAFGWGWLLELLEGYGFEPHMVHPLQCKAIASARLKNDKVDAATLAQLLRADLLPEAWIAPPEVRQLRALLRHRAQLVRLRTSLRNRVHAVLADHGHGRPAGCWSGVGRRWLASLELPAVSREVIDDALALMDALQQPIDRLDAEVRQRAKSDPRVKVLTRLPGVGPFTALVLLAEIGDITRFSSARKLASWAGLTPTVRGSDRTVHHGHISKQGPTWVRWVACEAAQTAKRHPDFAPGYQALARRRGKKIATTAVARKLLTRAYHLLTDAASGGAPA

SEQ ID NO: 226232 - protein, 394 aa, unidentified
MFYIGIDIGKRSHVASIMNDEGKVVLKGFSFPNTIEGGEKFLGKIHDFSSLPDDFTVGMEATGHYWLAVFSFLHEKNFLIHVLNPIQTDGWRKGTEIRKRKNDIIDSVLIADLIRFGSFVETTLSDENIFSLKQLSRYRTYLVGTASDFKRKIIAVLDQVFPEYDTVFGKAGVFGKASKELLLEFSSPETLNEISADTLAKLLSDASRNRLGIEKANALKNAASRSFGITFAQETFTFQLRSMIEQLKFLELQIKNTETEIKKIMAALHSVIETIPGIGPINGATILGEIGDISKFSNPTKLVAYAGLDATVSQSGQYQATHNVMSKRGSPYLRKALFSAALIAVQHDPVLKAFYEKKRSEGKHHLTALGAVSRKLCYIVHAILKKNEPYEIRM

SEQ ID NO: 226233 - protein, 443 aa, unidentified
MRIIYEQVAGLDIHKKTEVACRMRVNTEQRLEHETRTFGTMTQELLQLHDWLSEWECSPVAMESTADYWKPVYNILEGDFEVRLVNAQHVKQVDGRKTDASDAEWLAELMLHGLLRASFIPPKPQRVLRELTRYRSTLVGERRRVVNRVEKVLEGMNIKLSSVVSDVMGVSARAMLSQIVAGQEDSQVLAELAKGRLRNKKKALAAALQGRVDEHHRFILAQQLGHIDFLDEQIEQLSQEVSRQLERMSQPPTDDQHSGQSDIADQAAPADDQDRPLSWPEAVALLDTMPGVDVRTAEVILAEIGLDMSQFKSPKDLASWAGLAPGNRQSGGKRYSSRTTKGNKAINSVMNQAAWAASRTKDTFLKARYHRLAARRGKKRAIVAIAHSMMTSIWYMLSRRQAYHELGGDYFDQRKKDTKVSYLTRQLAKLGYSVSIEPLPVAA

SEQ ID NO: 226234 - protein, 453 aa, unidentified
MKRKRSYAAVDVEHLDVEALVLLLTMGCIVAIDVAKKKFVAGFATAAGEVLKLVKFEHPRQTAAFVGVVRALQQAERKPVVVMEPTGTYGDALRHQCHALGVPVHMMPPKHSHDFAEVLDGVPSMHDPKAATVLAKLQAIKPGRAWEPQSDVRRDLRAWVDQRQPIARMLAIYHGHLESMLARHWPEFEAHVDVYDQRSWFALLKEFPGPQAVAAAEEAAAETLRKASRGHFDHARVRAIVGSAKGTTGVPLTAGERERLRVITEQIELQTRRLDAVDAKLAELVGLDAVLSRMATVVGPACAAAIGALVGSPLDFPNARALEKAIGLNLKEKSSGNSQGRLSITKRGPGEVRRLVFMAALRLIKDDPIASAWCKARKGYKADQKIKAVVALMRKLVRALWHVAKGETFDAAKLFDTRRLDLPSTPTYRANTSAPDSPSAQAREAHQGGAAIA

SEQ ID NO: 226235 - protein, 351 aa, unidentified
MNIMGCDLHSRYQVVAWVEEGTGEVVTRRLEHENGEARAFYKSLPPGAIVGIEATFPAHWFERLLEECGHELWVGHAAKIRASVVRRQKTDTRDAEHLLELLLANRFPRIWVPSLAERDLRQLLVHRMKLVRMRATVKNQLQALAISQGICRKQKLWSVRGRAELESLALLPWASRRRQDLIATLERLDRSVGELDEAVEAAAQQREEAVRLMTHPGVGPVVGLAFVLTIGRVSRFPNSRHLVSYLGLNPSEHSSGGRQRLGAITKQGNSMLRWLLVEAAQTTARYDPELRRVYQRLKFRRASGVAKVALARRLAVRLYWMLRAQVDYAQLVRMSGSPSSGVAPKPSESID

SEQ ID NO: 226236 - protein, 365 aa, unidentified
MDVLHERCAGLDVHQETVVCCVLISEPGGRCRKEFRTFGTMTGDLEALRDWLRDRGVSHVAMESTGVFWKPVYAVLEGHVEIVVGNAQHIRNVPGRKTDIKDAEWLGQLLRHGLIRASFVPPPEFRELRELLRFRRGMVQDGVRLRNRMIRRLEGAGIKLAAVASDVFGVSGRAMLRALIDGTQSPAEMADLARRRMRSKLPVLARALDGRLSDSDRFLLDLDLRQLERLEADLGVLDERIDGKMAPYREQQRRLMEIPGVEAVAAATILAEVGIDMAVFGTAKRLAAWAGVCPGNRESAGKTKAAATRKGNPHLKAALFTAAASAVCKKGSYYKAKYYRLKARQGAKRALMAIAHKIWSRCSRC

SEQ ID NO: 226237 - protein, 400 aa, unidentified
MLSIGIDVSKGKSTVCGMKPGGEIVYTPFEVQHTREGMSELVSLLRGSGEEVRAVLESTGSYHCPVVAALLENGIFVSVVNSLRMKRFCSQSIRKVKTDRIDAMQIALYGLAYWQELQPTRLPEDTYRELQLLARQYYQMTSMLIKAKVDFNALCDQVLPGMQELMNDHAGRHKLSDFVLRYHHTTHILEMGETRFRKDYCKWAEKKGYRNCERMAVLIFATAQNGIPVLPNAPSTQIVITEAIRVLHTVEASRDAILTQMQALAKTLPEYSLVREMPCIGDTLAPRLIAEIGDVRRFHSKRALIAYAGIDAPPYQSGKFCANNRHISKRGNRYLRKTGYEVMQSYVMHKPANDPIFTFIEKKRSEGKSGKLAMVAGLNKFLRVYYGKVTELYRSLPAIE

SEQ ID NO: 226238 - protein, 346 aa, unidentified
MKNITLTAIDTSKNVFSIRCENHAGRIVCRKTLSREGLPSFLRSLPKGSTVVMEACGGSHHLAGECKELGLEAKMISPQFVAPFRMSQKNDDNDADAISTAAKQVGMRFVSRKSQEQLEIQMLHRTRERYMKTRTALINQTRGFLSEVGIVFPKGVTAFMKGVKKLLADSPETKMLTRLLQTLMSELLMVDQLIEDVNLEIERSAKSNPVCKELRKIRSVGVLISSAIASAVANPHDFKNGRNFAASLGLVPRQHSTGGKHKLGSITKCGDGYLRKLLVHGARSVIFHAVKKQKTDPLSLWIRRLYDKHGANHVAVALANKTARHLWGVLAGKQPQPFHELAGATA

SEQ ID NO: 226239 - protein, 391 aa, unidentified
MYIVGIDIAKRKHEAAVIDGEGTVIIKPFSFTNNCSGYNRLLAMLTKAKLPLDEVSFAMEATGHYWLALFTRLQKEGFRVQVINPVQTNSIRSFYIRQAKTDPRDALLIAEVIRFGHFSESTLHPENIYELRELCRGRHAIVSMQADVKRKVVALLDQVFPEYETAFANMFGDTSMAILQTCPTPKELSEMPLEELCHLIEVSSHKRFRMAKAQELQALARNSFGFAMAGDVFSTMIRLYAKHLDFLKQQVREMDRKIAEIMDTLDTPITTITGIGPTLGAYILSEIGDISRFSSAAKLAAYAGIDPTMRQSGEYNGVRNRMSKRGSPYLRHAIWLAASSAVLHDPALKLYFQKKRDEGKPYMASVGHACRKMVSIIYAVMRDNKAYCLCA

SEQ ID NO: 226240 - protein, 344 aa, unidentified
MDYYVGLDVSLRSVAVCIVDCDGKAIFERSVPCEIEDITECLLAFRASDLRLGFEAGAMSQFLFFGLQAEGFNVVCMEARQVNAALSAMRNKTDRTDARGIAQVLRSGWYNTVHIKSREAHAVRALLSSRKAVQRKCIDLANEIRGLFRIFGLRLPSRVEQRSFDERVRPIIEADPVLSHALMPLLDARVALHQAYRELDRRVKQIASHDDICMRFMGIPGVGPITALTFKAAVDDPNRFTSSRTVAAHFGLTPRRYQSGEKDNPGRISKAGDPDVRAALYSAANAMMMRSIAGSEIKSWGLRLMKRKGRRRAVVAVARKLAVVMHRMWADNTEFRQKPLEVAT

SEQ ID NO: 226241 - protein, 372 aa, unidentified
MVEREFYLHGSKADLMGSKIWTGLDVGVETTQICIINDHGEVLQETACATSLAIIDREIRWLRRRRWAKLGMEASSGSHLARGLRSRGYSIDLYETRELSKFLRLRRNKTDQGDALGIAEAGRLGATVVSKVHLKSFECQCLQSKLTIRRNLIRQRVALINLLCRQLELYGGRVSRSTRSMQLRSAVEAEFKKVFGRAAACPIDEFYQLLSYSEQLLSYQTSVDRELRSLAAENDVCRRFLEIPGVGPICALTFYAAVGDPYRFSSSKDVGAYFGLCPTIYQSGLTCRVGRISRMGNVSVRSLLVQASMAFRRHRNADRKLLEWVAGIEQRRGKRKATIALARKLAILMLAIWKSGDHFRSEPRSEALGLVS

SEQ ID NO: 226242 - protein, 342 aa, unidentified
MTMIGIDPHKQSHTAVAIDDHEVVLDEFTLRASSVQADRLRDWAARFETCEWAVESANGLGYLVAQQLVAAGETVFDVPPVLASRVRVLGSGRSQKNDPNDARSVAIAALRSDRLGRVRPDDHGRVLRLLAKRHRDMAQLRNKHCTRLHALLGELAAGGIGTELTVFKANAVLDTVVVDSEVTRHRVLIATELVDDIARLDTMLKASKKRVATAVSASGTALTSIVGIGPINAATILGYSGDISRFATKAQFASYNGTAPIEASSGGRVRHRLNPRGNRNINHALHIAAVCQLRYDGEGRSYYDRKIAEGKSSKEAVRALKRRISDRVFRVVVDDARRVEIG

SEQ ID NO: 226243 - protein, 292 aa, unidentified
MEHELHYIGIDTAKEKLDVDVLRPDGRHRTKKFANTTKGHDELVSWLKGHKIDHAHICIEATGTYMEPVAECLYDAGYIVSVINPALGKAFAQSEGLRNKTDTVDARMLAEFCRQKRPAAWEAPHPLERALRALVVRHQALTDMHTQELNRTETAREVQRPSIDAHLLWLEAELKRLEKQIKDLTDDDPDMKHRRKLLESIPGIGEKTSAVLLAYIGLKDRFAHARQFAAFAGLTPRRYESGSSVRGASRMSKAGHVSLRRALYMPAMVATSKTEWDGRSATVWRLMARKER

SEQ ID NO: 226244 - protein, 400 aa, unidentified
MLSIGIDVSKGKSTVCGMKPGGEIVYTPFEIQHTREGMSELVSLLHNSGEEVRAVLESTGSYHCPVVAALLENGIFVSVVNSLRMKRFCSQSIRKVKTDRIDAMQIALYGLAYWQELQPTKLPEDTYRELQLLARQYYQMTSLLIKAKVDFNAICDQVLPGMQELMNDHAGRHKLSDFVLRYRHTAHILEMGETRFRKDYCKWAEKKGYRNCERMAALIFATAQNGIPVLPNAPSTQIVITEAIRVLHTVEASRDAILTQMQALAKTLPEYSLVREMPCIGDTLAPRLIAEIGDVRRFHSKRALIAYAGIDAPPYQSGKFRANNRHISKRGNRYLRKTGYEVMQSYVMHKPANDPIFTFIEKKRGEGKSGKLAMVAGLNKFLRVYYGKVTELYRSLPAIE

SEQ ID NO: 226245 - protein, 355 aa, unidentified
MTETVYCGVDFHARMQTIAYCDSANGEIQLAQLDHRKDDVRGFYSQFTGQVIVGMESGGYSSWFEAMLEELGHTVWIGHATEIRRRANWRQKNDRRDAELILEIMLRGDFPQIHRHSRESVEVLRMLRYRARMIKMRTMICNNLQAIAMSCGLSERSGMLSRAGQERLKSARMTPVIKQQSEELLTLLVPINERIGRVDRWLKQQASTDDRVKLLMTHPGVGVLTGLGVVHTLEPFNRFSKQRSVVAYVGLEPMERSSAERKRYIGISKAGSRLLRFLLCEAAQVAARFDDELKQFYERLAKRRGKPKATVAVARKLLIRCWIMLRDNIEYGEFRSRGVEARLARNMPRPSVPAE

SEQ ID NO: 226246 - protein, 450 aa, unidentified
MMEQGMGTSKLKIGRAKLEVMHPDSAGIDVGGARHYVAVRGEVVERSVKDFGCYTRDLHAMADWLHECGVKIVALESTGVYWIPLYEVLERRGFEVLLVNARHVRGVSGRKSDVLDCQWLQQLLSYGLLKGAFRPHDQMCELRELNRLRSRLLREQGRSVQHMQKALTLMNVQLSNAISDVAGVTGQKIVRAIVGGERNPEELASYRDARIKASEEEIAASLQGNWRTEHLFALKVALSTFDFCAQQLEQCEHEIDRAMQALQRFTNEPAKGKRRSKAKNAPKFDVRERLFKMCGVDLTRINGIDVSTAMTIISEVGTDMSRFPSDKHFASWLGLCPGTYISGGKRLGSATKHSTNRATQALKQAAAALRTSQSALGAYFRRLCGRMDKAKAVTAAAHKLARLVYAMLTKGEEYTDQGQQYYEERYRERVVRQLQRRANKLGMLVVPAGC

SEQ ID NO: 226247 - protein, 346 aa, unidentified
MQGEKEKKRNFKYFVGIDVSKNELDYAVMSGKVLLFHHESKNEPKAIIEFIEKLRELPGFTFAKSMFCMENTGIYCNHLLQILKTKKAFIVVESPLQIKNSIGITRGKNDKDDAIRIATYAQTYSNELRPWIPKRTIVSDLHALATLRDRLLSVILVLRTPLKEQAFFLDRTRVKLYGKLSKNGIDAVKSDLKEVDRSIEQLINADEHLKKLNTIITSVPYVGAITAVRIIITTNEFKDINCPKKFACYAGVAPFKKESGLIIRKARVSHIANKKVKKLLHMCAINAVRFDSELRSYYEKKTVTEGKSKMLVINAVRNKLIARIFACVNQDRYFQKDYQGITHSSK

SEQ ID NO: 226248 - protein, 365 aa, unidentified
MIIEYYTTIGMDVSDRKIQVCVMTKSGVNPKIVTETTIPTTKEGVQKFLSTQDKNTPVVFETGMHCRWMHEIGEGMGFKVYVANPCRLKMITESKTKNDVNDARMLARIALSDPGLLHPVKLRDAEHQKMLNLHEMRNLLIKQRTGMIVQMRFIAKSMGFRMPKTSTRCFHKLDTTLWPKEFRDIAWPMLKNLEQLDITIKTYEKKIRELAETPTFKAQVDRLMEIHYVGLYAATGFIAVTGGDMDRFERPRDIGPWLGLSPKQDQSGDIDKQCHITKAGSPLMRRLLVECAQMIVRDGAIETDLKIKGMRICVRGAKIAKRKAITAVARSLAVLMVAMLKKMDKPYKPLSEVNEKAFSESQFSA

SEQ ID NO: 226249 - protein, 407 aa, unidentified
MGITCGIDWSESHHDVALIDEHGTVVARTRIDTGATGFHILLALIAEHGGSVDDTPIALETDKNLLVVALAKAGFTVYPINPRAVARYRERYGQAGGKSDPGDAAVLAHILRTDRHLHRPLPAVSEEGRAVKALARQHQEAIWALHQTVSRLRSVLLEFYPQALQAFPNLKHKAALTVLADAPTPAAGQRLTRGRVVALLRRSGRGNHPALVEQILTDLHTPALGQPPRVEEAYGHTVRGLVAIVVAMGQAVDDLETELAREFDQHPKAAILRSVPGLGPVLAARVLGEIGDDPARFDNPQGLRAYAGTAPVTIASGRLRYVKARKVRNKRFGDACDWWAYTMLTKSAGARAHYDRRRAAGDHHNAALRNLANKLLGRLWWCLVNNQPWDEHGAWPDHGHTENPTAA

SEQ ID NO: 226250 - protein, 404 aa, unidentified
MNLKFVSTKYRCHSFCHLDGVTGRQPTVVVAVAVPQDDEVGKTESGRACSKHHWGTTMEYYAGIDVSLESASVCVVDATGRIVREAKVASEPEILIGWFRSLRFAVTRIGLEAGPLSQWLYASMRDAGLAVELLETRHVRGAFKAMPVKTDRKDARGIAQLMRLGWFRAVHCKSLPAQEVRALLAARKLLQTKNHDVEMSLRGVLRGFGLKVGPTTPRTFPGRIRELVAGHTTLSTVAEALLAARSTLFEQWQKLEKRLRSLAREDGRVRLLMTAPGVGAIVALTYASAIDDAARFRSSKSVGAFRVDPQEVSVGRDRRHWPDFQDRRRRRAHRPLRGGQRHSDPAGERFYLEELGDAPGRSRGHAQSKSRACPQARRGSPPHVGRRNKLPGRQGGYSGHSPLT

SEQ ID NO: 226251 - protein, 307 aa, unidentified
MVGIGIDVSKATLDVAVAGQAPVRQFKNTTAGIAQLLKWLAGQPEARVVMEATGGYEEAALDACAHAGIWVARVNPRQARDFAKAIGQLAKTDSLDARVLAEMVDVLHARLRRHSPAPAWQAELKAWLVRRRQVIDTLQRSHQQSLTAPKLIRATMKNSVAALRKELAAIDVQMKHISQQHATPALRSAKGLGPVFQTTALAMLPELGHLSRQQIAKLVGVAPLNRDSGQMQGKRMIHGGRATVRIALYMATLSAVRWEPALRDHYQQLRARGKVAKVALVACMRKLLGILNARRRDELRAEGLLMG

SEQ ID NO: 226252 - protein, 379 aa, unidentified
MQSMNEQDVRVVGGVDAHADTHHAAALDGRGALLATESFPTTTPGYAALLDWLCGFGELTAVAIESTGSYAAGLVRYLREHSVQVLEVNQPHEHARRRRGKSDSIDAELAARLLLAGKATAIPKQSDGIVESIRLLRDARESAVKSRSAAILQLGGLIVTAPQDLRDQLKRRKTLRGKAALCRRFRPALDELATPSQAARFALRSIARRISALDDEITNLDRQLETLVHAAAPRTTQLLGISTGHAGRLLVTAGQNIDRLHGEAAFAALCGASPVPASSGKTTRHRLNHGGDRQANRTLHLIAVCRLRYCQRTRAYAQRRTAEGKTKREILRCLKRYIAREVYNTLQADVADLHQQPRPTRTTTIICGAGPIGITRHRT

SEQ ID NO: 226253 - protein, 336 aa, unidentified
MNEITRIAIDTSKSVFTLHGTDADGRALLRRNLRRHDMVPFFARRPPMEVVLEACGGSHHWGRVLAGLGHTVRLIPPQYVKPFVKRGKNDRNDAEAISEAAARPDMREVTVKSADQQAKAMLLSVRELLVRQRTQLVNALRGHAAEFGHVGRLGREGVAQVLADVAEDAQLPTPAKDALALLGAEIGRLDARLAEVDAKLLAQHKQTPTSKMLAEVPGIGPIVALSLVLRVDFTQFKSARHFASWLGLTPREQSTGGKTRLGGISRAGDERLRQLLVLGATAVIRQAKPGKASAWLIALLARRPRKLAAVALANKMARIVWAMMTSGEAYRQPATA

SEQ ID NO: 226254 - protein, 338 aa, unidentified
MYYTGIDLHKKTSFITTVNGSGKVVFRRNFPNNPEKILDYFLNLGGPTKIVIESMCSWHWLYDLLKANNFDVVISNPLKTKAIASAKIKNDKVDSHMLAQLLRADLIATVYVCSLKTRKLKELLRHRRRLVNDATRMKNRIHMLLMKNNISVAVSDLFGVKGMKYLKEIDLPIYHRQQLKCYLTLYGQLTKQIEPLTKRIKNLADKDPMAKLLMTIPGIGSLTAMFIIAEIEDISRFPSYRNLASYAGLVPCLDASADKSRTGRITKQGSPYLRTALVEAAQVIPRMKKSRLNIFYRKRIVRAGYQKAIVATAHKILRYAYYVLKNQTPYREEYPTCA

SEQ ID NO: 226255 - protein, 456 aa, unidentified
MAERREDESRSEEARQIEGLPVVRAQVGGIDLGSQRHWVCAPGLEGRGREIADFGATTPELQRMLEWLKVRQVESVAMESTGVYWIAPQEVLEAGGLEVLLVDTRQLARVPGRNKKTDPSDCEWIQRLHSCGLLTGAFRPPEQVGMLRTLVRDKANLVAEAGDWVRRMQKSLDQMNVRVHRAVSDLDGVTGLAIVRAIVAGERDARKLAQLRDRRCQKSEAEIAEQLSGHWREDHLFSLRQSLKMYEATQERIAAYEQEILRKLREMTPEERAGQTAPAVKNPHKANAIRKRGEEPRRQAWYRMSGVDATQIDAIGVGTIEVVLSEYGPDLSCFPTEKQFISHATLAPHVPRSGGKVVKKKKRYSASTRVAALALRHSPTALGAYYRSLARRIGGDVAVFATARKLATLIYRLLRWGQPYVDEGAQAFEERYRQQRIRSLTAKAKELGYQLLPATT

SEQ ID NO: 226256 - protein, 314 aa, unidentified
MNNIPQIFVGIDIAKDFLDIHLHPLNKAFRITNNKQGIRKLLKMFSKYEVQQVVFESSGGYGHFLYKELLAKDYTVWRVEPKRIKAFIVSEGVNAKTDQIDAKMIALFASQKKLKYRKVELRDNEVQIRVLVKRRNDLSEMITKETNRVKHPAQISSKKRINKHILFMKDDVKHIDQDIEQLINNDEALKLKAAIIKSIPGFGSVSVATLIALLPELGLVDYKKISALVGVAPFIQQSGASKGIAFIKGGRSALRKALHMPTLVAIRYNPVIKAFYDRLRKNGKNHKVALTAAMHKLVIIVNAMMKSGELWHYN

SEQ ID NO: 226257 - protein, 429 aa, unidentified
MQNESTPGARGPVFCGVDTHADSHWLCVLDWRGRKVLSRRFPADAAGYEALAGAIAAAGEPACVAMEGTSSYGAGLTRHLASLGMPVREALSPARMQRRRPGQGKCDESDAERAARAAMSGSKLGTPKSQDGWVDGVRCMLAARSGAVKARTSAINTARSLLTTAPEGLRSRFRGMAGPRLMEELPSVRAEGALGAALGALADLWAAARDAALDMERAIEASLEENCPALLAMYGCGPVSAAKLAVAAGDNPGRLRSEASFAAICGACPIPASSGKTVRHRLNRGGDRQANSALHEIARQRVMRDPETAEYAERARARGKSDREVMRCLKRYVAREAYRALMRPHEVRRPEDASGLVAARRAARVSQVRAASILGTSEKYISMLERGQRELKPIRRAYEAWVEAGLPLDWDRQAFEAEHKMNSKKHLAK

SEQ ID NO: 226258 - protein, 332 aa, unidentified
MNMNLQGGATQRSQSPTAGIDVSKLHLDVCLQTDLWRTSNDAQGWEELAARLCAEGVDLVVIEATGGYERGVVTALQAASLSVARVNPRQARDFAKSMGTLAKTDRLDARGLRDFADVLARHPQRSKFITPVKQAEREVLQGLMTRRRQLVDMRVAESNRLEVAAERAAKSIRRVLKLLDSQITELDRDIDEHMDRHFKDQRKLLDSVKGVGAVTTLTLLSALPELGKLGRKPIAKLVGIAPLANDSGYRRGDRHIWGGRSEVRSALYMATLSAQRYNPAIAAFYQRLLAAGKPKKVAMVACMRKLLTILNAMLRDQAIWDAAKHLKEPQNA

SEQ ID NO: 226259 - protein, 402 aa, unidentified
MRYFVGLDWAKLTHAVCVIDEDGQVVMRRAVDHTAEGLAQLVTALRRFGDPAELGIAIERPSGLLVDALVEAGFVVYPIHPNVVKASRPRYSAALGKTDPGDAYLLADLLRTDGHRFRALCSLSDETRALRALVRARSELVGARVGLANQLRALLESFWAGAVAIFGEIDSPIALAFLLEYPTPASAARLGPKQMAAFLSGQGYCGRRSPHELLQRLRAAPTIELGPAEMAAKGTLVCSYATLLDTTVKQIRQLTSAIERAVMAHSDATVFTSFPRIGKINAAQILAELGARDRFLTEEQLAGEAGVAPVTRMSGKHRAVVFRWACNHRLRAALTWWADNSRRASPWAHAVYLSARHRGCDHPHAIRILTRAWLRVLWRCWKDATPYDLTQHHAAAALKQPA

SEQ ID NO: 226260 - protein, 344 aa, unidentified
MTKSPIAVLGIDLGKNSCSLAGLDASGAVVLRKRVRRDGVIAFVSGLPKCMIAMEACGGAHFIGRALAEQGHEVRLMSPEYVQPYVKAQKTDDRDAEAIAEAATRPTMRFVPLKSAAQLDLQSLHRARERLVHARTALINQLRAVLLERGVIRPKGRAVLMRRLDEMMSDQQAISLRACQLVQDLREEWAGLDRRIAAYDDELAAVTRNDAQARRLATIPGIGAINATALLAAIGGGDAFRKGRDLAAWLGLTPRQHSTGGRTRMLGISKRGNQYLRKQLIHGARAAMRHLAAKPSGLGAWLRGLLGRVHPNVAIVALAAKLARIAWAVLRHERDFDQNAPAGA

SEQ ID NO: 226261 - protein, 338 aa, unidentified
MMAAIDVHKRVLQSAVLDPASGEFAEERFAGREGLADWAMRWRGRVATVVIEATTGWRWVARELAAAGFEVRLADPGQAKALRGRRRKPKTDRLDARWLCLLLARELLAEAEAWLPPAEIQELRDRTRLRKALVDDRTRWAQRLHALLTHEGWPCERARLLTGRGRRWVNGLALPAASRAQAELIVRLIEQLEREIETLESELRRFAKADPRCRQLTRIFGVGPIIASHLLAEIGQASRFRRARQVVRLAGLDPVVDESAESKRRGKLAKAGPPALRWALVQAAQHAGREQSPDRALYRRAAGRCGSQRAKLTVARKIARRAYHLLNELERQQEPQAA

SEQ ID NO: 226262 - protein, 286 aa, unidentified
MLDTTTFVGLDVHARSIKAVSLDVMTGEVRAATFDAGAVAEWVRSVDPGARCVYESGVTGFDLQKRLSGLGVDCVVGAVSKMIKPSADRRRKNDRNDAEFLARMLSVGNVVEVWVPDDECEAARDLTRALEDARDDLSRSKQRLSKFLLRHGLVFDERTPTGRRKGNWTRAHWSWIESIRFAEGADNDALAYYVDAVRRAAEEKARLEGLVEAEARKPRWRRRVDSLRCLKGVDTASAADLVFEAGEFSRFRNARSFAAWVGLTPSEHSSGESDRRGAITKAGNKC

SEQ ID NO: 226263 - protein, 387 aa, unidentified
MPQLNDLSRSLVALDQDSTIIAVVELSQSSWLVAGVLPGIERQPQKKLEPSAERLLGLLHRWRDEAVRAGKKITRIALAFEAGRDGFWLARWLNARGVEAHVIHPSSVAVSREHRRAKTDRLDTEMLKRGFLGWLRGERGHCTMARVPTIAEEDAKRPNRERECLVGERTRIVNRIKATLARMGIRNFKPTLRKAAERLATVRTPEGMPLPPNTLAELQRDMARLGFVVSQIREIEQARQKRLEQETETGPHAMVRQVARVIGIGIETADMLVHEVLSRPMRDRKAVARYAGLTGSPDESGARRREQGLARAGNARVRRGMIQLAWRFLRFQNQSALAQWYRARTADSRLGMRKTMIVALARKLLIALWRFVTTGETLEGVILRPAG

SEQ ID NO: 226264 - protein, 408 aa, unidentified
MEIIHKRCAGLDVHKETVVGCVRVRERGDVRHEVRHFVTTTAGLLELGEWLRAAGCTHVAMEATGVYWKPVWHILEGEFELILANPLHIRTVPGRKTDVNDATWIADLLAHGLIRSSMVPPGPIQELRDLTRTRRQLIREVVQHKQRIQKVLEDANVKLASVVSDMFGQSGRQMLKALIAGQTDAQKLAALGSERLSASRATLAGALHGKVTAHHRFLLKQHLQMIEQLEQPVSEFEAQIEAALQPFRAAVERLITIPGVSATAASVIIAEIGVDMSRFATVAHLRSWAGLCPQLKESAGKVMSRRLRYGAPWLKTVLVQCAWAAIRNKSNYLHAQFLRLRARRGPKKAILAVAASILTAAYYVLRCQVPYRDLGALYFARLDQDRTAQRLARPIKELGYEVEIRKAA

SEQ ID NO: 226265 - protein, 393 aa, unidentified
MICVGIDVAKDKHDCFILSSEGEVLADVFTIQNNAEGFDTLLQTIRRCVRPEDKIKVGLEATGHYSYNILGFLLNKGLPTYVINPLHTNLYRKSLSLRKTKTDRVDARTIAAMLMSDVDLKSYTDTVYHNEELKSLTRYRFDKVRERAKLKQSVSRLVTILFPELEKLVPTLHMASVYALLCELPGAKQIAGAHLTHLKALLSDASKGRYGRDMATTLRDAARCSVGSAMPAKSLELQHTIRLIHELDAEIEDIEAAIQSMMDEIQSPITTIPGISVRMGAMILAEIGDFSRFDSPDKILAYAGMSPSTYQSGQLSLSGTYSHMEKRGSRYLRYALYTATKYACLWNPTFAAYLAKKRAEGKHYNVALSHATKKLVRLIYAMEESGLPYSSAA

SEQ ID NO: 226266 - protein, 418 aa, unidentified
MKSMEITAVGIDVSKRKSTVAIRRPGGVIVACPFDISHSSHDLEKLVSILKTTGGDIRVVMEHTSNYWKPIALTLKNAGFYVSVVNAMLIHDFSDNSIRKLKTDRADSLKIANYALTFWNQLPPFNDEDETRLVLKEQSRMYERLASTATSLRNGLIALADQTFPSIDQAFGHAIKNADGHEKWVDFFSIYWHRDCVLRLSIEKFTESYRKWCLRRNYKFRTNTAHKLYALAQDAVPTLPKNNGTKALVLQACKSLNAVCEAKQATQEEMNRLASLLPEYEVVMQMEGTGPITGPALMAEIGDVRRFKNKKALVAFAGIDAPPFQSGNFESKSRHVSKRGSPHLRRTVFLVANIILTLSHKDNSVFCFMDKKRAEGKHYYVYTIAGSAKFLRIYYARVTEYLRAQEPTATAICLDCKD

SEQ ID NO: 226267 - protein, 354 aa, unidentified
MNIIGCDFHSRTQVIAMLDTETGEVVEKRLDHESGEAKSFYEGLKGPVLVGIESTGYTRWFAEMLAGMGHELVVGEAAKIRATETRKQKHDRRDAEHILNLLVKGDFPKIWLPPAEERDVRVLIEHRHQLVELRTRARNGLQAMALSYGLRRRGKLWSKAGQQELQNLPLREGMGRRREDLLKLVGQLNVWVKELDERIEEEVARREDARRLMTHPGVGVQTALATVLVLGPVERFPDDRHLTSYLGLIPQEESSGGRQRFGHLTKQGNRLMRFLLVEAAQTASRYDPRLKRAYRRLAFRKGAAIAKVAVARKLAIRLYIMLRDGIDYEEFCRRGPDGSGRGSHAGMLGDVALV

SEQ ID NO: 226268 - protein, 343 aa, unidentified
MYFIGLDVHKKTISYCVKDAAGRVHQEGKVGSTRRELDGWIRTMPQPRMIAMEATIFTGWIYDHLLPHAEKVKVAHPVMLRAIAAAKKKNDKIDASKIADCLRCDFLPECHIASTEIRDRRRTLRYRNLLVRQTVQMKNRVSGLLMETGVSYNKQRLHKVGYFADLMTTNEEVDESIRPLLKLSREMICRSQKLDYALVSSLERDPLLKERLRRLRTVPGVGPITALTWALEIGDITRFTSIKQAISYCGLCGDEKSSADKVMRMPISKQRNKHIQRVLIEAAKLGPRECHELAEVRAKELEKGDRNRATLAVARKMVCYLLAVDRRNQDFVPAEKFTRRRAA

SEQ ID NO: 226269 - protein, 388 aa, unidentified
MIYVGIDIAKTNHYASIVNYSTGEAVESPFLVTNNKQGFELLYSKIKDYDRNKVLIGLESTAHYGNNLISYFHEKNFKLGVINPIQTATLRKTRIRKVKNDKVDSILICEALSLGYYNLLSDYDIKLLEIKSLCRFHKELKDKATEAKIQLKAYVDQLFPELNYFFKNNLDIKTAHELLKLYQSPKDISKVNLTKLSNLLIDSSHGKYDKSRAIELKQLASNSVGINNYALSIQIKMTIDLIELLESQINDIEKQVSEFIKKSDNVITSIPGIGDMTAAIIISEIGDINRFNNPGQVLAFAGLDPSVKQSGTFNASSTRMSKRGSSLLRYALILAANNVQLNTKTFNDYYNTKRLQGKLHYNALGHCAGKLIRNIFYMLKQNVKFNLD

SEQ ID NO: 226270 - protein, 350 aa, unidentified
MSTVRIAVDLAKNVFEIAVSVHAGQVRERHRLSRPQFERFWSTRAPCRVILEACSSAHFWARYLISRGFDVVLLPPHYVRPYRRRSKTDRSDCDALLEADRCAGIHPVAIKSPDQQALVALHRIRSQWLRSRTARINAMRGLLREFGVTAPAGAQRFMNELHPLLCARQASLPPQIRGAVVSLWEEVRDLEERIDCLEAELQAVASQEPAVQALLKIPGIGPLTATALFATVADIHAFRNGRQLACWLGLTPREFSSGGRRRLGRISKQGDPYVRMLLIHGARAALNAARRAKAAEKPLTHLQAWALERARDAHANKAAVALANKLARIAWAVWYHEREFTGNHVVRLAA

SEQ ID NO: 226271 - protein, 453 aa, unidentified
MAARNARISLRPVKSRAALTITHPNAAGIDIGSASHFVAVPPDRDDEPVREFPSFTVDLNAIADWLKACGVDTVAMESTGVYWIPLFELLESRGFTVFLVNARHVKNVSGRKSDVLDCQWLQQLMTYGLLSAAFRPAEQVCVLRALYRQRGMLLRSQGRHVQHMQKALTQMNIQLTNVLADVVGETGQKILRAIVAGERDGQVLGAMKNVRVRASVEEIAKSLQGNWRAEHLFALRQALGAFDFVGTQLAECDAEIELQLQRLQAHDGDPAKGKKRGRARNAPKFDLRVQLFRMCGVDLTRIDGVDVTTALAVVSEVGTDMSRFPTIKHFTSWLGLCPGTKITGGKVMSGKTKRVVNRASQALRLAAAALRSSKSALGAYFRRMCSRMDKPKAVTAAAHKLARLIYTMLTKGEEYTDQGQDYYEERYRERVLRALSQRAAKLGMQMVPIAQPA

SEQ ID NO: 226272 - protein, 337 aa, unidentified
MKVTLIGIDLAKSIFQICGVNQAGKRVFNRQVRRARLMEFLMQHPDATIAMEACSGSNYWGRTLQQHGCKVMLIPPQHVKPFVKGNKNDRNDAFAITEAARRPGLTCVEPRTLAQTDMIQVHRVLDRMTRQRTALINQVRGFLNEYGIVIAQGKERLLAAMPDLLEDAENGLTPSSRALFQQLLEQWRQANEAIKLLEKGLKGTALTDEAAQRLMKMKGVAVKISTATIAHAGNGHGYKSGRHFSANLGLVPKEHSSGGQQRLGGITKRGNQYLRRLLIQGAWSVVRNVDKNDDRLSRWARQLVERRGKHKAVVAVANKMARIMWSMLYHQTEYRAN

SEQ ID NO: 226273 - protein, 340 aa, unidentified
MEKASMIGLDIAKNVFEVHGRNGAGAVVLRRSLKRSQVEKFFVKLSPTVIGLEACGSAHHWARVLGKLGHEVRLMPPAYVKPYVKRNKSDAIDAAACCEAVGRPDMRFVPVKTVEQQAALSLHRSRDLLVSQRTQLGNALRSVLSEFGIVAGKGKAGLARLVDELRAGTLDLPADAVAAAMTLADQRAALEAAADALERRITAQAKADEKAVMLKTAPGVGPLSAHATLATLPDPSLFRSGRDFAAWLGLTPRLTGTGGKVRTGRITKQGNQPLRRLLVLGATAWVSYAKAHPEKASPWLRGMLARRPSKVVAVAQAARTARILWAMLTHNQPYRAPAVG

SEQ ID NO: 226274 - protein, 413 aa, unidentified
MEAIVERCCGLDVHQASVVACLLVGRANEKPKKVVRTFGATTSDLGALRGWLAEEGCTHVAMESTGVYWLPVYILLEGHFQLIVGNAMHIRNVPGRKTDVKDSEWIADLCRHGLIRASFVPPQPIRELRDLTRYRRKLTESHTAEGNRLRRLLETACIKLGSVVSEILGVSARLMLRALIDGVATPGQMAQLARRRLRSKIPKLVLALDGRVTEHHRFLLRMQLDRVEQVERDLQKLDQHITNQLVPYQSQMQRLMGIPGVDWIGAASIIAELGVDMSIFKTEAHAAAWSGVCPGNNESAGRSKGQPIRKGNYHLTTALVQAAVCASKQKDCYLRDKYWRLKARRGPKRAALAVAHKILVAAYHILKDPLVEYRDLGPTYLDKLAPERTKHNLVKRLEQLGFRVTLEPAPGAA

SEQ ID NO: 226275 - protein, 378 aa, unidentified
MIVIGVDAHKRTHTLVALDAVTGIIRSEATVQASDDGALSVLRFAAAVDGERVWALEDCRHVTARFERALLGAGERVVRVPPSLTGESRKATRTPGKSDPIDARAVALAAIREGLDRLPVAFLDEQAHEIRLLCDYRDQLMHERVRLINRLRWHLVRIAPHLEAQIGPQALKGPRIRARLARQLGPPASTELRVAKAQLRRINEITKEQKELFAELTTLIQAHAPQLLEQRSIGTVTAAVIIGRTAGAQRFRSEACFARHAGTAPIPASSGKTSRHRLHRGGDRQLNRAIHIIALGRVAWDPATRAYIQRRVSDGKTKREAIRCLKRHIARQIWHLLYNTHQPQPAPAHATKTPRHSRRPHPQIMHSLKTANTETALT

SEQ ID NO: 226276 - protein, 378 aa, unidentified
MAIVAHARPFVIGVDTHARNHAISILACPTGEVIDEAQFPTTTAGLSRAVCWVGRRTGGDVDVLWVIEGTGTYGARLASTASDAGYTVVEAPRMNARANRGIGKSDPLDARRIAAAALPLQDSQLREPRADDGVRAAVKVLLASRDHMSTERTATINALTALLRVVDLGIDARQPLTATQIATIAAWRTRHEDIAIATARGEANRLAKRVAALDIELKAITKRITDLVRQSPAATLLDQPGIGPVTAAVALTSWSHLGRIRSEAAFASLAGTNPIPASSGNTVRHRINHGGDRRLNRALHMAIVTRMRTDPRTRAYVQRRTAEGRTLREIRRCLKRYLAREIYRHLNTAARGIRNIANYITRSLLDTSGFRPLIRSLL

SEQ ID NO: 226277 - protein, 341 aa, unidentified
MKQNVCTVGIDLAKKIFHLVGTDTTGKIVWRKRLTRHALMPFLAQLPPVTIGLEACGGAHYWARQLRHQGHQVKLMAPQFVKPYVKSNKNDMRDAEAIAEAVTRPTMHFVPLKDVDRQDIQALHRVRERLIGARTALINEVHGLMLEYGIVMPTGVAKFRQAVVEKLESEKDKLTALSQELFGKLVQEFVALEEQIAFYQEKLETLATTHPECQRLMTIPGIGPITATALVAAVSDVGVFKNGRPFAAWLGLVPKQHSTGGQSLLLGISKRGDSYVRKLLIPGARATLRWVKLQTDKRSQWIRGLLARRGWNRTAVAVANKNARIVWALLSRGGVYGAHAS

SEQ ID NO: 226278 - protein, 453 aa, unidentified
MAKQRKAAKRKGSRNRPIPVINPNAAGIDVGAREVYVAAPQDRDPEPVRTFATFTPDLVELANWLAVCGVTTVAMEATSVYWMPLFTILEERGIEVCLVNARHLRRVPGRKTDVLDCEWLQYLHSVGLLRGSFHPSEAVAAVRTVLRHKASLVQMGSSHVQHMHKALTQMNLQIHHVISDITGVTGMAILDAILAGERRPEVLAELRHRSIKADEETLGKALTGTWRREHLFTLRQSLGAYRHYQAQIQQCDEELHQLLGNFRSRIDPGEDPLPPAPGRRREPLGLDLRTEFYRIFGTDLTAIPGIEVHTIQTLFAECGRDLSAFPTAGDFASWLGLCPDNRITGGKVISTRTRKVNNPAANALRLAAQSLHRSPSALGDYYRRMRYRQGPAKAITSTAHKLARILYTLVTTRQFYDETVLAQHQHQTRARKTRRLKTQAAALGFDLVPVEAA

SEQ ID NO: 226279 - protein, 338 aa, unidentified
MSPSVQLYVGVDIAAKTFTATWATDPAAAPAARTFPQTDAGFTQFQQALAATGIAPAATRIALEATGSYWVALAVAMHQTGYVVSVLNPGQVALFARSLPRRSKTDALDAHVLIRFAAERQPAPWTPPEQVYHELRQRLVVRDGLLQMRQQARNQRHAVAQWPVQIASALAALDTVMAELDAQLASLERELLQVLQDGAWASSATILLATPGLGLVTTAWLLVSTVNFTTVTSPEQLTAYAGLAPLERQSGTSIRGRPAIGHGGNSRLRTALYMATLSAARVNPTIRTFYDRLREAGKPTKVARCAAARKLLHLAWALVTKQQPYRAPGAETAIPQAA

SEQ ID NO: 226280 - protein, 439 aa, unidentified
MKKRRERVCGADVHKDLIVATIAGDEVPPIRENFGTTKSELDRFRSWLAANKCEQVAFEATGVYWIPIYDALSRTIDTIVANPLQIKSIPNDKSDSKDSKHIATLCLNNQIKRSRVFCDEDRELRNLTRARAGYVKTRTQFKNRIHKYLSSNGVKLSSSMDDIFCKSGTHIIRGLAEDNPTEEILKGIPCGKIRKKQDEIRSALANELSDTNRMLIRDALEIMDNVESKIEKTSFEVLKKIQKKSTDLAIVMSIPGIAFISGSVILSEIGDYRDFQTPEQLAKWCGLNPGENESAGKKRKCGITKRGSKYIRVVLVEAAQTIANMKNTTLSRFYKRLSKKKEHNVAIVAVARKLICLIYHLLINQEFYQEVGCRKRRTGRNESSHEPSLKDEHLTDKVAAIVDAFYGMSESNRKKALMRVLEDISVNKPDRKRSSDGGG

SEQ ID NO: 226281 - protein, 450 aa, unidentified
MKFKAQEKQNQLIENITAQHLVVGIDIAQQTHVARAVNFRGIAIGHPLSFSNDEDGFLNLLRWIQSLQAAHNLTAAIIGMEPTGHYWLNVSKWLSEHHFEVVIVNPHLVKKNKENRDNTPSKSDKKDALVIADMVKNGYYSFVRNAPEAFEELRVFLSNRDSIVTRLVSAKNQIHRWVDVVFPELRQVFKSLMCTGSLATLRLFPTPEELRKLQPQDIIEGWKSLMKRHSGERKARALITLASSSVGSKQATHAYKLHLKQLLDEYDLACQQLKAVEAEIIALLDRIPFAKAMLAVKGISAISLAGVLGEAGDLSGFVHGNALLRHAGLNLAEASSGKWTGQMKISKRGRSRLRRFIFLMTMSLVANNPEFKALHAHNVQVKKMKKMRSLMKLCGKLARILVGMARSREAYNPHKTMPLQLAAKVYLIVMLYEVWLIRGISKESTEYRIH

SEQ ID NO: 226282 - protein, 372 aa, unidentified
MTGKAVADREFATTADGYRSATAFLTATGAVVRVGVEGAASYGAGFTRALKAAGIDVVDVDRPARFDRRRAGKSDRLDAYHAARAVLAERSNPVKGPAIEGVRALHLARRSAVKAQTAAMNQMIAILVMAPDTVRARYRRLHGDRLAIALTRSRGALDPVSTDTLFALKALADRYRQLAVQVDALTTRLDHAVRQASPALRAAFGVGPDTAAQLLITAGSNPERLYSECSFAALCGSAPVQASSGKTHRHRLSRGGDRAANSALHRIALVRMANHPPTRAYVARQTANGHSKREIIRMLKRAIAREIYRLLTHPADVPNYADLRAVRQAKNITVTLAARHFDVWPAVISRLERGLRRDDDLARQYRTWLAAT

SEQ ID NO: 226283 - protein, 409 aa, unidentified
MKDSRKRYIGLDVHKHYLIAIGVDDALNVVLPARRVEFSYLEAWMKKTLTRQDEVVLEMTTNTWQLYDELVVYAGSVLVVHPPHVALITRSQVMNDKLAASILARLLAKGLLVGIWVPPQEVRELRGLVAQRRKMTTLATQAKNRLHAVIQRHHLIPPEGNPFGASNKEWWQVLPLGKLEKLNLQSDLETLQFAEKQVKRMTEMMEGMAAEQEPIGRLLHLAGFGVVTAVTVWAAIGDIRRFREPRYLVGYAGLGTRVHDSGMTTRTGKITKAGRRDLRTVLIEAANVAANSHPHWKAELARLEPRLGRNKAVVAIARKLLIAVWYVLQGKTDKYAEPEAIAQKMLKFAYQVGKANRPKQQTAAQFARLRLDALGLGQELTSIPWGSKKPIPLPPSSLKTERSDVPNTK

SEQ ID NO: 226284 - protein, 371 aa, unidentified
MFQPIRYVGLDVSKETIAVAVAEPDGTVVEYGDIPNDPSSVRRLVEKLSRDAQLKTAYEAGPTGYPLHRQLTGLGIENKVVAPSLIPRRPGDRVKTDQRDAVQLARLLRSGDLTPVWVPDEAHEALRDLVRARDDARTEGLRTKHHLGKFLLRQGVSAPARVGRAWSARHQAWLNTLTFRDRAAQITFDDYLACVRAATERIRRLDAALLECGATSPHLELLRALQAVRGIGFLTAVTIVAEAGDLHRFRSAPAFMAYVGLVPSEHSSGGSRRRGHITKTGNRLLRHVLGEAAHHARLQPAVSEALRDRQQGVAKEVVEISWRCQQRLHHKYRHLGGRIGRQRAISAVARELAGFVWAIGQAVQSVTVATA

SEQ ID NO: 226285 - protein, 368 aa, unidentified
MKKGSTAAAKENRNFSQQKLTIGLDLEDRNSWYCVVNEAGQIQFEQRVRTSAKALREVFGAMPGSRIALETGTHSPWISRLLGELGHEVIVANARKVRLIGESRKKDDRLDAQTLARLARIDPQLLCPVKHRNAQAQADLMMIRARAGLVRARTGLVNTARGLAKSYGERLRGCNVRNMNPEKVEGLSPELQRALEPLLSAIAELSEQIREYNERIEKLAQESYPQVALLKQIKGVGTLIAVTFLLTLEDPHRFRKSRDVGCYLGLQPGRRNSGRSEPQMHISKEGDPYLRTLLVQGAQHILGPFGVDCDLRRWGLKLAERGGRNGKKRAIVATARKLAVLLHHLWVSGEVYEPLHNSSSRAIVTAAA

SEQ ID NO: 226286 - protein, 347 aa, unidentified
MCNVPRYFIGVDLHKTVLQICVLDQAGEIVEELRCRPVDQAGGELVLDRIQPYLNEGRVAVEAIGLNRWFVNRLLARNVDFVVCDPIKLNLKILGKKTDKRDALEIARRLLLGDIDRNAKTYYATDEEYGKRKLIRARQSLVRMRQQVINQIRSLLNSYKITGFPGRLTSRRNLTKLSELEMNTNELTVVLKAFLSQLVSFTESIENLDKQIKNLAQETLPRSLQEIPGIGPLTALILVNELGDVRRFKSSRAVACYAGLVPRISQSADTAHHGSLTKRGNRELRHILGEWAVRLLASDKRVSDWARSRLKRSHKNKVRMALSRRLIVGIYKTLLTGDEFTLERCLS

SEQ ID NO: 226287 - protein, 346 aa, unidentified
MVGIIRIGMDTSKSVFQLHGVNAKEQPVLRRKLSRREMVKFFEKLPPIEIAIEACGASHYWGRVLSCLGHTVKLIAPQLVKPYVKRGKNDAADAEALCEAMSRPTMRFVPLKSEEEQAALMLIGMRARLIRNRTQLVNTIRGYAAEFGITAPKGMCRIEALLDRIAADESLPTLTRELFALHAKEYAELQGEIEQLEGKVMAWHRANECSQRLAKIPGVGPIGAALLMMKTPDPHLFKSGRAFAAWIGLTPRDHSTGGKTRLGRITRAGDEVLRSTLVVGATAVVSHARRTNGKNASSWLRELLERKKPKLAAVALANKIARIAWKLMVSGEHYKRLLQQPGAAAV

SEQ ID NO: 226288 - protein, 446 aa, unidentified
MKKSSRMSVIHPHAAGVDIGAEFHVVAVPPDADAEPVRTFQSFTGDLHRMSDWLKSCHITTIAMESTGVYWLPAFEILEAAGFNVILVNARDAKNVPGRKTDVNDAQWLQKLHSFGLLRASFRPEHDISVLRSYLRQRERLTEYRAAHIQHMQKALMQMNVQLHHAVSDITGVTGLSIVRAIVSGERDPSVLIQYRDVRCKKTPEVLQQALTGNWQPEHLFALEQSVAFFDFYQEKIRECDDQIETSLLQLSTGTEEPEGVLPSARHRTKQPNQLSFDVRPLLWKITGADLTQIHGFGPYLALKFVAECGTDMNRWPDASHFTSWLCLSPGNKISGGKVLSSKTRRSSSRIAAALRLAGTTIGRSDTALGAFYRRLSSRIGKAKAVTATARKLAILFYNALKYGQKYVDPGADYYEERYRNRVLDGLKRRAKSLGYSLQQDPELCV

SEQ ID NO: 226289 - protein, 432 aa, unidentified
MPHIATRMGLPRFNVSAIAPEKEYAMITVGIDIGKEKHAVAAINAAGGVLMPPRFFDQTAAGFAALLAQLGKLGKAADIRIGMEATGRYWIPLRHALAEKGYRVESVNPIITSAEIAKDVRGRKTDKADALAIATALLRNRHNPAPAEDAATDALKSLTRHRTFLVRQRSNAKRCLHAALDVTFPEAGKVFGQLFSATALAVLEAFPSARLLARANLKTLSAIVSKSSHGRLGAERARLFRDAARASVSVSITNEGDEAALVSLIAQIRFADAQIEQAEEKIRSMPAPETAELLTSVKGLGTLLPRVIACEIGDMERFRHPPSGKPPRDMDKRILAFAGCEPRLRESGKWKGRTRISKRGSPALRTALWQASAMCRLHNPIFAAVYERQKSRGKPHSVALFYVARKLVEVMCGMHKTGRPFSLQTAGGAICP

SEQ ID NO: 226290 - protein, 345 aa, unidentified
MPIIGGLDIHRKQITFDYLDTATGEVRRGQIAPADREHLAAWLAGRFTGQNAHFAVEGCTGWRYVAEELAAAGTTPHVAEPADVAALRGRKRHAKTDKTDSRHLRQLLADGRLPECWIPPSHILECRALLETYHDLRAEHTAWTQRIHAALFHQGAPQLGGQRLRTGEGLAALQAIAAAQLSPAGQLQVAVALDKLAALDRHLDVLRRRLLEAARQLAGARELHARLYGVGPITAVALVCWLGGSGRFSSARKAVRFAGLDVTVWSSDRKGPPGRLSRQGPAVLRWCVYEAGKTHARGSAPDHGYYASVKDRIDGKRAAISEARKIIRQAVHILAELGDGALAAA

SEQ ID NO: 226291 - protein, 363 aa, unidentified
MTPRQNAMFSGGIVLAGRKYWVGLDTGVAETAVCLIDEFGEILFEGKRETHAGQIKDILRPFGVEAVQRITIEAGVGTHMVRELQAQGFPVYVAEVRRVSKFLAIRRQKTDLNDARGLAELGRVGRTIGAEVFVKPLDCQNLRSLLNVRKNLIQQRMKIDALVQSIVRLHGGKLKTSSGVGRLASSIEDQLEILRADGIDVDADVRPLISIAENLRSHIAGMDKRLRAAALAHPVCSNLMTVPGVGPITALSFYSAIGDPSRFQRTRDVGPYFGLTPSIHQSGVLARVGRISRFGSKLTRTHLVSAATVLLCSTKTESALQAWGLTLRKKVGLSKARVAVARKLAVVMLHMWKSGSSFDPART

SEQ ID NO: 226292 - protein, 386 aa, unidentified
MKRNDLSRSLVAFDQNSTLVAVIELSLKSWLIAGLVPGLARQPLKKQSADAEAIVKLLYGWREEAVKAGGKIERIVIAFEAGRDGFWLARWLRERGIEAYVIHPTSIPVSREHRRAKTDRLDTALLMRAFLGWLRGEAKHCSMAAIPTLAEEDARRPNREHEHLVGERSRIINRMKATMIRHGIGNFNVKYRKAAERLEEVRGREGMPLAENTLAELRRDMARLALVRVQIKEIEKTRLERLKKAPQEGSHPMVLMLAKVMSIGIETADMLVHEVLSRGLRDDRAVARYGGITGAPDESGSKRREKGLARAGNARVRRGMIQLAWRWLMFQKDSGLAQWYRARTASARRDVRKTMIVALARKLLIALWRYVTTGEIPLGARLRPAQ

SEQ ID NO: 226293 - protein, 346 aa, unidentified
MEQIIRIGMDTSKHIFQLHGVDAAERPVLRKRLGRKQMVAFFARLAPTVIGIEACGAAHYWARVLGEFGHEVKLIAPQHVKPYVKRNKNDSRDAEGLCEATGRPTMRFVPVKTAEQQAALMLAGLREQMVARRTQLSNAIRGYAAEFGISAAKGLDKIEPLLAQIAQDEGVPALARVSFAVQGRQYAQLQVELKAIEARLRAWHRANADSRRLAQIPGVGPIGATALVMKTPDPRAFPSGRQFAAWLGLTPKDHSTAGKTRLGKITRAGDERLRSVLVAGATAVIQQAKHGRGHPSPWLIALLKRKPPKLAAVALANKIARIAWKLMVTGESYDGARMLGASALAA

SEQ ID NO: 226294 - protein, 298 aa, unidentified
MFDGSKDYEVPNERGTKTLKKLIKRNYGKEWREVRLIYEPTGPYSNYLREFASENQLRVYEVNPKKSANFAKALGNRSKTDAVDAKMLYSFHLLLKKEDLNIPEIDETTEQLGPFIHSYEIIQKTRTMLSNHLHAMEYKSGIDTKLKESIKKEINHLKQIEEDLEREMKTFAENNPETREALDNLLSIKGIGVISAIALLYLFKKYPDTNRNGTTALAGLDPVRRQSGFSLNGGRKISRAGDSMLRKVLYLACMNSIQHNERIRMFYEPLVTNNHKKPKVALVACMIKILLVAHQKSM

SEQ ID NO: 226295 - protein, 342 aa, unidentified
MDHFAGLDVSVKETSVCIVDDTGRIVREVKVASEPEALLGVLKNPGYHFKRIGLEAGPLSQWLFSALAEAGLPVICVETRHMRAVLKAQINKTDRNDARGMAQMMRVGLYRPVHVKTLRSQKLRMLLTHRQLLLSKAIALENDLRGTLRNFGLKVGMVGKVKFEARIRKLVENLPDMAVLVEPMLIVRRVLREQIVILHRRLLAIVRDDEVCQRLMTTPGVGPVVSLTYRATVDIPARFRKSKSVGAVFGLTCAKYQSGEVDWDGRISRCGDEMMRTMLYEAAQAMMRSKKWSWLKAWAMQIARRRGMKKAIVALARRLAVIMHRIWVDGTEFRWTREAAVA

SEQ ID NO: 226296 - protein, 406 aa, unidentified
MEKTEKRYIGLDVHKYYLIALGVDAELNVVLPARRVELSRLEAWMKKTLTKQDEVVLEMTTNTWQLYDELVEYAGSVMVVHPPHVALITRSQVMNDKIAASILARLLAKGLLVGIWIPSQEIREARGLVAQRQKMVRLATQAKNRLHAVIQRHHLVPPAGNPFGASAKAWWQSLRLGKLEKLNLQSDLETLQFGEKQVQDMTEIMEGMAAEQEEIGRLLHLAGFGVVTAMTVWAAIGDIGRFAEPKYLVGYAGLGTRVHDSGMTSRSGKITKAGRRDLRTVLIEAANVAANNHPHWKAELARLEPRLGRNKAIVAIARKLLIAVWYVLQGKTDKYAEPEAVAQKMLRFAYTVGKSNRPKGQTAAQFARVRMDALGLGGELTSIPWGSKKPIPLPPSVLQRKERRPK

SEQ ID NO: 226297 - protein, 397 aa, unidentified
MYIVGIDIAKRKHEAAVIDGEGTVIIKPFSFTNNCSGYNRLMAMLAKAKLPLDEVSFAMEATGHYWLALFTRLQKEGFRVQVINPVQTNSIRSFYIRQAKTDPRDALLIAEVIRFGHFSESTLHPENIYELRELCRGRHAIVSMQADVKRKVVALLDQVFPEYETAFTNLFGDTSMAILQTCPTPKELSEMCLEELCHLIEVSSHKRFRMAKAQELQELARNSFGFAMAGDVFSTMIRLYAKHLDFLKQQVREMDRKIAEIMETLDTPITTITGIGPTLGAYILSEIGNISRFSSAAKLAAYAGIDPTMRQSGEYNGVRNRMSKRGSPYLRHAIWLATSSAVLHDPALKLYFQKKRDEGKPYMASVGHACRKMVSIIYAVMRDNKAYTPCIPNEISA

SEQ ID NO: 226298 - protein, 397 aa, unidentified
MYIVGIDIAKRKHEAAVIDGDGAVIIKPFSFTNNCSGYNRLLAMLTKAKLPLDEVSFAMEATGHYWLALFTRLQKEGFRVQVINPVQTNSIRSFYIRQAKTDPRDALLIAEVIRFGHFSESTLHPENIYELRELCRGRHAIVSMQADVKRKVVALLDQVFPEYETAFTNLFGDTSMTILQTCPTPKELSEMRLEELCHLIEVSSHKRFRMAKAQELQALARNSFGFAMAGDVFSTMIRLYAKHLDFLKQQVREMDRKIAEIMDTLDTPITTITGIGPTFGAYILSEIGDISRFSSAAKLAAYAGIDPTMRQSGEYNGVRNRMSKRGSPYLRHAIWLAASSAVLHDPALKLYFQKKRDEGKPYMASVGHACRKMVSIIYAVMRDNKEYVPCIPNEISA

SEQ ID NO: 226299 - protein, 456 aa, unidentified
MNNYFLGCDVSKGYADFVIIDERKYVVEKNFQLDDTFNGHNQLFQILKYFIEKDSEAFLYAAVESTGGYENNWFQTFKKFSRELPVKVVRINPFAIAHSNKAAMKRVTNDRISASTIAEYQIHHPEKLQYNQDDAYQTFKRLVTTTLMLKKTKSQFVNELETLLYVANPEIIKYRKSKIPQWLLRVLQYFPDAASLATASVENLSQIAFIKPARANEIIQAAQQSIASASDEMIRLAITSTVETIIALDKKIDQHIKLLQKQLMVPQIELLQTFKCIGLLSAIELYIEIGCIERFPTVKHLVSFFGVHPVYKESGDGIWGVGMSKMGRRKPRAILFMVALNAIQHNELIRSVYQRELKKGKAKMAALGVCMHKILRIIYGMLKNNTAFDPEIDRTNQQKRVTKTKKEKIDNKRRFQKEDLNAPISKKQTRKRKERKLSQSDNITINGISVPAPSNV

SEQ ID NO: 226300 - protein, 415 aa, unidentified
MLRIVYPICCGIDVHKKFIVACIASTDSKGVTTYKSSRFSTFTKGLRELSEWLYSNSCNDVCMESTGKYWIPVFNVLEATCKITLAHPKYVKAIRGKKTDKKDARWIADLFKHDLVNGSFMPPIAIRQLRDLMRYRVKLTNFKTSEKNRTQNCLTVSNIQLANVLSDTFGKSSIAIIERILKNPLDTDFDVIPYIHGSLLPKAADLQLAIDGVITPEQSQKLVIIRQHFNSLELCKLNLESIILSLADQFQKEINLVATVPGIKSFSAIAIISEIGVDMSVFPTAKHLCSWSGLTPQNNESAGKKKSVRISRAGVYIKPLLVQCANAVVTSEKHPEIRNRYLSIKRRRGHKRAIIAIARMLLTAIYHILAKNEPYNAELYKKADVLPLHREVTVEQAIFILQRQGYMISKADTGT

SEQ ID NO: 226301 - protein, 306 aa, unidentified
MEQFAGLDVSLKSTSICVVDADGRVTARGQVPTDPDAIRNFFIARKTEPSRIVHESGQLSIWLTRQLDALGLPIICIDARLAHKALSAKLNKSDRADAEGLAQLARTGWFTPVHVRSEASDRLRTLIGARERLIRLRKDLEGHVRGVLKTFGRRITGVGQTRGRERFREQLAEAGATDPVLALVAETFIPAHKTLMDATEALEAELRAIAKESKLARRLMTVPGVGVMVALGFIATIDDAARFRKSADVGAFLGLTPRRYQSGETDYSGRISKCGDQAMRALLFEAAASLTRISHEVRCIGPMNLR

SEQ ID NO: 226302 - protein, 438 aa, unidentified
MTVIETTDPVVSIGIDAAVVADHQVAIRGPGVRDDFRVPPTLAGMSKLTERLRPHADALVVVEPTAGTWLPLTIAVTAAGCRIGFVQNRDSARLRSAISGRNKTDAIDADMLARCEHVLGVDEAPVPLVGQVGLRRALTRRHHMVVDAHRSECRLWSLLIWVMPDVWRAAGGHTIIQPLLSRWPDMGALGRARVDSITQIVAAHSRDSDPSKRGERIRDAARGWSDFWDGRLDLDDIAWEVTELLDDIAIADRRTQTATDHALRCWQQRWPDDVLLSILGVGPICASTTRAWWGEGTHLRSAKAAGAFIGLNPSNWESGLSASPSRSITKEGPAAMRLAYYQAANVARRRDPQLAAHYRKLMCERGHTHIQANCAVARKLAARTWAVLQTGEPYEPRDLDGHPVDEATAVALAESLAVPSEHRRRNRATKPRRGRLAN

SEQ ID NO: 226303 - protein, 345 aa, unidentified
MKYFAGLDVSLEETAICVVDEAGRIVKETRAASEPQALIEALRKVDLPLERIGLEACSLTAWLHDGMCADGLPAICIETRQANAAMKMMPNKTDRNDARALAQIMRTGWYRQVHVKSRQCRLWRSLLVARRTVLNETRTIENVVRAILREAGIKLGTPSRTAFASRVRELAGTDPVVMPLVEPLLTILATMLGEFARLTKQVLGLVRQEEVCRRLMSVPGVGPITALAFRATIDQPDRFRRSRDVGAHLGLTPARYQSGETDIQGKVSRCGDELARTALYEAAHSLLVLSKKWSSLRAWGMNVAKRRGMARARVAVARKLAVILHRMWSDATEFRFGKAPGRVSA

SEQ ID NO: 226304 - protein, 402 aa, unidentified
MNAVGIDVSKGKSTVAILRPFGEVVASPFEVNHVSSELSKLAEMLRNLDGETKIVMECTGSYHLPIAYALYEQDLFVSTVNPIITHKYDNNSIRKSRNDKSDAIKIANYTLTNWLELPQYVPEEDVRHMLKAYSRQYNKYKKILTMLKNNLICLLESAFPGANELFSSPPRKSDGHEKWVDFVLTFWHCKCISSQSQKAFVERYRKWCKRAGYNFNQAKAEDIYIDSLGHCYVIPMNKTTKLLITQAALQINTVSETIETLSAEMKTLASSLPEYPVVIEFRGVGEILAPQLIAEIGDVFRYFKKSSLVCFAGLEPVENQSGKFKGVETISKQGSPHLRKTLFQVMDCLIKHKPVDDPVYQFLDRKRAEGKHYRSYMSAGSAKFLRIYYARVREYITNNCAD

SEQ ID NO: 226305 - protein, 345 aa, unidentified
MEITTVGLDIAKRVFQLHGIDAAGKAVLRRKLQRSEVLAFFKALPPCLVGIEACGTAHYWAREIRKVGHEVRLMPPSYVAPYVKRGKTDAADAAAICEAVTRPTMRFVPIKTAEQQAVLMLHRTRDLLVRQRTMLVNALRGHMAELGIIAPQGIARVADLLAVLLGEDTTNVPALARQALCGLAAELEALDRRVKEIEVAILTWHKDNEASRRLATIPGVGPITASAIVATIPDPFQFHSARHLAAWIGLVPRQHSSGGKQRQGGISKQGDRYLRRLLVLGATAVIRHSRSKSTAEAGWLKSLLERRPAQLVSVAQANKTARIVWALLVRGEAYRRPAAVPGGAA

SEQ ID NO: 226306 - protein, 408 aa, unidentified
MNKLFVGIDVGSRDNAIYIMMPDGTKHSAFSVQNNLGGAQTISKRVVTAMAEKELTAASIGIEATSVYGDNLIYFLREDSALARFERSLFVLNPKQVSKFKESYPELPKNDPVDAFVIADSLRFGRIGLPIQMDDYRYKALQKLTRARFYAVQNLTREKQRFANYLFAKCSGLAQEKVFSNNFGVTALAVYEEFETPDDIVNTDLMDLTAFIAECGKNRSPRPDEIAKAVQAAARGSYRLPKTVNDSVNQVLSISISSMRAMQAQIKALEKEIERQFENIPNTLTSIPGIGPVLSAGIIAEVGDVNRFIHGQSGLAKFAGLVWKENKSGMFEGQNTRLIKSGNRFLRYYLIEAASSLVRCDTEYKRFYDLKYKEVNKYQHKRALALTARKLVRLVFRLLKDNRLYIPA

SEQ ID NO: 226307 - protein, 350 aa, unidentified
MNTTTTTYAVDTAKSVMQLHWVDGASGEIGRKKLSRAKFIDFFSALKPAHVVMEACGGAHHWARSLGAMGHQVELLPARQVRAFVRGNKDDAADARAIWLASQHSDIRRVPLKSAQQQAVLSLHRLRAHWVCVRTATVNMLRGLLYEFGVVLPAGKVLGLRVLAAKRAEIDPLLPPLMQRQLDGQLAALRQLELEIEKVEDELALVQKSDAAAKKLRKVPGIGLLGATALAATLGDAKGWRNAREFSASLGLSPRHGGTGGKVTMGGISKRGDPYLRTLLVSGARAVANAPSAPEWVRQLMLRRPPNVAVVALANKLARTAWALVAHGREYERGWVSKSPRAAQAQAAAA

SEQ ID NO: 226308 - protein, 406 aa, unidentified
MDKPSVETAVLKTDRGGNQLYFVGIDISKFKHDCAIIDELGDVITPSWSFQNDCEGFSFLRELLDALDGEKKIGLEATGHYGQNLKLFLENNGFSFMEFNPLLINRFVRSKSLRKTKTDSIDALIIAQYLMTVEYKPYPPSFYTLEKLKSLTRFRDSLIRQRSRHLVELTNILDKVFPEFKPFFKGRFSATALYILSHYASPEKISNMNSKSYEPLRRLSRGRFSTVDFVELKTLARNTVGSTCDYLLQEMEITIDIYNQLQRKVEEIELQINDCVLGLAPPMLTIPGIGVASAAVILSEFGDLSKFNSPSKLLSFAGLEPGYFQSGTSESTGKMVKHGSSYLRYAIMNCAQTVVNNEPTFAAYYSKKRAEGKEHRVALTHVAKKLLRVIYTLQTKELSYNPDLVR

SEQ ID NO: 226309 - protein, 350 aa, unidentified
MIIIGVDYHPEFQQLASVNTDTGEFSEARLQNPEQAERFYRELAGRGAQVRIGMEASGHARWLERLFGELQFELWIGDAAQICSKRVRKRKTDRHDAQLILQLLLEDRFPRIWVPSSENRDLRQLLWHRHRMVQTRTRVMNQLQAVALNEGLRCKKRLWRERGREQLESFQLGRWASRRRHDLLQLLDQLNPTILELTQAIEREAEKCREAQRLRTHPGVGVLTALAFVLLIGDAERFHCGKHIASYLGLVPLEKSSGSRRRLGHITKQGSSMLRFLLVEAAQATVRSVPEWRNKYFHLMQRRGRNTAKVAMARRLAVRLYWMWRRGWDYEQLQKFGSHAGEPENRYGVR

SEQ ID NO: 226310 - protein, 430 aa, unidentified
MFLVVGWRLRVDQQVERCAGLDVHKDEIVACVRVPGPDGSGRRAELHTFGTTTNELLALRDWLTGLGVTRVGMESTSVYWKAPFYLLEDTISECWLLNARHMRNVPGRKTDAADAAWIAELVEYGLVRPSFVPPQPIRELRNLTRYRRAQTEERTREVQRLDKILQDAGIKLSSVASNILGLSGRAMLDALASGTTDPVVLCELAKGKLRPKIPALREALTGYFTGHHAIIVTEILAKLDYLDEAISRLSAEIDRVITPFADKVALLDTIPGVDLRTAQCLLAEIGPDMTVFGSAERLASWAGRCPGQYESAGRSKGGATRKGSKWLRIYLHEAARAASRTRATYLSAQYKRIKARRGPAKARVAIEHSILVAAFHMLNRDEPYRDLGANYFTHRRDPHRHAQRLISQLTSLGYQIEATPPPAPPDTAAA

SEQ ID NO: 226311 - protein, 307 aa, unidentified
MRKDIRYVGLDVDSEKMAVAVAEPTGEVRSLGSIPYREESVRRLVKRLGPASRLRACYEAGPHGYGLYWQLAKLGVHCDVVAPTLVPVKSGDRVKTNRRDAEKLARCYRAGDLTAVWVPDAAHEALRDLVRAREAAKKDQLRARHRLGKFLLRRGLRAAAGMRSWTAKHLLWVKTLRFEHVAQEITFLDYLHQVEHAVERVARLERAIDQAIESAPAEMRALIAGLQALRGIKSVSAATIVAEVGPLSRFSRPKQLMGYSGMVSSEDSTGDSVRRGAITKTGNAHLWAVGVQVEKEQLSGSQRRRAA

SEQ ID NO: 226312 - protein, 343 aa, unidentified
MDHFAGLDVSVKQTSVCIVDDTGRMVREVKVASEPEALLPVLTNALYRFKRIGLEAGPLSQWLFSALAEAGLPVICVETRHMRAVLQAQINKTDRNDARGMAQMMRAGLYRPVHVKTLRSQKLRMLLTHRKLLQSKAIAIDNDLRGTLRNFGLKVGVVGASKFEARIRELVESLPDLAELVEPMLIVRRTLREQIGILHGRLLAIVRNDDVCRRLMTVPGVGPVVALTYRATVDVPARFRNSKAVGAVFGLTPSRYQSGEIDRPGAISRCGDEMMRAMLYEAAHIMLVRLAKWSWLKAWAMKIARHRGMKKAIVALARRLAVIMHRIWVDGTEFRWTREAAVA

SEQ ID NO: 226313 - protein, 404 aa, unidentified
MDVLHPRCCGLDVHKSSISACILLREAGGMQKHQRRFGAMTQEVQELAEWLRQFGVSQVAMESSGVYWKPVWNILEGQFTVVLANAQHIKNVPGRKTDQKDAEWIAQLLQHGLLRASYVPCEIIRDLRDLTRMRASLSQEASRISSRIQKVLEDANVKLASVATNVLGKSGRAMLEDIITGEDNPEHLASLALGHLRVKIPQLRLALEGKIRPHHRFLLRRLLDQVQFVEHEIALLDERLEDIARQRPDLAQAVARWDTIPGIDRVAAWTLLAEVGDNMAQFPTAEHLASWAALCPGNHESAGKRLRGTTRQGSPWLCRMACQCAWAAARTKNTYLASQFRRLAARRGKKRAIIAVAHTIVVIGYHLQKNQSNYEDLGGNYFDHIHSDGLKRYLVKRSNNSGTR

SEQ ID NO: 226314 - protein, 400 aa, unidentified
MNERKAQVWAGVDAGRGHHWAAVVDETGATLWPKKIDNDESAILTALGEILGLADEVHWAVDIAGTSSALLLALLAAHGQRAVYVPGRTVNRMSGAYRGEAKTDARDAYVIAETTRHRNDFATIDVPAQLAADLALLTAHRTDLVADRVRMINRPRDVLTGVFPALERAFDYSAHKGALVLLTGYQTPAAIRRRGRARLAAWLANRAVRGADAVAATALEAARAQQSALPGEDVAAQIIADLAAQILDLDDRLKRIDKQIRERFRSHPQAEIIESLPGVGPILGAEFIVAAGDLSAYADAGHLASAAGLVPVPRDSGRRTGNLHRPKRYSRRLRRVFYLSAQTSIIREGPNRDFYLKKRGEGCKHVQAVIALARRRASVLWALLRDGRVFTSAPPVTHAA

SEQ ID NO: 226315 - protein, 389 aa, unidentified
MIYVGIDISKYKHDCYICNDFGDVLNGGFSFANNAGGFCEFQKELEQAKNSDEVRIGFESTGNYAVNLKMFLERAGFDYMEINPLLVKEHIRSKTLRKTVTDKLSAKAIASYLSEKQYRPHATSFYPKFALKQLTRLRSSLVTSRSRYLIQLTNVLDCIFPEFKPLFDNKFTVTALYILANYPSPEAISNMNSRSYDILRRKSRGHFSLDMFVRLKSLAKNTVGVFDECYRIELETLLDLHAQIDSKINELETQITKIIKDINPPTLSIRGVGEISAAVIVSEFGDFSRFSHPDKMLSFAGLEPGYFQSGTTEYNGRMVKRGSSHLRCALMNCARAMPLHNEVFAVYYRKKINEGKDYDAAVNHVAKKLIRLIFALETKGEMFDSDKLR

SEQ ID NO: 226316 - protein, 408 aa, unidentified
MNPLFVGIDVSSKNNVVCLMKPDGSKLSTFSVQNNLGGARILSERIVSALDKLQLSEVTIGMEATSIYGDSLVYALREDGSLGRYQRHIHVLNPKQVRKFKDAYPDLPKNDYVDAFVIADHLRFGRIASEVYMDDYRYRSLQTLTRSRFDAVQNLTREKQRFANYLFLKCSGIAQDKDIPNTSATTLALMEHFETVDELANCDLKTLTAFVSAAGRGRFADPEATAKAVQAAARGSYRLPKTVNDSINQAMSVSIASMRALEGQIKVLEKAIEQQFEIIPNTLTSIPGIGKVYSAGIIAEIGDIRRFESQASVAKYAGLVWTQHQSGDFEAQNTRMIKSGNRYLRYYLLEAANSVRRCDPEFRRYYDLKFHEVNKFQHKRALALTARKLVRVVFRLLKDNRLYIVPES

SEQ ID NO: 226317 - protein, 323 aa, unidentified
MVIIGIDVSKNKLDCALIDNLNVDKFKFKVISNSEVGFIALIDWLSKHATSTVSDYHFVMEATGVYHEKLADCLFNMGSKVSVVNPAHIKYYGKSLGVRSKNDKKDSVVIARYGLTQKPMTWQPEIKVLKALASRLDAIEKDILREKNRYEKSSVNPCSDSILESIQKMLSVLNEEKTSLEKLIDVHIKQYNYLKTNDALLQTIPGVGPVVSRYMLIVIGSRSFKSASQCAAYIGLVPIQNESGSSLRGRSRISKAGDPVIRAKLYMAAISALQHNPDIKIQNQRLLKNGKSKMSALCAAMRKLVHICFGVIKHQEPYQVQAN

SEQ ID NO: 226318 - protein, 392 aa, unidentified
METTTDRPVEPTAVRTDLGAIFVSLELSRSSWVVTALLPGGGEKMSRHAVPGGDLAGLLARLAQLGEKAQARTGRTFPIIVIQEAGLDGFWIHRALENAGIESHVVDPASIATSRRRRRAKTDRLDGETLIRTLLAFKRGEPRVCAMVRAPHPEDEDRRRITRERKALIAERVEHVNRIKGLLFAQGVRGYEPLRRDRRARLEDLRTGDGRDLPPHLKAQILRELDRLELLLDQIKAVEVERDAVLADQPQDRETPAAAKMLLDIRGIGPEVAAVLWSEGLFRHFGNRRQVAAYAGLAPTPWQSGAVRREQGVSKAGNPRLRSTMIQLAWLWLGHQPTSALTRWFRARVEQNGGRLRKTAIVALARKLLVALWKYVTSGVVIEGATMKQQAA

SEQ ID NO: 226319 - protein, 340 aa, unidentified
MRQLYAGCDLHGNSNLIGIIDGEGKRVFKKKLPNDLSLVLDTLGPFQEELVGIVVESTYNWYWMVDGLMENRYQVHLANPSAIQQYSGLKHSDDQHDAFWLAEMFRLGILPEGYIYPKQERPVRDLLRKRGHLVRLRTSLIISLQNILSRNLGRKVNVNDVKVLKEDRVSPLLESSEDLMLAGRVSKEAIDFLTYQIRKIEGVVEKRIELKEEYRYLLTLPGVGKILALTMMLETGPIGRFATVGEYVSYCRKVPSQWTSNGKWKGSGNKKNGNKYLAWAYSEASELARRFYPEPRAYYHRKMQKTNAPVAHSALAHKLARAAYYIMRDQVPFRPEKLFG

SEQ ID NO: 226320 - protein, 352 aa, unidentified
MSKIYAGIDLHKTQFTVCILRNGLYEKEGQYPTSKEGFKAFISDIQTMDVTPEEVELAIESTGNARHFKTLMEDAGFSVTVVNTLKFKVVNLSTRKTDKNDARTLADFLSKEMLPKSHLCSPVNEGIRRILKCRSLMVQDCVALKNQAHAIMLAYGKVTKPTQFQSKKNRAALLGSLLKRDASLKYSLETLFETLDVIEGQVRTMERRLCAMTKADRNVRLLMTIPGIGIVNACTISAYIDDVSRFETSGHFASFCGIVPWVQSSNESSYYGRITKRGPQELRTALVQCVVAMIRMGEKTKNTRLMKQYAVLKENKSSGKAIIATARKLSTVIYVMLRDGVPFDITKLSVNC

SEQ ID NO: 226321 - protein, 338 aa, unidentified
MKTMQLFAGIDMHSSTSTGSIKDEKGNPVRVLKVDTSKEGIKQLFFGLKNKKIKAVFEASRNWPYYARLLKPYCNEIVMAHPLKVRAIASARIKTDTIDSDILSDLLRANLIPESYMPSLEIVELRELLRYRAKMSRLRANLKIRIRGILSREGKKCELSDVTTKRARLWLNNIVLNDLNRRELDYLIGLVDNLSGELKNLDQTIEKEQYKYPEVEILKSIIGISTYSALLILAEIADFSRFSSAEKLAAYAGIVPSTYQSSQVCHHGKITRQGSNWLRWILTQCTHASIKSRKSHKLKRFFLRIAKRRGKQKAIIATARKMLTIIWHLLNKNEYYVY

SEQ ID NO: 226322 - protein, 316 aa, unidentified
MAAFLGIDIAKQKFDAMLLTEDGKRHKVFDNSESGFVALADWLGTEAASVHACMEATGGLGDDLALFLHGRGIAVSIVNPLQIKAFGQSELVRTKTDKVDAGVIARFCRSQSPALWQPPSAHVRELRGLVRRCAALKEMRVQELQRQTQGTSCALVKASLERMLAWLNGEIKTVSDAIAALIRQDKAIHEDHTLLVSIPGLAAPSAAILLAEIPDFRAFQHNKQITAFVGLDPKDHQSGSSVNRRTHISRVGNARVRAILYMCALSARRHNPILKAFADRLKEKGKAPKAILVAVARKLLVIAYGVLKTRKPFQTA

SEQ ID NO: 226323 - protein, 364 aa, unidentified
MTYLLGVDLHKTQFTVCEKMARKTETHEYPTTPVGYETLLKKIRRWKKGGHEVRVGVESTGNTRHFKNQVESAGAEVVVINTLKFKIVNESTKKTDKHDAATIVEFLEKDMLPESHLCSKETQNMRRLLKSRERLVRAIVGQKNEVHALLVSLGLEDTKRSLQSKKGRQAVLDVLESHSDYELEAQSVRLMFEMIDLLSENVKKAEKQLSQIMADDPMVKRLLTFRGCGPITAWTIRAYTDDIKRFSSAKKYAAFCGLVPWVQNSNQTVHHGKITKRGPQELRTAFVQFVMGINRCKDTANWRLMERYRYIKTKRGSGKSIIATARKLAEIVWTMLTREEDFDSSKMLEKYHSQSLVAQMLSAM

SEQ ID NO: 226324 - protein, 352 aa, unidentified
MEKIALDVHKRYSFISVDDGTGRVISEGRIEHSPGAVRAVLSGYPAGTPVAVEATGHWYWVVDEIEAAGLVPRLVHAGKAKAMLACANKTDRLDARGLNRLQRTGTLPTVWIPSGVLRDQRELPRARMALVHQRTQLKNRLHGTLAKYGLDTSAVSDLFGRKGRQFLTTAMQLLPVQSAFAAEVQLQQVDQVSEAIATFVSCIGTASTETEATRLLQSLPGVATVLSVVIAAEIGDISRFVRAEQLAAYAGTTPRVHASGGRQRIGRLRTDVNHYLKWAFMEAATVASRQRKRWPQRHVVRLYERLRQKRGHHTAVGAVARHLAEASFWILTKQQCYTEPGCLDRRTSAATL

SEQ ID NO: 226325 - protein, 388 aa, unidentified
MENSSTATRTGKRLTVGIDVGDRYSRICVLDAEGEVMEAGFLMTEEAAFRRRFTGMEPCLTAMEASTHSPWLSRLIEDLGHECLVANPATLKGKNRKKSDKIDAEKLARWARSDPKLLEPIRHAGAEVQADMALIHSRRSLIEARTKLINRARGLVKSFGSRLPRCDADQFTRKVKDCIPEALGGPIEPLLRMIAGLTEEIDALDKRVKALAEKYSQATVPLMQVDSIGPLIATTYALTVRDPARFRKSRQVGAYLGLTPRQQSSGQREPELSITKAGNVYLRKLLVNAANRVLGPFGSDCDLRRWGLKKAAGGKNAKKRAVVAVARKLAVLLHHLWLTGEKYEPLRRPEAAGEPSSPPGSQPGTAVKVRPPDASSRFQTLTAALKDK

SEQ ID NO: 226326 - protein, 316 aa, unidentified
MESQRPFVGIDVSSLRLDVDTLPVSQPFSKPHTEEGIASLVLHLKPLNPQIVLLEATGGYEIPVAYALYEAGLPVVIMNPKALRHFAKAVGKLAKTDKLDALVLALYAQKIQPPVRPLQDQEQLELANLMSRRRQLRDMIVMEENRRRTCTPRVRSNIDRSLAHLRQLLKDLDREIHDSIRRTPLWQENSEILQSFTGIGPKVSASLIADMPELGTLTRGKASALAGLAPMNRDSGQFRGKRMIQGGRPAVRQALYMAALVASRHNPVIRDFYQRLRLAGKPAKVALTACMRKLLVILNAMLKNRTHWDPQLPIAA

SEQ ID NO: 226327 - protein, 438 aa, unidentified
METTENMNRGIAPEEIVAWIGLDWADNEHKISMCEVTTGEVEASVLKHSSEALQEWLAGLEKRYEGKKVAVILEQSRGAVIYALMSSDFIVLYPINPQSLASYRRALYPSGAKDDPVDGALLREMVQKNPERFRQWIPDDPDTRSLRLLVEGRRKLVKQMTRLTNQLTSQLKTFYPQALEWAGELNSRQACEFLEEWPTLEAVQKVRPARLRKLYKKYGRPRPETINRRIEQIKEATPLTRDPAAILAGSTMVRAIAMQIRPLIAAIENYDDEIKRLFQKHPDRLIFESLPGAGPVFAPRLLAAFGADRERWGSAAEIQKLSGIAPVTERSGKQCWVHWRLACPKFVRQTFHEFAASSIQWCNWAKGYYQHLRDQGKEHHAAVRALAYKWIRILFACWKNRTPYDNEVFLNALARRGSLLSQRAAAVVPAGRAKAQPA

SEQ ID NO: 226328 - protein, 351 aa, unidentified
MKTELSAELKLYIGIDIHKRSWKVHCATDLFSGKSFSMKPYPEELHKYVTKHFSGYEVTTAYEAGCCGYKAHRSFESYGWTSLVVNPADIHRKGKERFTKTDKIDAQLISRELKDGRLKSIPIPCKEREELRSLFRRRNDLVKDYRRIKSLIKMQLLYYGVHIPEEHDNDHWSHKFRQWIDELEFDYSTGKGSLESKMRSFRFIDKELREVSNQLRAYCRKHYKRDYYLLRSIPGIGGIVACGILSELGDLRRFSSLKHLAGYVGIAPGIHQSGSNYKTMGMNPRAHRLIRSYFVEASWQAIRTDPVMQNYYRKHLGKDTKKIVIKVARKLLSRTLAVIKTEIPYEIGVIQ

SEQ ID NO: 226329 - protein, 309 aa, unidentified
MKKSIVYLGIDVAKAHLDVAWTDECRRFANSKSGRSALIKWIKTGPGPIQIICEASGGYEQALLEALWQNALPVSLVQASRVRQYARAAGILAKTDKVDAGVLAAFGSAMEPAPTMAPAAQQKELRLLDTQRAHLSGLLVAQKNRLGQLQDRQLRTFTRSLMDKIQKQIACIDARITGLINQDQHLCFKAKRLTAVKGVGTRTAALVLAQMPELGTLNRRQAAALGGLAPFNRDSGSWHGKRTILGGRRALRTGLYMAALVAARHNPILAPFYQRLCAKGKPPKVALTAVMRKLLLALNHTLSSSTCPI

SEQ ID NO: 226330 - protein, 325 aa, unidentified
MQTIKNYVGIDISKLCFDAAFEVSGSYRHYKFSNDLSGFKALAMELPVDSHVVMEASGPYYLQLACYFHELGLGVSVVNPLVIRRFCQMRLSRAKTDKKDALMIAEYGKAEHPSLWQPEEAYVLELRQLQALSDQLNKHRTSLIRQQEAFDQLPVKSKQVLRSIRRSLTFIEKELVELEVKMQELIKQYHGKMYEQIQTIPGLGKKTALLLIVLSGGFTKFAGCRQLCSYVGLSPRIFESGSSVKGRSKITKMGMSRIRAMLYLCAWSAKKCNQTCKELYDRLVAKGKSKRLALIAVANKLLKQAFAIATQDTIYEPHHQKNICL

SEQ ID NO: 226331 - protein, 353 aa, unidentified
MFNEKSIVIGVDVHKYSHTAVAMNAWGEERGTLNFTNNTLEIYRQWLEEMGLKENIVIGLEDVNSYGIHLVKDLRSQNYQIRYVPAILTERERQASTKHHKSDEVDARRVGKVLLTKYEETLPAKESIANERELEIAKSLDLLLMERRDLTRNKTIIKNQLHGLIHQHYTESYRLHCPKSFSKKAIKWFLEDLKGNKIILATSITRRLQRLLFVEEQIYAISKEVAIIGETSKEVMALTNIHGCGMVTACSIVSEVITIKRFKDKHHFSMYAGIAPTPHSSGRKHKMHTNPFGNRQLNRAIHTIALSQIAIKGDPRGKEYYQKKLKEGKTKLWALRCLKHQIAKVVFQKLRYA

SEQ ID NO: 226332 - protein, 473 aa, unidentified
MSKGSGTTRGDRRRNARRERLREMLPRDGAVIGIDLAEDKQAIAVVDHDVRVLARKTVKVKAFRLGEALDWAVGQARAKGFTHVTVACEPTGPRWLQVQRLCAERGLPLVCIQPLMSHIAREQQDYTTHKTDESDCVLIARLAVELHCYIPEELDETWAHLRHLGRRRQQLITSATASAQRIRDFLSVAWPTVTETCAQPLESVTWLAALQVVTARCGADPGRLAAMGVEAFTALVRSAVPGWGGKKGRGTICGRIFAALTGTEGVVVSSRRGLPRRCADEPGDLQRARAQRRAVEADMVAVLAELGLSRLADIPALTAVGAAAILAGTGDPRRYDSSSSVARHAGLSPSGNASGAFYGEAHISRRGRPGLRLAVWRAVWPMLRFNPVMAAKYQAMTSAADDAAQAAASQADAGSRQASAAAAAARARRARARVACAASLLRWIYSLVVHDTSWDPGIASGPASSQHTPAEAA

SEQ ID NO: 226333 - protein, 376 aa, unidentified
MQAAQIKSYEVNTTLYMAMELSNSKWKLGFGNGTKIRRKSIDARDRQRCLEEVALAKVKLKLPADAPVVCCFEAGRDGHWIYRWLESEGFEVMEIDSSSIETARGRKHVKTDRIDVEKLLDLLIRFHCFGLRKAFRVVRVPSVAAEAGQRLHREDEYLIRQRTRISNRIKGLLIAQGVDDVSLQGDFASYLERVRLWNGKGLTAQLKTELVRMHAQYTVFNDQLKALAKSYIEELAADTPLAEMRRCLETLKSMGPKTSRILSAEVFGWRSFNNTKQVGAFAGLTPTPSQSGDSDTEQGISKAGNRRVRRVMIEFAWLWLRWQPDSELSRWFNYRFANGGKRQRRIGIVALARKLLIALWRYVEHGVIPQGALLKG

SEQ ID NO: 226334 - protein, 320 aa, unidentified
MQPLGIDISKHDFRVALLLGVKVRQKKFRNEVGHFSALTDWLAKQGVTTVHACLEATGTYGEALAIYLYQAGHVVSVVNPARIKAFARTELTRNKTDRLDAMLIARFCQMHKPAAWVPSPPEIRELRALVRHLDDLLETRTQLQNRLGNALSVETVEVSLQTLIEAVENQIAEIEGKIQSHIDSSGDLRVCRDLLTSIPGIGALTAARLLGEIEHLRQYRHARQVVAYAGLSPKHHESGTFRGRVKLSKIGNRQIRKALYFPAITALRYNPVIRELGRRLEKSGKCKMVIIGAAMRKLLHIAFGVLKTRTPFAENHRLAA

SEQ ID NO: 226335 - protein, 341 aa, unidentified
MSNPNIYIGADLHKNTCYLTVMNKEGKIKKQTEISTDTDVVKKFFEKYKKANVAVESTMNWMSFYENVESLGCNVVLSNPLQTKAIAFARIKNDKVDSKVLADLLRTNFLPLAYVQPRKIRDIKEIVRERYGYVELRTKIKNKIHSVLLKNNIKHEFSNLYGKGGMEFLKTLELRNVYRGEMNQYLRTLDLLDEQINEISQLIEDTAKVDYDCKLLMTIPGISFYSALMIKSEIGDIARFRNANKLCSYAGLIPSTYASAEKIRTGRISKRGSKWLRKALVDAITSGSRNPNRIAMFYKKLKLSKGTGKAKVAAARKLCSIVFAMLKDQQPFREFTPTKQR

SEQ ID NO: 226336 - protein, 404 aa, unidentified
MWYVGLDWADTHHDVDVVDEAGKRVGARRFAHSHEGLNALKQFLLSIAAQPENLACIVETNHGLLITFLLEAGIPVYPVNPKTANQLRKAAGAKTDQIDAHLLAKIGRLDLAELRRLEPDSDTLQELKTLTRDQDALIQTQTRLVNQLTACLKEYYPAALHLFAKVQQRSALVFLQTYATPQAAQAASVEEITVTLRMGKHTSPTRVAPKIVEELHRPQLVANEVIVRAKSRLMGSLVKQLLVVIEDIATYDREIRTLFLTHKDQEIWRSLPRAGKRLAPRLLAEWGDDRSRYTDASSVQTLAGTAPVPFQSGNYAKAHKRFACVKPLRNALHQFAWQSTLSEPWALAYYQRKRAEGKSHSMAVRALANVWVRIIYRMWVSKTCYHPATFAAAKRAHAPRQHVA

SEQ ID NO: 226337 - protein, 370 aa, unidentified
MQTITRSQTLFVGIDVHKDTHTAVGLNPFGEKIFEMQIGNEAEDFISLIEKTKVEADKARLIPSFGLEDVHSWGERLSNFLVEEGLPVKAVAPILVDHCRSKMTHPEKSDSLDAQGVAEVMIQRIDTLSAYKLTEEAQKAKQIRELSLEREWLVKERSRLKNQLHILLHRMHNSGYRTKFKDPFSKKALRYWMRSALKDTDTILKQRMKRAVRRLLDLREEIQEIEEEMETMMKDSGQTIATASGCGAVIAAELIGEIGDVSRFHSPGALAKYAGCAPMEHSSGKTIRWRKTRSGNRRLNRAFHRMALSQISRSGNDAARAYFKRKISEGKTKAQALVCLRRQLVNVVWMMMKHRTEYRYPQEKLVDFFS

SEQ ID NO: 226338 - protein, 355 aa, unidentified
MNDSKYIGLDVHQATISVAVLDSAGTLVMEAILETKAETILQFIHGLRGSLHVTFEEGTCAAWLHDLLRPHVAQVLVCDPRKNALMKAGNKNDRADARKLAELLYLNKLNPVYHGETGIRALKELARSYLALTRDTTRVMNRVKALYRSWAIPCAGQRVYAPRYRSEWLGKITEAGVHRRAEIYYQQLDALRSLREQVRRDLLAEGRKHGAMKLLRQIPSIGPIRAALLLALLQTPHRFRTKRQLWAYCGLALKTSTSGEYRIVEGRLKRSKKFLAIRGLNANHNHDLKNIFQGAATRAAAVAGPFQEFHAGLVARGMKPTMARLTLARKIAAITLIVWKKGVCFDAEHLKQQAA

SEQ ID NO: 226339 - protein, 411 aa, unidentified
MDKIYDKCCGIDVHKKLIVACFRKGNKQEVREFGATTRELLELADWLKEGGCEMAAMESTASYWKPLYNILEYSDLKAMVVNAHHMKAVPGRKTDVKDAEWIADLLQHGLLKASFIPDKDQRELRELIRYRKSLVGERTRELNRLQKMLEGANIKLSGTVQDINGKSARNILEYLITGKAIDSKAYDEMYEKKVIAHNLKATKEQIIDDLNGVMTPLQRKMMKELLSHLDELNVHIKNLDDEIDNFMKPEEKQASAAIQDIPGIGNTSAQAIISVIGTDMERFPTDRHISSWAGLCPGDNESAKKRKSGKTRKGNSILRTTLITSAHSAVKNKNSYFHAQFMRISAHRGKNRAYVAVAHSILIAIYHILKDGVAFKDLGAEYYNQFNKERKINAYLKKLKALGWEAPVVAA

SEQ ID NO: 226340 - protein, 391 aa, unidentified
MIYAGIDVAKDKHDCFITNSDGEVLFKAFTITNNLDGFNDLYQKIETVMKDITKVKVGLEATGHYSYNLLGYLIDKGLPTYVINPLHTNLYRKSLSLRQTKTDKVDARTIASILMSDVNLKSYSDISYHNEELKSLTRYRFDKVKERAKLKSSVSRLICILFPELEKLVPTLHMASVYALLSEFPGAKQVANAHLTRLTNLLSEASKGRYSKDTAITFRDAARTSIGSNMPAKSLELKHTIKLIKELDSEIDEIENEIKIIMDEINSPILSIPGINYRMGAMIIAEIGDFSRFDSPDKILAYAGFSPSTYQSGHLYGAYAHMEKRGSRYLRYALYNAAKYVCHWDPTFTAYLAKKRAEGKHYNVAISHAVKKLIRVIYHLEKTNQQYIKAS

SEQ ID NO: 226341 - protein, 345 aa, unidentified
MTIVDSSRPNVGGVDTHLDAHVAAALDANGGVLGVESFSTTPAGFAELHDWLCAFGPIARVGVEGTGAYGAGLSRYLQSCGLVVIEVDRTNRQVRRMHGKSDPVDAIEAARAALSGRASGIAKTADGNVEAIRALLVAQRSGRQARARCLNQIRHLGFTSPDSLREQFRDVPKAHLARQAAALRPRPGDPVLHATKLAMRTLGRRALAIDDDMHELEHVLAELVTQTAPALLACHGVGVDTAAILLVAAGDNPERVRNEAAWAHMCGVAPLPMSSGKHRRHRLSRAGNRQANHALWRIVFTRMGSDPRTRVYVERRTEEGLSKPEIMRVLKRYVARETYQLLPRS

SEQ ID NO: 226342 - protein, 368 aa, unidentified
MLNTNRAGIGRTESDNTGIEHNRIDYAGIEVSAEELIVALRREGKLKPLKSFPNNPQGHKGILRYLARPGRQVRACLESTGVYGLDLALALHAAAGIEVMLANPRAVRHFAQALMQRSKNDRLDALVILEFAARMPFQAWQPPSPAARHLCALTRRLEALTELCAAEKNRLHAVGATQDLPPIIRQDLERSLRFHARAMQRLKKEALNLVAQDPELERKFRLLRSVRGIAEASALHILAAVAVLSPDLDVRQWVAYAGLDPREYSSGSSVHKKTRISKAGNRHLRRALYMPALVAVRHDPHFAAYYEHLLARGKTKMQALVAVMRKLLHAIYGMFRLQLPFDGSKVYQLPQSTPANSAPCTKEVAYAA

SEQ ID NO: 226343 - protein, 435 aa, unidentified
MEEVEDEPLFCDRVAGIDIGKATVMVTIRVPSEARAKGRQQETREFGTTRRELLALADWLRGWQVERAGMEATSDYWKPVLFTLEQEGFDCLLYQASQVKALPGRPKTDKLDSVWLARITEQGSLAGSFVPPEEIRRLRTHTRYRRKLVQMRTAQKERCEKLLEDAHLKLSAVISDIHGVSGRDMLRAIAAGERNPKVLAQMARGVMRSKIARLEQALDCSFFTGEHAFILTMMLDSIDSLTAQAGVLDARIADMCQPYQRQLEQLDEIPGFGTTTAQDLIAEIGTDMNVFPTAGHLASYARQAPRVKESAGKRKGKNATGRGNPYIGGALGEASISAGRTQTFIGEKYRRLTRRMPKRKAQVAIMRSQLVIAHALLSDPDARYQDLGPDYYERKADIRRRARNHARALERLGYKVTLEAIDPGTGELHLIATAG

SEQ ID NO: 226344 - protein, 378 aa, unidentified
MDVLYHRCAGLDIHAKTIVVCALWGEEDHIQKEIETFSTFTKDLFRLLKWLEDRKITHLAMESTGVYWKPVFNILEDYFDITLANAQRIKNVPGRKTDVSDAEWIAKLLRYGLIEKSFVPPAPIRELRDLTRLRKKWVGQLTAEKNRIHKVLECSNIKLGTVISDIFGVSGRKLLNRLMEQGYIEEADIDACLHGRMKGKKQQIQESLFGTLTEHELFMIRQSWKHIEYLESLIQEMDQRIDHLLQPYQQEMDLLMTIPGVKKETAAVIIAEIGVDMGQFPTPQRLASWAGVAPGNHESAGKRKSTRTVKGNPHIKSALCEAAWALSRCRNQPLAAKFWSLAARRGKKKALVAIAHRMLVTIYCMLSRKEPFRGPQVS

SEQ ID NO: 226345 - protein, 394 aa, unidentified
MQNVLAVDVAKSKSMVTLVSSCGEVLTEPYEINHSIKDFSNLLNRINKFKLDNISVIMESTGIYHRPIERFFLENNFKVFVINPIYGKMYKRNLRKTKTDKADCFNLVNLFFTNTFKEYIKPKQLYLDLNALSRQYFALDELCVNIKNRYRNLLYLCFPEFEEIFKGNMVYSNVALEFIEKYPHADIISNTRIDKLQNFFKKHNYKSWKSKLLKIKEAASNSYPSVDINDELVSNLSQIARLVNEYQKAIDIIKYKIAFLAKKSKYFEPINSIYGIGEFTISIIIAELGDINRFKNIKELTAYCGLDPSIKQSGKSINVHGPTSKSGNKYMRKILYISVSNIIRLTTISKQENDIELYYRKKRNEDKHHYASIVACTTKLLRKILALCKQLDNQ

SEQ ID NO: 226346 - protein, 360 aa, unidentified
MKKVSKQMRKMEAVDKPEMTLGLDLGDRFSHYCLLNADGDVVEEGRIQSTEAALKRHFEGELPMRIALECGTHSPWVSRLLTALGHQVIVANARKIPAITASESKNDKNDAEKLARFAAYDPRLLSPIEHRSSERQLDLNLIHARSTLVRARTMIVNALRGLVKSAGGRLPACSTEALPTRAPAAIPPALVTVATPLVEQIALLNAQIGGMDKQVEKLAVKYPEISLLRTAPGVGPIVAAAYVLTLDRPDVASNRSAGAFLGLRPGQSQSGDSDPQRRITKTGDRCLRSLLVQSAQYILGRFGPDSELRRWGLKLAATGGKRGKKRAVVAVARKLAVVLHAMWRNGECFQAFPQPVTIAA

SEQ ID NO: 226347 - protein, 401 aa, unidentified
MRRQGFIGLDVAKDTFTAAFLVVDALSGVIQQSHVATFSYDRPGWQRFLATWDTFQADFWWVGLEASGPYSALLEAHLLRGPRPHLSLHRLSPLQVRDFARARSRRRTKTDRLDAYTIALFLRQPLTVQALPAPLQDHTPLRALAHLDPHRAQERTRTQNQVRQLLHFLFPELERAYPRFPKALPALLRHFPSAHAIAQAPLPDLQALLPSRHTLNLEALQALARASFGLHDPIRAQTLQLLLERWAFLETLRARCLAALQQAARAHHPQAWRLLRAIPGIGPRLAARFLALTGPLDRFPDRKALIAYAGLDITLHQSGRLAGRCRLSKRGDPLLRHVLYLIATALKRYTRRFAQAFAYYRHQGRAVRETLVILSRKALGMLDPLPRHQAPFQALPQPAPV

SEQ ID NO: 226348 - protein, 331 aa, unidentified
MQRNEKFIGVDVSKETLDVAVSDSKDHLRISNGSEGFKQLKAWLKSLQIGASDCWFVLEYTGGYEYRLIQFLQSKGFRFTCVPGLEIKKSLGMQRGKSDSLDAKRIAMYGSEKRLKLRPHKVCNELVTRLRQLLTQRSSFVKSRKAQEHRLKELCSMMDINSADELVRHYKQAVAFAEKMIGKTEVCIKRLIESDTLMYQNFKLLTSIPGIGNVNGWMTIAFTGNFERFTDARKYGAYSGVVPYDHQSGKSIKGKSRISHMANKLIKSELSMAAKASVQHDPEIREYYNRRVALGKHHMSVMNEVRFKLILRMFAVVNKQEMYVKNMGIAA

SEQ ID NO: 226349 - protein, 369 aa, unidentified
MSEFYEGRQFVGMDLHRRRSVLVRMSETGEHLETVRILNDRDVLADVMSRAGESPEVVLEATYGWYWAADALAELGATVHLAHPLAVKAFSYRRVKNDQRDAADLADLLRMGRLPHAWIAPPETRELRELVRHRAKLVAMRSQCKAHVHAVLAKGGIWVPMTDLFGVEGNLLLDNVTMPAPYQARIASLRRFIEAFDAEIDLFTGLAQRRLTHHAGYTAIQQIPGIGPVLAAVFVAEIGDVHRFPGPAQLTCWAGLTPSHHESDTTVRRGRITKQGSCLVRWAAIESVKSLPEYQSHRRDPRPGGSSPRQPQHRRRGRRPKTVAARLLRAARSPHPCAAPPTPRGVSSQTRPVADRAGHDPRTRRGRPR

SEQ ID NO: 226350 - protein, 391 aa, unidentified
MFYVGIDIAKNNHEASIIDSNGKLMTGSFSFSNSVKGLEKFKRIISSFSLSSNNCIIGMEATGHYWISLYSFLVDLGFTCIAINPIQSDAFRKMYIRKTKNDSVDSFIIAQILRFGEFSVSNFSDEDTFALRNLSRYRFALVDEVSDWKRKLVAILDQVFPEYSTLFSNIYGVTSKELLSKYPLPEDMLSISANELAELLSKCSKGRFGIDKAKEIQDKASSSFGIKFALKSFSFQIKQIINQISFLEDQISDIEEEISSILNSLCPVITTITGIGDILGAAIYSEIGDILRFEKASQLVAYAGLDVAVKQSGNFNATDTKISKRGSPYLRRAIWLAANVAAFKDPALSLYYQKLRQRGKAHGTAIGAVARKLTNIIFAVLRDNKAYVPNI

SEQ ID NO: 226351 - protein, 345 aa, unidentified
MTIVGGLDIHRKQITFDYVDTVTGRVRRGRIAPADREHLAGWLAQRFPGRTDVEFALEGCTGWRYVAEELAAAGVGAHVAEPADTAALRGGRRHAKTDRTDSRHLRELLADERLPQCWIPPAQVLECRALLELYRDLRVEHTAWVQRIHAVLFHQGAGALTVPALRSQAGLVELSEQAADLSSAGKMQVVTALEMLAVLDAQLTQVRRQLLDAARHLRGARVLTARLYGVGPITALALCCWLAGAGRFSSARKAVRFAGLDVTVHSSDGKRSPGHLSRQGPSVLRWCLYEAGKTHARGSAPDHAYYAQVKDRIDGKRAALSEGRKIVRQACHLLSELGDDALTQV

SEQ ID NO: 226352 - protein, 397 aa, unidentified
MIAVGIDISKAKSTVAVIDSDGTVLASPFTMAHTQPEMEAFVTYLKGLGEPTTILMEYTGHYHYPVLKKLQDEGFPVCIVNPYQMKKYGDVEIHKAKTDKKDALRIAAYALEKSYKLVPYSSMEQKYEDLKFLSRQYNQRISYVAKLKVQLIALLDQTMPGITRILPLNSRNPEKCALLLFIKRFKSFDEIQRIGKARFLASYDVLAKKASERSASSKGLSIYELAVDSITTRGEDPYIWLSQNQCVDLLSATQNAADEIISQMRNIAETIPEYKILRAMHGVGDRLGPIILAEIGDVHRFHSGKALNSYAGNDAPPYQSGQFESRNRHISKRGSSALRKACYEVMQALKLTKPQDDPVYLFMLKKEQEGKPFNVAKMAGVNKFLRIYYARAMELYK

SEQ ID NO: 226353 - protein, 421 aa, unidentified
MGEHDMTDNNTTVAGIDCALEKHQYQLASATGAVLAKGSIANSLAGGELLCKQLERHAAKDNVIIGIEATNTYHLCLQHFLAGKGYKVIVINPMKTSAYTKIDDYGNKTDAIDANGICSFLLDGKHRTIKQMNQKYLKLRELCRCLTKLQADLVRTALRLHSRLLVINPEFTQYFSETFSDSGLYILEKYPTPLQLAEAKEDELQQALDKIANGFGKPDTAQRIIGLAIESFGVTADTEGYLRYIQHHLDAYRFLREKVREIKKEIRAEARKEYCCKEIETISSIRGVGTEIAAGILAELGDIRNFSKVSSIVRFAGMIVLRHSSGKTEGTSRMSKQGSRYLRCYLHQAAMGAKLHSVTFAAIYAQRNMKIKDLDPQSKKIARAKVRGCLARRMLETIALCLMKGRKFNDKIAFDAIELDD

SEQ ID NO: 226354 - protein, 321 aa, unidentified
MRTDQTFTTRGEEAVLTVSLELAAAKWKVALHDGRREKPAVHTVAEPQAAARLQAVLDLIERHREKWSLSAGVRTVVSYEAGQDAFWICRALQARGIECYVVDPASIPVERHRRRAKTDRLDVIKLVINLRAWLRGERDRMHVVHVPSPQDEASRQLMRDRGQLQKEVLQHRDRMRKLLVTLGCWDEVDHKAFAGRLARDQVRCHDGTPLPPELRERLLRECGRLALAEQQLATLEKTRQTSVPAPARKRSDDLARLKGIGEVGASRLALELFWREFSNRRQVGACVGLVPQPYDSGESHVDQGISRQGNRISKDFPDLVA

SEQ ID NO: 226355 - protein, 431 aa, unidentified
MLQPDSQPEPREGEEPNFAAFVAIDWADQKHMWALQRAGSEAREHGELEQAPEAVEAWMQILLQRFGERPVAVGLEQSRGALVYLLMKYPTLVLYPLHPATVGRFRAALYPAGTKDDPLDTDLQLELLVHHRHRLRAWKPDTVDTRALQMLAEHRRQLVDQRTGESNRLTQALKLYYPQALGWFDKVVSPLAGAFLQRWPTLELAQKARPQTLRDFFYRHNCRNAELIQQRIEEIGQAMPATQDPAILRAGVLQVKHLIQSIALLRDSIAELEQEIDKLVRSHPDFAVFDSFPGAGEALVPRLIAAFGTQRERFSGAVDVQSFSGIAPVTCRSGKSERVHFRWACPKFVRQTFHEWAGHSIGFCEWARLYYQQQRDKGAKHHAAVRSLAAKWIRIAYRCWKDQTPYDEQVYLDALRRHGSPLAAKLAPAKG

SEQ ID NO: 226356 - protein, 340 aa, unidentified
MSEITTVGLDLAKNVFQVHGVDAEGSTVLRKQLRRAQVLAFFSGLPRCLVGMEACATAHYWARELRALGHEVRLMPAQYVKAYIKRNKNDAADAEAICEAVARPTMRFVPAKTAEQQAAVLLHRGRERLVRQRTMLVNALRGHLAEFGVIAPQGLRNVGRLIAIIRDEEDARLPGLARQVLQVLAVQIEQLEAAIAALEKQLMGWHKSNPVSQRLATIPGIGPIIATAIAAMVAEPSGFRSGREFAAWLGLVPRQNSTGGKNRLGGISKRGNQYLRRLLINGASANLLRSKATNADPWVIGLRRRRPSLVVAVALANKTARIAWAVMHRQENYQRMATAA

SEQ ID NO: 226357 - protein, 386 aa, unidentified
MVSVGIDVSKGKSTVCMMKPYGEVVSGPMDIGHVDHELETLVKVIKNLNDEVKVVMEATGIYHLPVLQYFRENNLFVSVINPYQMKQYRAQGLRRVKTDKADSMKIAQYGIDHWLSLVEYIDSEEVYKELSVLSRQYRHFMRVHVTSLQGLTHLLDYTMPGIKKELASWNNRTGRDKLSDFVDQYWHYDNITKKSGKQFTEHYLKWAKKKGYQPDSNKAAKIYSMAKEGIPTLPADQTTKMLVNQAVEVLKRVDETLNTILARMQEIANTLPEYSVVRSMGGVGDTLAPRLIADIGDVRRFHSSKALIAYAGIDAPPYQSGQFTGTNRKISKRGSSAIRKTGYEVMRCLKSHRMPEDGEVYKYILKKEAEGKPKRVAKIAGLNKFL

SEQ ID NO: 226358 - protein, 355 aa, unidentified
MKHIGMDLHSTTTDVCVRNGKGKIVLRRQIQTTQAELEEFIRGIQGAKRVVVEESQIADWVARVLKPHVEEVIRCQPRFNKLISESEDKCDKTDSEALSELLYLNRLKRVHHPELAYRTLREAVRAYWIASRELTRAKNRVKAFFLFNGLHETGEAIYSVRKRSWNLRKLEKLEGNVELAGLLYERMDHCRQLKAKHIRILRESARPVKDLVHLLMTIPAIGPISAYTLVGYLEDGRRIPNKRKLWRYAGLSLRRHESGGTGTEGASHSGNRMVKHVAMSAAITIVARGESNALSALWEKDIRQKVDPKRARRNLARKIVVIAQHLLRSKQEYSNEQVSGNGEHSAQGDACNKSP

SEQ ID NO: 226359 - protein, 332 aa, unidentified
MRYSYVCGIDISKHHLDLSLIKGAGPQLFSGRCENTPNDLEALLNELPVDDLSSVLFCAENTGMYGYILQQIASNQSLALWIEHPGQIKACNGLQRGKTDPADAERIARYGWRYQDQVRLWQQADSELDQLRYLQSEAVLLVADRAKYKGQLSDQADYMPTAVYQSKQARLAAIIAVFDEQIAQIECQIKTIIAGSQKLNRQNRLLQSIPGVGPRVALAAMILTKGFTCFDNARAFCCYCGLAPFVWHSGTDTNTKARVSHRADKRMKSLLHMGAMAAVKRPGELKIYYERKCKEGKPKMSVINAVRSKLVHRMFAVVKQNRMYQPAIPTIA

SEQ ID NO: 226360 - protein, 335 aa, unidentified
MNHYAGIDLSMETSHVCVVDADGRKVGALCVDSTPAAIASALERYGPVDRAVIETGRMTPSVALGLRELGVAIVCIDARQAHQSLKAMRANKTDAHDAAGLAQLARTGFYKEVHVKSPAAHGVRSVITARGHLVEARVRLDNTIRGLCATFGIRLGIGQGERFLARMQGATAIPGLGEAVASLLGVRERLVDEIRELDRRLKAISVASPACQALMSIPGVGVQTSAAFAAAIDDASRFKRSRTAGAYFGLVPRRHQSGELDWTGRITKQGDSTVRKLLYEAANSILTRTRQSFALKTWALKIARRRGLRKARVALARRLGVIMHAMLRDGTLFEA

SEQ ID NO: 226361 - protein, 316 aa, unidentified
MEVSLISVGIDVSKAHLDVEIRPSGEKQSFANDKVGNKALVKWLAKIAPTLIVLEATGGYERQVTRALVSADLPAVVVNPRQVRDFAKATGQLAKTDSIDAGVLAHFAEVIRPELRPLPDAVTLELRALTSRRRHLLEMIAAENNRLEMTSKAVRKSINAHVGYLEQALEHINQELDRAIEQSPIWKENEDLLRSAKGIGPVTSRTLLAELPELGTLDRKQIAALVGVAPFNRDSGSLKGRRSIWGGRAPVRGALYMATLVATRRNPVIRYFYNRLIAKGKLFKVALVACMRKLLTILNSMIKHKTRWSNSFLHTT

SEQ ID NO: 226362 - protein, 404 aa, unidentified
MDVHKSFLVGTIITTTDKIEPNYQKKRFSTYNGDIRAFKDWLLANDCLDVCMESTGKYWVPVFNILEEYGIRVTIANPKWVSAVKGNKDDAKDSKWIGNLFRLGLVPGSYIPPKPIRILREFTRYRSKLVAMRSSEKNRFQNAFTVCNVALDSVVSDMFGKSASDITNYLISDQSFDPAYCVSLLRRSLKQKAAAVLESIEGFSIAPEQKVRIRIIRSHLDYINQTIADVDSLLSEMVTPYEPAISLLCTIPGVDRKSAITIISEIGTDMAQFGSSKRLCCWAGLTPGNNESAGKKKSVRITRAGVYLKPVLVQVAHAAVKSNDSPYFRLKYERIAKRRGKKRSIIAIARMILTSIFAMLTSGEVFNPCDLYKIDMPESMKSKQKEKALKQAIRFIQSQGLSVG

SEQ ID NO: 226363 - protein, 354 aa, unidentified
MFFAGIDAHTRYVVVVIINRMGERVLGPTRVPVGQPERLVALLGPYQPVEAIVETSSSWPWLHEVLTGAGVSFVLAHARRLRAIAEANYKRDDIDAELLGRMRLAGLIPTVYPTPFAQREWATLLRHRTTLVAQRTALVNRMHAQLHGHELHLERGRLLTRAGRQWLRTAAWPHFGIEQRALVRTHLRVIAGLRPLIRALDRRIGTVAATIPQAQLLKTIAGIGPQRALVICAEALPISRFRTPGHLASYAGLVPRSKQSGERAVRHGAIPAGANRWLRGALVRAVVSHVQHAPDSWLTQYYVALKARVGWPTARVAAARKLARAIHAMLRTNSCWTNAPVRGELVRTHAAPTA

SEQ ID NO: 226364 - protein, 417 aa, unidentified
MEQFAALVAIDWSDTKHDVCLLDVATGKTESGILTHTPEALEAWATALRTRFAGQPIAVCLEQSRGPLIYALLKYDFLVLYPINPATLAKYREAFSPSRAKDDPQDADYLLELLFHHRDRLKPWRPDNAKTRTLQYLVEHRRRLVNDRTRISNRMTALLKAYFPQVLQWFDDIRTPLVCEFLLHWPTLEAVQKVRPATLEKFFREHNSVRKETLAHRIAAIKAAVPLTTDPAVLHSSVLMIKALATQMKATIEAIRAFDHEIEQLCRTHEDYPLFASLPGAGPVYAARLTAALGTNRNRWITVEELLCFSGVAPMLERSGKSTWIRWRYFCPKFLRQSFHEYAGESINHSFWAKAYYMSQRARGKSHQAAVRALAFKWIRIIYKCWQTRTPYSEVRYLESLRKKGSPLLAYVAHNPS

SEQ ID NO: 226365 - protein, 385 aa, unidentified
MLSKGGEKTQNRQGRGRSNTLEANKLGGEQDRRATTKPAESPNSRWGHKVEPELRKAGSGPKSKWVKVMSQYAELYVGIDVAKRTLEVALSSGELLSVVNDDAGIADLVQDLVKRAPALVVLEATGGYERKVWMALLEARIPTARVNPRDTHHFAQAHRQLAKTDRLDARGLMLFAAQMRPRPDVAPAAADERLKELVARRHQLTTMLTAEHNRHQQAISPANHRSIQTVIRFLERQRKTLDQAIEKHLSTHAQMRELDELLQTAKGVGCVVSATLIARLPELGSLSRRQIAALVGVAPYDRKSGDWDGRSHIFGGRADVRCALYMAALGAVRGDPHLRAFYRRLLEQGKEKKVALTACIRKLAIMLNAMVKHRTPWRPLCPTLA

SEQ ID NO: 226366 - protein, 404 aa, unidentified
MPDYFVGVDISKYKHTCCIISGLGEVAKDSFDFANSRSGFEGIEAVLLTLGEKKSVHIMMEATGHYHQNLFRFLQSKGYAPQIKNPASIARFKDSDDVGRAKTDRLDAKLIAIYALRHAIAPSASPSYSIERIRILERAKYFLYQDRARTINHLHRYLDESFPELVGFLARDENGDKKAAGRNVFDSKTALWLISNFPSAAMFASARSETAEKLRKMSRGSFSLMRFNALREMAKASIGINRDESNAVIRQLVEEFEAISRRNDELDALLKPLIDAECPQLLTIPGIGYRLAGMIIGEIGDASRFPSPDKLVRFAGLDVKVYQSGTVERHGKLGKRGSPLLRYALFQAAEKARIHCPEFASFYAKKKAEGKHWICALTHTARKMLRTIWSIMRSGQNYSPRETI

SEQ ID NO: 226367 - protein, 420 aa, unidentified
MARLKIVYPICCGMDVHRDFVVACIAFTNAQGVTDYSSKRFSTYSGGLRDLRDWLASNTCRDVCMESTGKYWFPVHNILESTCRVVVSHPKFVKAIKGKKTDKKDAMWIADLFKHDLVRGSFIPPEDIRQLRDLCRYWVKLTSYTTGEKNRAQNCLTVSNYKLDSVFSNVFGKSASAIISHMLENPGEQFDVTPFVDRRCKTPRNDIQAAVDGSFNPFQAEKLKIIRRHMDDLGKLKALLETQIFALALPYAHQVELLLTVPGISEPMTAIRIIAEIGVDMTVFESAKHCCSWAGLTPQNNESAGKKKTTRIGKAGQYIKPLLIQCALAASNPRSTKHPEIRSKFQQLKKRRGAKKARVAIARRLLTAIFQMLLKDEPYSPYVAPATQSAPEKRVLTPKQALALLRSKGFVILDDSIELA

SEQ ID NO: 226368 - protein, 372 aa, unidentified
MNYNTVYVGMDVHKESFTFCAYTIDAEKGSHFQRTEADYKNVLKYLEFLRTVYGNDANFICGYEAGCLGYTLYHQLTEHDVNCVILAPTTMLEQRSKRRIKTDRRDAEIIGKCLAQHNYSPVHIPTATDEETKEFLRMRDDHKLALKKVKQQILAFCLRHNYRYDGNSHWTAAHIKWLKSLNPEALYKEILDEYLLTYTTLSDKVERLDKRIEELASKDEYRESVKKLCCFIGIKTHTALSVLVEVGDFQRFASAQNFASYLGLVPGEDSSGDGQTRLGITKAGNRHVRMLLTEASQCYARGQIGFKSKELKSRQAGNSPQVIAYADKANERLRRRYYKMVLGKSKKHNVAKTAIARELACFMWGMMTEHIA

SEQ ID NO: 226369 - protein, 410 aa, unidentified
MEILYPHCAGLDVHKDTVVACARHMAEGKVRTQVKTFKTTTEQLIALSDWLSSAGCTHIAMEATGVYWKPVWHILSDGEFELILANAAHVKNVPGRKTDASDAVWLADLMAHGLIRPSLVPDEPTQQMRDLLRTRKQMTRDRASHIQRLQKTLEDANIKLDSVVTDILGLSGRRILEALIDGQTVPQALASLAHRRIHASSDELEAALQGRVTRHHRFLLKLHLDQIDAIDAAIARIDQEVSANVEPFRAAIEQLIAIPGISPLAAQVLVAEIGIDMSRFKTAAHLISWAGLCPKNDESAGKRRSNRMKKGAPWLKTTLVQSAWAAARTKESYFQAQYHRLRSRRGSKKAVCAVAASLLTTAYHMLKNGSTYRDLGPHHFDQPDKQKQANRLLKRLQNLGYTVQIQPIAA

SEQ ID NO: 226370 - protein, 343 aa, unidentified
MKIHVLGIDLGKTVFHLVGLDSVGRVVIRKRCSRTQLLAFAANLQVQLIGMEACSGAHFLGRALREQGHEVRLMPAQYVKPYVQTNKNDYLDAEAIAEAVQRPRMRFVPIKTVEQLDLQTLHRVRERWVMRRTAVVNQIRSLLLERGLTLPKGRSHLHEQLPRILEDAELNLSDSFRVLLAQLKLELEQLAARIEEMDRVIQKAARENEACQRLTEIPGVGPVTATALIAAVGNGSAFGKGRKLSAWMGIVPGEYSTGGKQKLLGISKRGNKYLRRLFIQGARSVLQQRHKQAPGLSEWLAQLLSRTHQNVVVVALANKLVRMAWAVLCKNERYRAPVLAIAI

SEQ ID NO: 226371 - protein, 404 aa, unidentified
MIYLGIDWAEAHHDVFLLDEAGIRLDKARVPDGLEGLRRIHELVAAHTESAKTVMVGIETDRGLLVQGLVATGYQVYAVNPFAVSRYRDRHATSGAKSDPGDAKILADLVRTDRHNHRPVAGDSEHVEALKVLARAHQSLIWSRQKQVNQLRSTLREFYPAALVALGTDLSARDAVALLERAPTPEQGRLLSLSKIRATLERGGRQRNLDARAADIQAALRTPQLQPPRRLAQAYGSSVRATVRVLAQLNAEIAELEAELAESFEGHPDAEILRSLPGLGVVLGARVLAEFGDDRTRYQDARARRCYAGTAPITRASGTRYVVLARMSRNRRLADALYLWAFSSLTRSPGARASYDAHRARGNTHHQALRALGNRLVGILHGCLNHRIVYTEAVAWPPRAETAA

SEQ ID NO: 226372 - protein, 402 aa, unidentified
MTADRLWVGVDVGKDHHWVCVVDDAGKQVLSRKVVNDQQPIAAVIAEIDQLGQEVAWTVDLSSVYASLLLTVLADASKSVRYLAGRAVWQASATYRGGEAKTDAKDARVIADQSRMRGDDLPVLQPDDSVIAEMRMLTAHRTDLVADRTRTINRLRQQLIAVCPALERVADLTDDRGWVVLLERYQRPKAIRQSGVSRITRVLSDAGVRNAVAIAEAAVAAAKSQTVRLPGEEVAARLVAELAKEVVSLDARIKTTDADIKDRFHRHRHAEVILSMPGMGFRLGAEFLAAVGDPSLIGSADQLAAWAGLAPVPRDSGKRTGRLHSPQRYSRGLRRVMYMSALTAVRYDPDSKAYYQRKRDEGKRPTQAVIRLARRRTNVLYALLRDNRTWQPNAPEVSPQAA

SEQ ID NO: 226373 - protein, 436 aa, unidentified
MTTPYLHPKMKYTFVGCDSHKKTHTLVFLNCFYEPLGELVISNTPSDFKAFLKQASKFMQPDTEFCFGFEDVSVYGRSLIKFLLQQPYLVKHTNASLVASERRSTNTLNKNDSIDALCCARVLINRFDSLPVVSVNDPLFILRSLVSRRKSMVKINGMLKNHLHTLLADHYPTYPQFFHDLTTKSALAFFEAYPSPMLLTSSSMEAVEELLYTASSGKIGQKKAQKQAQAIWHAVNREGVEPFDYQEQRDFTICSIIRQLQNNLHEIERIETHLGQFLDLLDIPLTSMKGIDTVLACRLINEIGDIHRFKNPASLAKYAGIAPVTYASGSSHVEYANKRGNRELSAIFYQLAISLTMPRGAERQVLNPFFHEYYHRKLSEGKTTKQALKCVQRRLVNVIYGIMKYKQDYINPPVMYEDKENKQELKLTKKQATFKS

SEQ ID NO: 226374 - protein, 483 aa, unidentified
MSKKKREYIRGEKEERFKRKIKGIEKKKILGISIDVSKDYHKALIFDFEGRLVDGPFEFSVFKDGYENFKQRVGEAIKKKGAKKIFFGLEPTGPYHENLARHLKENFKEVEFINPSATYANRAQDMLVGLKTDDIDLGAIGDLLMRGKGYEYNLEEAGMYLSLKEETFWREKKLKMQTRLKNQIKARLNKIYPGLMSKYHNNEPLFSDLWRSRVARGLIRSRLTPAQIQIMKAEELIGEFERIGYALTRKWAEKIAHYTKRILAPHDKIIEIDLDLVNRDLNLLEALEGEMSIVEERMIEEVKETDSSFLLGKIKGLSDLQIASFVGAVGRIENYRLGKQIFSKSGLSSKVNQSGKRNIKGLGIRRVGSKILRSILFKMADSVKKHNPYFALYYSYLTEEKGKLWKKAHIAVSNKLVRVMFAMLRDRADFNPPTAKIDYLEMLFSQRRNRRRQERKKEKENSPSPFFGPKGIRASERIPSPVR

SEQ ID NO: 226375 - protein, 407 aa, unidentified
MLFVGDDWAGDHHDVCLQDAQGRVLAARRLPEGVAGITRLHELVAGHLDGDDPSQVVVAIETDRGPWVRALVAAGYRVYAVNPKQAARHREVVAVSGKKDGTFDAATLADMGRTRRHQLREVAAGSDEAEAVKVAARAHQKLVWERTRHALRMRSALREYFPAALEAYGPLTLTGTDTLELLAKAPEPAAAARLTIAQISAALKRARRRDVAGKARQIRAALREQHLGQPEIVTEAYAAGVRASAAVIAVLNEQVKVMEARVESFFRRHPDAGVYLSQPGIGVITGARMLGEFGDAPGRYAGAKARRNYAGTSPLTIASGKKKTVHARFIHNDHLVAAMHDQAFGAISASPGARAYYDELRAREIDHTDALRRVANRQAGILHGCLKTGTAYDEHTAWGHRSQPAAA

SEQ ID NO: 226376 - protein, 341 aa, unidentified
MKQDISVLGLDIAKRVFHAVGLDDTGKIVLRKPLSRHALMPFIAQLPPVLIGMEACGGAHYWARRFRAHGHEVKLMAPQFVKPYVKSNKNDARDAEGIGEAVTRPTMRFVPTKEVDQQDIQALHRVRDRLMGARTALVNEVHGLLHEYGIVIPKGVSKFRQAVVGKLESEQDKLTPLSQEMFWKLIDEFAALEKQLAYYQEKLEALATTHPECQRLMTIPGIGPLTATALVAAVSDASAFKNGRQCAAWLGLVPRQHSTGGKERLLGISKRGDSSLRKLLVHGARTTIRWVGRTTDRRSQWMRQLVERRGKNRTAVAVANKNARIVWALLASHQDYQLTTG

SEQ ID NO: 226377 - protein, 415 aa, unidentified
MEDLGLRALHRRVAGIDVHRMLHVVTVLIEQSDGSMQRHTREFGGFRRDCRALAAWLAELHVELVVMESTGIYWKSVFTHLENAGITAWVVNAHRIKHVPGRKTDMADSEWLAVLARFGLVKASFIPPRDLRELRLVSRYRRKLSAMCASEINRLHKILDDGGIKLGGVVSDINGVSARAMVSALIAGQPIEQMLGLARGKLQQKREELGASLDGDLSARHLFVLGHIEAHIQTLQRELAEIDRYLLAAMRPYAWAHQLLQTIPGIDEIAAALIVIEIGDDMARFGRAQSLACWAALSPGNNESAGKRKSGRTGHGNSTIRFILCECANAARMTKSTLAAKYRSLMVRKSHKKAIIAVAHKMIRLIFVMLSRRQPYLDQGIDYAAMSAKKNAPRWIRQLKAICRWPSPKSAAASA

SEQ ID NO: 226378 - protein, 401 aa, unidentified
MISVGIDVSKEKSTVCILKPYGEIVSSPFEVKHFESDLDSLAQMILRLDGEVKVIMEATGIYHLPILNHLQDKGIFVSVINPFMMKEYACRGIRRVKTDKQDAITISNYGIDNWFRLENHKGDDEIYAELKLLGRQYSHYMEMHVKALLELTHMLDYTMPGIKGKLRSWNEGNGKDKLSDFVERYWHFDNIVSMKKDEFVEDYIEWAKENKYHQNCSKALEIYELASDGIATLSANTPSTKMLVLEAVRVLREIDNTLIKIITRMKELAKSLPEYETVRAMGGVGEVLAPKLIAEIGDIRRFHSGKALVAYAGIDAPPYQSGQFMGTNRKISKRGSKLLRKIGYETMRVLKTHKEPDDAAVYRFILKKEAEGKSKRQAKIAGLNKFLRIYYARVSEVYKTI

SEQ ID NO: 226379 - protein, 360 aa, unidentified
MQRKDSQKIFEGQSVYVGIDYHKKSWKVSIYGEQYEHKTMSRAPDAEQLLRYLEKNFPGAAYHAVYEAGFSGFGSCRRLRDLGVNCMVINPADVPTSQKEKLQKTDKADSRKLARSLRSGALSGIHIPDRQLEADRGLVRQRFRIVKDIARNKNRVKSLLFQFGISMAERFTTAQTRYWSRPYTDWLLSLSGADPMVGPLIDNYVRIVNNLRKELLGINRQVRELSRTSRYKDSYNLLVTVPGIGLMSAMAFLTQLGDFTRFKRLDELCNYVGLVPRMYGSGDKMVVGKLINRGRKELKIMLIEASWVAIRQDPALMAKFNELIKTMPKNKAIIRIARKLLNRIRYVIVHRKEYVTGVVS

SEQ ID NO: 226380 - protein, 331 aa, unidentified
MKFRAFIGIDVSKSTIDIYLRNAGRHAVFVNDLEGFEAMGEWLMDILGQVCPDEMMFGLEHTGLYSELLISFLNDHNFPFTVLPGLEVKKSMGIRRGKSDKADAKDIADYIYEKREKVNLFNMPSQNLESIRKLASYRERLVKERTAYKTRLGEYQKVYGKESYELYTESHKQIIACLDKQIKGMEAEMERLIKDDQEMLRQYRLVKSVKGIGPQTAIMMIVLTKAFTAFPEWRKFASYAGIAPFPNQSGTYMGKTRTSKLANKRIKGLLTMCAAVAVQHNPEMRLYYEKRVNKGKNKMSTINIIRNKLVSRIFAVIERGTPYVETMKYAA

SEQ ID NO: 226381 - protein, 417 aa, unidentified
MEDRSGARAVRYIALDIHQHYCVVAGVDREGRVVLQAVRVEHADLEGWLKKNLRECDHVVIESTTNAWHVYDLLSPLVERVVVANPIKVKQIAQARVKTDIRDTLILARLLAANLVPEVWVPPAHVREMRQLLSQRRQLVETHTQIVNRMHSVAHRHHLQHERGKRFNEKTTGWQKDKRLSSLEQFQLGLEMENRAYIEKQISRIGKEVAKMSHQKPWAQSMTYLMQLPGFGVITGMTVLAAIGEIQRFDSARHLASYSGLTPGLEQSGTKYHEKGITKEGRKELRWALVEVAQRAVKSDPHWKQRFQELQKRMHRNQALVAIARRLLELVWYVLTRRQPYHHFSQERIAYKYLTWAWQMDDEARDGLTRQQFTRYYLMRLGIGHDLTRIALDPKHPRKISSEAELLALRPELNHIE

SEQ ID NO: 226382 - protein, 317 aa, unidentified
MRIIGLDIHRAFAEAVAWEDGRLRRLSRVDMRRDLLAAFAAKLSPNDVVVIEATGNASSAAAVIAPHVKKVVTANPKQVRIIAYAKIKTAIDAGVLAQLYASGFLPEVWIPDEPTQALRRQVTRRNQIVRQRSRLKNVIQSILHSHLIPSCPHADLCGAKGRSWLSEQIVPEDERLAIDRHLREFDRLGDDLQVIERDLARSALEDEGVKRLMTIPGVDMTVALAMKAAIGDVSRFDEPQKLVSYLGLNPSVRQSGPGPAYHGRITKQGRGHARGMLVEAAWAAARAPGPCEPSSCVCERAAASMSRPWQPHANSLS

SEQ ID NO: 226383 - protein, 406 aa, unidentified
MPVEGCSQIFMRGVVMLICGIDIGKFNHEASIIDETGRLLAKSLRFTNTTSGGEKLLDYFNSCNPEGKVIVIGMEATGHYWLSLYCFLFDKGYQVNVINPLQSDAVRNLFIRKTKNDAKDSFLIAETIRIGRFSKTEFADEDILSMRQLCRHRMDLVDYISDQKRKIIGVMDRVFPEYQTLFSDMFGKTSTELLNKAVTPEEILAIPTDELSKLLNSSSRGRFGQAKAEKIQALAKTSFGITVGTAALGLQLRQLLEMIELLERQLDELESEIEVYLSKLNTPITSCPGVGNVLGAAILSEIGDISRFSEAKKLVAFIGIDPSVKQSGEFVGTQNKMSKRGSPHLRRAIWLAATVAAFHDPVLTAYYQKKRAEGKHHYTAVGAVARKLTMIIYAVLRDNKPYVPNC

SEQ ID NO: 226384 - protein, 387 aa, unidentified
MARKRTLSTLDTSIAYEAVGLDLAKEDAAIAAFGPDHEGPYLIDRIPYDKLYELLADMAPTLVAMEPCSGAHQIAEQIQELGHEVMMISGRHVQAWVKDHCNGQKTDLNDAFAILNLAYDRWLTPIRGKTREECRLLALQASYRQLKGQRTKTMVHVKATLHAWGFPIRAGSFNQKVLHELIDANREAFGDEVVETLHLMINRVHDLDHDIATVLKLLTEATQRDPRASLLRSIPGFGVLTTSRWCAVVGDIARIDTPKQTMAFIGLVPNNRITGHHTETSSGREARGQGRMSKRGDKMLRSLCILGAGALCLMVRNDRLPDCPFVASIKERLASPRPWFKVLVYVAAKLVRIATALLKYGETFSFEKAGISKAVLKQWELEQAKAA

SEQ ID NO: 226385 - protein, 457 aa, unidentified
MVQTKRARGSRDFSTVNPEAAAIDIGATIHVAAVGPSRDKEPVRTFRTFTDDLHRLADWFVGCGIKTVVMESTGVYWIPIFEILEQRGLQVMVVNARDAKHVPGRKTDVSDAQWLQRLHEYGLLRASFRPQAEIASLRAYLRQRERLLDYAAAHIQHMQKALTQMNLQLHHVVSDITGVTGMSIIRAIVGGERDPAVLVTHRERGCHASVETMCQALVGNYREEHVFALTQALELYDAYQTKVSDCDKQIQVVLARLKQAASPPARKLPPVRCRTRQPNALGFDARAALHAILGVDLTQIDGLGPYLALKLVGECGTNLMAWPSAKHFTSWLALAPHNKISGGKVLSSKTRRTSNRAASLLRLAASTVGRTDTALGAFYRRLSARVGKAKAITATARKIAVLFYNTLRHGMTYSDPGATYYEDRYKKRVLANLQRRAKSLGFVLREVDDDTAEVGVS

SEQ ID NO: 226386 - protein, 286 aa, unidentified
MPQSRTLYVGFDVHKESIAVAYIAQAPHAEVVSLGNSGTRQCDIDKLIRRLQSKSPHLVFVYEAGPCGYWLYRYLTKKGQGCWVVAPSLIPKKPGDRGKTNRRDAITLARLMRSGDLTPIYVPAIEDEAIRDLCRARAEAIRDLKTAQFRLKAFLLRHAIRYTGRVTWGPAHLRWRSEVVCPTPQVQTWRLAPVVDALQALRGVQFTVAVTAVAELGDLTRFENPRQLMNYLGLTPSEYSTGERRRQGGITKTGNSHARRALVEGAWAYRYPAKVSRQRHCALPRQ

SEQ ID NO: 226387 - protein, 485 aa, unidentified
MKTKRQGGAQEAKKASSRATQDKWHDMNRKQRREMMRKIQSEDLSLEVIHPDAAGIDIGNESHYVAIPPGRDSQSVRRFGCTTAELKAMAAWLKQCSIHTVAMQSTSVYWIAVYDILEQAGLEVYLVNARDTKNLPGRKSDVQESQWLMKLHTYGLLRNSFRPSQEVRTMRTYWRQRNDLVRAAARHIHRIQKALTQMNIQLANVLSDVSGMTGQAIIKAILTGERDPRKLAAFRHPRVQASEEQIARSLEGNWQQDLLFVLKQEQDGYEFCQRQMAECDRQLNHYLEQREDRSQAAPLPEEKRKGRLKKKKGNKPQFDLRAGLFRMTGTDLTQIDCIDVMTATTIFSEAGWDMSKWETEHHFVSWLRLCPDNRISGERIIGKGRLPTNNRVTTALKIAANNLRLSNTYLGAQFRRLRTKLGAPIAIKAMAAKLARLVYRILRYGMKYVDRGAAFYEAQHRQIQITHLKWKAAKLGFKVIEAPAA

SEQ ID NO: 226388 - protein, 387 aa, unidentified
MQKPHDNSKVCRAAFVQDSTLVVVIEMALTSWLVAGMIPGVDREPLKKIAPDPEELLQLLYRWRDEAVKAGKEIARIAVAYETGRDSFWLARWLRARGIDAHVIHATSVAISREHRRAKTDRIDTAMLRRGFLGWLRGEPGHCSLAIVPTAAEEDAKRPHRERESLVQERTSTVNRMKSILIQFGVRNFNPVLRKASEKLDAVRTPEGIPLPPNAAAALRRHMERLRIIKEQIKAIERTRLQRLQQDPADKMNAMVFLLAGIIGFGVETAEQLVHEILFRDLRDRKAVARYAGLTGSPDESGSKRREKGLSRSGNARVRTILIQLSWRLLKLQPGSELALWYKKRTADAKGSRKPMIVAFARKLIIALWRYVNTGLLPKGFELKPAS

SEQ ID NO: 226389 - protein, 350 aa, unidentified
MQRYIGLDVHAASTTFAVIGESGKRLGTHVVETNGQALVEQLKTIPGKRHVCLEEGTQSTWLYEILSPHAEEVLVVMVSESRGQKNDAKDAFTLAEQLRTGAIPKHVFKEVGEYGTLRELGRTYTMVVQDVVRVQNRIKALFRSRGIAVVGKSVYSEKGREACLKQLPHASRGAATTLYAQYDAVEAIRRQAEKDLVTEAHRHPMSRVLESCPGLGPIRVAQVMPIVVSPMRFRTKRQFWSYCGLGIVMRSSSDWVRKPDGGWARAEVKQTRGLNVNHNSTLKSVFKGAATTVITQLETEPLHQDYQRLIAAGTKPNLAKLTIARKLAAIALSMWKSKEKYDPTKHRKQG

SEQ ID NO: 226390 - protein, 413 aa, unidentified
MDVILERCAGLDVHKATVTACIRYPGPAGERTQVSHTFGTTTPDLLALRDWLAAHRVTHVAMESTGVYWKPVYYTLEDGVPEVLLVNATHGAKVPGRKTDVSDSVWIAQLLECGLLRGSFVPPPVIRELRDLPRDRKTLIQDRTREANRLHKVLEDAGLKLATVATDVLGASGRAMLTALVEGTTDPGLLADLARGRLRAKLPALRQALTGRFRGHHAFLLTQLLAHLDYLDEAIATLSHAIEEHLAPFAEAAVRLQTIPGVKQRTLEAIIAEIGVDMRRFPTAGHLASWAGLCPGNNESGGKRRRGRVRKGNRWLKAALVEASLAAIRTKGSSLGAVYRRICRHAGHNVAIVAVAHAILEIVWHLLAQGTTYRELGADYLHRRNTEQTARRHIRFLETLGYRVTLEPVPAAA

SEQ ID NO: 226391 - protein, 312 aa, unidentified
MTEIICGIDVSSQYLDAAIGPDGAFLRVANDAEGVAELAAFCETHGVELAVMEASGGYERLAFGLLWAAGLACAIVNPRQVRHFAEAMGFLEKTDRIDARLIAWYAKAAGIGANEPAGEAQQRLRALVTRLRQLTALKTAQTSQRRFAQAPEVLRSIDEMLALLRRQSRELAGEIARLLDADPMWATLDAAFREIKGVADRTVAGLLAELPEIGTLSNKAAAKLVGLAPLAKDSGKLAGKRRVRGGRRPLRALLFIVAEVVRRHDPDFAEFHRRLNEAGKPKKVVRVALARKLLVRLNAKARDVRRQIAIPA

SEQ ID NO: 226392 - protein, 355 aa, unidentified
MSGEKYIGLDVHQATISVAVMDSQGKFIMESILETKASTILEFLAGLRGSLFVTFEEGTWAAWLYDLLKPHVTEVLVCNPRKNAMLKHGNKSDKIDARKLAERLRLKDLKPVYHGETGVRLLRELARSYLTVVKDLSRVMNRLKALYRSWGIACAGRDVYYRRHRSQWLEKIPEAGTRRRAEQLYQQLDMLQHLRQQARRELLAESRKHAITAKLRQIPSLGPIRSALAVALIQTPHRFRSKRQLWTYSGLGLETRDSGEYHYVRGQVRRRKKQATIRGLNKDYNHDLKGLFKGAATRASVKPGPFQEFYQRSLAKGIKPTMVRLTLARKIAAITLTLWKKGEDFDIDKLNSQAA

SEQ ID NO: 226393 - protein, 344 aa, unidentified
MDHFAGLDVSVKETSICIVDDTGKIVREVKVASEPDALLAVLQNPAYNFKRIGLEAGPLSQWLFGALAEAELPVVCAETRHMQAVLKAQINKTDRNDARGMAQMMRVGLYRPVHVKTIRSQKLRMLLTHRQLLQSKAIAIENDLRATLRNFGLKVGMVGKVRFEARIKELVENLPDLAALVEPLLIVRRVLREQMVILHRRLLAVVRDDEVCRRLMTVPGVGPVVSLTYRATVDVPARFRKSKAVGAVFGLTCSKYQSGEIDRSGRISRCGDEMMRVMLYEAAQSMLRSKKWSWLKAWAMQIARRRGMKKAIVALARRLAVIMHRIWVDGTEFRWTREQVPAAA

SEQ ID NO: 226394 - protein, 429 aa, unidentified
MVMGFTKLIEHFILQRKKVISMNTLYVGIDVSSKSNVVYLMLPNGDKHSNFSVANSREGSTQLVKRILSALTSHSLDTVLIGLEATSVYGDNLVYFLREDATLAPFNRKIHVLNPKQVKKFHDAYNDLPKNDYVDSFVIADCLRFGRINKEVYLGDYCYKALQNLTRARFFAVQNLVKEKQRFMNVLFKKYSTMTQEKVFSDTFSTTALAVYDEFDSAEALANMDLHELTDFIMEKGKNRFPNPDAVAKAIQKAARSSYRLPKTVNDSVNQVLSISITSMKALESQIKEFDKAIQAQMELLPNVLISIPGIGPVYSAGIMAEIGDINRFNNQAALAKYAGLAWKQHQSGGFESEVTRLIPSGNRFLKYYLCEAAFSLVRCDKEYSDFYHLKYKEVNRCQHKRALALTARKFVRLVFRLLKDNRLYRPAK

SEQ ID NO: 226395 - protein, 357 aa, unidentified
MEGLDEERRDAPVFLGVDTHSEAHVAVALDGAGGRLGELVVPNDRAGYARLWDWAMSLGILVAAGVEGTGSYGAGLSRFLRARGASVQEVNRTSRQHRRRHGKHDAGDAEAAARQVLSGTAAGEPKGADGAAESLRALRVARRSAVKAKTQAANQLHALLSTAPDELREGLGGLPTKHLAAKASRFRCGAGPVDPARATKLAMRSVARRHQALSGEIAELDAHIEALVEEAAPELVALEGVGPDTAAALLIAAGDNPERLKSEASFAHLCGTAPVPASSGKVVRHRLNPGGNRDANRALHVVALNRLRRDPRTQEYLARRTAEGKSKKEALRCLKRYIARETYRAVLLDAGARRPPG

SEQ ID NO: 226396 - protein, 362 aa, unidentified
MLQSTIIIAFDQHAATTVAAVLLPGHRTPALHPLTSDVPTILRFVERVRRQGPVACCYEAGPCGFELQRALVGREVPCDVIAPALIPRRPGDRIKTDRRDAGQLAILYRADALTAIHIPTAQEEAARDLLRCREDIRADLLRARHRLSKFLLRHGRRFTGTKKAWSQRHGTWLRAQTWPLPALDQTHAAYLRTVDEAVARLATVEQDLRALLDLEPLRTRVQRLRCFRGIDDLTALTIAAELGDPRRFPTAPSTMAYVGLVPSEHSSGTKRARGTITKTGNAHLRRVLVEAAWHYRHKPFVGAALRRRQRGAPDAAIARAWTAQQRLYRRYHRLAARGKPSQQVNTAVARELTGFVWAVLTQ

SEQ ID NO: 226397 - protein, 313 aa, unidentified
MREKLRFLGLDVHAETIAVAVAEPEGEVRSLGTIPNRAESIRKLIKKLGPADKLRACYEAGPTGYVVYWQLAELGVECEVVAPTLVPVKAGDRVKTDRRDAEKLARCYRSGDLTAVWVPDEGSEALRDLVRAREAAKQDQTRARHRLSKFLLRSGQRPPTGVRPWTRPYLIWIAQLRFKQIAQESTRQDYLHEVEHMRERVTRLEQAIMEAVKLASPALQQVINDLQALRGIADISAVTIASELGQVSRFESARQLMGYCGVVPSEDSSGKRTRRGGITKTGNAHLRRIVVEAAWSYRRPPGCSLTTTQKKTS

SEQ ID NO: 226398 - protein, 367 aa, unidentified
MKKVSTVAATPSKKISQQKLTVGLDLGDRNSWYCVLDDSGQIQLEQRVRTTAKGLSEVFSAMPRSRVALETGTHSPWISRLLRELGHEVMVANARKVRLIGESRKKDDRLDAQTLARLARIDPGLLCPVKHRSAQAQADLMMIRARAGLVRVRTGMVNTARGLAKSYGERLRGCNVRNMNPEKAEGLSAELQAALEPLLAAIESVSERIAEYNQRIEKLAQESYPQVAVLKQVKGVGTLIALTFLLTLEDPHRFDKSRDVGCYLGLQPGRRNSGQSEPQLHISKEGDPYLRTLLVQGAQHILGPFGVDCDLRRWGLKLAERGGRSGKKRAIVATARKLAVLLHHLWVSGEVYEPLHNSCRVAVTAAA

SEQ ID NO: 226399 - protein, 364 aa, unidentified
MNKRSTGNGVEGMGAWTVGMDLGDRTSHICVLDEAGTVVERGKVQTTREGMRKRFERAARMRIAMEVGTHSPWVSRLLKELGHEVLIANPRKTRLIYQNRGKQDPVDAEALARIARLDPKLLYPVEHRAEGVAEDLAVLRSRDVLVRTRTQLVNHVRGAVKATGHRLKKCSTRTFSEKAVSEIPEEVGEALSSVVATIEAVSRQILQLDKRIAELGKKKYPETALLRQVGGVGPIVALAYILTLEHPGRFRKSRAVGPYLGLVPSRSQSGGSDPQLHITKEGDNLLRRLLVQSAQYILGPFGEDCDLRRFGQALSARGERNAKKRAVIAVARKLAVLLHRLWKSAEVYEPLRKAGTPQDATVAA

SEQ ID NO: 226400 - protein, 358 aa, unidentified
MQRNKKTFKGQNIYIGIDVHKKNWQVAVITESGYTERLSTAADAKALFKFLKSHYPDGNYRAVYESGFSGFATHYALSDLGVSCVVAHAADIPSSQYELTMKSDRIDAEKLARALRAGLVRGIYVRPKDNLDDRGVLRIRKTIQIQVGGYKTRIKHLLHSNGVELPERFSRSGTHWSRAFIAWLREDVRLLSDTRRSLELLLLQVETLRANLLEATRRVRALSRTDRYREDCALLMGIPGIGLTVAMTILTEVCDIGRFGNERLFASYLGLVPTSHSSGERVSHGEMTFRGNKHIGPLLVEASWVLIVRDRELGRMYTEYRWRMAGQKAIIKIARKLSNIIFAVLKTRKAYEPYRRDA

SEQ ID NO: 226401 - protein, 329 aa, unidentified
MKRNWFIGIDISKKTLDVVIYDQEKKNASKHFKVNNELKGFKEMIKTLKAGGVVLKEAFICLEYCGVYGLELGLFLEGKIDFCFCSPLHIKRSLGLTRGKNDKLDAYKIAWFSYLFRDELSPSKMPTETMLKLKSLMGERYRVVKASATEKQVLRELSRQLDSKSIRRIKHRLKILAADIKAIENEVKELIQSSPALKKNYELLISITGIALVNATMMILCTNNFEGIINARAFACYCGVAPFEYSSGTSTRGRTKVSNLANKRMKADLTNAARSAIVHDPEMRIYYKRKRAEGKEYGTVINAVKFKIITRAFAVIKRGTPFVKLRQAG

SEQ ID NO: 226402 - protein, 345 aa, unidentified
MSKYKAIGIDLAKKIFHIAAINHNNKVILKRAINRQDFFEQLPILFPSTETFAFEACGGCNYTAQKLQALGHTVILLKPKDVKAYAKSRQKNDMNDAIAICKAACDPDIMHVSAKSRDEQEIAYIHKARQNTIRQRIQRSNSLMTSMIEFGYVPNCKKAEFARMYLLYLEEAYKEGFLPKPVYEQMLADGQEIEHLLKRQQQLEKAIKTQNKKSPKAKLLQTIPGIGPINASILSIKPVELYETAKDFAASLGLVPKQHTTGGKIILGSITKQGDRYARTMLIQGGRAIVMRCSKVNPPKEPIYELVARLKKAGKPFNVICVAVANKLARIAYGCMLQHKEYSGR

SEQ ID NO: 226403 - protein, 382 aa, unidentified
MQTIDTINPTILLAIELSASTWLVAARVPGLEKPHLHRIDGGDTAALLALISSLQARAARGLDATIGVVCCFEAGRDGFWLHRLLTAHGVVSYVLEPTSILVNRRARRAKTDRLDAEGMLRVLAAYLRGDHQACSMVRVPTPEEEDAKRTHREREKLVQERLRIENRIEALLFTQGIRKRPSLRSWERDLAVLRTGDGREIPRHLRAELDRLRRRLVMTLELIREVEAERDQAAKTKPQDQAYHKIAALCRIRGIGENFAAVLTREVFYRSFDNRRQIASYVGIAPMPYQSGGMDRDRRISRAGNPRARTTMIQLAWLWLRYQPGSELAEWFRERVGTLAGRTRRIAIVAMARKLLIALWRYAETGVIPAGAEIRAETTVAA

SEQ ID NO: 226404 - protein, 419 aa, unidentified
MEELLRVLLFIGDDWAEDHHDLEIEDETGRRLAKARLPEGLEGISRLHALVAEHAPAEWAELPSEEVASRVFVGIETDRGPWVTALRAAGYQVLAINPLSSARYRERYSTSGAKSDAGDAHVLAEIVRLDRDHHRQIAGDTDLVDAVKLVARAHQTAIWERTRQVLRLRSTLREYFPAAIEAFEDLAAKDTLLLLARAPSPARVAKLTRSQVVSALRAARRHHVEAKADAVLAVLRAPGLRQPATTEAAYAAVVVGQVGLIGALNEQITQLQEVVAEHFGRHPAADIYLSQPGFGVVLAARALGEFGDDKERFHDARARKNYSGQSPITRASGKKTVVLARYATNRRLGAALHAQAFSALVASPGARAYYDALRARKIGHHAALRQLANRLVGILHGCLKTGTKYDENTAWQHQIVVAA

SEQ ID NO: 226405 - protein, 374 aa, unidentified
MKNVSIFVGLDVHKESIDIALVESDRNSAVRYYGTIGGDLADLEKAVKKIKKAHPEASLHFVYEAGPCGYGIYRYLTKAGHECMVVAPSMIPKRSGNRIKTDRRDSIMLASLHRAGELAPVYVPREEDEAMRDLVRARQDAVKAGRVSKQQLKGFLLRHGIKFTGKGDWKQTHMVWLAGLAMPIPAQQIVLQEYINTVKDCTGRIARLTSQIQEVLPSWELAPVVKALQAMRGVSLQVAVTTVAELGDLKRFDNPRKLMSYLGLVPSEHSSGGSRRTGSITKAGNGHVRKALVEAAHTYRLKARIGKELLARQEGLPKQICDIAWKAQVRLCGRFRKMEVRGKKHQTIICAIARELCAFMWAIAKEVKPITACN

SEQ ID NO: 226406 - protein, 408 aa, unidentified
MPRYYLGVDWADRVHQLYGGDENGIKVMEMKVQENPEGLAELARWLNQSRAEQVELWAAIEKPHGRIVDFLLDHGVVVYPVNPKVLDRARDRFRMSQSKSDPFDAWVLSDFLRTDHGHLRPLAPNSEQAQELKLLTRDQQRMVRHKTRLLNQLKFTLKEYYPRPVEVFGDLEARIAVDFLKQYSTPTALSKLSRKQWSRFAQQHPHLGKARSAKLWEELKKPQLVVPDHVVRAKAQLLEALLDQLEASLRSIEKYSDKVERFFASTPAARLVEKLPGGKSGTLLPALWAELGDAPARWESFKHLQAEAGAVPVTKSSGKSRFVEFRFSCNKQLRYAVYWFAFISINRSQWAKAFYRDQRARGHSHPQALRALGAKWLKIIFVMWRDHKPYDETHHLANIARQKLRQAA

SEQ ID NO: 226407 - protein, 336 aa, unidentified
MQMVIGLDIAKRVFQVHSVDPASGEICRRQLKRAELPGFFATLAPAVIAMEACGSSHHWGRRFSAMGHEVRLLATKFVRPFVKTNKTDAADAEAIWEAAQRPDMRFVPVKTEQQQGILALHSMRDLLVKSRTAQIHQIRAVFYEHGIDLPTGRHWGLKALPQAFMRLDGRVSEMVLEALREQLGLINDLTSRIESIEQKLEMYERTDDRCKRLRAIPGVGPLTATAIVASVGDAREFRSAREFAAWLGVVPKQSGTGGRVRLLGISKRGSPYLRAMVIHCARAVAARQKVQPPWLVKMLQTKHWNVAVVAQANKIARVIWALLAHGRVYCADYARA

SEQ ID NO: 226408 - protein, 344 aa, unidentified
MTTIQHKQIDHESRPVLFAGIDVGAEELILVIRKNGKPFDPQKFANTPADRTRLVKKLVKLPGIIVCLEATGVYHFDLSLALHDAGVLLMVANPKAAHNFAKVLMKNSKTDAVDANTLAEYAARMDFVAWTRPSNETIALRSFARRIDALTSQKAAAKNHLHALTATSETPKAVLKDVKLAIAQLEKRIDRLTTGALILIGKHPDLERILTLLIGIKGIGNTSAIALMGELLLLPPDLSHREWVKFAGLDPRAFDSGKSVHKKTRISKAGNRHIRSALYMPALSAKQHDPHVKAYFQHLVANGKKPLQAVCAIMRKLLHAIHGMLKHNETFDNTRFYAIPASAE

SEQ ID NO: 226409 - protein, 358 aa, unidentified
MDGSSEQPQMTAGLDLGDKYSYLCLIDQQSGEIMEEGRLRTTPEALRRRFSSELQPLRVAIEAGTHSPWVSRVLEECGHEVLVANPRKVRLIYTNKRKTDEIDAENLARLARVDPKLLYPLKHRGEGSQAHLAIIRSREALVGCRTQLVNHVRGAVKSFGHRLPKCPARSFHKKVVEHIPAALWVALGPILEQIGSLTERIRDYDRKLEVISKEHYPETDLLRQVEGVGTLTALTFVLTLEDPCRFQRSRSVGAYLGLVPARDHSGDRDPQKRISKEGDEMLRRLLVGSAHYILGPFGSDSDLRRHGQKIASRGGKNAKKRAVVAVARKLAVLLHSLWLSAELYEPLRNTQRTGGQAA

SEQ ID NO: 226410 - protein, 366 aa, unidentified
MDAIYIGVDFHARQQTICYLKTETGELVICELQHQDKAQVRAFYQQFPSPVIVGLEASGYSPWFEALLEELSCEVWLGHATEIRRRARWRQKNDRRDAELIWDLMVHGEFPRLHRPPATSREVLRMLRYRQKLIKLRTMAKNSLQAIALQAGLAKGKQLFSRVGHEEFKSAAMSPVLHWQHEHWFALLQPLNQQLLETTVWFKEQSRGNISIQRLRTHPGIGLLTAICILHTLQPVERFRNTRKVAAYAGFDPVERSSAERQHFLGISKAGSRLLRYLLVEAVQTAVRYDEDLKRFYKRLAQRRGRPKAKVAAARKLLIRAYIMMRDEIDYAEFRRRAVAARLARTGQGPSNVPEVLIGQPASPDA

SEQ ID NO: 226411 - protein, 342 aa, unidentified
MTHYAGIDVSLEQASVCVVDANGKIVAEGKVASEPAALLAWFRSLGVELARIGLEAGPLSQWLYAGMTAGGLAVELLETRHVHAAFKTMPVKSDRNDARGIAQLMRLGWFRPVHCKSLAAQETRALLTARKLVQSKLHDVEMSVRGILRGFGLKVGKTTACGFAGRVRELVAGHPTLEVVAAALLAVRATMMRELSGLERRVRTIARSDARARLLMSTPGVGAIVALTYVAAVDDPTRFKSSKGVGAHFGLTPRKYQSGETDITGGISKIGDPSVRAALYEAAHVILTRPIKGCTSLKSWAMRLARRAGMKSAKVALARKLAVILHRMWVDGTTFNAAAAAA

SEQ ID NO: 226412 - protein, 353 aa, unidentified
MKKIVVGIDISKEKIDAGAICVGNLQESPVRLDHQVFGNRPAGFRRMLAWARHLMPDITLNDVLFCCETTGGYDRILCDYIYAKGLQIWREGALQIKRSMGVRKGKDDRADSFMIAEYAMRNMDKAVVYVSPDSTIRELKALFLYRHRLVQEKAEKRVRATHLAETAPRSKSMSFILRDAQKGIRALEKSIKECEERIIELTKSDGELMRNYKHIVSIKGVSIVNTTALIAYSNNFQSITTANKMASYYGIAPFRERSGTSVDRKACVRYYSCSLLRATITQAAECTVKEGGIFRKYYMRLKATGKPYGVILNNIKNKLLHLVFSLVRNDADFDMNYETRRNEIHSTMQKVET

SEQ ID NO: 226413 - protein, 420 aa, unidentified
MLFIGDDWAEAHHDVELQDEDGRRLARRRLPEGVAGIAALHALIADHLGDEESDTVVVGIETDRGPWVQALLAAGYQVFAINPLSAARYRERHVTSGAKSDPGDAKVLADLVRSDRQHHRPIAGDSELAEAVKALARAHQNLIWTRQRQTGQLRSTLREFYPGALAAFDELAGRDALAVLQIAPTPAKGRALSRSKIASALRRAGRQRGVDARTEQIQTVLREPQLAAAPMVEVAFGHTVTAMVAVLAQLVTQIENLEQELNAHFERHPDAEILRSQPGLGTVLAARVLAEFGDDPTRYADVKARRNYAATSPITRASGTRRVVLARVAGNKRLRDALYLQAFSALSRSPGARAYYDHHRERGHTHHQALRALANRLVGILHGCLRHRQLYDETTAWPTIAEQQHAAAGPYQDRCFRLFG

SEQ ID NO: 226414 - protein, 449 aa, unidentified
MNNGNGVSRGDRNRNARLARLRELVPVGNAIVGIDLADKKQMVVVCDHDSRVLARRTFRCKAWDLGSALDWAAERAAMKGWAGVTVSCEPTGHRWRVLGQLAADRSMPFVCVQPIQTSWARRSEDLTFDKTDEKDAVLIARLTAQLRCYVPEPVDETWGRLRHLGARREELIVANVAQIQQVRDLLECVWPAALGTARQPFRSRTWAAALTVILDRDGGDLDRTRRLGWARFERVVRREITRRGGQKPSLRIARHLFAALADPAGVIAHRRGALERAGLVLEDWDLDRKRLAETERRMAEVLDELELTSLVTSIHGISAVGAAAILAETGDPHRFATARAMVKHAGLAPREKLSGTFVGRTKLTGQGRPRLRVAAWRAVWGSLQTNTVYAARYRHLTTRKHNKLKPTQAQTVLAAAILRHLHAVVTTGQAWNPEIASRGTKRSAVTLAA

SEQ ID NO: 226415 - protein, 334 aa, unidentified
MKEFSKYVGLDIHKETIAVAVADAMGGKSRFYGEIANTPEAIGKLVKNLCPDGEVISFCYEAGPCGYEIYRQISQLGHHCSVVAPSLIPTKPGERVKTDRRDSEKLSRLDRAGELTPVWVPDQEQEAMRDLTRAREDMKGLERTTKQRLNAFLLRYGRIYERGKSRWTRAHFRWMEGLKFDVTVQQIVFQEYVDAAKQAEARVAGLEREMEKALENWALAPVVEALMALRGVKLISAMTIIAELGDITRFDSPRQLMSFLGLVPSEASSGLNRRQGGITKTGNGHVRRVLVEAGWCYRFPARKTAHLQRRAEKCSDAVQAIAWKAQESVGLGCS

SEQ ID NO: 226416 - protein, 321 aa, unidentified
MNPVQAYVGIDVAKERLDVAQRPTGEVWSVSNDPPGIGELVERLRRLQPVSVVVEATGGLETHLVAALAAAHLPVAVVNPRQVREFARATGRLAKTDTIDAQVLAQFAEAVRPSARPLPGEATRELSALVTRRRQLMEMLTAERNRLRTTSKRVRQNLESHIRWLECCLSDLDDELDRSVRSTPAWAERDDILRSSPGVGPVTSATLLADLPELGRLDRKEIASLVGVAPFNCDSGRFRGRRRVWGGRSHVRAALYMAALVASRRNPVIRAFYQRLLAAGKPKKVALTACMRKLLTILNAMARHHTPWRIMDLALAGQDSC

SEQ ID NO: 226417 - protein, 310 aa, unidentified
MQDTIGIDISKLILDAFRLTTGEFRQFPNDKAGCAALIRWIGKTPMRIVFEPTGPHHRLLEQSLTQAGAAIVKVNPRYARRFAEATGELAKTDRIDAMLLARMAAVLDLQARPGRSEIHHDLRELSVARQALIKDRTAARNREQVAQNAIIRRQLKARLGQIEKQIGEIEKAMAAIVAADETLARRREILASIPGIGPVTAMAIIVERPELGELDGKQAASLAGLAPITRESGGWKGRSRIQGGRASLRCGLYMPALVALRINPDLRRKYLALKKAGKPSKVAIAAIMRKLIVLANALIRDNRKWRPNAT

SEQ ID NO: 226418 - protein, 386 aa, unidentified
MIYIGIDISKYKHDCFIATEANHVLFSFENNLLGFNKFLTHTKPFSKEKIIIGLEATGHYGDNLKSFLLAHGYKFMEINPFLVKKFSDSKSLRKLKTDKKDAKLISEYMRTVDFKAYHLQYYHIKKLKSLTRCRSRLVSMRTSLYNQLTKSVDVVFPEYKPFMREQGYSLTSLYLLGKYTTPSKIKSLNSRHYETTRKLSMGKLSFVKFTKLKELAKNSIGVYDEGNTYIIKNNIKLIETFNTLIENTEQDIAKLMKQYPTYIQTINGIGLLSAAIIISEFGDISRFDRSSEMVSYAGLDSSISQSGTSESVGKLVKRGSKYLRATLINVCMTVMIRVPIFYAYYNKKKQEGKHHRVAMTHLAKKLIRIIFHLEKNKVPFDQSLLK

SEQ ID NO: 226419 - protein, 355 aa, unidentified
MAIRKQSIGIDISKSTFTACLCQQSDDGKLTFSKVLDFSNDSKGFNQLLRWTKGLIVSDSELVFLMEATGVYYENLAHHLYKIKKRVHVVLPNTSKHYFSSLNVKTKTDAVDARILSQFGVERVHKLWTPPPSALLQLRNLTRYYVQLQEQKTALGNIKHSKDCSHDIQNFITKSNKKLINEIDKEIQRCLKEIKKAIEDDKALKERVRKILTIKGVGLITVATILAETMGFEQFHSSKQLVSYSGYDIVQRESGTSIKGKTRISKKGNRYIRNALYFPAMVACRYNETLKETYIRINKNSKASKMIGQVAIQRKLLVLIYTLWKNNTEFIENHKSSSLDPKIETTQDSSVAELL

SEQ ID NO: 226420 - protein, 316 aa, unidentified
MDVAFKSVVGIDIAKRTLDVHVLPERTSLKQQNDSKGRGQLREKLPPPGECLIVVEATGGYERALVAELIDAGYQVTVVNPRQVRDFAKACGTLAKTDRVDAAVLALFGQRMGELRIQAKIPEKQLELQDLVARRRQLVELRTAEMNRKEHVGSKFVKKSLQESVDALNKQIRRFEKRIAALVQSDDDWKQKLEIVQSAPGIGPGTSATLIAEVPELGQLSRRKISALVGLAPFKRDSGEFRGRRAIRGGRSSVRCSLYMATLSARRSNPVIRAFSERLKALGKKPKVIITACMRKLLVILNTMVKNKTHWNPATT

SEQ ID NO: 226421 - protein, 356 aa, unidentified
MNEGSCVGLDVHARSVVAGVIDMGSGEVRSLRVPPGPEATVAWLKTLPAPVRVVYEAGPTGYGLARGCAEAGISCVVAAPSKIRPAADRVKTDRRDAERLARLLRLGEITPVRVPGPEEEAARDLVRAREDARGDLMRARHRLSKLLLRHGVVYEATAWTRAHDAWLRRNRFGGGPLAIVFDECYARMLDAKTRRDSLDAAIAELAASEPYVDVVERLVCLRGVSTLTAFALTVELGDWNRFRPESLGAFLGLTPSENSSGERRRQGGITKAGNSHARRLLIEAAWHQRSAPRLSVTLERRRTGKSLAVRAQADRSARRLHGRWHALEARGKPRSIVVVAVARELAGHCWALATME

SEQ ID NO: 226422 - protein, 359 aa, unidentified
MNTKVIVGIDVHKNYCEAASIDDDGRLIRRWRFKNQNEAIEEFLPNLPEGTRIAMESCSYFYPLYSQLEREGFQVSVAHPLKVKLIAESRNKNDRVDANILAQLLRMNYLPTSYIPPEPTRQIRNLLRYRAALARQRTQTTNRIHHLLEKRGIKTSQLGCGDLYSRKAQGNLAELQLPPIERSILDMELNLVRTSNSAIEKANIEIAKQAKENPQAKLLMTIPGIDYYSAMLLLAEIGDIHRFPDAKKLCAYAGLVPSVSQSGARTIYGHITKQGNRWIRFVMVEAVQRTITIQKGSPLSAMYQRIKARKGSAIAKVACARKLLKIIWFMLTRNEPYRYMDQEMFAGKQKRLMRTASKA

SEQ ID NO: 226423 - protein, 373 aa, unidentified
MANVQEGFAKGKPIYAGIDVHKKDWIIRVRCQGEEIYRAAIPADLERLIELLKRFKASEVHTVYEAGPTGYGLHDALSKAGFDSMVTPPSLVPQIGGKVKTDQRDSRKLTEMLAGGFLKRVHIPTPEERAHRQLLRTRNQIKKHRKQTQNQIKSMLLFHGKQPPPRLREQWSQEYLRWIKTISWEFEALTISMTVLLDLFHHLDKQLRELNKELTALANTEKYRERVRLATSVPGIGIYTAVAMSVELQDVQRFRRGDQLSSFLGLTPSQHSSGQSTRMGRITRCGNPRLRELFIESSWTLIRYDPGARSTYERIKHQTGSSQKAITAMARRLALRVRRVLIDKKPYRLGNGKPLVAGVSNKQRANRLVLNRT

SEQ ID NO: 226424 - protein, 268 aa, unidentified
MTVYLGIDIASKKFDVAELCDGNYRCKAFENTSAGFLALYKWLGQSTMPDIHACLEATGDYGTSLATFLYENKIKVSVVNPARIKGFGASELSRTKTDKADSKLIARFCKAAVPDGWKPTPAPVRKLQALVRRISALNGMLRMECNRRENADANIQASLDRIISLLKTEIEVVRQEIKDHVRSDDELKKQDALIQSVPGIGEVSSNLILSFMSGKGFRKAKEVTAYLGLNPRHHQSGSSVRGKTRMSKMGDTRLRSEEVPFICLRWPP

SEQ ID NO: 226425 - protein, 348 aa, unidentified
MHPVPVCGVDISKDHFDAAIARPTPDSPITDSVRHMQTEAGRKRLALWLRRHAPDAVVVLEDTGVYSLRLERALIDAGFAVFRVNPTILRNSRPSVGRTKSDPLDARLLADAGRIILLTKPALLDRFRVIPGDAFDNLALWNAERHRVAQRIVEQKNVLEAVALNTASDAATLADEIRKDLESLARRARQLKGCIERAAIAADKRAYELLLSINGIGVLAGAALLESIRSIKRFASPDALKAFLGWYPSVRGSGKVECVAHLAKHGPSLVRSLLWMAAKSAARHDPTLRAYYLKLVSRFGAQRKGASVYAWTGVARRLVQIVWGVLHSGKTYDPAKCAPRLTRVEIVA

SEQ ID NO: 226426 - protein, 347 aa, unidentified
MKFYNQQHKYYCGIDLHARKMYVCILNHKGKVVVHENIKTDPELFFELIFPFLEDVVVGVECVFCWYWLADLCSDHKIDFVLGHALYMKAIHGGKTKNDKIDSYKIAMLLKGGNFPTAYPYPAKWRATRDLLRRRMYISRRCSELVAHITNTNTQYNLPAFKKKLSRKYNHDGVAERFDDPEVRKSIEVDLEMISAMNHTLKKLEWHIEKTARQHDYHTLYLLRSIPGVGLILALVILYEVHDIKRFSRVQDFSSYARLVRPVKESDGKWAGHTNKKIGNHHLKWAIKEAAILMLRDSPEAKYFVAKLERKYNKGKALGIFTHKLGRAIYFMLKNKEAFDMKRFFDQ

SEQ ID NO: 226427 - protein, 323 aa, unidentified
MTMTYVGIDVSKATFVVAYSSAKSSETKTFKNTTKGIREFIRTISPEENHCVLEATGNYSMLLVYLLSKAGFTVSMENPLKIKNFARVMLSVVKTDEIDARLIALYGERMQPAPFKLHSDSLLLLKQKRTVLRQLKKQLIANRNLEGSLKVLPFIDSKCKKVLEKTIKFLEKQIEEMEEELTSLAEIEYKKQMDLLTSIKGIGATLAAALIIATGGFTYFDNAKQLTRYLGLSPTYQQSGTSVNVKGHINRNGDAYLRSQLYIGAMASLRCNTECKACFDRLRSNGKPGKLAIVAVANKLIRQAFAVVAHEKKYIDGYKSVKP

SEQ ID NO: 226428 - protein, 353 aa, unidentified
MSYIIGCDAHKHYSQFAVLEGDQTHCKQVRVEHERGAIREFLSEFPEGTPVALESIGNWYWIVDEIEQAGCKALLTHPGKAKAMMGNVNKTDKLDARGLTTLLRNGTLPTVWIAPSEVRDERELPRTRMALCKIRVALKNRIHATLAKYNLSLPTESDIFAPKWASQLNQVIEQLPSETQNCLQQELELLEGVQGQIQAMEERMRERISLTPEMQLLKTIPGVGDILAIVIGTEIGLIERFSSAEQLASYAGTTPAVKSSGGKVRYGHTPKESNHYLKWAFVEAANAPAQYGQKPHWQHRHVTHLYARVKQRKGHSVAVGAVARHLAEATFWILKKQEPYRQPIRQKVLPRQA

SEQ ID NO: 226429 - protein, 403 aa, unidentified
MEGPLISLDVSKGKSNYRFFENGTDRKGKKGVIRHDIQGFDSIRDEAEKMEKRLRIKPSVIFESTGVYSDVVEKYFTDKGFDVYVISPLLSASMRKEGVRPAKNDSLDTLSIAKVFYSRDDLRKCSENDKKAERLREMSYELDMMNRRIRPMKCQFLRLLDKVWPCLDEVSDYSSRFMLDFIIAFGHPENIKTVKGVLSVIRKSEMGTAGRKDKIAQDLFDYCHTHLSAVSKDSSYVELLKRMAIELKAMAKKKSELIDRMAEEARNKDEFVRLLTIPAVAKTTALKIMARVGDISRFRNAEALVAYCGLDPRVYQSGKMTGEHRTITKKGDCILRSTLFLAVKLMVMLYPDTKVARFVAAKAKNGLSYKQAVVAGSAKLARIIYSMLTHHENYVEFNADIVA

SEQ ID NO: 226430 - protein, 413 aa, unidentified
MKKHIYRTKKINAIDWIQMKEQLQGSPVVFAIDVAKEKQYALLANADSSVSELLSWNHPEQTRELLTYLENLACPLTAVMESTGTYGDALRYQFRCSGFEVNQISAKRVSDARELYDGVPSLHDAKSATVIMRLHRDGLSIPWRESDDAERELDALRREYDLHQSQYQRNKNRLEAYLSRHWPEVLPLLPLDSVTLESLLIEYGSPEQIAKNTEEAAKNMHLWSKNQLKNEKIAVVIQSAVNTLGQPCIEAERRYLQALTAEMRHSRQQQKEVKDILEATVKADTGLSKLASVIGLITTAVLLSCRLDPRNFRNARSFQKALGLNLKEKSSGRDVGRLKITKRGCSMARRYLYFAALRLINNDPVVKAWYQKKVDARAKNKTVIALMRKLAKALWHVARGERFDATKLLSVTA

SEQ ID NO: 226431 - protein, 378 aa, unidentified
MREKLRFLGLDVHAETIAVAVAEANGEVRSLGTIANREDSVRKFIKKLGPPEQLRACYEAGPTGFVLYWQLTQLGVECAVIAPTLVPKKPGDRVKTDRRDALKLARCHRNGDDLTAVWVPDEASEALRDLVRQREAAKQDQLRARHRLTKFLLRTGQRPPLGLKAWTERYMRWLAQVRYTQPAQEVTRLDCMNEFEHMSARVKRLEEAILEIVKLAPQSMQELIGGLQALRGIAHISAVTIAAELGNDISSRFESARKLMGYSGAFPSENTSGKRIRKGAITKCGNAHLRRIVVESAWCYRHLPRVGEKLRKRHEWIPAEILEIAWKAQNRLHKRYRKLTMAGKDLRKVMTAVARELLGFIWAIAIKVEQTRTPQLAA

SEQ ID NO: 226432 - protein, 348 aa, unidentified
MDHYAGIDVSLEYSSVCVVDASGKIVREGKVASEPAALISWFGSLGFAVARIGLEAGPLSQWLYAALRDGGLAVELLETRHVRDAFKAMPVKTDRNDARGIAQLMRLGWFRPVHCKSLVAQETRAVLTARKLVQSKLHDIEMSLRGILRGFGLKVGPTTPKRFAQRINELVAGHASLQIIADALLAVHAVLLREFNGFEKRMRMMARADARAALLMSTPAVGPIVALTYACAIDDPARFKSSKRAGSHFGLTPRKYQSGETDYSGRISKIGDAAVREALYQAAHVMLTKPVKGCAQLKSWAMRIAKRAGMKTAKVALARKLAVIMHRMLADGRPFNPTARTTPAAAAA

SEQ ID NO: 226433 - protein, 343 aa, unidentified
MQTVTTIGLDIAKSVFQVHGIDAEGKVVIRRQLKRRYVLAFFQKLAPCLVGIEACASSHHWSRELKGLGHTVRLMPPAYVKPYVKRQKNDAADAEAICEAVTRANMRFVATKTPEQQSCLMLHRTRHLFVRQQTAVINAIRAHLAEYGIVAPVGRNGVEELLGVVADPSDKRVPEVARACLAALGAQLRMLKTQILEFDRMINAWHRSNETSKRLDEIPGVGPALATALVASVADPKAFRSGRDFSAWIGLVPKQHSSGGREKLGSISKQGDRYLRCLFTAGALAVIRYAKIHGTKHRPWLTALLARRPTKVAAIALANKIARMAWAMMAKNERYKEPVALAA

SEQ ID NO: 226434 - protein, 402 aa, unidentified
MIFINCLGIDIGKSESVVAHYKDEVLVKEMVIQNNQNGYRYLKNYIKHLDSLFILFESTGIYSRGMKRFCEIHKIDYLEMNPLEAKFKTSSLRSWKTDKSDAHKLALLAFRMKDSKVQRQSEEIYFELRERARFHLEMEINQNRLKVELVETLHQTFPGLEKLFTNRYSKIALNIAKAFPHPDFVSTLTHDELVEKVLHSTDKGISVNKAHKYVQKLIEIQINSFPNVHKSSFLLQKVQYLCDKLLIGIEEMKEFDQEMIDLAKNTTEFENIISIPGIGELTATLLIGELGNIREFKTNKQLNAFVGIDIKRYQSGTSKSRDTINKRGNKKARRLLYLIIMNIIRGKNHYQSHIVDYYYKLREQPHGKTHKTAVIASINRLLKTIHYLIVNNKLYDYQKAPH

SEQ ID NO: 226435 - protein, 420 aa, unidentified
MSLDQNATPMRVTGGVDWAKDDHAVCVVGDHAEVIDRFGVAHDAAGLRTLVRRLVKAGVEQVGIERPDGPVVEALLQAELTVFVIPPGQLKNLRSRYGSAGNKDDRFDAYVLADVVRTDRRRLRPLVRDSAATLALRSLVRARKDLVAHRVAAANQLRAHLQVVFPAAAALFADIDSAISLRFLTRFTTQDQADWLTATSDPSSPKRLAAWLRSVGYCGPTHPAVLHARLTGAPRGLTGAAATTHAATTSAFLAVLQTLTAQIDTLAARIGEELTLHPDGHIFTSLPRSGTVRAARLLAEIGDARGRFPTADSLACLAGVAPSTRQSGKTKTVSFRWAADKQLRDAVCDFAADSRHANPWAADLYHQALTRGHDHPHAVRILARAWIDIIWRAWHDEVPYHPARHNALQRILNQDQPAVA

SEQ ID NO: 226436 - protein, 465 aa, unidentified
MTRQPRRRAPKPRQSPAALERLHPHAAGIDCGAAEHFVAVPPDRDPTPVRSFPTFTGDLHRLADWLTACRVTHVAMEATGVYWIPIFEILDARGFQVILVNARHVKNLPGRKSDVSDCEWLRDLHILGLLRGSFRPADGIVALRGYLRHRTTLIESAGALVQRMQKALVQMNVQLPLVVSDITGVTGLRILRDIVAGQRDPQQLAHHRDYRCHASEAEIVAALTGNYRPEHLFALQQNLELFDIYQRQLTACDVAVEAHLAHLAATTTPPLAPLPAARRRQKPRDNEPRFDVRTPLHQLTGVDLSQIDGIGPYNALRLLSEIGTDMTRWPTEKHFTAWLTLAPQNKISGGRLLSSRTQPSANRAAAIFRLGAMNLGRTRTALGAFYRRVAFRIGKAKAVTATARKLAVLVYRTLKDHLVYVDPGADAYDVQDRSRLVRRLRHRAQHLGFGLVNLATGEVVEGSVS

SEQ ID NO: 226437 - protein, 344 aa, unidentified
MSTSYIGADVDCRMTELAVEQNGEIVIRDRVPTDIKSLSSFLDSISGKKVMAIEEGSMSGWLYRNLKSKVEKFIVCDPRRNKLIYCDGDKDDSIDAAALASLLHGEYLREVYHTDDEKRLALKEAVALYHDRMRESVRQVNKLRGCCRCHGIKIPTGVLKNTLDRKKWLKELKPASLAALVSILLIGYDAAAKQVKMSRKEISQRSKSYPIINYWKDIPGIGPIRAITLFAYLDTPWRFGSCKKLWKYCGVGLKRFASGSDKEGRPKPGKLRLYRAANRKLKDAVMGAALSATIQPDNPFKDYYTRMIYNGLTASNARHTIARKILSVMWGMWKTNCRYNENLL

SEQ ID NO: 226438 - protein, 356 aa, unidentified
MGEGSWVGLDVHARSVVAGVIDQGSGELRSLRLPPGGEATVAWLQTLPAPARVVYEAGPTGYRLARACAEAGINCVVAAPSRVRAAADRVKTDRRDAERLARLLRLGEITPVRIPTLEEEAARDLVRAREHARGDLMRARHRLSKLLLRHGLVYDATAWTRTHDAWLRRQRFQGGPLAIVFDECYGRMLDAKSRRETLDKAIAELAATPPYADVVSRLVCLRGVSTLTALALTVELGDWHRFRPQSLGPFLGLTPSEHSSGERRRQGAITKAGNSHVRRLLIEAAWHQRRPPRRSVTLERRRGGKPLALQAQAERSARRLHGRWHALEARGKPRSIVVVAVARELAGHCWALATME

SEQ ID NO: 226439 - protein, 377 aa, unidentified
MKRIIRIGMDVHSTNYTLCAMEPIIGEDDRIFATIDVTPDYKNILMFIESLKMKLGIDNQYDIQCGYEAGCLGYSLYNQLTAANVKCVILAPTTMLTPQGIRVKTDARDARMIAQCLSYGGYHAVYVPTEDDDSVKEYLRMRDDHKLALKKIKQQINAFCLRHGHHYAQTKWTIAHWKWLKKLELSALYREVLDEYMASYEEQTAKIERFDQRIEELATQERYAEKVKRLGCFLGIKTHTALSLIVETGDFARFAKGNIYAAYLGLAPGEDSSGPKTNRTAISKAGNGHLRRLLIEAAGGICKGAVGHKSKDLKARQNGNTAEVIAYADKANTRLRSRYYKFIRHGKVRNVAVTAIARELACFVWGMMTDNIGLRIA

SEQ ID NO: 226440 - protein, 439 aa, unidentified
MTTPSLPVLDPRAAAIDVGSEQLHVSVAGGPPKVFGTLTGQLHEMRDWLKAQGVRSVAMEATGVYWLCPYEVLEAAGLEVVVVNGKYVKNLPGRKTDMKDCQWQATLHAHGLLQAGFVPPAHIRRLQDYIRVRTDHITLAATHEQPMQKALDRMNVKIHEVISDLTGQSGRELIGSILEGVRNPVALLARCDRQIREKKAEPMLAALQGTWKEEHLFALRQAYELWQFYQEKIAECDQAIEQVLQAIAGPPDPAQPAPPTSKRGGVNRPAIADLHALLWRLCGHKDLTVLPGVADYVLLQLIAETGTELGQHWKSDKHFTAWLGLAPGSRQSGKRRGNQKRGRNRAGRLFCVIARSVGRSVDKGLGGFYRRLKGRRGGLVANLALARKLAELFWRLMVHGITYVEQGLKKYEQKVAQTEQRLLQKLARKYDMVLHPKPT

SEQ ID NO: 226441 - protein, 404 aa, unidentified
MKICVGIDAAKVTHWAVAVDGEGRVVLDRAVENDPEAIDGFVAELRGLGQEMAIGLDVVGSFARFLEATLLAEGFALVRTPGIAVNRAGQGFAGGERKSDPRDAARHCPRTNGGQCLAIAELVRTRDLRPILPDDDSLVAIRLKVGRRRELVQAQTRRIARLRGLLCGIHPGLERALDIGCKGPLALLARYVTPAGIRHAGKARIVAHLKKTPHLHGAQALADRALEAAHARKIAVPGEAPTAELIRELAAEALDSRAKIARIDRDLETLLTDHPDGALIRSLPGMGAVLAAEFIACTGDIRRFGSADALASAAGLAPVQRQSGKRAGWRRAYGGDKALKRVFYQSAFCAVSARDPLSKAFYDRKRREGKHHNQALIALARRRVAVIWAMLQRRETFDPDRKAA

SEQ ID NO: 226442 - protein, 355 aa, unidentified
MIVIGADTHKRSHALAAVDADTGQLLGEREIPASEQGHLDGLRWAHELGQEIVWAVEDCRHVSQRFERSLVSAGERVLRVAPKMMGASRRGEREPGKSDQIDARAVARAVLRDGIEQFPAAFLDEQAVEIRLLCDHREILVAERTRLINRLRWNLVVLDPELEAKIPSRKLDYPGQLQRITRRLRALPQTARVRVAREQVKRITALTREAEALKRELRDLVRAHRPELLAETGCGPLCAAILIGQTAGAERFASDAQFARMAGVAPIPASSGRRDRHRLHRGGNRQLNRALHVIAITRGRIDPQTRAYLARKEAEGKSRIEAVRCLKRHLARTYYRLLSEKTEIDGPPARAIAGC

SEQ ID NO: 226443 - protein, 416 aa, unidentified
MDEEVYYERCAGIDVHKNFLVVCLRIGRKTEIRTFGTLTHEIRDIVAWLKENGCQMVAMESSGSYWKPLYNIFEQEGLPAMVCNAYHLKNVPGRKTDVNDAQWITKCLSQGLLNPSFIPDREQREFRDMTRFRKSQIEERARNLNRLQKFLEGANIKLGSWVKEIDGKSATALLELVIGKPEFTIDEVAERMERGLKSTAEELFYALEGSMTQTQREFLSHVMSVIREQTVQIEKTDAMIQRNLSDSYKTAIKDLCTIPGIGKVSAEQIIAETGIDMSRFKNQHSISKWAGICPGNNESAGKRKSGKTPYGNKTLKSTLTQCAQSAKKNKNSFFSAQYSRLVSHRGKNRATMAVAHSMLIAIYFVLNGCVFKDLGSDYYLQFNRDKKINSHIKQLSKLGVTFSDDVLRDAIYPPSA

SEQ ID NO: 226444 - protein, 331 aa, unidentified
MTSLPNRTNDAPMTVGVDVAKATLEVGFSDAESTLALNNDEARHQVLIKHLAALRSNGATIGLIVLEATGGLELEVATALQLAGYAVVVINPRQARDFARSMGYLAKSDHIDARVLAHMGQTLLQRGDLRKLVKPLPDERQRMLQSMVTRRRQLVGMRIAEQQRAGAPDKRMRRSLNTIMKALDREIARLDKELQAFIGEHHAELAALLDSVKGVGKTTIGTLLAEVPELGELNGREISALVGVAPINRDSGTMRGKRTIFGGRPQVRKVLYMAALVATRYNPVIKTFYQRLLAAGKPKKVAITACARKLLIILNAMVRTRQPFDVTRHLA

SEQ ID NO: 226445 - protein, 472 aa, unidentified
MTRHRTRHPRRRKNRRPPRLPRGLERVNLHAAGIDIGSRSHYVAVPPGSSPNGKDVQEYGAFTADLRDLAEWLKMCQVDTVTIESTGVYWIPLYEMLESCGFEVLLVDPKQLKRVPGRKTDVLDCQWLQELHTFGLLAGAFRPDEDICRLRGYSRQRDMLIKVSSQHILHIQKALTQMNIKLREVVREVTGKTGMKIIRSILDGERDPKKLASHRDGRCKNDEQTIALALEGNWREEHLFALKQAVELRDYYEERIRECDLEIERVMGEFVDISFDKELPPKPANPKRRHEPDFDLRCSLFRMTGVDLTQIEGIEAVSALKIVSEIGTDMSRWPSPKHFGSWLGLSPGSKKTGGKNLSGKTKPSANRAATAFRLAAQSLWRSKSALGAFLRRIAARHGMPKAITATAHKLARLVYAMLKHGTEYVAQGQDEYEKQYRQRRIANLKRHAHDFGLIIVDPSDLQQLNPNNASST

SEQ ID NO: 226446 - protein, 322 aa, unidentified
MNNDLEVFLGIDVSKARLDCSLLSGGKYRSKAVRNDEAGLIELHSWLGRNGAEQVHVCMEATGTYWELAAERLMQTGHRVSVVNPALVKAFAQSEGLRSKTDAIDARLLAAFCREKRPEPWVPPSPGERALRALVLRHQALVQIQTQEKNRLQVAREEVRENVQAHLDWLEESLREIEQAIARSIDDDPDLRGRRDLLDSIPGLGERTIAVLLAYCASEHFDNARQFAAFAGLSVRIHESGSSVQAKPRLSKVGHAPLRRALYMPAMVALYKTDWGRTFRKRLAAHGKAPKLIIGAMMRKLAQVAFGVLKSGKPFDPSLHGV

SEQ ID NO: 226447 - protein, 366 aa, unidentified
MKKGSTAAAKQSIIFSQQKLTIGLDLGDRSSWYCVLDERGELRLEQKLSTTAKAMRQVFSAMPHSRIALETGVHSPWVSRLLGELGHEVIVAHARNVRLIGESRRKDDRLDAQTLARLARIDPQLLCPVKHRSAKAQADLTVIRARAGLVRARTALVNTARGLAKSYGERLRGCNVRNMNPEKAEGLSPELQAALQPLLTAIESLSERICDYNQRIEALAEQSYPQVALLKQVKGVGTLIALTFLLTLEDAHRFRESRDVGCYLGLQPGRRNSGQSEPQMHISKEGDPYLRTLLVQGAQHILGPFGADCDLRRWGLKLAERGGKNGKKRAIIATARKLAVLLHRLWVSGEVYEPFHNSKPLMATAA

SEQ ID NO: 226448 - protein, 293 aa, unidentified
MKPMPVGVDIAKNVMQIHYVNSETGEIFSKAISRAKFLEFFTNKAPCCIGMEACGGAHHWARQLAQMGHLVKLMPGEFVKAFNIRNKNDIADAQAIWRAVQQPGKTVAVKTEQQQAILALHRIRSQLMKFRLMQTNALHGLLAEYGEVMAKGYASLLRSVPDILTRLSERLPSALIDSLREQLSEIQRTDKRITNTERRIRALSKDDPGVKAISEIPGVGLLTATAAVASMGDAKAFRSGREFAAWIGLVPRQKGTGGKLQLLGISKRGDKYLRKLLVNGAHSVIQNANEPGP

SEQ ID NO: 226449 - protein, 312 aa, unidentified
MDAIYVGIDVSKDRLDVAIRPDGESFAVQRSGAGIDELITRLKPLSIKLVTVEATGGFETVVAAGLAGAGLPVVVVNPAQVRAFAQALGKRAKTDPIDAAVIAHFAEATKPQLRPLPDATTQLLSDLVARRRQIVEMIAAESQRAGHVTLPRLKKSIARLRKALEKELAELDDDISDHVRGSPAWAEKEDLLASVPGIGPTIARTLIAELPELGSLDRRQIAALAGLAPWTRQSGKWRGKSFIGGGRSSVRRVLFIGAMVAARHNPALKLFRDKLVAAGKAKLVAIVAVARKLLTILNAILRDKTPWQPKIA

SEQ ID NO: 226450 - protein, 382 aa, unidentified
MPDVSSTAPAVVKTWVAIDQHKLSLVAATLPASGGTPEVTRLENTERAIRRFIEKLGGPERLTVCYEAGPGGYDLQRLLSRIGVACDVIAPSLIPVRAGDRVKTDRRDAKKLVRLYRAGELAFVQPPSPEQEGLRDLVRCRDDLRRARTAARHRITKQLLRHGHNYRHGKSWTLRHRAWIASQRLADPLAQAALEHMLGHLATLDAQIAAVDGQLERVASCEPWAQPVRWLCSFRGIATRTALGLLAEIGDFRRFSSPRELMSYLGLTPCEYSSGNQQHRGHITKAGNTHARRLLIEAAWHYQHRPRQSARAAQLAGELPPEITARAWQAQTRLFLRHRALTENGKRSTVATTAVARELVGFIWAAMVGAPLREPQPEAAAA

SEQ ID NO: 226451 - protein, 387 aa, unidentified
MDILYESCAGIDVHQAMIAVCVLHGPLTSTRPKREEKRFDTTTAGLKECREFLLSLHVQAVGMESTGVYWKPVWHALVNDFELILAHPDHMKAILGQKTDKKDSHWIAKLTRIGLLPRSFVPDETIQELRELTRQRKHYVESRHRETNRIHKILQSGGIKLTTYIEDIMGLSGRNLLQLLVDGTPITARIVHQSVYTSLKKKVPQLLEALDGYFSDHHRFMLTQSLEFYDFYQKQIEILENRINYYLMQYEDQVELLDSIPGIDVITASVFIAEVGVEMSQFKTAGHLASWAGLCPGNNESAGKKRNTKIRHGNAYLKKCLCQAVYAARRQKGSPISQRFYQLQARRGPQKATIATAHQLLKLAYFLIANNLTYEEYLHQKRLLETS

SEQ ID NO: 226452 - protein, 427 aa, unidentified
MTDQLKHKAYHSWVAIDIAKDYNVVMVELTDGKNRRFRMANSGKDHDRLIEVIRELPQPCHIGFEATGNYHRPLAYRLLTEGFDVSLISSLASARYREAIFNSWDKNDPKDAGILLELLKRGIVQIYVDPIRSGYHDIQELSKTYSNITLSRTRLQHSILTHYLPLYFPEMAKFWCSTRNGWWINYLLHFPTPASVIQYSEQAFCQIASPIIGRKMNKQAKLLELYEAAQHSIGLPIASDSLACQTFQLQLQRYQELTNQRQQLEQQAETTLSMNPDYCLLKTVPGIGPIVAMTILAEGGDLRRFNHHRQFLKYCGLDLAKNQSGNFRGQDKLSKRGNARLRLALYMASLHAIRQTENSFRNKFHRYTQATPKDADCKRKAMTAVMAKMARVIHALIKSGTPYQGYFEVSPSGSIPLCRAVGATRTP

SEQ ID NO: 226453 - protein, 413 aa, unidentified
MIVEQNGVGAESTRFVGLDVHRWYATVAAVDSNQQVVLTARRIDFNDFDEWVRKHLRRTDVVTLEATSNAWHLYDMLAPRVASVTVANRIQVALIAKARVKTDPRDALTLARLLAVGMLPSVWVPPVEVRELRALGAHRRRLIKQRTQARNRLRAVLYTHNLFPPAGEAFGPANRPWWEGLDLPASEKLRVRHDLSILDSLEPLVKGVDAELVRQSRLAPWGEQAAYLVQLPGIGVHSAMQLLAAIGDIARFDAPHKLVGYAGLGARVHSSGEEHYGGRITKQGRRDLRTTMVESAWVAVESHTYWKELFERLAVRVGRPKAIVAIARKLLVVVWHVLAKQVADREAAPEKVAGKFLEWSWKLGRVNRAGLTSGAFIRRELRRLRLGENVTAITRGKRRFPIPLAEDAEQAVG

SEQ ID NO: 226454 - protein, 345 aa, unidentified
MTQYKRIAIDTSKAVFTLHGIDQQDRPVLRINLRRAQLIPFFAKLSTTEIAMEACGGAHHWARELTALGHEVRLIPPQYVKPYVKRAKNDRNDAEAICEAAGRPGMHFVPVKSVTQQAQGMVLKVRESLVGQRTLLVNTLRGHAAEFGVIAGKGLSKIGPLLAAIEQEAAIPSEAKDMAALLGQQIADLDTRIKEIEVKLTAAHKANAVSRRLATIPGVGPVTALTLAIEIDPAAFESGRHLAAWAGLTPKEHSTGGKQRMGGISRAGNERLRVLLVTGATSVIKAAMQPGSQQMTDWLRGMLQRKPRKVVAVALANKMARVAWALMTRGEVYRRSVTTTGVAVA

SEQ ID NO: 226455 - protein, 407 aa, unidentified
MKAKIFLGVDAGKSDHAVAALDERDQVVWEARIKNTHEGFTPLLEKIQEWQEEGIEIWVGAEGIGGYLSPLDVHLCACECKYVNIQPKQYQLFREMMEWQPEKSDERDARGLAAFLHWQVEKDKARVREGGNDYYETLRTTARAFNQTMQSKVAMQNQLVSAAREYWPELFLDGYFSKTDAQGLLALLQAYPTPQAVAKAGVRRVNKVLSEATQRDQKELAERLVNEARRLAPQTPVSAAKASVVQALAAGVCHLTRVLAELEKQMKEQLRNHPFGQWLLEQKGFGVRTAGGFLGEAGNLDRFENDAQLARYAGNGAVLNQSGKSEGRHWDAHRCNHRLKRVVLLMAESRARYHDDSITYVATRKEAGGEYWKIIKKLARFLIRFLWKGWQEVCAREKVLADAARPT

SEQ ID NO: 226456 - protein, 406 aa, unidentified
MKPTYFLGIDAAKHKMRVALSNRSEHVLFEKDLPVAATGLRQLLAAIKRQVNDPEQLLVLIEATGLLHLNWSAALTKAGYAVAVINPLIARRLYTLQNSIRDNKSDPIDARGLCTIGLLHGEKLLAHYRFCLKPEQFALQRLQSVRKALRSALTNLKKTYQSLMDLSFPELGGLLQLDGVGIRQLLIQAPTPAAIAGKRLCTLEKNWMVRPKAAALKTLAADSMADPDLAAASGPALVALLQSVAAIEARLHELDQQIAKLACTSVDQKTKALIETIPGFGPVNAAKTLAWLPTEILHSGSNRKVAARLQAFMGNDPRLRQSGQWKGHTKMSKRGVEMLRTAFFQSAFSAAHNDPELRTYYQCKRAQGKTHEVALSHLMRILTRRLVAVLRSGKPYQSHYNLKNAA

SEQ ID NO: 226457 - protein, 339 aa, unidentified
MKITMIGIDIAKSVFHLYAVNKMGRYVKKKQLKRKQVLPYLARLEPCVIAMEACGGANYWAREMGVLGHEVKLIAPQYVKPYVKGNKNDYNDAEAIAEAAQRPTMRFVPIKSVEQQDIQNLHRQRERIKKARTALVNQVRGLLAEYGIVINKGVAAVRKGLPSILEDAENGLTMRSRELFADLFEELRLLDERFKHSEKQIEVSNRENEVCQRLDEILGVGPITASAAYAAAGDGKDFVNGRHFSAWVGLVPSQHSTGGKSTLLGISKRGNAYLRTLFIHGARAVLRHSANKTDRFSLWAQALLERRGHNKACVAVANKMARMAWVIMAKGETYRPAIS

SEQ ID NO: 226458 - protein, 252 aa, unidentified
MFAVHCVDQNGKTVLVKPKVSRAALPELIAGLPPCVIGMEACSGAHYWARLFREYGHEPRLMAAKFVSPYHMAGKSGKNDAADAQAICEAVRRPHMRFVPVKDESQQAMQCLHRTRQGFIEEKTATYNRLRGLISEFGVIAPQSTDALRRMVSEQKNSLPFQVQQCIDDLLEHVDRIEANIADYDRILSRMAKTDHRSQRLMELKGVGPTTACALVASIGNAHDFKNGRQLAAWLGLTPSQYSSGGNQSLAG

SEQ ID NO: 226459 - protein, 410 aa, unidentified
MAPIRPALGGLIRRLSALYLAWLVTELPHEHVFPGSGQQGQLSIREVTAMTIVAHAYDFVVGVDTHASKHAFSIVESRTQTEVDCGEFPVTPAGFARSISWLRRRTNHSCRVLVSMEGVSSFGRSLRLDLQREGILVTEAPKPPHRAGRIAKNDFIDARRAATSVMGWDVTSLQIPRSGGVREALRILVQARHGLTVENTAQINRLTALVRTNALGIDARRALGRIQIKAIAKWRVRAETIDLQVARSEAVRLAKLIIANREALTDNKNAIETLVQQVAPALLTMRGIGPVTAAQFYLAWSHHDRIRSAAAFVALAGANPIPASSGNNQRYRLNRGGDRSLNNALHTVVLVRMRYDQETQEYVQKRTAEGKSKQEIMRCLKRYVARQVYRTLQAATIPVTAESETHKIPA

SEQ ID NO: 226460 - protein, 333 aa, unidentified
MIKYIGMDAHSSSCTLCVTDASGREIDNVTLETNGKVLKNYLRSIEGTKKLTFEECELSRWLFGIINPEVDELVICNPVANKEYKKAKTDKLDARKLAKLLRGEFLTPVFHDGSERERFRHLMSSYQDIVEEGIRLKNRYKSLFRKNGQRIRGEALYSDENMLEGLSRTDDRFIGGHLYRLLASLEQTRQDYIKEICRCNKSFKELKFLKSIPGIGDIQAAKIVSQVVNPFRFGTKYKYYSYCGLVRHTRTSADRKYGSTRIWGNRILKCVYKMAGHAVLKGDSRLRVYYDALRKRGVSHDNAYNAVCRKIAAISLCVWKHNKRYDERMIQTI

SEQ ID NO: 226461 - protein, 316 aa, unidentified
MPNHREEGVNVGVDVGKFQLDVFIHERALALSVPNTPAGVRKLLGRLVRFKLARLVVEATGRREYDLVVAAAERGLPVVVAQPLTIRRYAAAKGILAKTDRLDARVLADYAATLRPDVRPIPIGPIREIKDLAARRRQLVTMSTMEKNRLDVMPRSLHADLRRHLKHLQAQVEKLDRAIDKLVAGVDAWRQKRELLVSTPGIGLQVANTLLADLPELGTLSNKQIAALVGVAPFNRDSGTLRGKRRIRGGRSSVRTALFMAAMSAIQHNPVLRAAYQRMVAAGKHKKVALTACMRKMVVTLNAMLRDDKPWTNVYA

SEQ ID NO: 226462 - protein, 340 aa, unidentified
MKSLGLDVHSSSFTLGVLTQRGQVVSCRSRSTSARNLIDAVMEVRGQKTLVLEESHMAQWVKGVLEPYVDKLVICDPVRNSWIAKDDFNNDKTSAIKLARLQLDGYIKPIHHPDIEGAQLRRLFVHYYDLNQQLTRFKNKLKAVFRSQAISTTGKSIYNEDAHDAWLKQLRGQSHLQHTARQDFELIDKLESMKQETFEVMVRLAQRKKAFKLLDGIPGAGPVIATGYIALIETPHRFSRKNKLWKYACLGNRYHESDDVVYDKASSKSGNRILKWVVIEHFIHAVERPRTANRFKLQYEALLRQGLNPTAARRNVCRSLLSTVRALWKKEEAYRENAVS

SEQ ID NO: 226463 - protein, 349 aa, unidentified
MRCFLPPADSRFYAGVDLHARSLFLCVLDRDGEERFARNLSAAPAPFLKAVRPFRDGLVVGCECMHCWYWLADTCREHQIAFALGHAWAMRAVHGQKTKCDRHDAQAIARLLRGGNFPLAYAYPKERRGLRDLLRARLRLVRQRAQLYGHVHTARRQANLPPVSSDVKYKSKRGGITADIADPFVRRRVETHLALLEPLDTTIRRLEAEIEEAAREHYPTELAVLQTTPGVGAVLSLTILLEIDTIDRFETRQQFCSYARLCGAVQESAGQRSGAGNRKAGNAWLKWAFSEAAVLAAQKDEHVGALLQRLASKPGKAKALSALAHKLGRAFYHMLHTKEVFDVNRFVRH

SEQ ID NO: 226464 - protein, 482 aa, unidentified
MKATPKEPAPKATGQSTQPNWHQMNRKQRRDMERKIQRADLSLQLVHPNAAGVDIGNESHYVAVPPDRDSQPVRHFGCTTAELRTMADWLKQCGIRTVAMQSTGVYWIPVYDLLEQAGLEVYLVNARETKNLPGRKSDVQESQWLMKLHTYGLLRNSFRPSQQIRRMRTYWRQRKDLIESAGRHIQRMQKTLTQMNIQVANVLSDVSGVTGQAIIQAILAGERDPQKLAAFRDPRVKASEKEIARSLEGNWQEDLLFVLKQEQAGYEFCQKQMAECDRQLEQYLRQLEDRSQGASLPEEKRKDRLQKRKGNKPKFDLRQQLFRMAGTDLTQIDGIDVMTAATILSEAGWDMIKWQDEDHFVSWLRLSPDNRISGDRIIGKGRLPTTNRVTVALKLAASNLRTSQSYLGAQFRRFRARLDTPVAIKAMAAKLARLVYRMLRYGTKYVDRGAQFYEVQQRTRQIKHLKQKAAKLGFHLVQAPAA

SEQ ID NO: 226465 - protein, 443 aa, unidentified
MQEKEKRSVKQILEELKAEIRSSQNTLIIAVDVGKIRHCVCFVSSSGKVLRGRFFFTNTIDGFNNLMRQTKFYQNKEKLPHALFGMEPSGYYWIHLYEDLVIREKTVVTVSPLAVNRNRETINVSKDKSDPKDAYNIADLMKQGKFYLPIYRDKEIRELKRFSNIYYRLIGQRASLRCRLRGAVGYIFPELEHYFKDILAKSTMIILKDCPFPSQIKKMRRSRFASLLARENPTLSRKRVAEIYELANQSVGITGEEKATLFEIKLLLDELEALQKNIAEVNARVHNIVRDRDDYHLLITIPGVGPITASSIIAEIGNITNFSSGKQLVKLAGLDLYGSESGISIHSLRHITKRGRKTLRTVLYQAAVSCIRCNAHLKACYLKLLANQPNKKKVKPKALVAIACKLLRMVYRMLTERRPFDSTYDQKLREKASLKMVKSSLLV

SEQ ID NO: 226466 - protein, 388 aa, unidentified
MTQISGSLPQPVAPDYDRTLVLAIELSNKSWVLAAQVAGLARVKARQTIEPTAEALLVAIQGYRERATVAGRHVERVIATYEAGWSGFWLARWLAVHEIETYVVQPSSVLVDRRARRAKSDGIDAELLLRTLLAWLRGEPRVCSMVPIPSEADEDARRSVRERTELVAERVALVSRIGAVLATMGCGDYNPLLQNRRQRLGELRTAFGTPLPQHALAKISRMVDRLDLVRAQIAALEQHRDAVLQEDEPDKAGTMIQQLSKLRGIGVQSATVLVREAFVREFANGKALGSYAGLCATPYSSGGAEREQGISKAGNRRLRTIMIELAWLWQRYQPGSAEADWFRTRVTGTGARMRKVMIVALARKLLIALWRFATQGVIPVGAVMKPAS

SEQ ID NO: 226467 - protein, 387 aa, unidentified
MKSIYQNQCAELRQLFAQVSPDRILAVAIDFALDQHVVLFCNGQGEQVLKPFPVHNNTAGFLFLKERILTTCRRLQIDPSHVVLAGEDDPPYALNFLWALNQEWLVLRVNARIAKEHRENLKASTDLLDLLGIAKALLSRQAHRVFPPNLAANDALQSLKTLGRDRDALVKDATRLKNRIHSHVKILFPGFLEAHKDNPVKAFGKPSLALMAKDDFCATTYARKKAAPLARCLKSLRLRLSQEKAVELIKRASEVLAPPPHRIESEQLALGSLLVAYQALEEAAYQLELQQSRILATHSAAMLTTLPGAGIITVSAMAGELGQPEELGSRAQMASYAGIVPQVEQSGGPNSATQTKPTGHRCNHRLKNHLVRAAMNIEADPEKRSSG

SEQ ID NO: 226468 - protein, 386 aa, unidentified
MTVRAINLPAAMHVETARCLFAIELSKQSWVIGFIRPFSSKISRRTLNGGDWKGLLELIDEVQTRASRETGRTVEVVSCYEAGYDGFWLHRLLEAHGIRNYVIDPASLQVDRRARSVKTDRIDTERLLRSLMAYLRGEPKVWSVVRAPSIAEEDARRLHRERDRLISERVRHVNRIKGLCALHGIYDYQPLRPQAMARLEQLRTAQGIPLPPRLKSEIKRELQRLELVVEMIATLEAERDAIVEDAASTHINAKKIRDLHKLKAIGPEFAAVLVGEIFHRRFDNRRQLASYVGYAPSPFQSGSVARDQGISKAGNSKGRTTGIELAWLWLRYQPSSDLIAWFKARVGATKGRIRRIAIVALARKLLVALWRYLETGLVPRGAVLKG

SEQ ID NO: 226469 - protein, 337 aa, unidentified
MKYSGIDLHSNNSVVTITDEEDRVMAEKRLPNDLTRILDFLKPWKQELIGVVVESTFNWYWLVDGLQGAGYKVHLANTGAIKKYDGLKHSGDETDARHLAHLLRLGILPTGTILPKELRAVRDLARKRMQLVRSRTAHILAVENITARQLGARISSNQVKQLACDDVEQMPLPPDVALAVKANVAVIKALSEQIKLLEKRLQEKVGARAEYGYLTSAPGIGKVLATTILLETGPIERFAAAGNFASYARCVDSVHTSNHKKKGEGNTKNGNKYLAWAFVEAANFALRYNPDAKRFYDRKKSKTNNVVAIKALAHKLARACFHMMKEKKPFDAERCFA

SEQ ID NO: 226470 - protein, 356 aa, unidentified
MMQRLDAETASRIRAWLGVDVSAETLDVCLLQVRKVKDKYKRINNQAVEDRETCKSFANAPSGYAQLLRWVESLAPGLLGAKAVHFCMEATGTYSDGLATFLVDSGQPVSVVNPAWLKHAGLSTGRINKTDPADGRLAAHYARKEQPALWQMAAPEVRTLTAMVRRLQNLTEQLVQEKNRLQVPGIVAPVQRSVEKSVRFIERQIDELQAQIRKHIDRHPGLKADRELLLSIPAVGETLAQWIMAELPDVSVFEAAQSVAAYAGLNPRLHRSGTSVHKRSRISRAGNRNLRRALYMPALSAIRHNPAVKELYDRLIEKGMVKKAAVCAAMRKLLMIAYGVLKSRQTFTFKATETTA

SEQ ID NO: 226471 - protein, 401 aa, unidentified
MVSDFRKGRYNLMKIYVGIDIAKLNHFAAAISSDGEIIIEPFKFTNDADGFQLLVSKLESFDKNSIIIGLESTAHYGDNLVRYLVAEFYQVCVLNPIKTCQMRKNNIRKTKTDKVDTFVIAKTLMMQDDLRFITFFDLDMMDLKALGRFRQKTIKQRTRLKIQLTTYVDQVFPEIQYFFKSGLHQHAVYALLKEAPSPKEIASMHMTHLANLLKVNSHGHFTKEQAKELRVLAQKSVGANDSAISIQITQTIQQIELLDSQLEKIEAEMTDIMRFNDSVIMTIPGIGYINGGMILGEIGDIHRFSNPNKLLAFAGLDPSVYQSGNFQAKTTRMSKRGSRVLRYALVNAAWNVVRNNATFKAYYDAKRAEGRSHYNALGHCAGKLVRVIWKMLTDEVEFNLE

SEQ ID NO: 226472 - protein, 498 aa, unidentified
MKSKSSRKPNPVDPVAEEIPDAEHELVIERVAAIDVAKASGKVCVRLPGQTGRRFSRVWDVPARTGAVSELAEQLIESGVEKVTVESTSDYWRIWYYLLEAAGLDVQLVNARDVKNVPGRPKTDKLDAVWLAKLTEKGLLRPSFVPPAEIRQLRDYTRLRVDLTRERTRYWQRLEKLLEDALIKISAVASTLDTLSTRDMIEALIAGERDPGRLADLARGKMKAKRSELIAALDGRFDDHHRELARMLLDQIDTLTAQIAALTSRIEQLLAAMPDTRSRGDGGTGGDPDRPSTGHGVEPETAARFTDATLLTPVERLDEITGIGELNAQVVLAEVGLDMTRFPTPAHLVSWAKLCPRTIQSGPVTRGGKTGRGNPYLKGALGEAAAAAARTDTFLGERYRRIVKRRGKLKALVAVARAILVVIWHLLANPEARFRDPRTRLPHPAHPHRTEAAQPHRPTHRDGLPGHPRTRRLTPNTQSRNDTRLPCSAGLLSPAHSP

SEQ ID NO: 226473 - protein, 339 aa, unidentified
MAILYVGIDLAKNVFAIHGVDEHGKPVLVRPSVQRARLHQLVAALPPCTIGMEACSGAHHWARLFAQHGHTVRLMAPKFVAPYRMSGKRGKNDAADAQAICEAVQRPNMRFVPVKSQDEQARLCVHRVRQGLVEQRTATINRIRGLLSEFGIVLAQKAASVRREAAAHLEDLPGWANTAVGDSLSELHRLDERIAEYDRHVVHMAREDERSRALMQLSGIGSTTASALVSTIGNARDFKNGRQLAAWLGLVPGQYSSGGKARLGGITKAGDGYLRTLLVLGAKAVLAAARNKHDRLSRWAMALEVRRGYWKAVIAIAAKNARMAWAVLAKGDEFKPLVA

SEQ ID NO: 226474 - protein, 340 aa, unidentified
MEHIAAVDLHSDNGYYGIIEPDGKRVYQKRLPNDLSIVLHELAPYRETIRCIVIESTYNWYWLGDGLREQGYRVKLANPAKFEKYNDLKYTDDKTDTFFLTEMERLNILPTGHIYPREERGLRDLLRRRMLLVQQKTSHILSFQSLISRQTGGSITSNDIKKLETEDVEKLLAGQERHVVFAGQSNIAIIGFLQERIRLLEKMVLASARLRTEYEKLQSIPGIGKILALVIMYETGAVGRFKAAGNYVSYCRCVKSNHLSNGKKKGSGNRKNGNKYLSWAYVEAANYSRRYCEEAKKYYQRKLAKGNSAIATKALAAKLCRAAYFIMRDQVEFDVTRMFG

SEQ ID NO: 226475 - protein, 303 aa, unidentified
MYIIGIDIGKNNHEASIVDSKGILIGKSCRFSNTHKGADKLMAHISRLIGDSSCCFGMEATGHYWYSIYSFLKSKGYTIYVINPIQSDSLRSMYIRQTKNDSKDSFLIAQVIRFRQFATTSLADEDLLSLRQLCRYHDSVISARTEIKLRIHTIIDQIFPEFDKLFSSIWRNSSIAILQSYLMPENIAAATILAEIGDIRRFKNTSALVAYAGIDPSVKQSGEFNSIHNHMSKRGSPYLRHAIFLATTTCTFHESPLNEYYKKKRLQGKHHLTAVGAVSNKLTSIIYAILRDGTPYETKKFGA

SEQ ID NO: 226476 - protein, 408 aa, unidentified
MAEKIAGIDVHKKVLMVVVMDARTPEEKPERRRFATMPSELRRLSNWLQEQGVEEAVMESTAQYWRSVWMELEPHMSLHLAQAFSNRARRGRKHDFKDAERLVRRFIAQELILSFVPAGEQRIWRNLTRMKLQLVRDRVRLQSQIECLLEEMRIKLSVVVTDLLGSSGLRILHALAQGETDAKNLALLGDDRLRCSEEQLIEALTGRIHPVHAQMLTLQLERLRLLDAQVAKLNTLIAQAMMSHQEVVIRLAEVPGLGIDSAQQVIAEVGVTAATFPSAAEFTSWVGTCPGREESAEENSSSRSAKGNKYLRRVLNQAAHAAARSKGTHFQAVFRRLLPRLGYQSAVWAIAHRLCRIVWKILHEGVRYVEQGTQPEPKLLIHRAQYLAKQLRKFGYKVQITPPNIAAP

SEQ ID NO: 226477 - protein, 344 aa, unidentified
MNRTTIAVDVAKTVFEVAVSEHPGQVRERHRLSRAGFRQFLAERPPATVIMEACSSAHHWARQAQSRGHEVVLVPPHAARPYVLRNKTDRTDAKGLLEAFRNDDLRPVPVKSETQQALAALHRLRSAWVAARTARLNTLRGILREFGVLIPAGAHHVGPHVRALLEDVDAGVPGLLRVALGEALREIGELEERIRAIERQLATAAEPALVVSQLRTIPGIGVLTATALVAAVGDVQRFPSARHFASYLGLTPREHSSGQRRHLGAISKQGDTYLRMLFIHGARSVLHHAKSKTAPTTDRLRTWALQVERLRGHNKAAVALANKLARIAWAVWRNGNDFAAVPAV

SEQ ID NO: 226478 - protein, 355 aa, unidentified
MTHPTYLSKDYETFIGLDVDKSSFSFTVNNDSQRAKSKKMPSNPEHLYNYIQKHFDHKKVICAYEAGPTGFHLHDYLTEKDVLCLITSPASIPKASNQRVKINRIDSIKIVDHLMSGKLKPIRVPQGPYRELRDLVKIRNQYATDRKTAKQRIKAYLLYSNLHTALKDPDSNWSSKYINDLKQIECSFAERQRLSMLIEDLEYARNKLLLVQRTLRSFCRENDEINQYIQYLRSIPGIGFIIAVTLLGNIGNPIYLQNPRELASFAGLTPKENSTGESVNRGSITQLGDKTLRFLLVEASWVAIRKDTQLSQFYHRIRRKNNPRIASKIAITAVARKLTQIIYRVLKDKREYIQH

SEQ ID NO: 226479 - protein, 335 aa, unidentified
MSLYCGIDLHSNNHFICVIDEKDNRMFEAKLSNDASLTLKSLSKYKRRLKGIAVESTYNWYWLVDALMEAGHHVDLVNTAKVVQYEGLKHTNDKYDAFHLAHLMRLGILPTGHIYQKDTRGLRDLLRKRMQLVQTRSAALIRFKSMIQLHSGKTLRADSIKTRKFVIPIVGDSNVQLALQSEHQLIRALMAQIKLLEVSILDQLEPLVEYQLLKSIPGIGEILASTIWLEIGDINRFKSPGNFASYCRCVNSRRESNGKKKGENNRKNGNKYLAWAFIEAANFCVRRCEPARRFCEKKTAARNNIVARKALAHKLSRACYWVIKNREPFELAKLF

SEQ ID NO: 226480 - protein, 394 aa, unidentified
MGIWVGIDIAKEVHWATGIDDRGQVVLDQQVANDPDAIDALIRTLDALADQPVIGLDLLGGIATLLQAMLGQAGFRLVHVPGLAVNRARQATSGGQHKSDPRDARVIADQVRTRPDLRPITADTELNLEIRLLVGRRSDLTGEQTRRIARLHELLSGVHPGLERALDLTTKTGLSLLTRWVTPAQLRQAGRDQIRAQLASTARLPSRRLDTLTDQILAAANAQQLALPGEQLAATLIAELANEALACRDRLARLDRDLAQLLDRHPDAALIRSLPGMGATLCAEFIAQAGPLTRFRSADALAAAAGLAPVLRQSGKVRYNRRPTGGSKALKRVFYQSAFCSLRAPDRKAFYARKRREGKPHHQAVIALARRRINVLWAMLHTRQAYQPGHTRAA

SEQ ID NO: 226481 - protein, 301 aa, unidentified
MVVLGVDAHKRNHTVDELGRKLGQHTCGTTSEDHFKLMLWAEQFGPDRQWAVEDCRHLSRRLERDLLSAGERILRVPPKLMAHARDAARSYGKSDPIDALAVARAALREPDLPAAQLDGPAREVRLLTDHRDDLVAERTRTINRPPWISSRAAGCSPSRSPRWNVSLSRSSSNSRPRCSPSKGCATLTAAKILGETADIRRFRSRHAYARHNGTAPLPVWSANRERRRLSRTGNRQLNAAIHRIAITQAHYHPDARDYLQRRRTNGDSTTESIRALKRRLSDIVYRALLTDAKDSNINMAA

SEQ ID NO: 226482 - protein, 410 aa, unidentified
MEPILISCAGMDVHEKKVDVCIAHGPFDKPPKFEIRTFSTMTSDLEELMTWLSKYEVTTIGMESTGVYWKPIFNVMEDQFEIVLANAQRLKAIPRKKTDIMDCKRIANLLRYGLLPNSLYRQKRSENSGISTGTRRKLVGMMTSEKNRLVKVLESANIKLSSVVTKIYGVSSLALIRSLLEKNKLSREEIAKMAKGKLKKKVDLLEKAVNGKLTNHHRFLLEMHLQNIDHLAKQIKKLDEEIEKKMVPFQKESKLIQTIPGISEVNASAILAEIGADMSQFPDEAHLSSWAGVCPGNNESAGKKKSGKTQKGNSFLKGTLTEAAWAASKTKKTSYNAFYHNLVRRKGKKKTLVALAHRMLIDIYFVLKTGETYQDLGAEAIHERTSRRKERSMIRSLEKAGYSVIKAATA

SEQ ID NO: 226483 - protein, 485 aa, unidentified
MGLRGRHARRYLRSAGGRHAGAVSAVRRGRCGQGRDRGGGPAARGGAGRPAHGQAHVQDVLRVLAEAARWLAGLGVTHVAMEATGIYSMPVYHALLEHGDFEKVLVCNAGHVKNVPGRKTDFSDAEWLVHLLECGLLAGSFMPPAEIKAARDVIRYRTKVAQQRVSEIARLGNVLQDAGIKIDSVACSIATKSGRAMIEALIDGERRGPVLAELAKGRMRAKIPDLSMALEGRFGDHHALMCRLHLDHIDHLEAMIARLDAQIEAMMTPFHAARDLLATAPGIGQLAAAAVISEIGVTVTEFFPDDAHLASWTGLCPGNHESAGKRRSGRRRKGNPHLQSILVECAWSAVRQDGYLKSLYHRHVMKWGGYRSQAAKKKAIVVGPHTPGRHHLAHPGHRKALPRTRRRLLHHPPGPRTGNPPPHRQARSPRPHRHPPASRLTTRPEEPGSADAPPVLPPAQLGAIHVSGVSARWRRHRAGMNLRSV

SEQ ID NO: 226484 - protein, 346 aa, unidentified
MEHIGMDLGKKESQIAIITEAGELIEQRIRTERVRLQEVFGARSKAKVLIEAGTESEWVARCLEELGHEVIVGDPNYAPMYSQRDRRIKTDRRDALALAEACKLGAYHRAHRTSDEKRHMRAVLAVRDAVVRTRTRWICVVRPLLRREGFRVRNGNVETFVQRIEELALPEHLRLEIAPLLALLSPVNEQLEVLDRQLATMVRKDEVMKRLTTVPGVGPVTAVSYVSTLDQVERFRGAHKVESYLGLAPAEWSSSEIERKGHITKQGNSRTRWLLVEAAWCILGRAKRPATAPLREWADRIAARRGSRIAAVALARKLAGILFAIWRDGTAYDVGKLRSGRMKKAA

SEQ ID NO: 226485 - protein, 347 aa, unidentified
MRFYTQQHKHYCGIDLHARAMYVCILDQHGTKLVHKNLPTTPEAFLRVIAPYREDLVVGVECIFTWYWLADLCRKEAIAFVLGHALYMKAIHGGKAKNDKIDAHKIAVLLRGGMFPLAYVYPAEMRATRDLLRRRCHLVRKRAELLAHIHNTNSQYNLPEIGKKLTYQANREGVGEHFPDPSVRKTIEVDVSLIDHYDKLLGEVELYITRTAKAHDVQTFARLQSVPGIGQILALVLLYEIQDIVRFPRVQDFVSYCRLIKCAKESNNKRLGTSGKKIGNVHLRWAFAEAAVLFLRHNQPGKAYFTKLEHKHGKAKALTVLAHKLARAVYYMLTRHQAFDLQRFVAA

SEQ ID NO: 226486 - protein, 415 aa, unidentified
MEDLGLRALYRRVAGIDVHRMLHVVTVLIEQADGSMQRQTREFGGFRRDCRALAAWLSELGVELVVMESTGIYWKSVHAHLENAGVPAWVVNAHMIKHVPGRKTDMADSEWLAVLARFGLVRASFIPPKDLRELRLVSRYRRKLSAMCASEINRLHKILDDGGIKLGGVVSDINGVSARAMVSALIAQQPIEHMLGLARGKLKQKRADLSASLEGDLSARHLFVLGHIHAHIETLQRRLADIDRFLLAAMQPYAWAHQLLQTIPGIDEIAAALILIEIGDDMTRFGCAARLASWAALSPGNNESAGKRKSGRTRHGNSIIRFVLCECANAARMTKSTLASKYRSLMVRKSHKKAIVAVAHKMIRLIFLMLMRRQPYIDQAIDYGAMSAKKNAPRWIKQLKTIGRWPLSKAAAASH

SEQ ID NO: 226487 - protein, 414 aa, unidentified
MEVLYRRCCGLDVHKETVVACLRLVSDGKVDIEVRTFETTTASLIALSEWLAQIGCTHIAMEATGIYWKPVWHILADGEFQLVLANSAHVKNVPGRKTDVNDATWLAELLAHGLIRASFVPDSQTQELRTLLRTRKQLVREKASHILRVQKTLEDANIKLESVITDVMGMSGRAMIEALIAGESDPVKLAKLANYRLKTSQQKLREALRGRVTKHHRFLLRLHLNQIDALDAAVATIDRQVEAGIAPFRAAVELVSSVPGIGDIGAQVIVSEIGTDMSRFPSDGHLISWAGLCPQNDESAGKRRSNRLRKGAPWLKTTIVQCSWAAVRKKDSYSHAQFLRLKARRGPKKAIMAVAASMLTAIYHMLKDGTLYQDLGSNHFQSRSKGQQTQRLVKRLADLGYEVALKPLVPAVSF

SEQ ID NO: 226488 - protein, 340 aa, unidentified
MEKASMIGLDIAKTVFEVHGRSAAGEVVLRRSLKRGQVEKFFAKLPKATIGLEACGSAHYWARVLCQLGHEVRLMPPAYVKPYVKRNKSDAIDAEACWEAMSRPNMRFVQIKTAEQQASLSLHRSRDLLVRQRTQLGNALRSLLSEFGIVAAKGRAGLASLVDDLRAATLALPQEATFAALTLADQRAALELSIKQLERRITAQAKADDRAALLQTAPGVGPLGAHAALATVPDPTVFKSGRAFAAWLGLTPRLDGTGGRIRTGHITRQGDQTLRRLLVLGATAWLRQVRAHPEKASPWLRGMLARRPFKVVATAQAARTARILWAMLTHNQPYRAPAIG

SEQ ID NO: 226489 - protein, 381 aa, unidentified
MATPATHQRHGNTTEATLFVAFELSDKKWKLGFTIGHGQKPRERNVPARDQKAILNEIAQAKNRLGLPETAPVVSCYEAGREGFWLHRFLQAHEITNYVVDSSAIEVSRRQRRAKSDGLDVRKLLSMLMRYEQGERRVWQVVNVPSVEAEDRRHLNRDLETLKRERASTTNRIKGLLSSQGLEVKTLTNLPEQLDTLRLWDGSELQPGFRQRILRVYAHHTFLNEQIAAIDAERRALLKTSDDAPIDQIRQLMTLKGIGINGAWLLVMEFFAWRDFKNRREVGGLAGFTPTPYQSGESHREQGITKSGNRHVRWMTTELAWSWLRFQPESALSVWFRERFGGGGKRLRRIGIVAVARKLLIALWRFLQTGALPEGAILKAV

SEQ ID NO: 226490 - protein, 336 aa, unidentified
MTLYAAIDLHSNNNYLCVIDGKDKRLLEAKFDNDANLVLQALKPFKRRLMAVAIESTFNWYWLADALMEAGFEVQLVNTAKVIQYEGLKRTDDRYDAFFLSHLMRLGILPTGYIYPLEQRGLRDLLRRRMRLVQDRTRYLNSLNTQYQRQTGQQLSCNKINSKLFRLPIVGDANVQLAMKANLNMCKALKVQIKLLEKSIMNQVKECKAFNLLKTTNGIGDVLAETILLETGDISRFKSPGNYASYCRCVDSCKSSNGKKKGVGNRKNGNKYLAWAFIEAANFAIRYNLKAKKFYERKKLKTNNLIALKALAHKLSRACYYIMKQGVPFDENKIFS

SEQ ID NO: 226491 - protein, 356 aa, unidentified
MTDRTGLEGAALRVLRQDTPPLRATSAKHVFQAHGADASGAVLIRKKLRRAQVLSFFATQPPGTVAMEACGSAHHWAREIGKLGHAVRLIPPAYVKPFVKRQKNDAADAQAICEAAQRPTMRFVAPKSEQAQAAALVFRARDLLVRQRTQIINALRGHLAEFGIVVAQGPAHVSSLVRAVEDPAEPVPEIARAILSVLIEMLHRLDGRISLLDREIAQRAKEDVTARRLMTIPGVGPITATALTALAPPAETFKRGRDFAAWIGLTPLQHSTGGKQKLGATSKMGERTLRRLLIIGASAVLRWAARHGAPAGSWLSRMLARKPPMLVRVALANKMARMVWALMAKGGDYRAPAVSV

SEQ ID NO: 226492 - protein, 423 aa, unidentified
MPATVSIHLSSKRDGFVAVVMIGVDPHKGSHTAVAAGGDERQLGKLRVRASAEQAGHLMEWAAAWPERTWAVEGASGLGHMLAQQLVAAGERVLDVQPKLGSRVRLLATGNVNKTDPNDARPVAIAALRSAACRQVRADGHAAVLKLWAKRHRDLGRSRNQVACRLHAVLCELVPGGVRKEITAPHAARLLEAAQPSGPVEMARWQLASDFLDDLRRLDEQMSQTKKKLAAAVKASGTTLTEIFGVGPVIAAIAIGEVQDVSRFRDRDHFAAYNGTAPIEVSSGKRKVHRLSLRGNRRFNHAIHMAAITQIRFAHSEGRAYYDKKVAEGKTPKEALRALKRRISDAIYRQLRADARRATTSAQATGPGGQAGNDTDASAAGSHPEHQLFGEATPGPSPTLRPAPATQPRKPRSQASKKMSRTT

SEQ ID NO: 226493 - protein, 318 aa, unidentified
MPESIVVGIDIAKKTFDAAIGVAGHTETFSNDDAGHDALLAQLAQRPVELVVMEATGGLERDLACALDAAGFAVAIINPRQARSFARAMGYLAKTDRIDAKALAELAQVISRHAERERFITPLPSPDQQALQALVARRRQLVAMHVAEHQRLSVCHAAAQKSIEAIILAIRAQIDDVEAELARHIQTHHADLAKRLESVRGVGPATVASLIADLPELGHLSRRQISALVGVAPFNRDSGQMRGKRAVFGGRGQIRRHLYMAALAAIRFNEVIKCFYNRLVAVGKPKKVAIVACMRKLLTILNAMVRTGKSWDSSYHLA

SEQ ID NO: 226494 - protein, 361 aa, unidentified
MSQTFQSFVGVDLHKCTVTLTAVDAGGEIIRLKISTKSTGKIEAWLKALPGPVWMAVEACPFVEWFIDRFRECVGRIDVADATELSNRRGKRRKTDFNDSLDMAVRLSRGECPLGFIADEELMQLRKRGRHWRHLSRLLSRTKHSMKSLLNAANIRGPKFDAAAAQRWFLADRDLLKPVQQQAFADFIDVLMLTERHRERLRREIIFATRSARFAPIAALLTSVPGIGEIWAAIIAAEIGPFDRFPNADALEFWAGLTADMKESAGRTQSGNITKAGSVTLRWALCQAAVTLCQCDARQEAIRQRLVKRLGKPKANVAMGRRLLRVLYAMVRDGKTFERGPVRDRTAAANKARLGRRKQVA

SEQ ID NO: 226495 - protein, 402 aa, unidentified
MNAVGIDVSKSKSVVAIMRPFGEIVSTPFEIKHTASDIHSLIELINSVEGESRIVMEHTGRYYEVLAHQLLEANLFVSAINPKLIKDFDNDSLRKVKSDKADAVKIARYALDKWQNLKQYNVMDELRNQLKTMNRQFGFYMKHKTAMKNNLIGILDQTYPGVNTYFDSPARSDGSQKWVDFASTYWHVDCVRKMSLNAFIDHYQNWCKRKKYNFSQSKAEEIYGKAKELVPVLPKDAITKLIIKQAVDQLNSASTTVESLRTLMNETASKLPEYPVVMAMKGVGTSLGPQLMAEIGNVSRFTHKSAITAFAGVDPGVNESGSYEQKSVPTSKRGSSDLRKTLFQVMDVLIKTHPQDDPVYQFLDKKRAQGKPYYVYMTAGANKFLRIYYGRVKEYLSSLPES

SEQ ID NO: 226496 - protein, 370 aa, unidentified
MKEYSEAFIGFDTAKKKHAVAIADVGREGEIRYLGEIDSSPLTIERMIRKLAGRYEKLHFCYEAGPTGYGLYRQVRALGHNCSVVAPSLIPKKSGERVKTNRRDAVTLARLFRAGELTSVWVPDTVHEAVRDLVRARETASQDLRRKRQQLLSFLLRHGRIFSGRQHWSRAHLRWLAQQKFDHPAQQIVFQDAVDAIDDAAARLRRLDEQVAAIVPSWSMAPVVEAYQAMRGVSFVVAVTFVAEIGDLRRFDNPRQLMAFLGLVPSERSTGERVRRAGLTLAGNKRARRVLIEGAWSYRYPARVSQTLQARLEGLPKAVREIAWKAQIRLCARYRRLNAAGKKLPVVIAAIAREMAAFLWAIARHVAPAA

SEQ ID NO: 226497 - protein, 382 aa, unidentified
MHASNIRTPIETYIGTIFVAIELSQKSWLVVMHSPDRDRISRHKLLGGDHGGLLALIEKVRNRAARVIGSEPAVVSCYEAGYDGFWLHRRLSAAGITNVVFDPASIAVEQRSRRAKTDRIDGEVLLRTLMAYRRGEPRVVRIVRVPSREQEDARRDSRERHRLIKEQTGHTNRIKGLLRLVGIEPGNPRRRDWLKWLAEQRDCQGQPVPPRLLAEVKREHARLMLVCAQLQELAEASAPAEEPAAARMAEQKAQLRRLKSLGPAFAGTLVDEVFYKNFDNRRQLASYVGLAPSPWRSGGTDHEQGISKAGNRRARQQAVELTWLWVRHQPESALTRWFLERTAGASARVRRIMIIALARKLMVALWRYLTTGLVPEGAVMKA

SEQ ID NO: 226498 - protein, 442 aa, unidentified
MTTDKETRLERRSDRRLLVMPRVVTTHTRGRWESVLLVGIDWADKEHVYCLMDDAGTTLATGTVEHTAEGLERFMNAVRARVQTPHDILIALETPHGPLVGALLDQGFTVDAINPKAVERHRERFRVAGAKSDLRDAWVLAALLRTDRALYHPLTPDSDVAQELRALTRDRADLVRTRTMLSNQLTACVKAYFPEFLTLFSDPDRPVALALLQAFPTREHLQAAPRAELETFLRRHRCPHSRKRAAAIHERMQAPGFHIASPIVRAKARLAATLVAQLQTLGEYLDAYEREIQRVLRLHPDGELYLSLPGAADVLAARMVGELGDNRDRYRDPNIAQCEAGTAPVTKKSGSTRTVHFRRACIHPLRETLWQFAFSSLRRCGWAQAYYNQARKRGKKHAEAIRMLGNVWLRIIIAIRRNRRPYDEEVLQKARLRHGTPGLCFA

SEQ ID NO: 226499 - protein, 358 aa, unidentified
MNRKAGMSAGQVIGTVDGQQVFGLDIAKSVFQVHTVDMGSGEIVNQQLKRAKVLTYFANRTPCLIGIEACGGAHHWARKLTAQGHNVRLIHAKAVRPFVGGNKTDAADARAIWLAIQQPGTKFVGMKTLEQQATLVLHRQRELLMKMKAMQSNALRGLLYEFGATFARGRNALFAEIETALEALVGDIPQYVADSLREQVKRIKDLAKDIKAIEGRLAQRLRDDEDMQRVAQIPGVGLLTATAAIATMGQASAFKSGREFCAWLGLVPRQSGTGGKVKLLEISKRGDTYLRTLLIHGARSVLTHAREPGPWLEQIKARRPVNVVIVAQAAKMARAIWAVTAKQEDYQRGYCSVKPKAA

SEQ ID NO: 226500 - protein, 297 aa, unidentified
MTSDTVMEYIGVDVSKARLDVAIESTGQTWAVANDEVGIASLIVRLSKLNLGRIVVEATGGQERLLVAELWQAGLPVALVNPRWVRDFARATRRLAKTDKLDAQLLAHFGLKTEPALTQLPSEAERTLEAFVTRRRQIIDMLTAEKNRLGTVPPAARDRLTEHIGWLEREAADLLAEIEALIHKVPALEDKGHLLRTTPGVGPVLTATLLSELPELGRLDRRQIASLVGLAPFNCDSGKKRGHRHVAGSVADHRPDFRRARPGLGRRRPQPDRHARLLHRRGCHRAPGGADLLVRGH

SEQ ID NO: 226501 - protein, 456 aa, unidentified
MPRFVGLDLARATVQVAILDEHGHQLRNQKLPLRREELERFIPATLDPTDEVAVEATGNTWAVVDLLTPHVTRVVVSNPLRTRAIASAKIKTDKVDARVLAELLRCRYLPEVWQPDATTRHLRGLTHHRAALVGQRTAIKNRIHAQLAHRLLHVPTSDLFGTKGLAWLHDLSLDAAGRAMVDAELRLLTAVDAEIAREDAALAGHGWKDDQIRLLMTLPGVSLVVAIGLLAAWGDLARFPSGAKAAAYLGLVPSTHQSGNVCYHGRITKQGASRTRWLLVQAAQHLDRHPGPLGHFFRRLSRKKNRNVAVVATARKLAVIAYHMLRAGEPYRWAQPLPTATKLAALRVAATGARRRGGSPKGKPRPTSYGSGERTRAVPSLAGVCKAEGLPAPRTLDDLPAGEIRVIKLTHSLTHARAIQNPTTRPRPTAKHLEEKTQPTKGPSQIIDSQRHAQGT

SEQ ID NO: 226502 - protein, 313 aa, unidentified
MEMSESVVVGIDVSKDRLDVALHPSGEHFAVSNDHAGLEELIARLGASRPTIVGLEATGGYEMLAAGSLSAAGFGVVVVNPAQVRAYANALDRRAKTDPIDAAVIAAFVVATKPAIRPLRDAETQALSELIARRRQIVQMVVAEENRLRMALAKQAQKSIKRLLTALRRELETLDADLDSHIRKSPVWQVREALLTSVPGVGPTTARTLLAELPELGSLDRRQIASLAGLAPWTRQSGKWKGKSVIGGGRGKVRAVLFMAALVASRYNPDLKAFRDRLVAAGKPKIVATVATMRKLLTILNAIIRDGRPWQNA

SEQ ID NO: 226503 - protein, 337 aa, unidentified
MEYFAGLDVSMAETQVCVVARDGTVIHKAKVPSTPADIAAALAQFPTCRRIVFETGRMAPMLYHGLRQFGLPVICIESRQAYQALKLLATHKTDRNDARGLAHLARTCFFKPVHVKSLPAHAVRSLIIARKKLVGQRVTLENQIRGLAVVFGVRLPRALSSTFISQALRASDGIPGLSAAMQGLVAARAAVLAAILAIDADIRRMVRASDACRRLMSIPGVGQLTALAFTAAVDDPGRFRRSRDIGAYLGLVPRRYQSGEVDYTGSISKCGDRRVRTLLYEAANVMLTRYKGPLKLKDWAFAIAKRSTMRKARIALARRLAIIMHAMLRDGTEFKPA

SEQ ID NO: 226504 - protein, 422 aa, unidentified
MLEQAQDKHEIIERVAALDIGKAMLVCCTRIPGQGGRGRAQEVTEHSTMTRSLQLMADRLLELGVTRVVMEATSDYWKPPFYLLEAHGFEVWLVNAKDVKHLPGRPKTDRLDAVWLCKVAERQMIRPSFVPPAPIRRLRDLTRYRVALIADRTREKNRVEKLLEDAQIKLSVVASDIFGVSGRAMMDQLIAGERDPRVLAQSARGSMRGKIASLEQAFVGSFGDHHAFLLRQMLGRIDALSTDIATLEGRIEEQIAPFAHAVSQLDEIPGVGVTAAQAIIAEIGLDMSRFPTPAHLASWAKFAPGVKESAGRNKGNGSTGHGDPYLARVLGEAAVGASRTDTFLGERYRRIARRRGKKKAIVAVGRSILVIVWHLLSDPDAHFHDLGSDFYDKRRGPERIKQTHIRQLEALGYKVTLEPTAA

SEQ ID NO: 226505 - protein, 378 aa, unidentified
MNRILKIGMDVHSTNYTLCAMEPVIGAEDRVFANVQVTPDYKNIILFIENLKQKLGMNDTYDIECGYEAGCLGYSLYNQLTSAGVKCVILAPTTMLTEQGQRIKTDSRDAHLIAQCLSYGGYHPVYIPTEQDDSVKEYLRMRDDHKKALKKIKQQIGMFCMRHGYYYEGTKWTIAHMKWLKKLELAPMYQETLDEYLASYEEQTAKIERFDARIEEIASQAEYAEKVKKLGCFLGIKTHTALSLIVETGDFTRFAKGNVYAAYLGLAPGEHSSAVKVNRLGITKAGNSHLRLLLVEAAGGICKGAIGHKSKALRQRQQGNSAEVIAYADKANARLRSKYYRLIRHGKKRNVAVTAVARELACFVWGMMTDNINVIEAA

SEQ ID NO: 226506 - protein, 335 aa, unidentified
MHYLYYVGLDVSKETFDASLVAFEDANEMAHRKFANSRKGICSCLHWVEKRHGILLDDVIFCAEDVGSYISEMAVCASDRTLTFNFSLISPLVIKYSMGIARGKTDRVDARRIAEYAITHYRKIALYLPAEKELCQLRTWLILRAHLAKQRVAKLVLLEKLDYKEKFADVSIQRSMLQEEIAYAETHMKTIEREMKELIAADSNICRNYKLLTSIKGVGPITAIVMLCSTLNFTKITDHRKFACYCGLAPFEHSSGTSVRGGCHTSSMANRDIKVQLNRSALIAIRCDPQLKAYYERKVAEGKHKFSVLNAVRAKIAARCFAVVRRGTPYVALQI

SEQ ID NO: 226507 - protein, 346 aa, unidentified
MEISTYVGFDVSKSSVAATAVDPLGHRRRQERLGTSDEEIRRFLEDLPGPIQVVLEACNVWEHIYDAAAATGAQVLLANPFQTKLVSKTTLKTDRVDSEKLAKLARLQAIPEAYVPTPEQRALRKLVRERVFYTRLWTGVANHVYAVLLQKGISFRPGLLQRRTLRHSVADPRFPEIERGLQELTSIEEITHSLDRAIRDAYEASTEAQLLATIPGVGKFTSVALVAFLCPIERFSSLDAVVKYCGLCPSVHQSATTSYNGPLVWDANHLLKWVLVEAQWNVRRHEGKGDVYRVGHRVARRKGMGTGAVAAARKLVRITASVLRRRSPYQPHAPESSSRQRPIAAS

SEQ ID NO: 226508 - protein, 315 aa, unidentified
MTSEMRQKDDTKTGRLLVAIEMSLSKWGLSAAREGQPRKRVKTVAGGDYQALLEAVADFKARFKLPLEAPVVFCYEAGRDGFYPYRRLTELGHEVWVIDSASIEVSRHRRNAKSDGIDADKLVELMQRKAGGEQRALRVVRVPAEGAEDQRQLPRERASLLTDRRRVLNQIESLLFIQGYREVPQSSRALKVWLEQSRALGPQLRARVQRDVERLALLESQLTAVERRLKEQAHHAHAGRVACALMQLCGIGLIGAWVLASEIYGWRVFRNRKEVGSALGLTPTPYSSGTAQREQGISKAGNKRARSLLVELSWL

SEQ ID NO: 226509 - protein, 337 aa, unidentified
MEYFAGLDVSMAETHVCVMDRDGIVIYEVKVPSTPADIATALAQVASCRRVVFETGRMAPMLFHGLSQLGLPIVCIESRQAYQALKSLATHKTDRNDARGLAHLARTGFFKPVHVKSLSAHAVRSLIVARKKLVGQRVTLENQIRGLAVVFGVRLPRALSPAFIRQALRTSEGIPGLSSAMRGLVAARAAVLAAVVAIDADIRQMVRASEACRRLMSIPGIGQLTALAFTAAVDDPGRFRRSRDIGAYLGLVPRRYQSGEVDYTGSISKCGDRRVRTLMYEAANVMLTRYKQPLKLKDWALAIARRSTMRKARIALARRLAIIMHAMLRHGTEFKPA

SEQ ID NO: 226510 - protein, 367 aa, unidentified
MKKNSTVKQSPKRAKVLALGPITIGLDLGDKTSRFCMLDKNGEVQSEGSVATTKKAMTQKFAGLRRCRIALEVGTHSPWLSRLLSSFGHQVIVANARQLQLISASSRKDDRMDAQLLARLARVDPELLRPIHHRGEKAQQDLMAIRVRAALVEARTSLVNAARGLAKSMGERLASCDTDTLSVERLESLPEKLRELLTPLVKEVESLTDKIQQSDQKLEQIARTEYPETRLLRQVSGVGPLIALTFVLTLEDRGRFEKSRDVGCYVGLRPKRSESGESQPQLRITKEGDIYLRKMLVQGAHCILSRRAPDTDLKRWGLRLAERGGKNAKKRAVVAVARKLAVLLHRLWVTGEIYEPLRNSTAKKAAA

SEQ ID NO: 226511 - protein, 275 aa, unidentified
MNNISTIAIDLAKSVFQICIVSGHNKVSKQLRLSREKFRQFMLEQTPSRVVMEACYSSHYWARLFQQQGHQVLLIPAQHVTPFVRGNKNDQNDALAIYEASMRPNIRFVPIKSLGQQDVQSLHRMRERLVKDRTALCNQMRGLLTDYGYIFPIGINAVLKGLREILEQGELSGMMQSELNWTLTEYDLLSRRIDHINEELKRYGEQDQQCQNLISIPGIGAHIATAIKSTVGNAEVFHNSRDFAAWTGLTPRQKASGHKSVMSGITKRGDAYLRK

SEQ ID NO: 226512 - protein, 376 aa, unidentified
MISSDYTVGCDAHKHFSLFAILDKRGELIQRIRVDHAPGEIRAFLSQFPEGTPVALETVGNYYWIVDEIERAGCLPLLAHAAKAKIMMGNIHKTDKLDAYGLAILLYLGKLPSVWIPPGDVRDERELPRTRMTFSQHRARVKNRIQSTLAKYALSLDTHSDIFTPKWRRDLLAAVDRLPEETARCVHQQLDILDAIQEHIKKLEARILERIRMTPTMQLIQSVPGPAKVLAIVIDRQLGSIDRFPGPKNLSSYCGLVPKVKASAGRVHYGRMVKQCNTYLKWAFIEAANVIVRQRHHPNWRGKYVVHLYERIRRRKGHAIAIGAVARYLAEATYWVLKKREPYREPPHWKAAGKQSLSRSARVRSVANMGPMRSAS

SEQ ID NO: 226513 - protein, 345 aa, unidentified
MAETIIGIDLGKLKFHVCVLDTNGHVERRRAYSRSAVMRFLANTPPATVAMEACPGAHHLARKAASFGHDPLLLPAQYVKPYVKSQKNDTVDAEAIAEAASRPTVRERAVAIKPEERQTLQLLHRQRSGWIGERTALGNRMRAMLLEFGIVLPKNLNRLRTGVPEVLEDADNGLPDRLRALIHDLYADLKRLDARIEALNAELTAFARQDPLMQLLLTIPGIGPINGTALLAGIGDASQFRRGRDLAAWLGLVPRQHSTGGKTRLLGISKHGNRHLRMMLIHGARAVLRVADKRAADDGLRRWVERITARKHANVAVVALANKLARIICAVLQRRAPFAAAQVTG

SEQ ID NO: 226514 - protein, 340 aa, unidentified
MKGTTMGIDIAKNVFEVYVEDEAGQVLERRRLSRKKLLSWLANRPPATVGMEACGGAHYWARELEQLGHTVRLIAPQYVKPWVQTNKSDAVDARAICRAVQEPGMRFVAIAGEAQQAVQAFHRVRSRLMGNRTALVNQIRGILLEYGVALPQGVASVRKALPLLLAEERWSPLVRQFLVEQQAELLAWDTRIEVVTGHIQRESATQPVCHRLEQVRGIGPLGASALWLKLAGGSYQNGRHVAAALGLVPKHTGTGGKVRLGGISKRGDRYLRQLLIHGARAVVAHVGEKQDGLSRWLRSLVARRGMNKAVVALANKNARVAFALIQGDQPYDVTKMCHAA

SEQ ID NO: 226515 - protein, 457 aa, unidentified
MAHAGSKPKDPAPSPRGLVLIIRGCLTHDPKAPLNFPNPKRKGVKTLQKTLFVGCDVSSKLNTVCLMDPEGKTLGSQTFSNTLSGAEAIESWLLKIMKENDFSDLKIATESTSFLDLHLVDFLAQSTKLAPFHPSIYQLNPKLVRNFKRVYPDKEKTDKVDAFVIADRLRFGRLPEPYENHKPYLPLRRLTRYRYHIVQSISKEKAYFLTHLYLKFSGFSVEKPFTSLFGATSLTLITEFSPDELVNLPIEELTQLIIKTGKNRFEDPEGVVEAVRRAARESYRLRPALAPSIDLILGSILQTIRALQDSLKKVEQAIEKEFQAFPNTLQSIKGIGPVYSAGIFSEIGDIRRFPKEDALAKFSGLYWKRYQSGNFEAEETKMSKGGNEYLRYYLIEAANALRVHNAEYRAYYETKFKEVTKHQHKRALVLTARKLVRLVYALLKKGQLYKANYQQEA

SEQ ID NO: 226516 - protein, 343 aa, unidentified
MQTITTIGLDLAKSVFQVHGVDAGGQVIVRRQLKRRYVLTFFQKLSPCLVGIEACASAHHWSRELQALGHTVRLMPPAYVKPYVKRQKNDATDAEAICEAVTRANMRFVPTKTPGQQSGLLLHRARHLFIRQQTSVINAIRAHLAEFGIVAPVGRHGVEELLNVVADPNDKRVPEIARACLSAFGAQLRRIKEQVLEFDRLIRAWHRSNELSMRLDEAPGVGPVLATALVAAVADPKSFRSGRNFSAWIGLVPKQHSSGGKNRLGNISKQGDRYLRGLFVAGALAVIRYAKIHGTTHRPWLTALLARRPTKVAAIALANKIARMVWAMMARGERYKEPFALAR

SEQ ID NO: 226517 - protein, 321 aa, unidentified
MKWIGIDIAKRKFDLALREGEKVRNKVFENSPAGHRALLAWLEARGCEPADTHLCMEATSQYYEGVAEVLWSAGYRVSVVNPLQIKAFGESLLARQKTDRADAGLIARFAEQQTPMLWQPPPPEIRELQRLLARLEAVQQMRVQEQTRRHLAEGEALDSIDRVLALLTEEQANLERRIDDHIDRHPPLRAQRALLTSIPGVGERVSSYFLAWLQAERFDDARQAVAFVGLSPRQRQSGDSVRGRSRLCKLGHARLRKVLYLPAMSAIRCNPAAGSFADRLKAGGKGGKLVIGAVMRKLVHWMFGVLKSGQPFDAKRAFAKG

SEQ ID NO: 226518 - protein, 420 aa, unidentified
MKAYNVDNFAALIGIDWADKKHDICEHPTHSEKYHYAVINSKPEALHEWAMSLKKRYPNQQIAVACELKKGPLIYALAKYNHLTLFTINPSTVAKYRKAFAPSGAKDDPSDALVQVEILTLHMHKLTVIEPESPPMRSLTQLVEYRRNLVQDSVNLSNKITATLKNYYPQALEWFKEKDTFIFCDFISKWPSLAKVKRAKKQTLVDFFNSHNSHYAHVNDARILSIKKAMPLTDDIGVIEPNQLLVEVLIAQFRVLLKGIDTLDKAIKLAYKSQDDKVIFDSFPGAGPQLAPRLLVAFGSNRDRYEDASDLQKYAGIAPVIERSGKKMWTHWRYSCPTFLRQTFVEWAGFSIRYSFWAKAYYEQQKSKGKPHNSIIRSLAFKWIRIIFRCWKTKTPYDESKYLEALKRRGSPLLKFAINS

SEQ ID NO: 226519 - protein, 355 aa, unidentified
MEQHYVGLDVGLEETSLCIVDSESKTVREVKVSTEPAAIRCALEGYADRLSRIGVEASSLGLWLYRELQAKGLPIIVVEARHMRVSLSTMRNKTDRNDARGIAQMMRLGWFRAVHVKNVEMQKMRTLLTNRKLLKRKLVDIENHIRGVLRTYGLLVGAVSRRQYEARMRELIERTDIVVSTMIDTMLDVRRAIFDGYAKLHRVLLQVVQHDQICRRLMTVPGVGPVAALSFKVGVDDPLRFTRSRTVGAHFGLTPRRHQSGTSIDYEGRITKQGDVSVREALCEAAASLLLRVRKWSALRAWGLRVAKRSSMLCAIVAVARKLAGILHRMWIDGSDFKVGFGAKVTQRLKLKPAQ

SEQ ID NO: 226520 - protein, 369 aa, unidentified
MIKKNTAKLKQEITEITVTDKKNKADYIIVGVDLSKTKLDVKHIKYKIYSNDEKGHARFIKAIKELGDNVIVAYEATGYISLNFAEMLDTNGIMRCQVSPRRVRHHAKAGVAEAKTDKLDCEVIQSYTMKYWEHLRINEPMNRNYSELQELQRVRNLYTQFIKQAKQILSTCHRESARKPIEENLVKLKEEKKKIEQKIKNLIDEDENSKNLKELLMSQPGVGEETATSLVLNLPELGRVTRKEIASLTGTAPFNYDSGNHNGKRFTRFGRKEIRNLLFMATRAALNSKKENDYHKRFNHLSRITNLKEGRTYMQVIVACMRMMIVRLNGITRDWIAKGKPDLRTYTKMKEEEQKEKEQAEQEKNNQEQ

SEQ ID NO: 226521 - protein, 420 aa, unidentified
MAGVVDIVYPVCCGMDVHKNFLVACIATTDERSHTSHQIRRFSTFAGDLRKLADWLASNNCKDVCMESSGRYWIPVFNALEKTCNVCLTHPKYVKAIKGKKTDKRDAKWISELFKCDLVRSSFIPPPDIRQLRDLCRYYTKLVYMTSSEKNRAQNCLTVCNFKLDAVFSNVFGKSATRVLDTFLEYGNSDFDLSSLIHKGCKATDEEIRAALDGEFTPAQSDKLNLIRQHMENLEVLKSALESLILKLAEPYQPQIELLLTVPGISESLTAVRILAEIGADMSVFETSKQLCSWAGLTPQNQESAGKKKTTRIARAGAYLKPLLVQIALAVSSSDKHIELKSKYQALKKRRGGKKATIAIARKLLTAAWHMLSKNEAYNAELYHNVDKPPASRELTTAQAIALLRRKGFVIVDEETGEVA

SEQ ID NO: 226522 - protein, 346 aa, unidentified
MRYYAGLDVSMKETFICILDEEGQEVYESHTYTDPKHIYDEFLKSGYELEKVGLESGSLSSYLTKGLQALGCKATCIDARKMAAILSVTVNKTDRNDARGIADAMRCHHYKEVHLRDSQDDAVGILLKSRSTLVSNRGLLKNTVRGHLKNYGIRLGTVSHKQFSITVRSYYPKLLQEAVQGIEGLLKSYESLSKEIEKMEKPLKKICKQDKETQLLMTVPGVGMIVALTFKADLGDPTRFQKSSSVGAYYGMTPRQYSSGETVRQGRISRCGAKEVRTLLTEAAITLLTRTKSWSSLKVWGLKLMKKHGLKKAAMAVGRKLAVILHRMLLTGESFKYGKFEAKAAA

SEQ ID NO: 226523 - protein, 355 aa, unidentified
MNQEKYIGMDVHQATISVAVMDGRGKLIMECILETKAATILEFIQGLHGSLSVTFEEGTSAAWLHDLLKPHVADLVVCDPRKNALLKDGSKSDRIDARKLADLLRLNQLNPVYHGEHGVRTLKELGRSYLTITQDLTRVMSRIKALYRSWGIPCSGTTVYAPLHRAEWLAKIVEPGVRRRAERLYQQLDLLQPVRQQARHDLLVESHRHEAVKLLRQIPAIGPIRAALLVALLQTPHRFRTKRQLWAYCGFALETRDSGEYRLVRGKVRRNRERLTVLGLNDNHNHDLKNLFKGAAISASTCPGPLYDFYAGLLQKGMRPTMARLTLARKIATITLTIWKKGVDFDAQQLNRQAA

SEQ ID NO: 226524 - protein, 350 aa, unidentified
MTMVGGFDVHRQQITFDYVDDDGLVRCGEIRPATRNMLRRWLGEHCPVGDAEFALEGCTGWRYVVDELAVAGVVAHLGDPAEIAAARGPKKRAKTDRADARLLRTLLLQGRFPESWIPPAHVLETRTLGRLYTTLMDERRAWQQRIHAQLFHQGCPPIRALLSQVGREALTSADLSAAGRQYVDTALRRIDELSVEIEPLRAQLVNIARRQAGCRALQAHYGIGWLCAAIMWAEIGDARRFSSSDQLVRYAGLDVTVYSSDDKRSPGHLSRQGSPELRWTAFEAAKCAARRSSPDYVYYRRLAAKHNGHNGKNPTLAVERKILRRCYHTLRELGDAAMAIPVPEREEAAA

SEQ ID NO: 226525 - protein, 352 aa, unidentified
MTKKAIDALMSIGIDIGKDTFHLVGFDFDGQLVLRKKIKRLALLQTFETLPRCVVGMEACLSAHFVSRSLRKLGFKPRIIPAIYVKPFIKGQKNDYNDAEAIAEAALRPNLPTVPEKSQDQLDLQALHRVRSRLVSRRTATINQIRAFLIEQGITVRKGLRALKNSFETILEQRKDEVSPRMRKILFGLYGDWLWLDDRIEAVSKEIEEISQREENCVNVMTIPGIGPMISTAMVAAIGTGEAFDRGRDFAAWVGLVPRQYSTGGRTILGRISKRGSRYLRMLFVQAAKVILMRTNRWPDFSFGEWLTRASERMHRNKLAVALANKLARMAWSILKHKTTFDAPRNAVEIGI

SEQ ID NO: 226526 - protein, 351 aa, unidentified
MMIIGVDYHPSDQYIAFVDTETGESGEQRLNHGDGEAEKFYRELKQRGVSVRVGMEATGYSRWFERLLAGLGIDVWIGDAAEIKTKRVRKQKTDRNDAGLLLKLLLENNFPRIWVPSPENRDLRQLLWHRHRLVQMRTRIMNQLQALAMNEGNRRKKKLWSEQGRAQLEKLPLATWASRRRQDLLELLDRMNPAIEALTTAVEQEAKKWPEALRLMTHPGVGPLTALAFVLIIGTPERFPCGKQIGSYVGLIPCEDSSAGHQRLGHITKQGSSLLRFLLVEAAQAAARWDADWRRRYMHLAMRRQTSIAKVAMARRLAVRLYWMWRNGWEYSQWVKFGSNAGQLAPGHSVN

SEQ ID NO: 226527 - protein, 316 aa, unidentified
MKHAINQNINVGVDTGKFQLDIYIRPLDIYFTVTNDEQGIKEAITTLKKYAIERLVIEATGRLEMPFIMACAKAKLPFVIANPVHIKKFAGAIGQRAKTDKLDAQLIAHYGEAIKPKLSQLKPDIMQTMSDLVARRNQLLVMQTMEKNRLQILPKNLAMTIKPILTAIKNQVTQIENKIVKLIESCPDYQAKNTILQSMTGIGKIASASIISNLPELGYMTSKQASSLVGVAPMNRESGRYKGQRKIQGGRHQVRTVLYMAMMSAIQSNPVFKEMYQRLVAAGKPKKVAIIACIRKMVVILNSMLRDGVMWEAPKT

SEQ ID NO: 226528 - protein, 312 aa, unidentified
MNEIICGVDVSKDWLDAHVQPGGASGRFANDAQGIAELALFCRGHGAGLVAMEASGGCERSPFLLLWQEGLSCALVNARQVRRFAEAMGHLEKTDRIDAAVIARYGVVARVAPTPMPSAAGQRLGALVARLCQVTGDITVNKQRRSAARSDEMSDSLDAMLAFLKREARRLEGEIASLIDDDPLWASLDRAFRSIKGVAGRTVARLLAQFPEIGTISNKAAAKLAGLAPIANDSGKRAGNRQVRGGRAGPRSILFVVAAIAAKYDPNLNAFAQRLQKAGKPKMVLRIALARKLLVILNAKARDARRQFQNAT

SEQ ID NO: 226529 - protein, 458 aa, unidentified
MYRELQPLRRTLSAELRSALLPGLPGIEPDKLIETYLDQLTLFVGADVADLTLSLLAIDASKEELGSLLNVTNDASGFRQITTWLEKLRSQHQLRIIAVACEATGVYYWGFWDALAEQPNLARILYNPRTTEHMGEVLSKRVRTELVDAYLLAEQLRLGSTPEVVLSQDADLLSARFCSRSARDLAQQINRKKNQLRALLRAYNPAFAQAFPGQKFHHPAVYALFEHYLFPDEIVAAGTETIAAVLTSHCRTAFDATVAQQLVDLCRPVLLRPITRSVIRQRVLDLADDITTAQSRQRYFIRTGYDLIKPRSETKLLKQTSGAGLSNTLALVSEVGDVQRFPDGEHLASFLGLTTSKHISGATVYKATHITKQGAPNARYAAVNLADHLRHKVPYYHTMYQRIADRKPPHKGHFVALVAIARHFTTNVLYDMWRYQRPFFLETEDYRQYLKEHPHTDH

SEQ ID NO: 226530 - protein, 338 aa, unidentified
MQTYAGIDLHSSNNFVGVINDKDKILYGKRHKNRLDDVLRALDPFKASLNGVVVESTFNWYWLVDGLQEHGYPVHLANPSAIQQYEGLKHTDDPWDSFWLAHMYRLGILPEGYIYPKEHRAVRDLLRRRLLFVRQRTSQILSLQSMISRNLGFKMSNNEIKKMKPEDIVRLFDCNNLMLMATNCWATIEFLKHIIKGIEKRVKSQLKLRKEFEMLLTIPGIGDILGLTIMLEVGDIGRFAKVGDYSSYCRCVESKRLSNGKKKGENNKKNGNKYLAWAYVEAAQFARRYCVKAQSFYQSKEAKTKPVVAIKALSNKLSKASYYIMRDRVAFDEDKLFR

SEQ ID NO: 226531 - protein, 443 aa, unidentified
MTRKNQKRFEVIHPDCAAVDVGGGEHLAAVDPTKCADPVKRFSTFTDDLHAMADWFESMGVKMVAMEATGVYWIPLFEILDRRGFKVYLVNSRATRQITGRKSDVLDCQWILQLMTHGLLRGAFRPSDEVCSLRSLVRQRSNKVRDQAKALNRMQKALVQMNIQLAQVISNIAGVTGMSILRAIVEGERDPEVLAMLRDKRVKADQATVARSLRGNWRAEHLHALSQELAAYDFLEKQIGECDQAIAHALERLPVLQADVVPPSKTLRNPHRSNEQQLILHRALNKVMGVDLTAIPTIGIDTALVLASELGADLSRFPTSQHFCSWLGLAPPTRISGGKPLPGKTVKVINRAAQALKQAASIARNDKSFIGASHRARLTRMDTCCAIKATAHQLARLIYAMLTKGQPYVEKGIEEFEERSRDRQLRALERKARKLGLQLVKAA

SEQ ID NO: 226532 - protein, 350 aa, unidentified
MIIIGCDYHPSFQQIAFVDTETGELQERRLQHREEAEKFYRDLAAQGMKVRVGMEASGHARWFERLLAELQLELWIGDATVIRAKRGRKSKTDRQDAQHILKLMLKDDFPKIWVPSGENRDLRQLLWHRHRMVQARTRMMNQLQAVALNEGLRYKKRLWREAGREQLEAIRLAPWASQRRRDLLELLDRMNPTIAKLTQAIDLEVEKCPEARRLQTHPGVGPLTALAFVLIIGKADRFQCGKQIAAYLGLVPLEDSSGERRRLGHITKQGNSLLRFLLVEAAQVTARSLPEWRSKYCHLTMRRGRKIAKVALARKLVVRLYWMLRKEWDYEQLRKFGSHAGKPGSGDGVK

SEQ ID NO: 226533 - protein, 299 aa, unidentified
MKVIGVDLAKDHCDVIGYDENGKICLRLDGCSYAKLREILANLPQAVVLMEACKGSMFHARSIADLGHEVRLVKGADVKALRNVNHKNDLRDAAYIAKLYFVPGTTYVYIKSQQQQSLQFLQNEYKSLQELRIQAGNQIHAGLEEFGCPVRKSSKFIKTRMVAHLEKHAELIPEDVMASFKRRREIWLNLLQQEEEAKRRLEQVAATNANAKRIMTVPCVGPQTAVGLLVHVGVDFGRFKFAASLGLVPKQNSTGGNNTLNHPASRQKITQSPETKQTLLLKALFNRGFFLAPRWVHMI

SEQ ID NO: 226534 - protein, 390 aa, unidentified
MFVRTALGWDLHRRFSTVSQVEQHAPGEFRVIKRARLEHADREAMRAWLAQLPPGTPVALEGAFGWPWVADLLTELGLDPYLGHPPALKVLAKNEAKSDRADADRLARFWLRGTFPKCYLSTPEVRQIRERVRYRMALARTRTEIKNRAHAVLHRHGILHDFSDLFGKGGRAFLKALDLPAASRHVLDGWLNLLDDVTALLADVEQWMEQNLEEDAIVSRLKTIPGIGLILAHVIRAEVGQLDERFVNRRKFTSYAGLAPLADDSADRRGRRHISPACNHTLRWAFIEAAATVQHAKNCPRSLRSLHYRLTLGNRVRKQEGRVAVARELAELVYVIWKKGEPYREIPSPQARRAALPGGNCCAAGELQSVRSKETRHPIVHGIRSGETLS

SEQ ID NO: 226535 - protein, 440 aa, unidentified
MNDLRVLDAHAAFVDVGSEQMFVSIAGGSPEVFGTVTSQLHALRDWLLTHQVRSVAMEATGVYWLPLYAVLEAAGLEVLMVNGRQMRNLPGRKTDMQDCQWGATLHAHGLLHAGFVPPAHIRRLQDYLRLRADHITSAAAHVQHMQKALERMNVKLHHVISSLTGTSGLAVVRAILRGERNPEQLLALCDTQIQRAKAQRVKESLRGTWAEEHLFALRQALASWEHYQNQIAECDRQIEALLPASADDHTPPNTAVHTRPRKRAGPNAPEIPQLREILTQMCGGQDLTRLPAHTEYSVLQIVSEVGTDLTKWATEKHFTAWTGLAPGSHQSGKRKGSVKRQRNRAGRMFCVMARALARSKDIALGGFYRRMAARRGGLIANIALARKLAVLFWRVMVKGTDYVEHGLAQYEAKVLQTKQRALRRLARQLGQQLVPSPVPT

SEQ ID NO: 226536 - protein, 321 aa, unidentified
MEQRKTSTKIAGIDIAKAHLDVALHGAEPGSADEARFANDADGMARLGDWLARRCVRRVGLEASGGYEKSVVRFLQDSGFETVLHQPMEVRLFARLKRKRAKSDRLDARLIAAATAQVEAVKAAADPYLAELAERMTAYEQAADLLAQARTHREHTRLADLRADLADHIRILAARKKSLAADLVRRIRARADLARRFDLVASLPGVGAINAAALVIRMPELGAMDHGQASALLGVAPFDRDSGAWKGQRFIGGGRQRPRRLIYMAALAARRTDPGLKAFADRLTARGKPPKVVLVAVMRKIIEAANLVLKRGTPWTPTICI

SEQ ID NO: 226537 - protein, 317 aa, unidentified
MEIHTLGIDLGKTVFHLVGLNVRGEVVLRKKCSRTQLLRFTASRHVQLIGMEACGGAHFLGRALREQGHEVRLIPAQYVKPYVKTNKSDYIDAEAIAEAVARPTMRFVPIKSDDQLDLQSLHRVRDRWVMRRTAVVNQIRGLLLERGITLRKGRCHLEAALPEILEDATTKLSGALRLLLAQLKLELDQLALRLEETDGLMQTIAQESEVCRRLDAISGIAPVTATALIAAIGNGAAFHSGREFAAWVGLVPREHSTGGKQKLLGISKRGNSYLRRLFVQGARGVLQFREKKSSGLSACGTTNIAGTSQCCRRSPGQ

SEQ ID NO: 226538 - protein, 339 aa, unidentified
MGLYTGFDLHSSNTYVGIVDEDGKRIWKKKLQNDPGLISLALKPFKEDIVGIVVESTYNWYWLVDLMMEEGYRVHLANPSRIEQYSGLKHGDDEDDAFWLAEMLRLKILPEGYIYPKEQRPLRDLLRKRGHLVRLRTSLMQSLQNILARNIGSKMNTHHMKSLSTDYVSPLLAGNSDLSLAGRVSKEAIDGLTRQIKAIEVVVEKRIDIRRPYDLLLSLPGVGRVLALTIMMETGPIERFREVGNYVSYCRKVPAARFSNEKKKGTSNRKNGNKYLSWAYGEAAEHARILDSESRGYYDRKLRRTNAPIAHSALAHKLARAAYYMMRDGVPFMPEKTFA

SEQ ID NO: 226539 - protein, 363 aa, unidentified
MIIIGVDYHPSFQQIAFLDQETGEYDERSLNHSDGEAEKFYRELKQRGVSVRVGLEATGYSRWFERLLAELGFEVWIGDAAEIERQRVRKQKTDREDARLLLKLLRENRFPRIWVPSPENRDLRQLLWHRHRLVQMRTRIMNQLQAVAMNEGYRWKKKLFSQQGRALLEKLSLAPWASRRRKELLELLDQLDPKVAELTRAVEQEAHRRPEVLRLMTHPGVGPLTGLAYVLVIGTPERFPSGKQIGSYVGLIPSEDSSAGHQRLGHISKQGNALLRYLLGEASQAAVRKDVYWRRRYVHLAMRRQKSIAKVAMARKLAVRLYWMWRNGWDYSQLVEFGSHAGKLGTGHGVNSSVAHMIGHPAP

SEQ ID NO: 226540 - protein, 351 aa, unidentified
MVVVGVDVHKRTHTFVAVDQVGRQVGQPTVDATAKGHAKALRWARAGFGNDLVWAIEDCRHLSARLERDLLTAGQSVVRVPPKMMALTRASARTRGKSDPIDALAVARAFLREPGLPVASHDEVSRELKLLVDRRETLVAQRTATINSLLWRVHELDPERAPKPRSLDLAKHQDLLRDWLLTQSGVVAELALDELSDIVAFTARAKELERRIAAIVEAIAPVLLAMPGCGRLTAAKLVGESAGITRFADEAKFARHAGVAPIPVWSGNTAGRVRMTRSGNRQLNAALHRIAVTQIRLDGGLGKIYYEKKKAEGMSTTEALRCLKRRLARTVFNHLIADHKTRQTACLPAAA

SEQ ID NO: 226541 - protein, 370 aa, unidentified
MLDTTTFVGLDVHARSIKAVSLDVMTGEVRAATFGYDAGAVAEWVRSVDPRARCVYESGVTGFDLQKRLSGLGVDCVVGAVSKMIKPSADRRRKNDRNDAEFLARMLSVGNVVEVWVPDDECEAARDLTRALEDARDDLSRSKQRLSKFLLRHGLVFDERTPTGRRKGNWTRAHWSWIESIRFAEGADNDVLAYYVDAVRRAAEEKARLEGLVEAEARKPRWRRRVDSLRCLKGVDTASAADLVFEAGEFSRFRNARSFAAWVGLTPSEHSSGESDRRGAITKAGNKHLRKALVEAAWHYLTCSGRPKGLAKGQAPDRGARRHAAKGVRRLAERREALLARGVHGNKANVATARELACWVWAVGLMAEEA

SEQ ID NO: 226542 - protein, 353 aa, unidentified
MRRTKEKLIAGIDLHSNNVMIGVINQDGKRVAHRKLGCDLGEVVGFLKPLKPQLQSMAVESTFNWYWLVDGLRAQGYSIDLANPAKIEQYSGLKHVDDQDDAFHLADLQRLNILPKAHVYDPELRPVRDLLRRRTNLVHQHTALLLSFSSLYTRTTGQKLDLGDAKKMEPKQAPKLYEHPANQLIAQVQAEHIQALAKSIRRVEKAVLACAREIPLYERLLTIPGIGRILGMTITMEVGDVKRFPTDGDFASYCRMVDAKRLSNGKCKGDNNQKCGNKYLAWSFVEAANFARRYDEHCRRWYDRKAAKTSKVIATKALGCKLAKAAWHVMAAQCDYDEKRMFPELANQPMKTS

SEQ ID NO: 226543 - protein, 319 aa, unidentified
MAQNDLIVVGVDVAKDKVDACIRRFTLRQTFPNTAQGHRKLVAWLRKCRVGKAVMEASGGYEREWRNVLHNSGIEVRIVDPRRVRSFAQSAGRLAKNDPIDAEMIAWFAETFSQTPGQIPDAAREELAALAKARTALVNVKIRLLVQDEHAAPEPARKAYARVLKSLAAEIDKLEAAISAKVKATPEFAERAEIIESVPGLAQATSAILIAGMPELGQVSDKVAAALIGVAPYDDDSGKRRGERYIKGGRRWVRNGIYMPCLGAATQCNPVLKAFYQRLLAKGKEPKVALVACMRKLIIILNTMLTRRQKWNPGRHAMG

SEQ ID NO: 226544 - protein, 450 aa, unidentified
MSKPKPQVIEDEEHQRVFERVAAIDVAKASGMVCVRLPGRDGRPRASKVWEVQAMTSAISDLGRRLLSDRVQMVTLEATSDYWRIFYYLLEALGLAVQLVSPAQARQLKGRPKTDKHDAMWLARLTEWGMLRPCFVPPAPIRALRDYTRARTDYVRERTRCYQRLEKLLEGALIKLSSVASKLTTESAKDMVRAMIAGERDPHVLASLARTRMKAKHDALVEALTGMFDAHHGELAQMELDQAKFLDQKITQLQARIRGSLAAIPGAQGVDADGTTGPAAGTGPDARVLPAAGRLAEIPGISPDLAAAIIAETGLDMTRFPTAAHLVSWAGLCPAANQSGPRTGHGKKKHGNAYLRGALGQAALGAARTGTFLGERYRRVARRRGKAKAQVAVARSILIIIWHLLADPAARYTDLGPDYVASRTNRDKKIRNHVRQLQALGLEVTLTPAA

SEQ ID NO: 226545 - protein, 342 aa, unidentified
MNKVAIVAIDLGKKSFHLHTQDDRGHELYRKKLTRAALVQHLANLEPCTVVMEACGGAHFMAQQAAKFGHTAKLIAPHLVRPYVKSNKNDFADAEAICEAATRPTMRFVPVKTQAQQALAMLNSTRDSFIKDRTATVNRIHAALLEFGISLPAGFKSINELTAQLEASSLPDPIRKLLTRMHGHFDYLHEQIRSLDKELECQAAEDDLAARLMTIPCVGPITSSALAAELGDGKQFKCGRGYSASIGLVPKQHSTGGKTVLLGISKRGDRNQRRLLIQCARVYLMHLDRQKGVLAEWVRHLIATHHHSNHVVCALANKFARIAWAIAAHHTEFDAGPSAMNA

SEQ ID NO: 226546 - protein, 321 aa, unidentified
MSSIIAFDVSKDELVGVRMHASGRVAERYSIKNDPASIGAFLDKLPHRIRYVGSEATGPYHTFLAEVCLERAIRFKLMNPLVTKQFTRATIRKKKTDEDDAVYIGRSLLMENGRELSAVDLSPALPHLRTATNLVNMAATLKQRRGRFATYVVNSIKAQQHLSDAERALRVAADALRKIGRSHVSEDACTLLQSISGIGEILAATIVSEIRDIARFKDGKALVAYAGLDPRVRQSGTSLVRNTHLTKRGSPHLRHALFFAAAIGQRHDPDLKAYYAKKRNEGSCFTEATVANARHMTHRVFAVLKRGTPYEKRQLVISSAC

SEQ ID NO: 226547 - protein, 381 aa, unidentified
MDQKQITPEKEVNTGLPVLFVAFELGNSTWKMACSDGRKVRQVTVTARDLEQVQRALLRAQTHFGMDGASAVVSCYEAGRDGFWLHRYLQDQGIDNVVVDSASLEVDRRLRRAKTDRIDAGKLLRMLIRYHGGERQLWRVVRVPSREDEDARHLHRELEGLKRERTRQRNRIHGILMQQGLCISNPSKKRFLKDLEALRTWDGRILPVGMKARIVRAYQQLRLVEDQISTLATEKREQLKQVDNAKMRQVAQLLRLPGIGPVSSWSFVMEFFGWRQFRNRREVAALAGLTPTPYDSGGKLREQGISKAGNRRIRTLAIEIAWAWLRYQPQSKLSQWFSDRFAGGGTRMRRIGIVAVARRLLIDLWRFLEYGVIPEGALLTT

SEQ ID NO: 226548 - protein, 316 aa, unidentified
MNDTSMKCAGVDVSKATLDVAVFDGQRFVETNDAAGHRRLAARLTAAGVERVGMEASGNYEAAVRAALEAVGFAVKVFDPRQVHGYRIFRGRRAKNDAIDADLILAATAALGSGGAAADPRLAAFQEHMTLIDALTDDIARHETRRDRFSDPAHRRYLEAEIRRLSKRKSKELAKLIAKVKAHADLAKRFALLLSIPGLGEITALVFVVRMPELGRLSRAEAAALVGVAPFDHDSGTHAGQRRIAGGRRRLRKAVYMAAFSAANHWNPILVAFRKRLVDAGKTYKQAIVACARKLVHMANAVLARGTPWNPQNASA

SEQ ID NO: 226549 - protein, 413 aa, unidentified
MSVMPEEVEFYVGLDWAAEMHAVCVLDAAGRVVAGFPVPHSADGIAALITRLGRLGEPEQIPVGIERPTGRLVDLLLEAGHPVVPVSPNAIKTWRDGEVLSGAKSDAGDAAVIAEYLRLRAHRLRVVPGYSAETKALRTVVRTRDDLVDMRVAAGNQLAALLDAFWPGAKAIFADITSPITLAFLTRYPTASSARHLGEKRLAAFLVKHGYSGRRCATELLTRLRYAPAGAFDDTLTEAVRDTVLAMAAVLTALGVALKDLDRSVTAHLGEHPDGPIFTSLPRSGQINTAQVLAEWGDVREAYDRPDAVAALAGVTPVTKESGKHRAVHFRWACNKRFRRAITIYADNSRHASPWAAKIYNDARAAGKDHPHAVRILARAWIRIIWRCWQDGVPYNPANHGNAIKITQPPIAA

SEQ ID NO: 226550 - protein, 343 aa, unidentified
MEYYVGIDVSLESSSLCVVDATGRIVREAKVASEPETLTAWFKSLGFALSRIGLEAGPTSQWLYAGMTQAGLAVELLETRHVRNAFKIMPVKTDRKDARGIAQLMRLGWFRPVHCKSLPAQEIRSLLGGRKLLQGKLHDIELSLRGTLRGFGLKIGKTTPKSFEGRVRTLVADHPTLTLIAEALLRARAVLLEEFIKLDKKVHTLARHDPRARLLMTAPGVGSMVALTYATAIDDPGRFKSSKSVGALFGLTPKRYQSGETDVTGRISKIGDAAVRTALYEAANIILERPVKGGWLKAWALGVAKRAGLRKAKVALARKLAVVLHRMLVDGTPFRMDKVAARA

SEQ ID NO: 226551 - protein, 393 aa, unidentified
MNTIVHYLGLDVHKETIAVAIAPAENTEVRVYGIIGGTLDALDKLIRKLSAPNLQLRFVYEAGPCGYVIYRHLKSKGLHCDVVSPSLIPKKASDRVKTDRRDAQQLARLYRAGELTPIHVPDQEDEAVRDLVRARDCAKDDQRRARLRLKGFLLRLGFRYTGKSSWNDAHKRYLSGLLMPQPPQQIVFQEYIHAIDAATERLQRLTQSMEDCLIGWKWEPVVRALMCLRGVQVLTAMTLVAEAGDMTRFTNPRQLMNYFGLTSSEHSSGGKRVQGSITKCGNRHCRHVLAEAAWHYRLRPLVSQAMQKRQEMQSKEVRLIAWKAQQRLHKRFRRLSVRKKSVVAATAVARELTGFVWAIACAVKPAAQPPQPEIIRTCKGRVYQLNPHLKYRK

SEQ ID NO: 226552 - protein, 369 aa, unidentified
MGKHSEVFVAFDVAKKKHAVAVAEGGRTGEVRFLGDVENSPLPIERTIKRLAERYERLHVCFEAGPTGYGLYRQIQALGHDCMVVAPALIPKRAGERIKTNRRDAVTLARLHRAGELTGVWAPDEAHEAVRDLVRAREAAADDLRRKRQQLLSFLLRHSRIYSGGGHWTLAHRRWLAHQKFDHAAQQIVFQEGIDIIEDALQRLRRLEKQLALIVPEWSMAPVVEAYQAMRGASFLVAVTFAAEIGDVRRFDTPRQLMSFLGLVPAESSTGDTIRRKGLTLAGNRRARRALVEAAWTYRYPARVSETLRARLEGLPKPVRDIAWKAQVRLCARYRRLSATGKKLPIVVAAIAREMAAFLWAIGREVAPR

SEQ ID NO: 226553 - protein, 444 aa, unidentified
MTRKSKNQRLQIIHPHCAGIDIGSREHWVAVDPDKAADPVRCFSSFTDSLNEMADWLKSLGVEIVAMEATGVYWIPLYELLDQRGFEVQLVNSRSTRQVTGRKSDVLDCQWIWQLMSHGLLKGAFRPADSVCRLRAIVRQLGTKVQDQSRCIAHMQKALTQMNIQLDNVVSDLMGKTGTAILRAMIAGERNPQKLASLRDNRLHADEKTVARSLQGNWREEHLFALTQALEHYDFLEQQIQHCNQLIEQHLVELPQLAENPPKPVKVLKSSSRTKKQQSALHQALYGVMGVDLTAIPTIGIETVLVLASEIGADLFRFPSESNFCSWLNVAPPTCISGGKKLHGRAPRVFNRAGQALRQAACNARNSNSFIGASHRARLSRMDKASAVKATAHQLARLIYAMLTKGQPYVEKGMEAFETRTQDRQLKALQRKAHKLGLEIVEAT

SEQ ID NO: 226554 - protein, 346 aa, unidentified
MQYIGIDIHKKYGVYTTLGENGKVVDQSRIDNNPILINEHLNKFNQPLKATIEATFSWGWLADLLSERKIGVTLAHPQRVKAIASAQIKTDKVDSKILAQLLRANLIPPAYYTPKDIRDQKELLRFRASLVGIKTQTKNRIHSLLDKLNIREPEELTDVFGKKGRQFLNNLILPSNSQFALRQYLNLIDQLEKQIHEGNELIDEQFSGNDQAKLLQQLPGLGKYSSLILAVEIGPIDRFNTSKQLCSYAGLVPSVFQSGDKTRYGKIKQGNSYIRWVLLEAVPKAIKKDKKLMDFYLRISDKKGKKKAKVAAARKMLTQIYHILKRKQVFRNGEQGSPVFFSEDIE

SEQ ID NO: 226555 - protein, 336 aa, unidentified
MNHYIGIDVAKATLQVYVPEGNQDIELSNTQTALKTLYSKLKKIYKKEKEKIVLIYESTGSYSTVLENFAQKQNIKCFKVGSAQSASFARTIKNRSKTDKADARMLCEMSILAKPKDIKVPYRDEKAHQIRSLMKYYQSLIKEQNRSSNYLEAAKYNKEDSYVIKKLQQKILKLKKEQKELITKILLIIENNTLYKKAYENIISINSIGEKSAIILLYLFLRYPNASRQHITALCGLDPIHRESGTSLKKRAKISKQGMSLVRSILFMPVMTAVITNDEMKYHYDKLLERGKCKSLAQIAIMRKIVLLAHSLYKNNEKYDSKKYLNHLDFKDGIMS

SEQ ID NO: 226556 - protein, 331 aa, unidentified
MYNYIGIDVSKQSLKISDETKEYDVPNEKGLKTLKKLFRKNYGKDWKETRLIYEPTGPYSNYLREFVFKHKIRIYEMNPKKSANFAKALGNRSKTDDIDAKMLYKFHVLLKEEDFRIPEIDKVVEQLGAYVSSYRIIQKTRTMLSNHLQSREYENGIDPKLKESIKKEMEKLKQIEEALEKEMEAFGRDNPEIKEDFENLLSIKGIGVISATALLYLFRKYPDANRNEITALAGLDPVKRQSGSSINGGRKISKAGDSSLRKILYVSCLSSIRYNDRIRVFYEYLITNHKKPKVALIACMRKILLIAHQIYVKKSEYKPLYIDNKSLCSSY

SEQ ID NO: 226557 - protein, 348 aa, unidentified
MVANFTFDKYAVQCVGIDISKDKFTACLFTYNTASDLGWWTDVIEFRNNKTGFNQLVRWSRKNANKDYPIRYLMEPTSTFHEPLAYHLNAIGCTVFLIFPAKAKEFAKYEGIRSKTDEIDARTLSTIGCTNRKLKPWTPPKPIFRKLKQMCRFNNRMERMRTELTNQQSALKSGANAEASLMNRYEALLNELDKQVENNKKLIKKTVESDSDLKEKVARITTIKGVGYLTAVSIIAETDGFSLIGNRRQLASFAGLDVIAYKSGTIDTNHRISKKGSSYIRAALYWPSIVASMHNPQMKVLYDRIASKNTRTKMIAITAVMRKLLLLIFTLWKSGEEYDSKRSVSCTV

SEQ ID NO: 226558 - protein, 330 aa, unidentified
MKQYEHFFGVDVSKKTVDITHVTNQQFTHRQFTNDTQGMEQLTCWLNELTLEFNKVLFCMEATGLYCFTLTHFLANHSIDTWIEHAAQIKKSTALSRGKNDKVDSHRIAVYATKNLDRIRLWKPVNATLEKIRHLASLRDRLVETKKRLATPIKEFEDVGHLAMAKLLTRSIKSSLNAIDKDLKNVESKIIDIINEDENLKFLYKLITSVVGIGFVTAINLIVHTNGFTILKDTRKLACYCGVAPFEYSSGSSIRGRTKVHYMANKKLKCNLHMASLTAVKLDGDLKAYYERKVGEGKSKMSVLNAVKNKLLARVIAVVNKQELYVKKAA

SEQ ID NO: 226559 - protein, 395 aa, unidentified
MISVGIDVSKGKSTVCILKPGGEVVKPPFEMDHAVEKLDSLVSLINSFDEETRVVLEDTGHYHLPVASYLSSHGIFVCCVNALRMKKYCAQSIRRAKTDKIDAVRIASFGITYWSELTRAYDAPDTYDELRFLARQYYQFTAILVKAKVNFSNLLDQVMPGISNLLQNQNDNHKLTEFVDRYIHFQTILDMGEKRFTADYCKWAKKMGYRCNERKAAEIFALAQNGIPSLPNSQSVKIAVSEAIKMIHSTEESRNTILAQMQDLCKTLPEYSVVRNMNCIGDVLAPRIIAEIGDVRRFRNKHSLIAYAGIDAPPYQSGAFNASERKISKRGNSYLRKTGYEIMQSLIKHKPADDPVYEFIQKKRSEGKCGKEAMIAGLNKFLRVYYGKVMELYSK

SEQ ID NO: 226560 - protein, 315 aa, unidentified
MRSTVAQSVGVDISKDALDVAIHPAGESFRITNNPEGHRAVIKRLKGFDIARIVFEATGAYHRLFQQALVEAGLPWVKVNPCQARRFAQATGKLAKTDRCDALMLARMGAALELETRAPASKTVEALRELVNARDALIKDRVAALNRQAIAVSPLIKRQLAQRLRQIDGQIEAIDRRLKTLRNADADLCQRFDILTSIPGVGEVTANVLVVETPELGSLEHAQAASLVGLAPVPRDSGQTHGKRSIRGGRSRARQALYMPALNAIRLNPEFKAKYQAMVKAGKPAKVAIVAIMRKLLILANALIRDQRKWTPANP

SEQ ID NO: 226561 - protein, 346 aa, unidentified
MEYFIGIDVSLEASSVCVMDQGGAVLKETKVLSEPDALITFVHGLGHDVSCIGMEAGPLSQWLYKHLTEAGLTTVLMETRQVKGALKAMPIKTDRRDALGIAQLLRMGWFRPVHCKSVSSQEIRALLAARKALQGSAIAIELSMRGLLRGFGLKIGLVTKGLLEARARELAEGNSTLKALVTSMLRGRAALRAELIRIDKRLRDVARTDDVCRLMMSVPGVGPLVALTVKSGIDDPGRFRSSKMVGPHFGLTPRRDQSGERDVVGGISRAGDAGVRTALYQAATSMLYRSAKNSWLRAWGMRVAQRRGMKRAVVAVARRLGVVLHRMWADGTLFRFSQADALVKGA

SEQ ID NO: 226562 - protein, 349 aa, unidentified
MLHAGLDLSRNRIDVCVLRDEGELVDEFSSPADRDGLSHLHRRIARHGEPVRAVVESMTGARHVHDTLERLGFDVLIADAQKTKGLAPLACKTDRIDARVLAVLSERYLVPEIWLPAPGIRAERELARFRLHLVKHRSMLKQRIHSTLINFGQPCPVSDLFGLAGRELLQKLDLPAPWRQSVDTSLYLIDELDLQIAEVAKELRATGADHPYVPLLMSAPGIGWVLAFTIAAEIGDISRFASATKLQGYTGLCPKVVQSGNSDRRGPLSKHGPRYLRWALLEATMHALRHPAYSERYQCTKKRAGRQRGSKVAQVEIARRLTRAIWHMLTNSEPFNAQAPGGAAGRLAA

SEQ ID NO: 226563 - protein, 350 aa, unidentified
MIIIGCDYHPGFQQIAFVDTETGDCGEQRLEHCEGAQKFYRDLATQGKKVRVGMEASGHARWFEQLLGGLHIELWMGDAAVIRAKRGRKSKTDRQDALHILNLLLTGDFPQIWVASWENRDLRQLLWHRHRMVQARTRVMNQLQAVALNEGLRCKKKLWRKHGREQLEAFRLAPWASRRREDLLELLDRLNPTIAELTQAIEQEAEKCPQAQRLMTHPGVGALTALAFVLIIGKAERFQCGKQVGCYLGLVPLEDSSGDKRRLGHITKQGNSLLRFLLVEAAQVTSRTIPEWRSKYLHLTMRRGRKIAKVAMARKLAIRLFWMMRQGWNYQQVMKFGSHVGQPGNRHGVQ

SEQ ID NO: 226564 - protein, 370 aa, unidentified
MKQKILYVGLDVHKNTIDVAVATGRSNGKVRSYGKIDGTIDALDKLIKKLKGSDVDLRFVYEAGPCGYRICRHLRSKNISCAVVAPSMIPRRSGDRIKTDRRDAINLVRLQRAGELTSIYVPSVEDEAIRDLVRCRDDMRRFEQKARQRLLAFLLRHGHRYSGNRHWTKGFYNWLATVKFSHPADQIALQEYIDTANECGERLKRITEQIRMHVEPWSRAPFVKAYQALRGVSFVVAVTVVAEIGDMNRFATPKQLMAYLGLIPSEHSSGKTVRRGSITKTGNSHVRRVLVQASWTYRLPARISTVLLTRQQGLPKSVCDISWKAQTRLCTRYRRLIARGKSRQNAVTAIARELGAFMWAIDKQMQLSMI

SEQ ID NO: 226565 - protein, 344 aa, unidentified
MIIIGCDYHPSFQQIAWVDTETGEMQEQKLMHGDGEAERFYRQLGGPVRVGLESTGNCHWFVDLLAEMGHEVWVGDAARISAKQVRQQRTDRRDAAHILDLLMKDDFPRIWTPSKAERDHRQLLIHRYKLVTLRVRVKNELQHLAMNQGMQRGRSLWSREGQKRLQELSLAPWASIRRQDLLELLKKLDGQITVLDQAVKKAAEENERARLLMTQPGVGPITSLAFVLTLGDVSRFRCGKQVASYVGLIPREYSSGGKQRLGGISKQGNRFLRMLLVEAAQVVVRYDPKFRKEYLHRCHHKPKAVAKVAAARKLAIRLFWMLRTNKTYPEVVRIESSSRVPLAD

SEQ ID NO: 226566 - protein, 365 aa, unidentified
MKNETISSNGISPASLVNYVNRVLNLGLDVHYRQVTVAMQEDGGRIKAAGKMGHMDFLNWVQKKLQEGWQIYSCYEAGASGYWLHRELVKLGVKNLVVVPKAMGQGGKKQKTDKRDAGELCDCLDRYLRGQDKALSVVGVPTEEQEEKRALIRYHRQIMADRGRCEARGKGLLCAQGIEVHGRWWQGDAWLETLSDPRLKDWMKEQLIGWRNKILSTDEEQDGLRERIAALAPLILPKGVGAYSAAVLYYEMRGFERFTNRRQVGSMTGLCPGIHQSDGRGKEGSINRCGIGIVRWTLVEMVWRLMIWQPQYPPVRRLAAGLVKGKRARKRLVVQAARRLAIDLWRLSTGQTAPEKLGLIMHSAK

SEQ ID NO: 226567 - protein, 322 aa, unidentified
MSTICGVGIDVSARELTVSVAGKTTQSFENNAKGHRAISRLVRDCAKDEIQVCVEATGSYSLDLCFHLQGCGFRVMVANPRAVANFAKAMMSRSKTDPMDAEVLREFAERMPFVEWLPPSQGALELRAASRRLDSLSNMLTREKNRLHAARATKTTISIVCDDLKSSIKHFEGRIERLIKKIEAFIETQPSLHAHYRRLQTVRGIAARSAIRLLGELATMPADMSPRQCVAHAGLDPRQHQSGSSIDRPARISKRGNRYLRCALYMPAVVASQHDPVIKAFYQRLLQRGKKPLQALVAIMRKLLVGIIGMFKSGTDFDALGV

SEQ ID NO: 226568 - protein, 375 aa, unidentified
MSNHSEAFVAFDTSKLRNAVAIADFGRTGEIRFFGEIENTATATAKLVRKLAGKYERLTFCYEAGPTGYELYRQIKSLGQECLVVAPSLIPKKPGDRVKTNRRDAISLAKLLRAGELTAVWVPDRHHEAMRDLTRARDTAVDDLRSKRQQISAFLLRQGLHYCAGKKTWSQTHLNWLASQKFEYPEHRLVFEEMMMAMRQAQERLERLEQAIRAAVPDWSLADLVTALMAMRGIDLIAAATFLAEIGDLSRFQSPCELMAYLGLVPSEDSTGDCVKRGPITKAGNRRARRMLVECAWSYQHPPRVGKDKQEKIAAAPRAVREIAWKAQSRLNRRCRALSRRGKLKNVAITAVAREFAGFIWACARAATAARATAK

SEQ ID NO: 226569 - protein, 438 aa, unidentified
MICAAIERCAGIDVGKTFLAVCVMTGPLGGEARAEKRRFGTTIAELERLRQWLQLEQVTHVVMESTGSYWKPVFNVLETSVKVYLANSQEVKNRKGHKTDDKDGWWLAHLLRHAMIHPSFIPPRPIRELRDLTRRRRRLLEDVTSEKNRVQKILEDANVKLGNVLSDVFGVSGQLMLDALLEGKAGAAEIAQFAKRRAKKKIPAISQSLEGHRMSDHHRQMVRYSLKHLEFLEEQIGEMDRDIVAKIGAAGLGPSWQLLQTVPGIQERSAAVILAETGGDMKQFPSRGDLSSWAGVCPGNHRTAGKNKSSRTTGGNPWLRGTLTECAWAAAAKKNCFIKEKFWRHVSKSGGKKAPALIAVAHTLLKLIYEVLRTGQPFVDRQAPPLDDGQRQRMIRHHIHRLGKLGISVPQYLVSAPLESQTIRSCYSTGQTRSSPSH

SEQ ID NO: 226570 - protein, 420 aa, unidentified
MAEEAEQIKWWVGIDWASEKHLACLIDRHGNQVGVREVAHGGTGLAELCDWLIATTAAAPAEIAVAIETAHGPVVETLLERGFAVHAINPKQLDRFRDRFTVAGAKDDRRDGLVLADSLRTDRRAFRRLAGDDPLLIELREWSRLTDELQSERIRLANRLREQLWRYYPQALRLTDDHAADWFLALWQLAPTPAKAAKLRPASVAKLLAAHRIRRLTAEAVVERLRQPPLAVSSGAVAAASDHIRLLIARLTLLNRQLKQAHQRLDALSAALAPAAEPPPGQACEQRDGMILRSLPGVGRINLATLLAEAWEPLRRRDYHALRALSGVAPVTRRSGKSCIVIRRHACSPRLAKALYHWARIAIQHDPVSRQRYAALRQRGHRHGRALRSVGDRLLALACTLLRRQVPFDPHYRQPQAAAA

SEQ ID NO: 226571 - protein, 401 aa, unidentified
MFFIGIDLADKSFDFCIVNLYGDVVSRGREEMSDEGFSSFIQTLNRKGIDASSCIISLENPRSRFAEFLCLRGNQLYAPNPKAIARYRESRFNTNAKSDSADAQLIADHIREHYRSLKPIKLPPQQIRHLQMLLEDRDKLVKDKTRLSNRLTSILKEYFPQAFAAFSDITSKTALLFLERVDSFQEAKGISRQQWQEMLNESHFYNPKARERFFQAMQQKEIFISPAVISAKAMMKRAILAQLKVVIHCIYLYDQKIRELFDQIPHSDIFRSLPGVDYLLGAKLLVLFSKEFRSAKEVQSYCGTSPYSKLSGQSRGVYFRSGCNKFGRNLFVQIAFCSLTSSAFAKSYYRKKRLEGKSFHHALRCLANVWAKIAFAIWRDKSRYDESKHLAAIALHSLSAD

SEQ ID NO: 226572 - protein, 341 aa, unidentified
MQITTIGLDIAKNVFQVHGIDAAERVVVRKQLRRGQVMKFFEALPPCLIGIEACASAHYWARELTRLGHEVRLMPARDVKAYVKRHKNDAADAEAICEAVGRPRMRFVRPKSAEQQGRLMQHRARDLLLRQQTQVINALRSHMAELGIAAAQGREGLKQLLAVIADKKDARLPIDARASLIVLAAQLQALHTMIGSLEKRLIVQHRTNEASKRLQNIHGIGIIGASAIAATVPDPKAFRSGRDFAAWIGLVPRQDSTGGKQKLGPISKQGDRYLRRILVVGAHSVLRRAKLNPEKYPWLTQLLARRPFKVVAIALANKMARIAWALLASGGHYRPRLGTAA

SEQ ID NO: 226573 - protein, 426 aa, unidentified
MNYKQNEKILQVTEKTLVVGVDIAKHTQYCRAFNYRGLELGKVYSFSNDRSGFDGFKEWSEHLMKQNDLDKLIIGMEPTAHYWWNLAEYCRDNVMKIVLVNPFHVHRSKEMDDNSPTKNDRKDPKTIAKLVIEGRYVETYMPTGVYAELRSVVRMYDHVIGCKSVVENKILQWLDNYFPEFTQVFGNWECKSGMMTLREFPLPSMIVDLGETKVLEIWKKEIKRGVGKKRAQELVEVASRSVGSKEALKMGVKELHYLINEYDVYVMQLDEIKTEMESLLKQVPGAKEALKIKGMGLVTVAGILAEIGDISRFQDARQIQKYAGLNLVETSSGNHKGETTISKRGRKRLRMMLFRVMLPIVANNAEFKQLHNYYTSRKENPLKKKQSLILLCCKLIRILYAMLTKGVEYDGDRLMKDIRRPQEQAA

SEQ ID NO: 226574 - protein, 438 aa, unidentified
MSNKVIFNLDELFISVGIDVGADFSWMSIALPNQQFVGKPYKILHNSIDSLTTAVSKIKEAEESYSLESRIFLESTGIYHYPLFCYLRDKGFNCSVINPIITKNSTNINIRKVHNDRFDSKKAALVGLKPNLKVSLMPSDLALNCRNLSREYYDLMDNRSAYVNKLQGELRMAFPQYLGIFSKVTINTSLTLLETYTSPSAFLEADKQEIIDIIKSTARFGLTYAQNKYNAIIQAATDANQFGYIIDSNIKRIRLYISFIRKYDEEINSILESLHELVDANEDTDFVKQIHLIETFKGAGFLSAVSIMGEIGDFSAFSKPKQLFAYFGLDPAVKQSGKFEGTKVQMSKRGSAIARRVIHTLTLQSISISRNGEAKNPVLREYYIKKCDSKPKLVAMGAVSHKVCNMIFAILRDNKPFKIIAPHEHIKQYNAAKCDIAA

SEQ ID NO: 226575 - protein, 389 aa, unidentified
MSSARGDGAKRSGAPVPRAGDARSIVPRPSKAVTKLDRRRLRGTSPNSRLSDGRPLAAADSVSSHSQDRDVSMNDSLSFVGIDVAKDKLDVFIDSTSQYFTVENTPAGISTIRQRLAELNVKLIVIEHSGRYERRCALDLMDAGLPVALVNPRQTRDFARSRNWLAKNDRIDARLLSEFAKANNPRPSERISQNQAELDELVGRRRQLVAMRASEKPRLQQASSRSVRQSIEKVLRQLDVQIQDLERAIATMIENDDDWRGKTQLLQSVPGVGPVVASTLVAELPELGKVNREQIAALAGLAPYDHESGKFKGRRSCFGGRAQVRCTLYMAALAARRFNPIVRALSQRLLARGKSFKVMMVACMRKLLTILNTIAATKTIWRENQLANA

SEQ ID NO: 226576 - protein, 451 aa, unidentified
MGCDVSKGYADFVILDEFKHCIENNFQLDDTFSGHNCLFERLNTFFSHYPDAELFAAVESTGGYENNWYSTMHQFQATFNIKAARLNPCGVHASSRAEMKRTITDAVSARSIAEYLIAYPDKVTYEQEDSWASLRKQWSFVQMLSKQKVQLLNQLESLVYTANPEVLSYCRDGVPEWVLTLLKRYPTAIKLAKAKKSALAKIPYISQKRAEQLIAQAKISVASSLDVITSQLISATVEQVLILRQTIASQNKILSQQCSTPEVDLLKTFNGIGNYSAVGLLLEIQSIKRFSSAKKLASFFGLHPIFKISGDGSSGFRMSKQGRKAPRSILFMVAMSAVKSNALIHDLYREKVSKGMAKMSAIGLCMHKILRIIYGMLKNNTAFNQEIDLQNRKKAALIKAKPAQDKNRRFQTYDKSAPISRRNRKKRLERELSQDAINIKCGIEVPAPASN

SEQ ID NO: 226577 - protein, 404 aa, unidentified
MYNAVGIDVSKGKSTVSVLQPGGVILRKPFDVRHSHEQLNELAEYVLSLDGDTRVVMECTGRYHQPVLNALSGKDIFVSAINPHLIKNFGINTLRKVKSDPADSKKIARYALDNWADLRQYSAMDTIRAQLKTLNSQMDFFMSQRTSAMNNLISLLDLTYPGINDLFSSPVRDDGHLKWVDFISAFWHVECVSKLSLRAFSERYHAFCKKYGYQDRAGKAEQIYVYSLDIAPSVPKDNTYKNVILIAVQQFNQLSASVENIRNEMDKLASTLPEYETVMSMAGVGKTLGPQIIAEIGDITRFTHREALTAFAGVDPGVSSSGKTTARSNRSSKVGSSRLRKALFLVMSVLLQTKPENDPVYKFIDKKRSEGKPYLVYMTAGANKFLRIYYGRVKACIATQSESE

SEQ ID NO: 226578 - protein, 372 aa, unidentified
MNYNTVYVGMDVHKESFTLCSCKYEDEKASHYQRTPASYKNVLRYLAFLRTIYGEDTRFVCGYEAGCLGYSLYHQLENFNVECVILAPTTMLEQRSKRRIKTDKRDAEIIARSLAQHNYSPVHIPTETDNQTKDFIRMRDDHKAELKKIKQQILSFCLRQGYQYDGSGNWTAKHVKWLRSLKPAGLYKEILDEYLLTYTILTDKLNRLDQRIEELASKEEYKESVSKLTCFLGIKTHTALSVIVEVGDFQRFVSARKFAGYLGLVPGQHSSGDDRNGLGITKAGNTHVRRLLVESAQSYTRGKIGYKSRVLRSRQAGNSPQVINYADRANERLRRRYYKMVLKDGKKYNIAKTAIARELACFIWGMMTDNIY

SEQ ID NO: 226579 - protein, 398 aa, unidentified
MSNNTPLEIRVGVDVGCYQHNVAIGLPNGDFLEEFEISHTSDGFREFFLRIGAHEKKYNCGVAVAMEGFNGHARPLDTMICVRDYRLYNVNNLKLARFKEIFPAAAKTDVIDARKALELFQLRDHLPSARDVLQEVKAVPQENAILKRLTRRRRFLVNERVRIINSLQTDLRAVCPGLLDITNDAGNLWFLRFLTCTDSLKKLARLRLATLLKIPGVGKKYANSIRHWQEKAIYSPEVEWVGDMIQEDALRVLELHDKIKTLEKRCEDIGRHSRTAALISSIPGYGPVCSATLAGEIGTIDRFRSEASLALYLGMATLDNSSGKHKSSKNPRHVNARAKAAMMIAIDRHRKGVPESQKYYVKKRSEGKAHNQAIRALGRHLSRVIYKMLKEDRPYQMR

SEQ ID NO: 226580 - protein, 396 aa, unidentified
MPSTTVSERVVIAVDPHKASWTAAAVGSALAPLATLRTPVSRQGYRQLRRFAARWPDAEWAIEGATGLGAPLATWLSGDGIEAVDVPAKLATRVRMLSTGHGRKNDDADAVSVGIAALTAPGLRSAAVEDAIIITLRALVEHRDDTVRTRTQTINRLHVLLTGLLPGGAPRQLDADTAARLLRTVRPRATGPATLRRLAAELIGEVRHLDRRIATASTQISDAVTASGTTLTQLRGIGDLTAGKIIGRVGDITRFRSPAAFASYTGTAPIEVSSGDVVRHRLSRAGDRQLNYCLHVAAITQLRHDCPGRDYYLRKRACGKGHKEALRCLKRRLSDVVYRQLLRDAQAAQAAGPRGQLGATTNSRAAGSTPHTSSSGKSLPGPAGTDPTTPDEDRLD

SEQ ID NO: 226581 - protein, 369 aa, unidentified
MKDVERRFVGIDLAKRSYVAKVLQPGTDKGRILKGSTSPEGLKKLYHSLNSQDRVSLEACAQGFWLARRLIETVGCEVVVLNAGDLAIIYRSTKKTDLNDAEKLAWIIKRLPLKELPVVALPTEEEESRRSMVSELHFEKRLRTMQINRLHSIFTRVGQTEIRKKHLATIEARKESIQSLPGRAHREALRLLEVICLIENHIQLIEEEMAVSLSGEELAEHLLSMPGVGIQTAMAFLAHVGDGSRFSKGRQVSNYVGMTPRIYSSGETERMGHISKHGCLALRSIIVQSAWSAVHTRRSNVFKTKYEELVPRIGKKRAIVAIARRMLETMWILVTRKEDFRGYDEFSKRLKLRKIQIKVERLEKTGLVA

SEQ ID NO: 226582 - protein, 356 aa, unidentified
MTNVKTNFTEQTIYVGLDVHKRSWNAALFLNDHYLRNVHQPPSPQALWKFLQTNYPGADYVCAYEGGKFGYWIQRQLSGNGILCIVVNPADIPSTHKDEVSKTDTRDARAIAMALQCGQLRGIYIPTQQQEADRSLVRHRKKIWRDLVRCKNRIKGFLDYTGVELPDKFSNSNWSRIFLQWLSAIKYDYVSNRVTLDYMIREAELLRKELLHISNDIRKLMRSSAYKKMYYLLRTITGIGPITAALLITEIGDMKRFSSFYQLNSFIGLLPSEHSSGEKELKGRLTIRRHRQLRSDLVECAWTAKRTDPALSLFYSDQLKRGKESKLIIVKIARKLLSRIRCVWLTEKPYERGIMK

SEQ ID NO: 226583 - protein, 345 aa, unidentified
MEIHTIGIDLGKTVFHLVGLDARGEVVVRKKCSRNQILGFTANLHVSLIGMEACGGAHFLARALREQGHDARLMPAKYVKPYVKTNKNDYIDAEAIAEAVGRPRMRFVSIKTDDQLDLQSLHRVRERWVSGRTAVINQIRGLLLERGITIRKGRHHIEESLPGILEDADNKLSGALRVLLTQLRLEMQYLQGQIDESDKLIQRIAGELEDCRRMVSVPGIGPLTATATIAAIGNGSAFKKGRGFAAWLGVVPGEHSTGGKQTLTDTSRRGNRYLRKLFVQGAHAVLQQRMKQSNGLNTWLAQLTSRKRIQVAAVALANKMARMVWAVLSKGEAYRPPLWIETAAV

SEQ ID NO: 226584 - protein, 390 aa, unidentified
MPLDHHSEEPTAIRTNLGAIFVSLELSRSTWLITSLSPGGGEKMSKHSVSAGDIAALLSRFSELKQKAFARMGQSFPIIVIQEAGLDGFWIHRVLQSEGIESYVVDAASIATSRRRRRAKTDRIDGEALVRALLAYKRGEPRVCAMVRAPTPEDEDRRRLCRERKTLTVERVQHVNRIKGLLFSQGVSGYEPLRRNRRQRLGELKTGDGRPLPPHLKSQIGRELDRLELLLGQIKAVEAERDALLTPATETEGMPAPQAMLIDLRGIGAEFAAVVWSEGLCRSFANRRQVAAYGGLAPTPWQSGSVAREQGVSKAGNPRLRTTMIQLAWLWLRHQPNSALAQWFKERVKRNGGRLRKTTIVALARKLLVALWKYVTAGVVVEGAVMKAVS

SEQ ID NO: 226585 - protein, 413 aa, unidentified
MMNPVVGLDVSKGESQVQAFLDKGKPYRKSFSIKHTLDGLDSLLEFLKDIEKLANGKQPAVILESTGQYHMPVIQFLEEQQYVYIIVNPLISHRARSTNLRKVKTDAIDAFHLCELFYKEELEPYKRRGIQLLNLRNLTRQQETVSSTAAQTKLQLQSILDQVFPEYRGVFGNLYSKISLQILSIFPTSKEVLSVSESELTNKIAELCTTRSEKWAKEKAIKLREAALRNPFQNNLYQSHIFNLRMFINIVLQYQEHLSKLATEIDALAKEIEEYGIIQSIPGVGEKIAATIISEIGEIERFNHPKKLVAFAGIDPSVYSSGRFTASINRITKRGSSRLRQALFMAVQCGIRDARKQKTSEEIIPRNKKLREFYDKKREEGKPFRVAIIACANKLLHWIYALLKRKEAFQNAV

SEQ ID NO: 226586 - protein, 343 aa, unidentified
MEYYVGLDVSLKRTSICVVDQTGSVVREGVVDSDPEAISVYVRSKAPGAVRIGLETGPTSTWLWTELKRFGLPVICIDARHAKAVLKMQINKNDRNDAIGIARIMQTGWFKEVHVKDIDSHSVRALLASRALLVKIKRDLENHVRGLLKNLGLVIGRATFNVFAARAEELIEGRPDLVAAVRPLLEARNAVEQQVSELDRKVMKLARRDAQVQRFMTVPGVGPITALAFKATIDDPARFARSRSVGAYVGLTSRRHASGEIDWSGRISKCGDAMLRSYLFEAAGVLLTRVPKWSTVKAWGMRLAKRNGLRKAKVAVARKLAVILHRMWIDGTEFNWPKKEIAA

SEQ ID NO: 226587 - protein, 355 aa, unidentified
MDNTKYIGMDVHTETISIAVLNSAGKLVMESVIETKALTVIQFVQGLRGDLQVTLEEGTWAAWLYDLLRPHVNQVLVCDPRQNAFLKVGNKSDKIDARKLAELLRSNLLRPVYHGEHGVRTLKELSRSYVAISGDLARVMTRLKAVYRSWAIPCAGKQIYAPRYRGEWLGKLSEAGVRRRAEIYYEQFDALRSLRQQVRRELLAESAKHKASKLLCQIPSIGPIRAAQLIAILQTPYRFRTKRQLWAYGGLAIETHSSADHRYVEGQLRAAKKQVSLRGLNRNHNHELKNIFKGAATRAAAVRGPLQEFHAGLVARGMKPTMARLTLARKIAAITLIVWKKGVGFDAEHLKQQAA

SEQ ID NO: 226588 - protein, 314 aa, unidentified
MSEPTLFIGIDVSKASLDVAVHPTRESWTLSNDPVGLQALVHRLRGLPIKLIVFEATGGYETLAAATLAEAGLPVAIVNPRRARRFAEAMGHLAKTDKIDAHVLANYARTLTPNPRPLPDEESRQLSALLTRRRQIVEMLTAEKNRLHTARRPVQERIREHIAWLEQDLHDLDQDLQQRIRQSPLWQEKDHLLRSVPGVGPVLSLTLLAELPELGQVDRKQIAALVGVAPLNHDSGRQQGRRLIWGGRASVRAALYMGALVATRHNPVIRALYQRLLAAGKAKKVALVACMHKLLIILNAMLKNETPWRCPSAT

SEQ ID NO: 226589 - protein, 337 aa, unidentified
MALYCGIDLHATNSVMAVSDEQDKIVFEKRLPNDLPQILGALQPYQSELVGCVVESTYNWYWLVDGLMEAGFTVHLAHTGAIPQYAGLKYTNDQSDARHLAHLLRLGILPEGYIQPKEHRAVRDLLRRRLLLVRQKTLHHLSLQSLITRYTGQRLSANQIKQLQAKDVSEHLAEPVVLGGQISCLAMHWLEEAIALLEREVFKHLKPRIEFQLLTTMPGVGQALGSTIALETGGIERFPGPGHYASYARCVKTEKLSNGKRQGHGNGKNGNKYLAWAFMEAAHYAPIWSPPIKRYSPRKQARSHILVAKKAVANKLTRARYHMLSKQEPFDVKRAFG

SEQ ID NO: 226590 - protein, 355 aa, unidentified
MTSTKYIGMDVHKESISIAVRNDAGKVVMECVIETKASMILQFIEGLRGDLHVTFEEGTAATWLYDLLKSHVTRLVVCNPRRNALLKVGNKDDRIDAGKLSELLRGNQLHPVYHGEHGLRALKELVRSYLTISKDLARVMTRVKALYRSWGIPCSGTQVYSRLYRVVWLSKITEPGVGLRAAFYFQQLDALRELRQEVRRELLAESKKHTAWKRLCQIPAMGPIRAAVALGILQTPHRFRTKRQLWSLSGFAIETRSSADHRQVNGQLQKVKKRVSIRGLNQNHNHDLKNLFKGAAVLASTKPGPFREFYAGLLAKGMRPEMARLTLARKIATIVLIVWKKGVCFDAQYLKPQTA

SEQ ID NO: 226591 - protein, 428 aa, unidentified
MKYNTQNAKIKSITEKTLIVGIDVGSETHFARAFDWRNYEYSKKPLEFSNTEAGFMTLKAWMADLVEKYGKNVVIPGMEPTGHYWFNLGAYLQDNGMKPVHVNPHHVKKSKELDDNNPNKNDRKDPKTIAALVNEGRFSYPYIPTGIYAEIRSLSNLRLQTQEEITRIKNRIARWFSIYFPEIKDVYRNPDSVSGLMILKEAPLPQDIVKLGVDGINKIWRDAKLRAAGLKRAKTLVTAAEHSIGSQEAPDSARIELKNLLNDYEIYKNREEDLMSLTEEKLSEIPHIDKLLEIKGVGLKTVSGFVAEVGDITRFDNPKQLQKLAGYAIVECSSGKHKGESHISYRGRKRLRYVLYEAAISLIARNEEFKEVHRYYRTRKENPLKKMQSVIAVACKVLRIFYTILTKGVTYDGAKMMQDIKRPQMLAA

SEQ ID NO: 226592 - protein, 444 aa, unidentified
MKVIYKQVAGLDVHKKTVVAARMRVTEEDRVEWETKTFGTTTPDLLEMHDWLSEWELTHVAMESTGDYWKPVFNILEDSFEVWLVNAEHVKHVSGRKTDVKDSEWLAELMLHGLLKPSFIPPKPQRALRELTRYRTRLVEERARVVNRVQKLLEGANIKLSSVASNIMGVSARAMLEEIMAGQTDVELIADLARGQMRSKIPELEKALTGIVQPHHRFVLAQQLDHIDFLDEKVETLSLRIEQQLETMNWPDEPSPPDAGEGAEEGTAVADESELPVTWNAAVALLDTIPGVNRRVAEVMLAEMGLDMSQFPTADHLASWAGLAPGNHQSGGKRYSGRTTNGNKPLASTMVQAAWSAVRIKDTFLKSRFHSLAARRGKKRAIVAVAHSMLVSAWHMLANQQPYQELGGDYFDQRKKETKVSYLVRRLEKLTGGSVSIELQPAVA

SEQ ID NO: 226593 - protein, 339 aa, unidentified
MELYAGLDLHSRNTYIGIMDNAFNRVFKKRVPNHLEHILQALDPFRDQIKGFVVESTYNWYWLVDGLMDAGYSYAHLANPSAIKQYEGLKHSDDQHDAFFLAQLLILGILPQGYIYPKKDRPVRDLARKRMFLVQHKTAHILSLQSFLQRCCARKVRANDMRHLTVEELEMWLEEEHLVLSAQANLDSINFLKQKIKQLEKAIIQKVKLDKAFEYLLTVPGIGNILAMTIMLEVGDIKRFSKVGNFTSYCRCVPSRRLSDGKTKGYGNRKNGNRYLSWAFTEAAQLGRRHNERFRKYYNRKVAQANTSLATKALGNKLARICYYIMRDQVPFREELFCH

SEQ ID NO: 226594 - protein, 348 aa, unidentified
MAEVTTIGLDIAKHVFQAHGVDADGHKVFSRRLTRAKVLEFFSAQPRSLVALEACGGAHHWVRELAKLGHDVRLIPPAYVKPFVKRNQKNDANDAEAISEAAQRPNMRFVAVKSEEQQASALVFRTRDLLVRQRTQLINAIRGHMAEYGWVAPKGRMWMASLREVIDSDNSLPVAARDMLRVMLVMLDGLDGLDGLDFQIADLDKEIARRAREDEDVRRLMTIPGIGPIAATAICALAPPAETFARGRDFAAWVGLTPLQKSTGGKPRQRRTTKMGERTLRRLLIIGASTLIRHASKKGPTEGGWLASMLTRKPRMLVTVAQANKTARIVWAVLTKKEDYRASVAAAV

SEQ ID NO: 226595 - protein, 297 aa, unidentified
MDYFAGLDVSVKETSVCIVDDAGKIVREARMASEPEALLQVLTNTIYRLKRVGLEAGPLSQWLYSVLAEAGLPVICVETRHMRAVLKAQINKTDRNDARGIAQMMRVGLYRPVHVKTLRSQKLRMLLTHRKLLQSKAIAIENDLRATLRNFGLKVGIVGTVKFEARIKELVAKLPDVALLVEPLLVVRRVLREQVGILHRRLLAAVRDDDVCRRLMTIPGVGPVVALTYRVTVDVPARFRNSKAVGAVFGLTPAKYQSGENDRTGAISRCGDEMMRMMLYEAAQSMLVRSTPWPSDA

SEQ ID NO: 226596 - protein, 349 aa, unidentified
MVDDRVIGGVDTHGEFHHAVVLDRIGRRLADQKFGATQTGYSAMLAWFRSHGSLEVVGIEGTGAYGAGLARHLHGEGVQVVEVARPDRRARRQFGKSDPIDAEAAARSVLAGTATTTPKLARGAIESIRMLAITRSGAVKANTSAMNTLRALVITAPEPLRAQLAGLTRGRLVTACRRFRPDGTRLSDPVNAAKASMKSVADRITQLGKEAKELEGQMKALLAVTAPATVGVFGLGTDTAAALVTMVGDNPERLRSEAALARLAGAAPIPASSGQTQRHRLHRGGDRSANRALHVAVIVRLRYCERTRAYAARRRTDGLSTLEVIRCLKRYLVREVFAALRADFAQSAP

SEQ ID NO: 226597 - protein, 443 aa, unidentified
MSRKTRTHLRGKRGQAFADRIRGIPSEQILCVSLDISKYFHVVMIHDASGDIVTPVFEIGILETGFDRLCQAIDEAVLRTRTQLVLLGMEPTSHYFENLARHLLQRPQPVKLINSFAVSKNRDQHMMHREKSDEIDAAAIGDLLRRGEGTPYRPPTGVYLQLQHLDRVRLSKVKIQTMLKNQILGHLDRIFPGLVISDDSAKERYTPLFTTYFWSCRTLQHLIRVCPDPHQLSAMSIQDLIHAFHAQDYPLGPARSGKIIAHAKKALLPDPELVAIRSELLQHDLALLDAVEHHIGSMAAREIALLAQTSYSIWTKLKGLSPIQVASLAAAMGDPAHYGYARQVFCRSGLTSGRDDSGVRQRKGKGKRVVKTGDVYLRRALMNAVATLLVHQPILNRYYHQLKQTKPAGVARVATARRATGILWATLRDQRPATLILKRGVTM

SEQ ID NO: 226598 - protein, 327 aa, unidentified
MAQKMDVVGIDVSKATLDAYALTSQQARQFANDPAGHQGLVAWLQELGVGVAVFEASGGYERAAARSLRRAGLVAHVVDPKRVRHYAQAAGQLAKTDRIDARMIAAFGAAFLLGKHSGAAGGDDPARQDLAELVGTRQVLVDHRTGLQQQADAVTSAIAKKLLLAPLKQLDRQIETCDRQIAAAIARHEPFAALARRLDTVPGLGPVSIAALIAWLPELGQLDRRQLAALVGVAPFADDSGKRTGQRHIQGGRMKLRNVLYMATVGAATRHNPVLQARYRRLLENGKKPKVALIACLRTLLTILNAMVAHQQDWNPTKLPATEPVAA

SEQ ID NO: 226599 - protein, 328 aa, unidentified
MIIIGCDYHPAFQQIAFVDTDTGELQERRLQHREEAEKFYRDLAAQGMKVRVGMEASGHGRWFERLLAELNFELWIGDAAEIRAKRVRKQKTDRQDAQHILRLLLEDRFPQIWVPSWENRDLRQLLWHRHRMVQARTRIRGREQLEAFRLAPWASRRRHDLLELLDRLTPTIAELTQAIEQEVEKCPEAQRLQTHPGVGALTALAFVLIIGKAERFQCGKQIASYLGLVPLEKSSGNQRRLGHITKQGSSLLRFLLVEAAQVTARSLPEWRSKYYHLTMRRGRKIAKVAMARKLAVRLYWMMRKEWDYGQLTKFGSHGGKLGTGDGVQ

SEQ ID NO: 226600 - protein, 413 aa, unidentified
MSLTPAPVPARVCAGLDWASVDHAVCILEPDGSVLERFFVIHDAAGLKTLVRRLLKAGVDEVGIERGDGPVVDALLQAGLTVLVIAPGQVKNLRSRYGSAGNKDDRFDAYVLADVVRTDRARLRPLVRDSAATTAMRTTVRARRDLVEHRVAAANQLRAHLQLVFPGAASLFAAIDTAINLSFLERFTTQAQADWLSPKRLATWLRSVSYSGRTDPEVLHARLLAAPRGTTGADAEVHAATTSAYVTLLRVLNTQIAALEDNLAAQLAVHPDTHVFTSLPRARTLRVARLIGEIGDARGKFPTAASLAALAGVAPSTRQSGKVKAVTFRWGCNKQLRDALCDFAGDSRHDNPWAADLYDRAIARGHDHPHAVRILGRAWAHVIWHCWHQGLSYDPNQHRALQHVLAQAAHLAA

SEQ ID NO: 226601 - protein, 536 aa, unidentified
MADKKRNTQRKHIRSEGAYSLDEIRSLTMDDGTRVITSADGDIKRPVCAGIDVHKEILMAAVCKTDPKTLNAVFYVRQFKSTNSDIRTMGAWFQSHGVQDVCMESTGKYWIPVFNILEQCGQRPVLTHPKYVKQAKGQKTDFRDAVHIASMFRMDLVVASFIPPADIRDLRELCRYRLKLTYMRTSEKNRFQNSMTVSKVRLDCVFSDPFGKSASSIMEYLIMTEPEDVSDKQILSMVDRRVKASGEDILDSIHGYEFIGIQRDKLKVINLHLGQINECIRLIDEKLDYFRQKYSRIIRHLATMVGVTEESALYILGEIGTDMSVWRDDASLASWAGLSPANNASAGKKKSTRTGDGGHYLKPLLVQCALAAAKSTKKDPYFHYKYETLKKRRGHKKAIIAIARKMLVAIYHMIRDDADFLPVDHEEVLHSTKKQKGLNLDNVIAFLKEQGADDDTLRLVERQCGAQEMDAAEEMESVSSAEKKQSVSGSAATSQPIQESVNGSPVLISGSKQGRALNHHPKDPAVATATAQNELL

SEQ ID NO: 226602 - protein, 346 aa, unidentified
MGMDISVLGVDIGKNVCSVVGLDPSGAVVMRRRVRRETLIALAEKLPACIVGMEACCGAHHLGRVFAAHGHDVRLMSPEYVRPYVKAQKNDDRDAEGIAEAVTRPTMRFVELKSQDQLDMQTLHRSRDRLVGERTALINQLRAILLERGFIAPQGKRKLEQFLAVLMDEQGGAGLTPRMILLVADARAQWAELDRRIAAFDAEFVRWVKENEEARRLTTIPGIGAIVASALVAAIGQAESFDRGRDLAAWLGLVPRQFTTGGKPKLLGISKRGNKYLRRQLIHGARAALPYVADRDTPLGRWAKDLLSRAHRNVAIVAFANKLARIAWAVLRRQERFAAIRTPAAA

SEQ ID NO: 226603 - protein, 346 aa, unidentified
MLHAGLDLSRKRLDFCLLDESGDRVEVGAAPPDGDGLRSLARRLALHGQPLRAAIESMNGARFVHDQLELAGWQVEIADALKVKGLAPLACKTDRIDAWVLAELSRRDLVPAIWLPDPEVRAERERARFRLHLVRHRTSLKQRVHAVLLAHGKPCPVSDLFGVAGRALLQRLALPEPWAGTVTASLQLIDELDQQITGCESELRQLGADHRYIPLLLTVPGIGWLLAYTIAAEIGDIDRFAAPRQLAGYTGLCPRVYQSGNSDRRGPLAKNGPRYLRWALIEATAHACKHPLYRDHYQRTKARLGKQRGAKVAQVDLARKLAEAIWHMLTRNQPFAPASATNPLAA

SEQ ID NO: 226604 - protein, 341 aa, unidentified
MEQYVGLDVSMEETSMCVMDATGSVIWEGKTETEPTALVRALHRRAPEAVRVGLESGPLSTWLWHALRSEGVAVVCVDARHAQAALSMQINKTDRNDAQGLAQLMRMGWYREVKVKGLPAHADGALLASRALLVRQRCELENQIRGLLKNFGLRVKATKGRAFEQSAVALAAKQPVLGEVVRALLAVWSSLRLQIEVLTRQVRNEVAGDAVCRRLMTMPGVGPMTALAFRTVIDDPTRFRHSASVGAYLGLTPRRYSSGEIDRMGHISRCGDPLARSYLFEAANIMLGRNRKANPLKSWGAKLAKRAGFKKARVALARKMAVVLHRMWLDGTDFGAPMVNV

SEQ ID NO: 226605 - protein, 359 aa, unidentified
MIVVGIDPHMKTHTAVAVDAGTGRSIAEKTVSGDERGHDELLCWVRELGAERYFAVEDCRHVSGRLERHLLPRGERVVRVPPKMMAGARSSARCYGKSDPIDAACVARAALREPTLPEAGLAGPEHDVRLLTDHRDDLVKERARIQKRLRWHCHDLEVGLDLPPRVLDRYVWLDRLEEALCGLPESTRRRIAVDQVCACRESTRKIRALEREIRDHIRTLAPELLGLPGCSAICAAQLIGQTAGASRFGGVAAFAMHVGTAPLPVSSGKSERHRLNRTGNRCLNSTIHVIAVTQARMHPPAIAYMERKRAEGMSTREALRCLKRHITRTVFKTMLRAEKTRSATVIVAEFSAGNVAVAV

SEQ ID NO: 226606 - protein, 362 aa, unidentified
MESMRWVGVDVHAKESVAAVLDQATGEISTHRVAGRPDEVLEWLATLTQPFRAVYEAGPTGYGLVRRAQVRGLDVVVCAPGHILKNANDHIKVDKRDAVRLARLLSAGELRLVRIPQPDEEQLRDLVRSREDVRVDLTRIRNRIGKFLLRRELYPPKHAESWGVLHRKWLQQLRFEDRASELVFEDALHAHEILVARREQLEQALAEIAESSIWSGTVARLRCLRGIDTLSALGLVAEVGDFRRFVHPRFLSSYLGLVPSEHSSGEKRRQGGITKAGSKHARRLLVEAAWQYRHRPHISHHISQRQQGQDQRVIDIAWRAQRRLYKRWQRLYEERRKRSTVVAVAVGRELAAYCWEVATLTG

SEQ ID NO: 226607 - protein, 340 aa, unidentified
MRMFAGLDVGFKRTAVCVVDEAGRIVWRGVVDTHPAALCGALQRWGGKLAKIGLESGSMTPWLARELAKAGFPVVCMDARAAADAVKSRRVKSDKADAYALAEMLRTGWYRAVYVKSEDSHRLKAMLGARDQLVRAKRALGNQVRGLLRPFGIRLPSRQGTKKFAEAAHQAVRRDNMLHASVTALLETLAAIEGQIARLDEQLKELARRSPVCWRLMSVPGVGPIVALAFMAAIEDINRFRRMRSVGAYLGLTTRRYQSGETDVVLGISRQGDAMARHYLYEAANVLLTTVRSPSALKSWGLKLMKRRGPKRARVAVARRLAILLGRIWKDKTHFDAVPA

SEQ ID NO: 226608 - protein, 342 aa, unidentified
MQISTIGVDIGKNSFHFVGFDARGGIVIRRQCSRTQLIRALANLPPCLVGMEACCGAHHLGRMLVAQGHDVRLIPPQYVKPFVKSHKNDLLDAEAIGEAVQRPTMRFVPLKTMAQLDLQAIHRLRTRLVARRTAVINQMRGFLLERGVTFPIGREALVKRFPEVLDNPALGLSVRFCRLLKQLRDEWRLLDDDIEDVDQEILSLARDDEACDRLMQVPGIGPLTATALVAAVGNGAAFAKGRDLAAWLGLVPRQHSTGGKTVLRGISKRGNAYLRCLFIHGARSVCRHHHQKPHPLGRWLTSLEARAHPNVVVVALANKLVRTAWAVLQRNTHYDGRLLANA

SEQ ID NO: 226609 - protein, 345 aa, unidentified
MSMVSGVIGGVDTHADVHVAAAVDRNGGVLGIESFPTDTVGYETLTGWLAGFGPVVKVGVEGTGSYGVGLSRYLHSEGVEVVEVDRQNRQARRRFGKSDPVDAVSAARAALSGTASVTPKGRNGPVEQMRVLLVARRSARRQCNQTLNQLRQVVITGPDEIRARFKDRAKAGLVSEAARMRPRKGNDPVTYTTYVVIRGLARRIKDLNDEMRSIDGALKELIDVTAPSLIECHGIGTDTAATLLVTAGDNPDRLHTERSWAHLCGVTPVSTGSGKTSGRVRLNHGGDRQANAALYRIVLTRMSSDAETRNYVRRRRAEGLSTREIMRCLKRYVARQTFKHLPRVA

SEQ ID NO: 226610 - protein, 349 aa, unidentified
MEHYAGIDVSLELSSVCIVDAKGKIVREAKVASDPDALVAFFKQLGFPVVRIGLEAGPLSQWLYAGLAQAGFEAVLLETRHVKAALLAMTVKTDRKDARGIAQLIRMGWFRPVHCKSPGSQEVRALLVARKQLLGKLLDVELSIRGILRGFGLKMGVVTRKTFEARARELSSGQTMLETVVGAMLTARAALQSEYAKLHKTMLVIVRDDKICRRLMTVPGVGPVVAITFKTAVDDPTRILKSKAVGPLFGLTPKKYQSGETDVTGGITCVGDMMVRTALYEAANILLSRVTRFSALKRGHGGGETARIEAGQGRAHAQDRRDFASHVGRWDGFPMDEGGVGLGRRGALS

SEQ ID NO: 226611 - protein, 353 aa, unidentified
MSSDKYIALDVHQATTVTSVLNAAGREVDQSVIATKSQPIRSYLEGFSGPLHVTLEEGTYAAWLYDLLEGRVAELVVCDPRHNALLKEGSKTDRNDARKLADLLRTGMLRPVYHGRQSLRPLQELVHSYEALVEDTTRAMNRIKALYRRRGIDGAGRGVYTQKQRASWLEKLPAGASRLRGQLLHEQLDHTRSLRRQARLALLQESRKHPISARLREVPGLGPLRVARLIAWIQTPHRFRTRRQFWSYCGLGLVIFDSGEYRLVKGRVVRRAQPVKIRGLNRNHQPRLKEIFKSAALSAIRQPGPFKEYYDQRVQQGRDPALLRLSVARKLAALVLSLWKKGGRYRAEDVKQA

SEQ ID NO: 226612 - protein, 382 aa, unidentified
MSAERANDCYVALELSQRTWLIGYLLPGSDKLQTTAVAGGNAEALLSALGRIESLARARSHAGCALGSMRVCFEAGYDSFWLARFLIDRDIDTTILDPSSFLVSRRGRRVKTDRVDVEAMVLTLKAYLLGDRSVCRPVRLPSVAEEDAKRLSRERTQLKKERTRHVNRIRALLVLHGIRSVPGLWGGRWKEALSNIRTGDGRELERFIFRELCPQFERLDLVHSQLKSLEKKRIQACETEGAINGNAKIRVLKQLDGIGEVGATQLVVEVFHRTFKNRKHLASYLGLSPSPYSSGEVHRDQGISKAGNKQARVMLVELACCWLKYQPQSQLTRCYRSRFSGHGSRSGKVGIVALARKLAIALWRFIEDGEVPEGATLAVAAK

SEQ ID NO: 226613 - protein, 394 aa, unidentified
MFLVGIDIGKHKHSFCIINKETGESIVKPKFFNNNKVGFEELLFSFKGLPKKDILIGMEDTGHYHFALLKFLLDKKYQVALINPVTTDLTRKLSGSHTKTDKLDTLTICDILTSNQRTKPYRISKVDRFDLYEQKQLTREHHNLKEQSNVLKNRLQKSIDIVFPEFNSLFKSMYGVVYMNILKEFGSADALAHSDIRTIRKCFDFKGRGKRIELTAKELKNAAINSIGFPSIAEVVQIKHLVNQIELVEEQIEELDKKIEEFSIANNSPILSIPGISHFSGTSILAELGDIHNYSKPSQIIKFAGVAPLTYESSQFMAKHTAITKKGSTYLRKTLYQIIIPVINNNKVFKDYYNLKLSQGKGYRCAQGHCVRKLLRVIFQLLSTNTQFDPALLV

SEQ ID NO: 226614 - protein, 364 aa, unidentified
MKRKVYVGMDVHKETIRIANLTSNTKEIVKEQQIKHNEVQIKKFVNKLKSEWNEIHSCYEAGVTGYPLYRYLKSLGVNCILVAPGKIPRQSSDKIKTDKRDAIKLAKLLRSGELESIHVPSEEDEAVRDYLRSRDSLRLDLGRNRQRLMKFLLRKGITYSKTKYWTVSHNKWLNTLQFNNEILQETFNDYYSRVRVQEENLKAMDKRIQEIAESEPYREKVGILRCFRGVDYLTAMFLLCEVCDFKRFKTAGSFMSFLGLVPGEYSSGSKRKQTGITKTGSPRLRRILTEAAWQHRFPGTGSKVVTARRSGQPALVVALAEKASLRLHKKFRNLQQRGKTPQVIITAVSRELSGFLWAAMNLVA

SEQ ID NO: 226615 - protein, 356 aa, unidentified
MTPLLNYIAQDFDAMIGIDVAARTSSLAQWHNNSMTRTITMPSKPDYIANYISKVYPNKRVLCAYEAGPTGFGLHDYLIKQGIDCIVISASSLPKPANSRVKTNRIDAQRITLHLKNGEAKPIRVPEGAWRGLRELIRSRESYAKLQRTSKQRIKSLLLAQSLNYAMQDADKNWSGRYISQLKELECTDPVRKRLLFLMEDLVYAKTQNARALKELRVYVSEHSDISRNMKYLMSIPGIGFITAVSVLGNIGDPSYLNNPRELGCFAGLVPSESSTGDDVKRGSITHLGNTNLRVLLIEASWTTIRKDSRLCQFYHRIRLRHPANIGPQKAITAVARKLTMIIYRVLKDQRDYIPY

SEQ ID NO: 226616 - protein, 375 aa, unidentified
MVLAPTPQLWEVPTMSESMALVGLDVHKAQTVAAVLDPVSGELRVERLRGEPASVVPVFLEELDRPVAAVYEAGPTGFALARVAEQRGLDIRVVAPGSIPRAPGDRVKTDRRDAKRLVRLFAAGELSYAFVPSEVDERFRDLVRCVEDARKDLMRSRHRLSKFLLRRGQRFPCKAWTQPHDAWLAKLRFEDPLSQATFVDYLCAVQALVARRRALIAVLEQAVPDSSHATTVARLRCFRGIDTLTAAGLCAEVGDFHRFSKPALLSGFLGVVPSEYTSDDKRTQGQITKAGPPHARRLLVEAAHHYRYRPVVGVGLKARQAGQDPRVIQIAWRCQRRLHERWSHLAGTRGKRTGTVAIACARELAAFCWEAATLD

SEQ ID NO: 226617 - protein, 388 aa, unidentified
MNKIIYIGMDVHSSNFTLCSFEPGYGFKADKIFGQTQIKEDIFNSTVKYINKLKSMRPDVDVVCGYEAGGLGYSLHRKLKAKEIESVILAPTTMAVAINSSKKKNDYRDAITIAKCLASSAYKAVYIPDEKDEDVRDFIRMRDDHKTALKQIKQQLNAFCLRHGHHYDKPKWTGLHLNWLRKLELSKVQRETVEEYLATYEALTSKIAALDVRIEDIASEERYSEKVNKLKCIKGIKTHIALSFVCEIGDFNRFKSADKFSGFIGLVPGEYSSGNTERMLGITKAGNRHLRRLVVEISNTYRRGAVGRKSVALRERQKDMPKDVVAYADKATNRCQRKYQRMMFKGKNSNQAVAAVARELCCFIWGMMTGNYSRTAQAEASVYRSELD

SEQ ID NO: 226618 - protein, 334 aa, unidentified
MSDDCMYAGIDVSKDSLELVIRSSNQVSYLKSFANTKAGIRKVVSLITKPGLPCRVVVEPTSRYHVQVTLALAALPDCQVMLVNPLRARKFQEANGKRAKTDAIDARSLSKMAQKLEEDFIPYTPPADNIRELQLLGRRLANCVLQRARAKCRLKSYPVKDKVSNPCIASLKREIKFYKKEIARLLAKMQRIVDADAELRECYDLLLGIRGIARQSALQLLAELMALPAGMGPRQWVACAGLDPKPQQSGQHDPPMRISKMGNRYLKQVLFMAAMTTTHWDPQIKAYYDNLNNRKNSKRLAQVVVMRRLLHGFWHVIDRKQPFDASKCFAIPTS

SEQ ID NO: 226619 - protein, 341 aa, unidentified
MNATTYGLDIAKRVCQVYWVDAQTGEVANRRFARDEVIQFLARRPAGRVALEACGSAHWWARKIKALGHEVVLLHARFTRPFVQTNKTDAADARAIWTAVHQPGMRTVAAKTEHQQAMLSLHRMRSLLVKFRTMQVNQLRSMLYEFGATFRTGRAAGLTEIRERMAELEAALPPTILLNLQEQLRRVEGFERDIDQLEKRIGVCHRDDAECRAIAEVPGIGRLTATALVATMGDAGAFKSGREFASFIGLVPRQNGTGGKVRLGSISKRGDAYLRTLLIHGARSVLYHAKAAPTPWQKGIQERRPGNVATVALANKMARTAWAIMAHGKSYRRNPIGVSPA

SEQ ID NO: 226620 - protein, 446 aa, unidentified
MDPESREHPVLRHRRNRRARTLDFAHADSAPAAIAERRVMDILYPRCAGLDVHAGSVTACARIAAGGQVNYHHHTVSTTTAGLLALSEWLTGNGCSHVAMEATGVYWKPVWHVLESDFTLILANAMHIRNVPGRKSDMNDATWIANLLAHGLIRSSFVPPAPIQQLRDLTRTRKQLMRELTRHTQRIQKTLEDANLKITHVMSNIIGTSGRAILNALVAGETNPERLADLTAGRLKVTRTELVEALHGRVTDHHRFMIRLHLTQIDALDAAVRDIDARVGDALGPFRAAVSLLTTMPGLSDTTARVLVAEIGTDMTRFPSASHLVSWAGLCPRLDESAGKRRTTRTRQATPWLKTTLVTAAWAATRKKNGYLRAQFLRIQSRRGTKKAILAVASSMLTAAFYMLRDGVEYHDLGGQYFAHRDKEQTAKRLIQRLRDLGLVVEVSAA

SEQ ID NO: 226621 - protein, 323 aa, unidentified
MDKDIKYFGIDISHLVFDVTGPDGNHHQFRNNPSGFRKFSKLLDGDSHCVMEATGYYHYQLAYHLLESGIKVSVENPLSVKRFIQMKLSKVKTDKSDSRLICEYAKQVELKLWKGNSREQTECLQMARLLDVYTKQCTMIKNKLHGEEVLGNPSRAVVSSLNRSKKHIEKEMAELEKKLLMTVKRAHQEVLTCVKSIPGIGTKTGVMLIVLTGGFERFSSASELCSYAGLTPIIRNSGSSVNGRSRISKMGNQKLRSLLFMCSFSAVKYNRACKAIYDRIVAKGKSKKLALIAVCNKLLKQAFAVAKSRLKYDREYKSVLVKN

SEQ ID NO: 226622 - protein, 326 aa, unidentified
MEHELHYIGIDTAKEKLDVDVLRPDGRHRTKKFANTTKGHDELVSWLKGHKIDHAHICIEATGTYMEPVAECLYDAGYIVSVINPALGKAFAQSEGLRNKTDTVDARMLAEFCRQKRPAASEAPHPLERALRALVVRHQALTDMHTQELNRTETAREVQRPSIDAHLLWLEAELKRLEKQIKDLTDDDPDMKHRRKLLESIPGIGEKTSAVLLAYIGLKDRFAHARQFAAFAGLTPRRYESGSSVRGASRMSKAGHVSLRRALYMPAMVATSKTEWGRAFRDRLAANGKKGKVILGAMMRKLAQVAYGVLKSGVPFDASRHNPVAA

SEQ ID NO: 226623 - protein, 410 aa, unidentified
MEVLHPHCAGLDIHKDSVVACVRHRVDGKVTTEVKTFNTTTQELMALSDWLSAERVTHVAMEATGVYWKPVWHILSDGEFELVLANAAHVKNVPGRKTDVNDATWLADLMAHGLIRPSFVPDEPTQQMRDLLRTRKQFVRERTGHTQRIQKTLEDANIKLDSVISNIVGISGRRMIEALIDGQTAPEALAALAHGRLQATPVELEAALRGRVTAHHRFMLRLHLDHLDALDAAIARIDKEVEGNVEPFRVAIEMLTTIPGVSSLSAEVIVSEIGIDMSRFRTEGYLISWAGLCPKNDESAGKRRSTRMKKGAPWLKTTLVQCAWAATRTKGTYLHAQYLRLRSRRGAKRAIGAVAASILTAAYHMLKNGTLYQDLGANHFDHRAKGKHVLQLVNRLKNLGFAVQITPMAA

SEQ ID NO: 226624 - protein, 314 aa, unidentified
MSARAVFDVGIDVAKATLCVASEPAGLAGEFPNTPAGIEQLVAQCAAAPCTRIVLEATGGYEHAVVAALLAANQPVVVVNARQVRDFAKAIGRFAKTDAIDAAVLARYAAQVQPVVRRLPDVATTELALVVQRRRQLVEMLHTERQRALLLPSRGAVRSNLQAHIRWLEASLGETDTTLQALVEASPAWQTQTLLLRSVPGVGPVLAITLLADLPELGRLSRREIAALVGVAPFNRDSGTLRGRRTVWGGRPHIRTVLYMATLTATRCNHVLKAFYQRLCAQGKPKKVALVACMRKLLTILNAMLSHQRAWQSA

SEQ ID NO: 226625 - protein, 338 aa, unidentified
MKLYGGIDLHSSNNVIALLDEEDQSIYRKRLPNNLEYILGQLSPYREAIEGLVVESTYNWYWLVDGLMEAGYRLHLANTAEIVQYEGLKYSDDDTDACWLAKLLRLGLLPEGYIYPREERAVRDLMRRRSHLVHQRTSNLLSVQNLLARNLGVGLSGNRVKRLSFEEIDLLLPDEYLSLAVKSNVAVMGCLEEQIVQLERSAKARIKIKPAFKLLLNVNGIGDILGLTIMLETGDIARFPKVGNYASYCRCVGSERISNGKRKGRGNTKNGNKYLAWAYVEAANFAVRYHPLIKRYYQRKRARSNGVVAIKTVAHKLARACYYILRDQVEFDVRKAFS

SEQ ID NO: 226626 - protein, 360 aa, unidentified
MARRSRRPDKRRVVGGVDTHHDTHHAAVELMNGGRIADADFPATVEGYARLLAWMEGFGRIHAVGVEGTGSYGAGLTRYLRGQGVTVVEVNRPDRRQRRSVGKSDPLDAYAAADAVLAGRARALPKGNDGIAESIRVLHLTRTGAIKARTAAINELRAVLVTAPAQLREHLTGKPTPALISACARLRPGTDLTDPLHATKHALRALAHRHQHLTTEIDGLNLHLKALITQTRPDLLAIYGVGVETAAQLLITCGDNPDRLTTPAAFAALCGVAPIPASSGKTTRHRLSRGGDRQANRALYLITITRMSHCARTRTYIQRRTSQGKPKPEIIRCLKRYLARELYKALTSTNTTPSDLPAAA

SEQ ID NO: 226627 - protein, 422 aa, unidentified
MKEHVDLQQKWEETRMKHIFVGIDLHKRQHVAVFLNGFKRKLGEFKFDNKPNAFPLLLQEVKKYLKKGMKAIYGLEDTGGLGRALAVYLVEQKQTVKEVNPALANGVRKANPIARKSDEWDAECVGSVLVDKLESLPDANPIDQYWVIAQLVTTRTAIANEHRILVNQLHAQISHHYPSYRKFFSELDGKTSLAFFERYPAPHHLDGVSVQELREFLLVPSNYACSLKSAEKILNLVHEDGSTKRNYQEDRDFIIQSHIRRIRTCKEEMQAIEERLVILMKDTGYKLDTMYGVEVVTAASFVAEIGSIGRFSNADKLANFSGIAPVLYGSGDKHKHYKCKQGNRALHELFYRLACRQIGTKRGSGEPNNPYYYEYYQQKLAAGKTKTQAIICIMRKLVDVIYALMKNKTEYVMPAVQMKQAG

SEQ ID NO: 226628 - protein, 368 aa, unidentified
MSDIIRIGVDTSKSVFQLHGVDAAEQPVLRKKLRRRDLLAFFERLPATKVGMEACGGTYYWARELTAQGHEVKLMPPQHVKPYVRRGKNDRNDADAICEAMSRPRMSFVAIKTADQQAAQMLMTTRERLVAYRTQLINTIRGHAAEFGLTAAKGPAHVEPLLLRVAEDGKVPELAKELFAMHGQELSRLKIELREIEAKLKAWHRQNEMSRRLAEVDAIGPIGGCLLAIKAPDPQAFRCGRDFAAWMGLTPKDHSTAGKVRLGVITRAGDEALRRTLVVGATSVIKQVSQGKGNPSPWLRDLVARKPPKLAAVALANKVARIAWKLMADGERYDAARAGIVSPAARVAPCSRRQGRCAPPAAVACGQP

SEQ ID NO: 226629 - protein, 414 aa, unidentified
MKVVYPICCGVDVHKTFLVGTIISTTDGVQPHYQKKRFSTYNSYLHRFADWLHLNNCLDVCMESTGKYWVPVFNILEERSIRVTIANPKWVKAVKGNKDDTKDSKWIGDLFRLGLVPGSFIPSKKIRILREFTRYRYKLVSMKSSEKNRFQNAFTVCNIALDSVVSDMFGKSATVITNYLISEDSFNPEYCVSLLQRSLKKKSDSVLESIEGYSITDEQKLRMRIVRSHIDYITDAIAQVDSAIDTMVAEFENTISLLRTIPGVDRNSAITVISEIGNDMSRFGSAKRLCCWVGLTPGNNESAGKKKSVRITRAGVYLKPALVQVAHAAVKATDNSYYRLKYEHISKRRGKKRAIIAIVRMILSAIFQMMTTGEVWNPTDLFKVDMPDSLKERQLSKAVKQATKFLEKQGLTVS

SEQ ID NO: 226630 - protein, 338 aa, unidentified
MRLYCGIDLHSNNALTKVLDEGDRTVYSKRLPNDLGLIVSALEPYRPDLVGIAVESTFNWYWLVDGLMEWGYRVHLANPSAMRQYEGLKYTDDSSDAGWLARLLRLGLLPEGYIYPKEDRPLRDLLRKRIHLVRQRTANLLSLQNILHRNTGRRLSGRALMSLELEAVRAELGAGNLMMSVESTLQVLRCLDEQARRVEQEVLGQVRPDPVFRLLKTIPGVGEILATTIRLETGQIGRFASTGRYVSYCRAVGSQKLSNGKFKGQGNRKNGNAYLAWAWLEAANFGIRHHEMVRGWYQRKLSRTHRVVALKAVAHKLARAGYHVMRDGVPFEMPLAFG

SEQ ID NO: 226631 - protein, 340 aa, unidentified
MEITTVGLDLAKRVFQVHGVDATGGVVVRKALRRAQVLPFFGKLPPCLVGIEACGTSHHWARELIRLGHEVRLMPPAYVKPYVKRGKTDAADAEAICEAAQRPNMRYVAVKDEEQQARTVVFRARDLLVQQRTQVINALRGHLTEYGCIVPKGPARVARLIVWIEDPASQLPESARAVFKVLIDSLKVVDTQIAGLDAEIARRSREDPVARRLMTIPGIGPITATAITALAPPPETFRKGRDFAAWLGLTPLQKSTGGKQRLGAISKMGERTLRRLLIIGSSAVVHQACKRGAPAGSWLAQMLARKPRMLVTVALANKIARVVWALLAKGEVYRAPVAAA

SEQ ID NO: 226632 - protein, 319 aa, unidentified
MFNLGIDVAKAKLDCALRLPNGKHRNKVVENNDKGFVALSEWLLKQDAGSPRARMEATGTYWERVAEYLAGRGMLVSVINPAQIKAFGASRLVRTKTDKVDAQLIADFAHERQPEPWLAPSPAEQALRAMVLRLEALQTMRQQECNRLDVAREAVRQGIADHIAWLDGQIKELIQAIKRHIDDDPDLRGKSELLDTIPGLGERSIPVLLSYYANPERFDSAKQAVAFAGLDPRQHESGSSVRGKPRMSKVGHSFLRKALYMPAMVTVYRTAWGKRFGKRLSAAGKAPKLIIGAMMRKLVHVAFGVLRSGKIFDPALHAA

SEQ ID NO: 226633 - protein, 340 aa, unidentified
MTITTIGIDLAKNVFAVHGVDQNGKTVLVKSRVTRAALPGLIASLPPCVIGMEACSGAYYWARLFLQYGHEPRLMAAKFVSPYRMAGKSGKNDAADAQAICEAVRRPHMRFVPVKDESQQAMQCLHRNRQGFIEEKTATYNRLRGLISEFGVIAPQSTDALRHMVSAQKSSLPLQVQQCVDDLLEHVDRIEANITEYDRILSRIAKTDHRSQRLMKLKGVGPTTACALVACIGNAHDFKNGRQLAAWLGLTPSQYSSGGKSKLGRITKAGDSYLRTLLVQGARSVLIGAEKRTDLFSRWVCSLVERRGYWRAVVAIAAKNARLCWASLHYGDDFRRYSAC

SEQ ID NO: 226634 - protein, 316 aa, unidentified
MTTSAVVVGVDVAKDRLDVAVRPTGETWSTANDEAGITALVARLRPLGPGLVVCEATGGFERAAIAALAAAGFPVVVANPRQVRDFARATGQLAKTDQLDAGILALFAERVRPTPRPLPDAAAQLLDAVLTRRRQLLEMLVAEKNRLGFAPKPLHRGIHAHIRWLERQLDDVTTDLAGLIEASPVWRAKDDLLQSVPGVGPIVSSTLLGELPELGTLSHKQIAALVGVAPLARDSGTLRGKRMVWGGRASVRTALYMAALCGRRWNPQLKVFYERLKAAGKPTKVALIACARKLLTILNAMMRDQSPWTSNVQYSC

SEQ ID NO: 226635 - protein, 411 aa, unidentified
MVKENFIYVGIDLHKETHTAVMIDCYNQKLGEITFPNRPAAFPKLVTKVKKCNTDGKEVVYGLENAYGYGRALAVWLIDKGYLVKDVNTAISHRQAKHRGAMYRKSDSDDAKAIALATLNMLDKLPDACPNDAYWSLGQLVHRRDNIMKQRTRLVNQLHEQLCIAYPSYKQFFNDISRPTALYFWEHYPSRKYLKGKSVEDLRAELVPVSHNKCSTKTCEKILDAVASDKVKNNAYQDARDMVTLSIVSDLQHYDKQLAEVDKMLEQMYKMLGCTLTTIPGVNVITAVKILSEIGDIERFANANKLAQFAGIAPLHLSFSGKGKDVATKQGNRRLQATIYFLAIQMVQVSSKGTPRNPVVRAYYEKRKAEGKTSQQALICISRRLISIIYGMLKHGTEYRMPVVESAGENR

SEQ ID NO: 226636 - protein, 379 aa, unidentified
MATTKQALLNDTSVKLMLYMALELSASKWKVALADGQRAASQHTLVGGDVDGLLRLIDRAQKRCGLQGKVRVMSCYEAGRDGFWLHRWLLEQGIDNVVVDSSSIEVNRRARRAKSDTLDAAKLYEMLVRYVAGEKRVWRVVRVPSVQQEDERRLHRELERLKKERNAHVNRIRALAVLHNVRLQRVGGRGWSERLEELKGQLPAGMVAEIERQSARAQLVGEQIAALEKSRQEQLRAMIEQQQDGPLLALLKLRAIGVQTAWVLVRELFSWRRFSNRRELAGCVGLNPSPYDSGASQREQGISKAGNRRVRALLVEIAWYWLRYQPHSALSAWFNRRFGGAGKRMRRVGIVALARRLLIALWRYVEQGVIPEGAQLKRP

SEQ ID NO: 226637 - protein, 445 aa, unidentified
MFIQSQDDSHYCYSFFTKVVILMMKLKYSICCGLDVHKNVIVATIVITNKDGVSEYKQKSFSTISSDIQKFHNWLIENHCYHVCMESTGKYWIPIFNYLENDIEVCLTHPKYVKAIKGKKTDKKDSKWIADLYKFDLVRCSFIPPKDFRQLRELARYRFKLVCMKSSEKNRIQNCMTVSNVGIASVLSDPFGKTATEIMSYLLEHTADSIDEKAVRKLIKKGAKAKSDEIIEAIRGYNIETDQAKKLELARAHLDFLDDMITQTEVELYVRIKPYYEFVEFVSSMPGMTGLSSTIVLAETGVDMNIFDNAKHLCSWCGLSPANNESAGKKKSVRIAKAGDYLKPMMVQYALAAVKSRKQPYFAIKYGRIKKRRGHKKAIIAIARMMMVCIYHMVSEEKPFTPTDYEELMDPQNHVERVVLNENNVFAYLETLGYDSSKLVKRSDN

SEQ ID NO: 226638 - protein, 351 aa, unidentified
MKYYKTTTKYNCGIDLHTRCMYICVMDRDGNILVHRNIRNNDFDFFLKLVEAYKDDLTVTCESCFVCFWLADACEDAGIKFVLAHAFYVKSIAANKHKNDKEDARELAECLRTNRIPQAYVCPRDLRPVRKLLRRRNKYVKNRAELTGHSTCEVMAAGRQPLSISANSKERWQEGIRSSFDNPVDSFTAEAELEIIGSYDRVILKMEQRIEKHARDFRQQDYRLLRTAPGVGKILALTILYETIDIKRFPTVKDFISYCRLVAGTNESGGKDFGGKGRKMGNPYLKWAFMQSAILCKRADPKLNAYYERLERKKGKHTANAIIASKIARAVYFMLDCKTGFCVDQLIKGRR

SEQ ID NO: 226639 - protein, 350 aa, unidentified
MLIIGCDYHPGFQQIACVDTDGGELSERRLAHREQAEQFYRELKQQDLCVRVGMESSGHSRWFERLLHELGFELWIGDPAEIQTRRVRKQKTDRQDAQLLLRLMLENRFPRIWVPDAENRDLRQLLWHRHRLVQMRTRVMNQLHVVPLNEGLRRKKALWRPAGRKELESIALAPWASRRRRDLLDLLDQLTPKIEELTHALEEEVEKRPVTRLLMTHPGVGPLTALAYELVIGTPERFHCGKQLASYVGLVPEEKSSGDRRRLGHISKQGNVLLRFLLVEAAQVTVRSQQEWRNKFFHLAMRRGRKIAKVAMARKLAVHLYWMWRQGCDYGQTQKLGSYAGEPGHRDGVQ

SEQ ID NO: 226640 - protein, 424 aa, unidentified
MREEGLSMAEEIEWFVGIDWASQSHQVCLVDARGECLGERAVAHGGLGIEELCDWLIARTGATPEVIGVAIEMTQGPVVEALLERGFCVYGINPKQLDRFRDRFTVAGAKDDRRDAHVLADSLRTDRHAFRRLSNDEPVIVKLREWSRMADDLQQERARLASRMREQLWRYYPQMLELADDLAADWFLDLWNQAPSPAKAARLRQTTIERFVKAHRLRRWQAPEVLRILKQKPLSVAPGVVEAASDHIRTLTVRIRLVNQQLKAAHRKLDELCAQLVPSEEDEPGQQCEQRDVVILRSMPGLGRTILAVLLAEVWQPLRRRDYHALRSLSGVAPVTRRSGKTCVVVRRYACNKRLANALYHWARLATQHDELSRRRYAALRQRGHSHGRALRTVADRLLSVACTLLEQQTLFDPSYQVRDAAGA

SEQ ID NO: 226641 - protein, 452 aa, unidentified
MKKATPHLHKQKKFAAQVRPEPRPDAAGIDLGATVHYVAVPPDRDKQPVRSFGTQTGDLHALADWLIACKIKTVAMEATGVYWIPLFQILEDRGLEVCLVNARHVKNVPGRKTDVQDCQWLQYLHAMGLLQASFRPPAAVCAVRALVRHRDSLVRTGCEHLLRVQKALDQMNVQVHRAVTDLTGETGLAIIEAIIKGERDPAVLAQHRNYRCKQSEAQIAAALRGDWRPEHLFTMRQSFEAWQYHQKLIAECETELRKQMDGLTDQTKEAAPAKVRPNKRCDEKTRQHLFEKFGVDLTAVDPVNVQTAYVFLSEVGPDVSKFETADHFVSWLGVCPNNRKTGGRHIGVATRAVANRLATALRLAAQSLHRVESPLGDWFRRLKAKLGPKAATTAAAHKLARVLYAMIKTRTPFDPARLGNPSLRQARKENALRRAAKQLGYELHAIQPVAVS

SEQ ID NO: 226642 - protein, 422 aa, unidentified
MNAKLIETKPKLFIGIDWADKEHVLHLISSENNKHSTEKLQQQPEAIAEWVKQLRQRFPEHRLMVILEQSRGALFAALAEYSELELYPVNPKQLSRYRDSFFPSGGKNDPVDAKLLANFLKERHEGWRQWRPDDLCTRQMSQYSELRRKLVEERKRLLLKLQSTLKEYFPQALALFKTEMQDEQNLDLLKRWPSLQSLKRVKPQTLRRFLKEHRVKIEERQTEFIESVRSAKPLTKDQAIVKANGLYVQSLVQQIRVLNQSIGQFDEQLKELIKVHPDAEIFKSLPGAGEALVPRLIAAMGSDRDRYQSAKDVQCRVGIAPLTIQSGRSLQVQKRIACPKFLRQTFHEFADHARKWSPWAKAFYQMKRSQGMKHHAAIRALAYKWMRIIFRLWKAKTIYNENQYIQRLKATGSPIVNFLENS

SEQ ID NO: 226643 - protein, 429 aa, unidentified
MRAESTPGARGPVFCGVDTHADSHWLCVLDWRGRKVLSRRFPADAAGYEALAGAIAAAGEPACIAMEGTSSYGAGLTRHLASLGMPVREALSPARMQRRRPGQGKCDESDAERAARAAMSGSKLGTPKSQDGWVDGVRCMLAARSGAVKARTSAINTARSLLTTAPEGLRSRFRGMAGPRLMEELPSVRAEGALGAALGALADLWAAARDAALDMERAIEASLEENCPALLAMYGCGPVSAAKLAVAAGDNPGRLRSEASFAAICGACPIPASSGKTVRHRLNRGGDRQANSALHEIARQRVMRDPETAEYAERARARGKSDREVMRCLKRYVAREAYRALMRPHEVRRPEDASGLVAARRAARVSQVRAASILGTSEKYISMLERGQRELKPIRRAYEAWVEAGLPLDWDRQAFEAERKMDSKKHLAK

SEQ ID NO: 226644 - protein, 414 aa, unidentified
MDWTACVGIDWGDRKHAYEICERGGTRNRGEVESSPEAVHAWVRGLRERFPLGAIVVAVEHGRWSLLYLLMVYEFLILVPINPRASKTYRDSLRLSGASSDPYDAALICDFVMKHLSELRVWKPDDPITRKLRLLVEHRRGLVDQRTGFTHTLADTLKQYFPQALQWFGGEKSHLLRAILARWSTLDQLRTASLEDIASVMRAQRCRKIATAAKTVIEKIRAAVPLTSDTAIIDGYANYARSLAAVIDPLDVQVARYDELIAVEWAEHPYREIFDSLPGAGKVMAPRLAVAFGLDTSRYANPEEVQCYSGIAPVIEQSGRQSWTHARWGYPKFLHQTFHEFAQASIPHSAWAKAVYDEHREHDAGHHEAIRALAFRWIRILFSLWKNEEKYDEQRHIETLTKKQSPIVRRLTAA

SEQ ID NO: 226645 - protein, 413 aa, unidentified
MLFAGDDWAEDHHDVEIQDETGRKLAARRLPEGAAGIAALHELIAGHLGQNGDPGQVVVAIETDRGLWVQALVAAGYQVYGLNPKQVARFKERYNLSGAKSDAADAHALADMVRTERHQLRAVAADTPEAEAFKVVARAHQTLVWERTRHTLRLRSALLEFFPAALTAYAGLGLTGADTLELLVKAPDPASAARLSAAQITAALKRARRHNAAVKAAAIKDALRVQHLIQPAPITAAYAAAIRATASVLITLNEQISELEGQVEAHFRRHPDAVIYLSQPGIGTINGARVLAEFGDADGRYASARARKNYAGSSPITRASGRSKIVLARFVRNDRLADALQSQALSALTGSPGARAYYDKQRERGLGHNAALRQVSNRLVGILHGCLKTCTLYDEATAWPDHHATQHASRLAA

SEQ ID NO: 226646 - protein, 409 aa, unidentified
MRYYVGVDWADQTHAVWVVDESGTKITGRTVPHTAAGFSEWGRELDEWRAQGIERWAAIERPDGRVVDFLLDHGVVVYPVNPKALDRARDRFRQSGAKSDPFDARVLADFLRTDHRHLQALQPSSDAAQELKLLTEDCQRHIRQQTRLVNQLTATLKAYYPRALEVAELTTALAREFLQTYPTPEALTTLTARQWQRWARGRRVSAARIGALWAVLHQPQLPVPAHVVRAKARLMQSLVEQLTPVVTAVAQYRTAIDDFFARMPAAQWARTLPIGKHGITAPTLWARLGDAPGRWESFRHLQAQAGAVPVTKRSGKQRVVHFRFACDKSLRHVVGQVAFLSLLSSDWARAYYDQQRARGHAHHQALRALGAKWLKIIFVMWHRQVPYDEPYHLATMTRQQLRQRQTTIA

SEQ ID NO: 226647 - protein, 344 aa, unidentified
MDYFAGLDVSVKDTSVCIVDDAGKIVREVKVASEPEALLAVLKNPAYHFKRVGLEAGPLSQWLFSALAEAGLPVICVETRHMRAVLKAQINKTDRNDARGMAQMMRVGLYRPVHVKTLRSQKLRMLLTHRKLLQSKAIAIDNDLRGTLRNFGLKVGMVGTVRFEARIRELVENLPDLAALVEPLLIVRRTLREQFCILHRRLLAIVRDDEVCRRLMTTPGVGPVVSLTYRATVDAPARFRKSKSVGAVFGLTCAKYQSGEVDWSGRISRCGDEMMRVMLYEAAQSMMRSKKWSWLKAWAMQIARRRGMKKAIVALARRLAVIMHRMWVDGTEFRWTREQAAAAA

SEQ ID NO: 226648 - protein, 474 aa, unidentified
MSQLNDLSRSLTSLEQDSTIIAVIEMSQSSWLVAGIVPGIERHPLKKLEPSEEDLIRLLMRWRAEATEHGRTITRIAVAFEAGRDGFWLARWLRARDIETYVIHPTSVAVSREHRRAKTDRLDTGLLKRVFIGWLRGEPDHCHMAAIPTLAEEDAKRPNRERERLVRERTRIVNRMKSCLVRFGVQNFKPTLRKAPERLETLQTTEGVPLPPNTLLELRRDMARLRFVIDQIKQVEEARAQRLEQAPQEKSHAMVRLLARVIGVGIETADMLVHEVLARNLRDRRAVARYAGLTGAPDESGSKRREKGLAKAGNARVRRGMIQLAWRFLIFQKDSALAQWYRTRTESAGKKRKTMIVALARKLLIALWRLVTTGEVPAGVILRGHPKQAMVLIPVSRMGPPPRSFAADAHDCIMVRSLWTYRIQGCGAMIRARWQAPLGPFRCPASARLQAVAAVRRRLSDEPQSQEHRIENQR

SEQ ID NO: 226649 - protein, 370 aa, unidentified
MNSIIYVGMDVHKASFTLSCFSVTTQETFATVKISPDAKAIKKYLDGVSLSRSEECEFVCGYEAGCLGYTLYHQLTAMNIRCVIMAPTTILRNSKRIKTDRIDAENLARCLAYGGYKSVYIPTAQDEAVRDYLRMRDDHKLMLKKIKQQINAFCLKHNKIYPGNKSKWTQAHVKWLNVLEFDGYLQDAFNEYMITYRELADKVERLESQIEQLAELEEYRDKVKKLICIKGIKTHTALSLIVETGDFSRFQSAERYASYIGLVPGEHSSSEDQKRLGITKAGNRHMRMLLIEAAQCYSRGVPATKSKDLKSRQKGASPEVIAYADKASIRLRRKYIRMELVNKKKANVAKTAVARELACFIWGMMTDNIA

SEQ ID NO: 226650 - protein, 288 aa, unidentified
MRTKSAGPFIGVDVSKATLDTAVDGETRVQQYANDEAGIAALAAFVTEHQPTLVVVEASGGWEMDLVASLAAAGLPAAVVNPTRVRNFAKATGQYAKTDKIDARVLAHFAAAIQPPVRPLKTGAQAQLSAVINRRQQLVTMLTMEKNRRVTTRNEMREQLERHICWLEAEIADLNEQLELLVAHCAEWQDKKKVLMSVKGVGVVTATTLLADLPELGSLNRQQIAALVGLAPLNKDSGRKRGKRHIFGGRAAVRSKLYMAALSASRTNPVIRPFYERLIANGKLGKVV

SEQ ID NO: 226651 - protein, 354 aa, unidentified
MSQQLNTTIAVIGIDIGKNSFHIVGLDKPGAVALRQKWSRGQVEARLANMPPCLIGMEACVGAHHLSRKLKALGHDARLMPAKYVRPYSKGQKNDFRDAEAIAEAVQRPTMKFVATKTTDQLDLQALHRVRERLVSQRTGIINQIRAFLLERGIAVRQGQRFLRAGLPTILATPSDVLSPRMVRIIEGLASDWRRLDERIEGLSSEIKAIACQDSSCERLMSVPGIGPIISSAMVAAIGTGDTFSKGRDYAAWLGLVPKQMSTGDRTILGKISKRGNRYLRVLFVQAAWVVLIKPKTWQRHGLKPWIEAAKKRLHRNVLAIALANKLARIAWSVLARGRGFEASTINDTATQPA

SEQ ID NO: 226652 - protein, 367 aa, unidentified
MEKSSKIFVGMDVHKESIDITVAESGGEVRRLGQIGGDRVSLLKMVRKRQSKGGERVFVYEAGPCGFWIYREITGLGQACMVVSPALVPRRAGDHVKTDRRDSARLASLARAGELAAIHVPDIRDEAIRDLVRGRDDAVIAQRRVRQQLKALLLRNDIRYVGRTSWTGAHRRWLSELKLPEPAQQITFEEYVDAIAVATGRIERLTRAIETEVITWRFAPVVAALQALRGIQFVHAVTLIAELGDLTRFASARQLMGYLGLVPREDSSGEHRRQGSITKAGNSYARRALIEAAWAYRHPARVTRIIATRQTGLPKPACDIAWHAQLRLSAKYRRLSARHLNHNKIVVALARELSGFVWAIGQSVKPQ

SEQ ID NO: 226653 - protein, 387 aa, unidentified
MPQQNDLSRSLTPFEHTTTLVAVIELSQSSWLIAGTIPGIERQPLKKIVPDETELLRVLHRWRDEAVRKGRTITRIAVAFEAGRDGFWLARWLSGHGIEAHVIHSSSVAVSREHKRAKTDRLDTAMLMRVFLGWLRGERGHCGMVAVPTVEEEDAKRPCRERENLVGERTRIINRLKSTLVRLGIRGFKPQLRKAPQLLASLRTPEDQPIPPNTLDEMQRDLTRLALIREQIKAIEQARLTRLEQALQTRPDAMIRMLASIRGVGIETAEMLVQEVLSRHLRDRRAVARYAGLTGAPDESGSKRREKGLTKSGNARVRRGLIQLAWRFLLFQEDSALVQWFRSRTEGVKGARKTKMIVALARKLLIALWRMVTTGEVPHGVVLRPVA

SEQ ID NO: 226654 - protein, 368 aa, unidentified
MSTRDTQTDATQKTLSRWCGCDVAKPTFDAALLLPVEEERPFTMKDMPVRTFQRTREGVREFLAWADELLEPYMDSLCPMRVVMEATGKYSAELAIWMTAERPSLSPAIINPQTAHAFTESLSLRNKTDKTDARALAIYGVERRPVAYEPPSRELSQLRSLSRHRQSVIEMRVAEENRIKETNDSPLVRQMLKRHIAQLRRDEGRLEKEMKKVLETMPELKRDAQATDQIDGVGFITAVTVLAEVGDLRRFEKARQLSAFSGISPRQNRSGQSVHHKTRMSKKGSSRIRKALYMPAMAAIRGHNDLADCYHRLLAQGKPKKAALGAVMRKLLLLMRAILISGEEYQKHYRRPCGKLLKKGLKTELILT

SEQ ID NO: 226655 - protein, 406 aa, unidentified
MAGAVCAGVDWAKDAHEVLVQDADGERLWGETITHDEAGIIRLCRTLVTLKVARVAIERPDGLLIERLLDAGLTVLAIHPNKVAAARDRFRAAGGKSDRFDAFVLCELARTDSHRFQPLVPDSDQTKALRALTRGREVLVEQRVALCNQLRAELERFWPGATEIFRDLDSPISLAFLERYPSPADARGLGEKRLAQFLARHGYCGRKDPAELLARLRNAPSGRAADLEADARRSLVLALVAALKPIVEQITLLTSEIAHAVHAHPDGHIFLSFFKHPKSVITAATLLAEIGDCRARYPTAEHLAADAGMAPVAVESGRRKVACFRRGCDHRLRHATSTLADSTRHWHPWAHRNYADARARGHDHPRAIRTVGRAWTRVLWRCWQDHVPYDPERHNTLQRQLLIVKG

SEQ ID NO: 226656 - protein, 343 aa, unidentified
MQTVTTIGFDIAKSVFQVHGVDAASEVVIRRQLKRRSVLAFFQKLPPCLVGIEACASSHYWSRELQALGHTVRSMPPAYVKPYVKRQKNDMADAEAICEAVTTATMRFVPTKTPEQQSCLMLHRTRHLFIRQQTAVINSIRAHLAEFGIVAPVGRRGVTELLHVVADPSDKRVPEIARACLAALGTQLLRLKEQILEFDRMILAWHRSNQTSKRLHYIPGVGPMLATALVASVADPKTFRSGRNFSAWIGLVPKQHSSGGKDRLGSISKQGDRYLRSLFVAGALAVIRYAKIHGTGHRPWLTALLMRKPTKVAAIALANKIARMAWAMMAKGERYKEPIALAR

SEQ ID NO: 226657 - protein, 400 aa, unidentified
MLSIGIDVSKGKSTVCGMKPGGEIVYAPFEVQHTREGMSELVSLLRSSGEEVRAVLESTGSYHCPVVAALLENGIFVSVVNSLRMKRFCSQSIRKVKTDRIDAMQIALYGLAYWQELQPARLPEDTYRELQLLARQYYQMTSLLIKAKVDFNAICDQVLPGMQELMNDHAGRHKLSDFVLRYRHTTHILEMGETRFRKDYCKWAEKKGYRNCERMAVLIFATAQNGIPVLPNAPSTQIVITEAIRVLHTVEASRDAILTQMQALAKTLPEYSLVREMPCIGDTLAPRLIAEIGDVRRFHSKRALIAYAGIDAPPYQSGKFCANNRHISKRGNRYLRKTGYEVMQSYVMHKPANDPIFTFIEKKRGEGKSGKLAMVAGLNKFLRVYYGKVTELYRSLPAIE

SEQ ID NO: 226658 - protein, 418 aa, unidentified
MSVTLQGVPARVCAGVDWAKDDHAIAIIDPDGQVLDRFAVPHDAAGLKSLVRRLLTAGVDEVGIERGDGPVVEALIQAELTVLVIPPGQLKNLRSRYGSAGNKDDRYDAYILADVVRTDRRRLRPLVRDSAATTALRTTVRARRDLVEHRVAAANQLRAHLQIVFPGATSLFAAIDSAISLTFLERFSTQAKADWLSPKRLGTWLSSVSYSGHTDPEILHTRLLAAPQGTTGAEAQTHTVTTLAFVAILRSLNTQIEALAASIGEQLAIHPDAHIVTSLPRSGTVRAARLLAEIGDARGRFPTADSLACLAGVAPSTRQSGKVKAVTFRWGANKELRDALCDFAGDSRHANPWAADLYAKARARGHDHPHAVRILGRAWVHIIWRCWQDNIGYDATKHHALQVVLNADQPKAAQNVRG

SEQ ID NO: 226659 - protein, 337 aa, unidentified
MKYCGIDLHSNNSVVIVSDEEDRIVFSKRLANDLGQIGAALEPHREDLAGVVIESTYNWYWLVDGLMATGYQVHLAHPSAIKKYEGLKHSGDFADAAYLAQLLRLGLLAEGYIYPREERGARDLARKRMQLVRYRTAQILSIEGILMRQTGARMKGEAVKRLTAEQVDAFAFAPDVSLAVEANRAVSQTLSQQIETLEKRLKQRVILRPEYHLLKTVPGIGDVLATTIMLETGTINRFTQVGNFSSYCRCVDSLKESNGKRKGEGNTKNGNKYLAWAFVEAANFALRCCPQAKRFYDRKKSKTNRVLALKALAHKLARACYHMLRDQKPFDVHLCFG

SEQ ID NO: 226660 - protein, 346 aa, unidentified
MVIIGCDFHSDFQQISLLDTETGEVKELSLRHREQARAFYAALPPGAVVGVEACGQTQWFEALLAEQGHELRMGDPAKIRAAMPRRQKTDRRDAEHIRVLLAENRFPDIWVPSPAERDARQLIVHRHKRVQMRTAVKNQLHALAINQGLRLRWRLWTAAGRRQFEALPLLPYAAQRRNELLRLLDEMDRDIAVLDAAVAREAQARPAVVRLMTHPGVGPVTALAFVLTIGPVERFARARQVASYLGLIPAEHSSAGKQRLGHISKQGSPLLRLLLVEAAHVAVQHEPELKRGYARLRHKHAAGVAKVAIARKLATRLYWMLRNQTNYRQLRAGHTQVSPSHSVVEV

SEQ ID NO: 226661 - protein, 365 aa, unidentified
MGVPTVVQAKTFVALDVHVSGTVAAMIDRDSGELRRRRLSGRAVEVAEFVAGLESPVCATYEAGPTGFALARRLEAAGVDCLVCAPGLIPRGPSDRVKTDQRDAERLVRLLVAGELHRVGVPSVEAESLRDLVRAREDLRGDLMSARHRVSKLLLRHDVRFEGRQRNWTQDHLRWLSTVRFDQPGTQAAFDDYRGAVEALVIRRSELERQIAEQLPLSPWAQTARRLRCLRVIDTLTAAGLCAEVGDFHRFRHPEQLMSYLGVVPSEHSSGTRRRQGSITKSGSQHARRLLVEAAWHYRQPPRVSQPLRRRQTGADAAIIALSWKTQRRLHRVWTRMERRGKRRTIIAVAAARELAGFCWAISTA

SEQ ID NO: 226662 - protein, 325 aa, unidentified
MMYLGIDLSKAYFDVTLRNAQGEKHSHHFDNDSAGFKALQHWLKEQGVKEVHVCMEATNVYWEKVAQFLYAKGYAVSVVNPARIKGFAMSQLRRNKTDKQDSDVIVDFCQAIQPKLWTPPSAEVSKLRAMVRLRATLVKTVTQQQNRLGDCQDEESQACYQRLIDTLKGEIKQVEGKIEAHLAHHPHLQEQADLIESIQGLGPISTWTILAEMPDLADYENAHAAAADAGVNPSHHESGDTIRRRPKLSKVGKASIRGVLHMPAITAIRHNPVVKALAERLANRGKPKNLIIAAAMRKLIHLVYGVLKNKRPFDPNYAAFPLPAT

SEQ ID NO: 226663 - protein, 400 aa, unidentified
MSANSVAVVALDLHKKFTRAVTMDSGGEVMDDRRVHHADHAEMENFFREFEQGTDVVMEATFNWPWVADLAEKVGLKPHLGDPTRIKDFRKGLPKSDRKDCIAEGNLWLKKMFPEAYLAPVGVRRMRGLFRMRGLFVKMRTALKCNVHGQLFRLGVLLEEESSIFSLKGRAALKLVDMNEAERTELARKFALLGDLDVHIKEVERMLKLDLKKNDDARIVDSLPGFGMILSHGFLSEVGELSRFPNGRALAAYAGVLPLDNESADKDLGKHTGKHSNRFLKWILLEAVNGAAKKSPRIKSLLERVRARNRSAPGKARVAVARELAELAYLLLSRKVLYIECPPARPGSRGEGKRWTTPTKSAPAKAKKEPGGTRRRKSFALTGRTLARGTRQGSSATAKG

SEQ ID NO: 226664 - protein, 346 aa, unidentified
MKINRVGVDLAKNVFQLHGADHKGNTVWKRQLPRSKWIKVLCETVKPGTEIGMEACTGAHHWARLLIQRGYEVTIISPQFVKPFVKSNKNDANDAQAICEAMGRPNMHPVRVKTIAQQDIQAIHRVREEIKRHRAAKANQIRGLVSEYGLVAPQQLMSLRRAIPEWLEDADNGLSFLFRQLLQGLWGDLHVLDQRMTELDNQIAVMAQQDPVAKRLQQLRGVGPLIATALIATVGDAKQYRKGRDMAAAIGLTPRQHSSGGKNRLLGISKRGDAYLRCLLVHGARSAVRTAKDRDDRLSRWVVSLQSRRHANVVAVAMANKIARMAWAIMTQGTDYDPDFNPAIAG

SEQ ID NO: 226665 - protein, 376 aa, unidentified
MKNLIFVGLDVHAETIAVAVAEADGSVRSLGVIPNRAESVGRMIRKVGKPEQLRVCYEAGPTGYVLYWQLSELGVKCEVLAPTLIPVKAGDRIKTDRRDAEKLARCYRAGDLTAVWVPDAAHEALRDLVRARLAAKRDQLRARHRLGKFLLRHGRRTPEAMGAWTDKHLAWIKTVHFEHSAQETTLLDYLHEVEHVAERLVRLERSIDTTIETLPVKLRAVIEALQSLRGIAQISAVTIMAEVGELSRFEHPCQLMGYSGAVSREHSSGPRVCRGAISKAGNAHLRRIVIEAAWAYRHRPAVGTTLAARQRRSDPAVIATAWKAQHRLHQRYLRLIGRGKSKQQTVTAVGRELLGFIWDIGVQVERQTQLPLKQVV

SEQ ID NO: 226666 - protein, 456 aa, unidentified
MNNYFLGCDVSKGYADFVIIDERKYVVEKNFQLDDTFNGHNQLFQILKYFIEKDSEAFLYAAVESTGGYENNWFQTFKKFSRELPVKVVRINPFAIAHSNKAAMKRVTNDRISASTIAEYQIHHPEKLQYNQDDAYQTFKRLVTTTLMLKKTKSQFVNELETLLYVANPEIIKYRKSKIPQWLLRVLQHFPDVASLATVSVEALSQIALIKPARAKEIIQAAQQSVASASDEMIRLAITSTVETIIALDKKIDQHIKLLQKQLMVPQIELLQTFKCIGLLSAIELYIEIGCIERFPTVKHLVSFFGVHPVYKESGDGIWGVGMSKMGRRKPRAILFMVALNAIQHNELIRSVYQRELKKGKAKMAALGVCMHKILRIIYGMLKNNTAFDPEIDRTNQQKRVTKTKKEKIDNKRRFQKEDLNAPISKKQTRKRKERKLSQSDNITINGISVPAPSNV

SEQ ID NO: 226667 - protein, 388 aa, unidentified
MFKTVERPDAPAAIRMDIGAIFVSLELSRSTWLLTSVSPGAGEKMSQHATPAGDLRQLFECLAELKRKALARTGKTYPIIVIQEAGLDGFWIHRALEREGIESHVVDAASIAVPRRRRRAKTDRIDGKTLLRTLMAFKRGEPRVCAMAKPPSVEEEDRRRLGRERKTLIAERVEHVNRIKGLLFTQGAIDYQPLRRDRRARLEALRTGIGDPLPARLKDLISRELDRLELLLAQIKAVEAERDALLAEQSRQAPAAAAMLLAFKGIGPEFATVLWLEGLFRSFANRRQVAAYAGLAPTPWRSGSIAREQGASKAGNPRLRATLIELAWLWRRHQPKSALTLWFEDRVKANGGRVKKALLVALARKLLVALWKYVTTGLVIEGAIMKTA

SEQ ID NO: 226668 - protein, 371 aa, unidentified
MTILTDPASASGSPPPMWVIGVDTHTDTHDAALLDALGGVVGQTRVETTPAGLARLRAWAQAHVPAGQPVLWAVEGSRSHGHGLTRHLRTAGQRVVEAPKPEAASRRRGGKSDPLDAIHAARATLAVELAADDVNADRHAEPRADGVREALRMLLVTHRHDTDMRTATVNLFKSLLLGAGDLRETLRGLTTVRQLRTVLALPDPGTGTGADVETRIRIQTLRRVAATILDLDNTIKTAEQQLRALAEQSCPGLLDQPGVGPIVAATLLTTWSHHGRIHSEAAYAALGGISPIPTGSGRYQRHRLNRGGDRHLNRALHTVVTTRRRMKHPPTTNYIDRRTTEGRNPKEILRCLKRYAIRQLYRYLQTNAVTT

SEQ ID NO: 226669 - protein, 408 aa, unidentified
MLFDRPAETAAIRSQLGAIFVSLELSRSTWLMTCVSPGTGEKLSKHAIEAGDVAALLARLAELRRKTLAQTGTRYPIIAIQEAGLDGFWLHRVLQAEGCESHVVDAASIAAPRRRRRAKTDRLDGEALVRALLAYKRGEPRVCSMVRPPTPEAEDERRICRERADLVEERIRHVNRIKGLLFSQGVRDYEPLRRDRRQRLEALRGGDGRPLGPRLKAQIGRELDRLELLLAQIAAVEGERDALLAELADRRGPASRDARASRDGAAPGAAPPSPVALLMSLKGIGPEFAAVLWTEGLSRAFANRRQAAAYAGLTPTPWRSGTIAHEQGVSKSGNPRLRTKMLQAAWLWLAHQPQSALARWFHERLPGMAGKAARKRLIVALARKLFVALWKLTSAGVVVEGAVMKPAA

SEQ ID NO: 226670 - protein, 473 aa, unidentified
MRKDKRLRQLASTRKQLLKQNKRLSNTCLEQINLDAAGIDIGSRSHYVAVPTDCDKEPVREFLSFTEDLIKLCRWLKKCKVKTVAMESTGVYWIPLYEMLCEKGFEVKLVDARHVKNVCGRKTDVLDCQWIQQLHTYGLLQGAFIPDLSICALRSYVKQRDMLIAKAASHVQHMQKALVQMNLQLHNVVNDITGITGMKIIRAIVSGERSAKRLSKYRDGRCKRSQDDIRKSLVGNYREEHVFSLKQALELYDYYHEKIAACDVEIEKKLRELSTTTSVESNEPEHIEHKLKKRRKNDHHFDLGKALEAMLGIRMTAIPGVDASTVLHVISVIGTDMRHWKNEKCFVSWLGVCPGTKVSGGKRLSGKSKRTANKAALALRLAAQTLYRSQTALGAYYRRMRARIGAPKAITATARKLAAIFYRMLKYKSEFIDMGQDYYEKQYRNRIMNNLRKKAAQLDMQLVPLHQTMNTRI

SEQ ID NO: 226671 - protein, 423 aa, unidentified
MRNNAARKLKQVPKGYLVMGVDPHKKRHAAVAVTQDFTTHSKFKFNNSRKGFETALERARAEMVRTGSRGVIFAIETGGHYWRNLAYFLDERGIPFHFINQFTLKRRREGKDLNRRKNDYRDSEVAAQLLCTGEFTDTKLQHGVYAELRAAYNAYRRLVKERTRITNLVKGLLDGLFPEFTQVFKDPCGLTALSVLSICPVPVVITKMTEEEFVNAIRAKHQGRLMKRKLCALHYAARTSIGIEAGAQSVSSEISFLVEKLRLIRRQTRRIDEALARLVDETEEGKYLLSIIGLNYISVAGLLAELGSFRSYRSAKQLIKMAGSNPTESESGGKRSAHTPMSKKGRPVLRYCAWTAVIPMLRFNPDFRVWAKELRERPAHANPLGGREIVGAALNRLLRLAFALVKKQTFYQVPQLEVAQAVI

SEQ ID NO: 226672 - protein, 385 aa, unidentified
MNQTSCFATSTHALHCALELSKKSWLLAIQFPDREQPSVYSIKGGDTEKLMAKLTAARDCWAKVSGSLPVITLCYEVGYDAFWLARFLKARGIECLVIDPGSLQVNRRGRRVKTDRVDVKMLLRTLIAWCRGERHVWSLVRIPSVDEEDLRRSHRERSRLVRERTAHINRIKGLLFAQGIRDVKVKSQYKTLAVDKLLTADGHRLPPRLASEIARELQRLAMVQEQIAEIERERDTAPTPCEATERKRQLLLQLKSIGPAISALLSREVYYRQFANRRQVGSFLGLTPSPYSSGEEERCQGISRAGSGQVRAIMIETAWLWIRHQPKSALTRWFVERTAGQSTRMRKIMIVAVARKLSIALWRYVEQGLVPQGAILNPPTTGRAR

SEQ ID NO: 226673 - protein, 341 aa, unidentified
MSDYSYFCGIDLAKNHFSLHAVDQNGKVILHKSVIRSKLLTTIANMPLMRIGVEACGGAHYWARTLNKLGHDARIMAVKYVVPYRTKGKNDLNDAVAICEAVQRPSTRFVPIKSPDQQAILSVHRMREHWVRERTALMNRMRALLSEFGLIIPVGRSSLMKHVPLMLEDAENELPHLARTVIAEAYHHLGELNQRIADTEKVFDSFAKVSANVQRVMKVRGIGPQTATAILASIGNGSQFDKSRDFSAWLGLVPKQYSTGGKPRLGRITKHGDKYLRTLLVHGARTVIANLGDKQDKLSQWCRGVLERRGMNRAVVALAAKNARIIWSLLHNQTEYENYAA

SEQ ID NO: 226674 - protein, 403 aa, unidentified
MNNVVGIDVSKGKSMVSVLRPFGEVVAKPFSVGHTGSELKELADYLKSLDGETRVVMEHTGRYYEPVARFLHDEGVFVSAVNPKLIKDYGNNTLRKVKTDKADSRKIARYGIDNWAELRQHTPMDTIRMQLKTLNRQQSLYSKTKTMMKNNLIALLDQTYPGVNALFDSPVREDGSQKWVDFATTFWHVDCVRNMSLTAFAERYRKWCKRHGYNFSQSKAVEVHAGAQDLIAMLPRDALTKTMVRQAIDALNAISASLERLKAEMQALAAQLPEYPVVMTMHGVGDSLGPQLMAELGDVTRFTHRNAITAFAGVDPGADQSGTHEAKSTRVSKSGAPELRRALFLVMDCLLKTQPQDDPVYRFMDKKRAEGKPYLVYMTAGANKFLRIYYGRVKEYLASLEGN

SEQ ID NO: 226675 - protein, 341 aa, unidentified
MEHTTIAVDLAKSIFQVAVSHRAGQVDVERRLTRGRFLTFFAQQPPATVLLEACGSSHHWARQLQQFGHTVRLLPAHDVHRYVPRNKTDRTDAKAMLEAHRNEEIHAVPVKSIDQQTMASLHRVRSTWLATRTARLNTIRGLLREFGVVIPTGAHHVVPAIRALVDDERVPVALQPIFSTAGDEVNTLEATIHDVERQLAGLARQRPEVELLQTIPGIGVITATALIATVGDIRRFPSGRHFASFLGLTAREDSSAGRRRLGAISKQGDTYLRMLLIHGGRSVLWSAKGKAAPDGLRAWALRMEQRRGHNIAAVAVANKLARITWAVWTHQRPYAAALNST

SEQ ID NO: 226676 - protein, 412 aa, unidentified
MNAVGIDVSKGKSTVTIRRPGDIVLMPPCDIPHTQSAINALIQQIKALDGETKACMEHTGRYYEPVATWLSDAGIFVSAVNPILIRNFGDDSLRAPKTDKADSKKIARYTLDRWAKLKQYGSMDQTRNQLKTMNRQFGFYMDQKTSMKNNLIALLDQTYPGANDFFDSPARSDGSQKWVDFVHTYWHVDCVRSKSLPAFTEHYHNWCKRRGYNFSTDKAEEIWQASCDLIAVFPKDSNTKMLIWQAVAMLNIASETVESLRRKMDETAATLPEYPVVLAMNGVGPTLGPQLMAEIGDVTRFTHRGALTAFAGVDPGKNDSGQHVQKSVRTSKKGSPSLRKTLFQIMDSLIKRSPADDAVYAFMDKKRAQGKPYYVYMTAGANKFLRIYYGRVNEYLASLDQASKGKENTDGI

SEQ ID NO: 226677 - protein, 356 aa, unidentified
MEYYAGLDVSLRSCALCIVDGKGTVLFERELPCEVGDIAECLLEFPHPIERVGFEAGSMSQHLFFGLTAEGFDVVCMEARQVSAALSAMRNKTDKTDARGIAQILRTGWFSPVHMKSREAHGLRALLSTRKALLKKTMDLANEVRGLLKIFGIRLPQTVKHGSFDGVVRPMIEIDDVLAHALVPLLDARVVLYQHYLELDRRVKRAASHDDVCMKLMTIPGVGPIAALSFKSAVDDPTRFKSSRTVGAYFGLTPRRYQSGEHDNPGRISKAGDRDVRAVLYAAANALLMRTMASSQIKSCTARQAMPASLRGGMRLMRTKGRRRAVVAVARKLAILMHRMWIDGSEFRQDQVGGMA

SEQ ID NO: 226678 - protein, 363 aa, unidentified
MTKQRLSSTQLLDFIGVDEKTPVWIGLDVHKKSYHVALRRADGVCQSWVSPADPTVLARQLCAISQRISLIVYEAGPTGYCLERVLKVNGYKVAVVAPSRIPRPVTNQAKTDKLDCLKLAEYAAKGMIEAITTPSEQESAERSVLRRRNQLVDSRRKTKQRIKSFLLFHGIEEESGLRYWSQSAKSKLSKLPLQSDLKFVLKSLLRQLSYEEEELAKITNRLTRIAKRKPHWEVVKNLKTVPGVGDIVACAFRTELFRPERFRRAEEVCSFLGLAPAIRQSGEKRQGGWLMRSGQTRLKSLLIEAAWMWQAKDPWARKKYRTHLSRCGIAQKAITALARRLAVILWRLSVENRSYVMLKVDIA

SEQ ID NO: 226679 - protein, 370 aa, unidentified
MEFNSYIGLDVHKETIAVAIADAGRNGEVRFFGEIANNPDAVANLLKKLGGRHGKLHLVYEAGPCGYGLYRQILAAGHACDVISPAHTPKRAGDHVKTDRRDVAMLARLSRAGELTSVWVSDETHEAMRDLIRAREVTTKDVRQARQRIQGFLLRYDRRYVGAVWKKRHRVWLANQSFDHPAQQIAFQTYLNAMDQAIARKDLVEAQIEALVPEWSLGPVVEALQALRGVALVVAAGVVAEIGDMRRFDNPRQLMAFVGLVPGEHSSGSKRKLTGITKAGSVVARRLIVESAWAYRMPAKIGQAMMLRQQSIAVPIREIAWKAQIRLCGRYRRMLARGKKAPIVITAIARELLGFIWAIARQVEPKTIAA

SEQ ID NO: 226680 - protein, 339 aa, unidentified
MQLYAGLDLHSRNTYIGIMDKEFKRFFAKRVSNKLPLILKTLDPFRDHLNGIVVESTYNWYWLIDGLMDAGYQCVHLANPSAMKQYEGIKHTDDQHDAFFLAQMLILGILPQGYIYPKQDRPVRDLARKRLFLVRHKTAHILSLQSLIARCCAQRITAGEIRKFSAEDLQQLLKEEHIVLSAQANLDTIVFLKQQIQRLEKAIKKKVKLNKAFKQLLTVPGIGLILAMTIMLEVGDIGRFPQVGNFASYSRCVSSQRLSDGKSKGHGNRKNGNRYLSWAFTEAAHLSRRYNEHFRSYYNRKVAQANTSLATKALSNKLARICYYIMRDQVPFRKELLSH

SEQ ID NO: 226681 - protein, 413 aa, unidentified
MDVLHPRCCGLDVHKNSISACILVQVAGQVQKHQRRFGAMTQDLQELANWLRQFEVTQVAMESSGVYWKPVWNILEGQFTIVLANAQHIKNVPGRKTDQKDAEWIAQLLQHGLLRPSYVPCEVIRDLRDLTRMRASLSQEASRISSRVQKVLEDANVKLASVATNTLGKSGRAMLEEIIAGQNDPEYLASLALGHLRAKTPQLRLALEGKIRPDHRFLLRRLLDQLRFVEHEIVLLDEHLEDIGRERPELSQAVDRWDTIPGIDQVAGWSLLAEVGDTMAQFPTPEQLASWASLCPGNHESAGKRLGGTTRKGSPWLRRMACQCAWAAARTKNTYLSAQFRRLAARRGIKRAIIAVAHSLVIIGYHLQKSQRNYEDLGGDYFDRIDSDGLKRYFIRRLEKLGHKVTLVPIKAA

SEQ ID NO: 226682 - protein, 359 aa, unidentified
MINVGVDVHKRICQACLKDERGSIIEELRFPNNQEGASRLATILKKHGEAKVAMESTGNLWVKLYDRLDEEANIDVILTNPKKTRVIAEAKIKTDKLDARLLADLVRADLVARSYVPPREVRMQRALLRERISLVESRTMIKNRIHALLDKYEIQPTYTDIFGRRGREWLRSLNLPSIDQTILEVSLQRLEELEAHIDAFTDKIAQEAVENPQAKLLMSFTGIDYYSAMLLASEIGDVTRFPSAKKLVSYAGLAPGTRQSAEKTIHGHIVGEGNKRIRWILVEAAQHASRHDPRLRGFYLRILKRRGYQRAIVAVARKMLVAIYHVLSKNEAYYGVRGELFERKLKRLEWTASHSLQAP

SEQ ID NO: 226683 - protein, 336 aa, unidentified
MNYCGIDLASEASAICIITEEGTLVREQMVATEAQEVGQALTGLGRLRCVVEAAPLAEWVAQLLEESGPEVIILDPRRAKAVIQTKNKTDKLDARNLAKLAQVGWYTAVHRKTPAARLQRTQLQARNGLVETAKAQAARIRGLLRAHGVKVGAVSAGQFVPTVQALVAEHVPALTTALEPLLQIYRQAQEGAKALARHVTKQVKQDPLCQRLMQVPGVGPLVAGTYVATLDDPTRFRTSTQVAAYLGLVPRVYQAGAANYHGRISKEGDKLLRWLLVEAAHVLLTRTKRSSALKRWGLKLAKKRGQGKANVAVARKLAILLHRLWMTDAAFTPEPG

SEQ ID NO: 226684 - protein, 403 aa, unidentified
MNNVAGIDVSKGKSMVSVLRPFGEVVAKPFSIGHTGSELKELADYLKSLDGETRVVMEHTGRYYEPVARFLHEEGVFVSAVNPKLIKDYGNNTLRKVKTDKADARKIARYGLDNWAELRQHTPMDTIRMHLKTLNRQQSLYTKTKTMMKNNLIALLDQTYPGVNALFDSPVREDGSQKWVDFATAFWHVDCVRSMSLTAFAERYRKWCKRHGYNFSQSKAVEVHAGAQDLIVMLPKDALTKTMVRQAIDALNAVSASLERLKAEMQALAAQLPEYPVVMAMHGVGDSLGPQLMAELGDVTRFTHRNAITAFAGVDPGADQSGTHEAKSTRVSKSGPPELRRALFLVMDCLLKTQPQDDPVYRFMDKKRAEGKPYLVYMTAGANKFLRIYYGRVKEYLASLEGN

SEQ ID NO: 226685 - protein, 454 aa, unidentified
MKTRKKSPDKKVQKTSPISIINPNAAGIDIGDTMHAVAVPDGRSALSVREFGTMTCDLELIVTWFKECAIDTVAMESTGVYWKPLFSLLLQHNIKVYLVNARHVRNVTGRKNDQQDAQWLQQLHSFGLLKSSYLPEEEQEGLRALVRYRHTLIQDSSRFVLRMQKSLELMNIKIHTIISDLMGKTGKAIIEAIINGERKAEKFIPFVDCRIKTDKATIVKSLQGNWREEHLFTLKESYRFYTFYLQEIKACDIAIENQLIHYEAFIQDGNIEEQQSQPVSKFKKTSKNGPGFNMVHYLQRIHRVNVMAIYGLSDISALEILAETGTDMSKWKNEKHFVSWLNLCPNNKISGGKIISSNILKKKPNLASQAFRTAANSVSKSNHWLGDYFRRMRAKGGHKYAIVATANKIAAIYYKMLSLKKEFNPVDLVAYQQKYKTAKIAYLERKLQQLKNTA

SEQ ID NO: 226686 - protein, 328 aa, unidentified
MNLAGIDIANESFEICMRHGEKLRHRRFGNTPSGHRQASRWLRYRGQPARVCLEATGIYHLQLALALSGAQDIEVMVLNPRASRRFAEAQMRRAKTDKVDAAILLSYLERMPFRPWQAPGAEVLELQSLAHRLSQLQKEITRERSRLHAAERAGPHTRFVQKDIRAHIKQLKARLRRFEARAIDWLRQHEQLSENLELIDTVPGFAEHSAFKVLAEVSPLADDMTAPQWVAQAGLDPRPNESGTSVHSPRRISKQGNAKLRAALFFPAMVAIQHDGNVRAFYKARLDRGATPRQAQVAVMRKLLHAIWGILKRRQPWDGERFYRLNTA

SEQ ID NO: 226687 - protein, 335 aa, unidentified
MSSLVCGLDVHKDSVYATVMNYGGKVIEKRKLSNDEVVNFIGQYPIDRVAMESSTSIVPVYRALRGKGYEILVSHPKKTRLVAESRIKTDRVDSWAVTELARLDALPLSYMPPDDIAALREKVRRRAFLVRMRSKLKVKIRSQLIINGLTPPSEYGLFTSKGLEWLRSLQLDAVDSYLPVISTLDIQVGKLSRELRGMVSGDEDVRLLMTVPGIGYYSALLVKSEIGSIDRFPDGEKLCSYAGLVPSVSISGKYRRHGSITKEGSRWLRWIMVECVHAHLKYDTSITRAYHAIAERKGARIAKVAAARRLLMCCYSVLRNREPYHDPAGHYQASS

SEQ ID NO: 226688 - protein, 412 aa, unidentified
MQDILTCVMGLDVHRDIIVACLVKGAVDAEPEAEIRTFSTLIPEMQKLRDWVIESECRNIAMESTGIYWQPIYEMLESCFDGEISILVVNARHMKNVPGRKTDMKDAQWIATLLRAGLLKGSFIPDKTFRELRHLTRYRKSVVHDITAQKNRIDKFLQSSGFRFTAFLSDTFGASGRNIIRHLIEHGSIDREALDKCLKTKTRNRIDEILVALNGSLSVHQRRFLNMVFLHLEDLEAHKHTIEDEITEEVLKHTDALNLLCSIPGIDVTAAAAIVAEIGTDMSAFPDSQHICSWAGLSPGNNESAGKRKSVHINKGNPYLKSMLCETAWIMASHRKLYLSGWYWKVKQRKGAKRATIALARKILSIIYTMLKTGTPYSEECFEQRRQRCERKRANRMVNELQKLGYTVVAPD

SEQ ID NO: 226689 - protein, 347 aa, unidentified
MVTIGIDPHKASHTAVALDPSGEMLGELRVVADASMLRRLRKWASSWPQRVWAIEGAAGLGRLLAHQLVAAGERVVDVPSALAARARVLASGHGRKSDGIDARSVAVVAQHRGDLLAVAADDHTAVLRLLSDRRDELTGERRRTINRLHRVLRDMHPGGAPRQLSADRAARLLTSIRPASAVDLERKAIARQLIADVRRIDRALLENRRRCEQAIAASGSTLTEIFGISDVLAAKILGHTGDITRFASADHYASYTGTAPVEASSGEQTRHRLSRAGNRSLNHALHIAARVQTMHPGPGRTYYQRKRAEHKTSTEALRSLKRQLAKIVYRQLRHDHLGRPFIHSELT

SEQ ID NO: 226690 - protein, 346 aa, unidentified
MKILALDLGKYKTVGCEYESESGAHRFQRSLTTPAALRKMVQEVNPERVVIEVCSIAGWVCDLMGELGVAVQVANTSDEAWRWRKVKQKDDRRDALKAARLSAVNQLREVYIPAKEVRQWRALITYRRQLVRRRTQIKNHIRDLLLREGQILARGSQCWNQVGTELLTSLARPLSAVGLTELWRGELHEELQQLELLQARLATVEEKLNAIGKADARVQLLRTAPGVGPRLAEAIVALLDKPQRFGKASQVSAYIGMVPKAFDSGESVRRGHITRQGSRLVRSLLVEVGWAGLRHNAWVRQTYQRLHGGKKARRKIAIVAVGRKLLVRCWAMLRDHRAWDWQPQIT

SEQ ID NO: 226691 - protein, 423 aa, unidentified
MNRLHYELHVGIDLGQWLHQACVVDANGELLEERGFEHSVDGLGTTLAWLLSLAGKDAERIAVAIEKPHGAVVETLLESGVAVFAINPKQVDRFRDRHSMSGAKDDRRDAFVLADALRTDGHRFQRLQLPPPEMVALRELLRTRDQLVKNHVALSSQIRDLLARCWPHLVTLAPKDKALDAFFCELLQLFFDHHPTAELSLQNIQKLVHQHHIRRLQPEHILEVLRKTPLRVAPGTTEATSAHLNLLLHQLLLVRQHRRDSDQHLERWFKQLQPTSDQPYSDAAILASLPGVGAVVLASVLSYAHDPVRLRNLDAFRSLGGIAPVTKKSGKRGQQRPQILMRRARSLPLNNALHHWARIAVLTDPRFKEHYGRLRDRGHSHARALRGVMDRILAIAVAMLRDQTLYDPSKRANFNEGAKKVSS

SEQ ID NO: 226692 - protein, 500 aa, unidentified
MKTKRSKAKIRGGQKRLSVICNDPEQKLEILRPDAAGIDCGAEEHYIAVPPDRVRAGEPTVRSFSAFTEGLDAAVEWLKACRVTTVAMESTGVYWMPLHQKLEAAGIEVYLVNARHVRHVPGRKTDVQDSQWLRQLHRFGLLNASFRPQDIICRLRSLHRHRDNLVSSSASEIQHMQKALQQMNLHLHHVLSDVTGLTGLRIIDAILAGQRDPEQLVKLRDKRVYKSTPRQMQAALVGDYRAEHLFVLSQSLQAYRFYQARIEECDREIEPLLEKLAQQVEAASAKLKLDALKRSSAKDGTMTPEPLSESKPACGLGAKRKRKPRANEPKIELAGLLERICGIDLTKVVGLHVLNVLLIVSEIGVDMSKWRSAKAFCSWLGLCPGTKISGGKVLDSRTRQVVNRVADALRLAAQSAGRTQTCLGIFYRRKQAHLGAPKATTATARKLACLIYHLLKYKQPYQKLDPAIYQLRLQKSTLAKLQTQAATLGYKLVPTAPVPV

SEQ ID NO: 226693 - protein, 464 aa, unidentified
MATYGIIAANSWVKCKNPRVATGDARGLCWINYPIVLIERRWKRTHMVKNRIPVYHVAIFFRYAACLTTNLMTTTKEKINRIIGLDMHPDVFAAAAIEKTSADQSKTLWVKDRLVTARLEDWAKKSLRKDDLLVLEASGNSFEVASRFHALGYTCLVLESHQASKIKENFCNDDRHSAVKLARVYLSGLAKIVWQPEEETREFREIFFAHRAAVKDCTRLRNRIRTFLNEHCVRLPRGTALTQQRGLDKALSMRQWSEIQTELITDSFEQLWHTERRRKHLEELMVKELLKRPKWLRLWRLMGVRHIVAFGLMAIIGDVNRFPTAKKLVGYFGLSPRKVQSGNDAKGRDRGIGKTGRGDVRALLIQAAQNALSQRNSPLHKWGWKLVMKKDRNVAAAAVARKLTVAIWHLLKGHFTPLLELNKHLKTKLLYIATLLGKENLKETGFKNRSEFIQYQFKKIQLST

SEQ ID NO: 226694 - protein, 386 aa, unidentified
MPQLNDLSRSIVVLEQDATLIAVIEMGQSSWLVAGMVPGVERSPLKKLAVDESALLTLLNRWREQAEKAGHRIERIAIAFEAGRDGFWLARWLRVRDIEAHVIHASSVAVSREHRRAKTDRLDTELLKRAFLGWLRGERNHCKMVAIPTLAQEDAKRPNRERENLVGEQSRIVNRMKAALARLGIRGFNPKLKKAVERLDGLRTPEGEPIPPNTLAELKHDMERRRLVRSQIRDIEGTRLERLEQAPGDGPHVMVRLLARVIGVGVETADMLVQEVLSRNLRDRRAVARYGGLTGSPDESGKKRREKGLARSGNARVRRGMIQLAWRFLMFQKDSALAHWFYARTKNAPQTRKTMIVALARKLLIALWRLVREGAIPEGVVLRPAL

SEQ ID NO: 226695 - protein, 353 aa, unidentified
MEKQCVGIDISKANFSATVCCRSASDELNYSETRKFNNDKKGFNQLTKWVTKERSKSSSLSFLMEATGVYHENLAHHLHRIGKTVHLILPNTSKNYFRSLNIKTKTDDVDSRILAQFGVERTHRKWQPPNKIYKEMRDLSRYRIQLQEQKTALANIAHSKEFSHDLATEITKSNKKLIKIIDKEIASIKSRLEALVASDQHLSERIRKICSIKGLAIQTVAGLIAETNGFENFRNGKQLASFAGYDIVHHESGKSVKGKTRISKKGNRYIRHLMYYPAMSASRHVPEFKNLRDRVFERTFIPMKAQCAVQRKLLILVYTLWKYETEYEPDYYTKKIARTKVRATQDKPTKSFP

SEQ ID NO: 226696 - protein, 336 aa, unidentified
MCLFNSNSYKSDGTPEVLVSSYLQGGVSHVKEHVVYCGIDVAKGQLDGALLGKRWQVPNTKAGIRRLIKMLRQRNTCPQVICEASGGYEQDLVELLHQAAVPVTLVQPQRVHQFARASGILAKTDKIDAQVLVRFGQALAPAPNAAPGAQTLLLRELDRQRAHLSGLLVAEQNRRAQLRDPSLRQLSAQLIKQIQGHIVRIDARTQAIIAADQELKAKAKMLTSFSGVGLRTATMLLAQMPELGQLNRREAAALAGLAPFNRDSGTWRGQRRVCGGRSLVRRGLYMAALTAARRNHILAPFYQRLRAAGKPPKVALTAVMRKLLIALNSALSPTPA

SEQ ID NO: 226697 - protein, 324 aa, unidentified
MENIALIGIDLGKNSFHIHCQDRRGKAVYRKKFTRPKLIEFLATCPATTIAMEACGGSHFMARKLEELGHSPKLISPQFVRPFVKSNKNDFVDAEAICEAASRPSMRFVQPRTESQQAMRALHRVRESLVQDKVKTTNQMHAFLLEFGISVPRGAAVISRLSTILEDNSLPLYLSQLLLKLQQHYHYLVEQIKDLESQLKRKLDEDEVGQRLLSIPCVGTLTASTISTEIGDGKQYASSRDFAAATGLVPRQYSTGGRTTLLGISKRGNKKGTVAKLAMRQPFVLFKGLTFQKLCLPGAFRPGDHHNKMLRPGLCVVHASPQYL

SEQ ID NO: 226698 - protein, 414 aa, unidentified
MEDILECCCGLDIHKESIVACLLKGPLKDGSKPQREMREFGTLSRDLLDLRSWLEAEECRHVAMESTGIYWQPVYAVLEQAFCDEMHLLVVNARHMKQVPGRKTDMRDAEWIATLLRAGLLKGSFVPERDIRDLRQYTRYRKALVRDITSQKNRIEKLLQSSGFRLSSFLSDIFGSSGMAIMRELVQVGFITNQSLDLCLKARARRKASEILSSLNGTLSMPQRQLLKMQLSHLRDLQENLQEVEAQIRDSFMRFEDPIELLDSIPGIDQTAAYAILAEIGQDMSAFPTAQHICSWAGLAPGSHQSAKKKKKQRVTHGNNYLKTMLCEVAWVIAGQKKQYLSTWYWRLKQRTDAKRAIVALARKLLVIIYAMLRTNQPYNEDKFLERKKASEQRRVGRMVNELTRLGYSVTFAS

SEQ ID NO: 226699 - protein, 352 aa, unidentified
MSIKYIGMDVHQATIVLVVLNEAGKCVMQTIIETKGSTIVQFLRGLQGSLYVTFEEGTYAAWLYDLLTPYVDKLVVCDPRKNKLLPSGHKSDKVDARKLAEWLQKGELSPVYHGSRSLRTLKELAHLYLVQDTTRVMNRLKALFRARGISCSGRAVYHARQRDLWLKLLTEGGARQRAELLYQQLELLQPLRKTAHQALLVESRRQPAHRILRQIPGLGPTRVALLQAIVQTPYRFRSKRPFWSYVGLAVVTQASAEYRVVDGRVCRSSKIVATRGLNRSHNHVLKEVFKSAATGAIQRDPVFKLGYFRLTQRGVSPEMARLTLTRKLAALTLTLWKKGARYDPEHVKPQAA

SEQ ID NO: 226700 - protein, 371 aa, unidentified
MRFYTGQHRFCAGIDLHARSMHVCVLDAAGAVVYDRNLPCHFPTLLQAIAPYREDLVIGAECMFGWYWLADRCAEHHIRFVLGHALYMKLIHGGKAKNDRLDAAKIARLLKGGNFPLAYVYPQGMRETRDLLRRRMYLVHKRAELITHLEILNAQNNLPPFGKKLSYAANRAELQIPERFSHPSVQMSATLDLDLIDKLDELIGQVELYLTRTAKVDDVQTYHRLRTIPGVGPILALVLLYEMHHLARFAEVGQFLSYSRLVRCEHESAGKKLGWGGKKIGNAHLRWAFAEIACLFLRASERAKQWKQKQEKKHGPGKALGILAARLARSVFHMIRKEEAFDEDRFWGRQVSDPQPAQSRKKPAGSRKKAS

SEQ ID NO: 226701 - protein, 342 aa, unidentified
MTFVGCDLHTRMQQVAVLDTRTGEVSERQLAHDGSAIEEFYAALPGPVTIGIESTGYAVWFHTLIQRLGHTVLVGDAAKIRAMVVRKTKTDRRDALHILDLLRHDRFPTIWVPDPATRDLRALLTHRMRLVRIRTMVKNGLHAIALNYRLARGSKLLRQAGLAQLHALALPPHTAQRRDQSLELLAGLTTQIRALDEAITTAALAHPDGPRLITHPGVGALTALATLVVLGPVARFHDSKHVVSYVGLAPALNASADKHHLGHITKQGSTLLRFALGQAAAHAARMDADLKRTYFTLVHRRGRSKAKVAVARKLLVRLFIMLRDQIDYDEFCRRGRAARAAA

SEQ ID NO: 226702 - protein, 328 aa, unidentified
MEEVKRFVGIDVAKAALDVFIGSGGGAFSVANDEVGIRELLRQLTPADFVILEATGGLEVPVASALATAGLAVAIVNPRQVRDFARATGRLAKTDRLDAEILARFGETVRPAARPLATEQALALEALVTRRRQLVEMLTAEKNRRTNAPKVLHRSIDEHIRWLEKRLVGFDDELAELIRNTPLWRERDELLRSVPGVGKVLSTTLLAQLPELGMLNRKQIAALAGLAPFNRDSGKLRGSRCIWGGRAQVRRVLYMATVAGVRSNPTIRAFYLRLRGNGKHAKPALTACMRKFLVILNAMLHNNTHWQTPALTSSLSPLLGAVSEHGCC

SEQ ID NO: 226703 - protein, 398 aa, unidentified
MTESSDYESVQVFIGVDVGKDTHHAVAINRSGKRLFDKALPNDENKLRSLISDLKQHGQILLVVDQPATIGALPVAVARSEGVLVGYLPGLAMRRIADSHAGEAKTDARDAAIIAEAARTLPHALRTLKLADEQIAELSMLCGFDDDLAAQTTQASNRIRGLLTQIHPALERVLGPRLDHPAVLDLLQRYPSPEKLASLGEKKLAAQLCKLAPRLGKRLAADIAQALAEQTVVVPGTNAAAVVLPRLALQLITLRKQRDEVALAVEQRVLAHPLYPVLTSMPGAGVRTAARLLTEVACRAFASAAHLAAYAGLAPVTRRSGSSIRGEHPSRRGNKALKRALFLSAFAALRDPLSRAYYTRKMSQGKRHNQALIALARRRCDVLFAMMRDGTFYTPQAS

SEQ ID NO: 226704 - protein, 408 aa, unidentified
MAKEPFNVFVGVDTHADTHHVAIISEYGKPLADQEFLAVGSGYRKILDFIASHGTAAAVGVEGTGSYGAGLSKVLRSEGLTVLEVNRPNRAQRRLKGKSDPLDAYQAAQSVLAQRGLSTPKAKDGPVECLRILRTARSSAMKARTAAINQIKGLLVSAPDTLRAKYREMATPTLITALQRSRPSGHVADPEYMTLLTLKTLATRYQALAEEITAADTALQEILDSYAPLLCDLPGVGPDVASQLLITVGDNRDRIGNEAQFAALAGVAPIPASSGKTTRHRLSRGGDRNANRALHQVVLTRMASCPRTKNYVSKRTTEGKNKREIMRCLKRYVSREIYRQILNPVPAPDISDLRQKRKSLGLTVNAVAGELNQWPSIISRLERGILRNDDLATSYRKWLEEQAAQKTN

SEQ ID NO: 226705 - protein, 452 aa, unidentified
MLALPSVHCLELPRPALVGGTIGAEDEMGNGVRLEDEELAGKVVAGVDTHADTHWLCVLDENGRVDLSEEFPATAEGYAALADAIGDPTGCAAVGVEGTCSYGAGLADELARRGFRVLEVLNKRKERKRGRGEGKDDAIDAERAARDVLAADGTSVPKLRGGWVDDLRSLLVARDRCVRSRVECHAAALSLARCAPEGQRRRWEGMGQDAMMASMAGLPEDGASPLERSMLALARAWETCSEEAGALELEMRRVLEESCPSLLAVYCCGPVSAAQLAVAAGENPSRLRSEASFAMLCGAAPIPASSGKTSGRMRLNRGGDRRANSALHTIAVRRMRHDPRTREYVSRRCSGERPLSKREATRCVKRYIAREIYRALMHPHDVGERIDRAGLAAARRSAGYTQAQVARALGVAPSSISGIETGRNQCRRLAERYSKWVLDGLPIDVENLRTVP

SEQ ID NO: 226706 - protein, 349 aa, unidentified
MEQNEVILGVDTHLDAHVGAVISETGKLLGTLSVSTDTAGYLNLVTWANSFGHLRRAGVEGTGTYGAGLARVLRDHEIEVLEVNRPDRATRRSRGKSDPTDAENAARAVLSGKATAIPKEQSGAAEAMRAVSVARRSAVKAKTQAINQLRALLVSAPQEIRERLLKTKTAECVASCARLRSLGNTPMLQTLTTTLRLLAKRWLALAEELNTLDAMLDRLTSQHAGRLRERFGVGPQTAAVLVAVAGDNPERLKSEAALAALCGTSPLQASSGKTVRHRLNRGGDRSANNALWTIAMVRMRSDPRTRAYVERRTKEGMSNKEIHRCLKRYIVRELYPLILADLAESTRVP

SEQ ID NO: 226707 - protein, 405 aa, unidentified
MQVLYKSCCGLDVHKKSVTACVITSEGKEIKTFGTMTEDIFALVEWIKEKGCTHVAMESTGVYWKPFYNLLELEDITALVVNAQHIKAVPGRKTDVKDAEWIADLLRHGLLKGSYIPDRDQRELRELVRYRKSLVAERAREVNRLQKVLEGCNIKLGSVATDVTGVSAKAMLKAIINGAGDPVVIAKLARGRMKNKQKELEKALVGLVGKHQKMLLTTQLKHIEFMDQQIIQLNQEIEERMRPFDEKLSLLETIPGVARRTAEDIVAEIGVDMDRFPSDAHISSWAGMSPGNNESAGKRKSGKTTKGNKSLRTTLVNSARSAARTKDTYLSAQYRRIAARRGGNRAAVAVGHTILVIAYHILKKHEPYKELGANYFDQRKKDMVVNNAVKRLEALGYKVTVEAAA

SEQ ID NO: 226708 - protein, 359 aa, unidentified
MRQLYAGCDLHGNSNLIGIVDGEGKRVFKKKLSNDFSLVRDTLKLFQEELVGIAVESTYNWYWLVDGLMEEGYKVHLANPSAIQQYVGLKHADDKHDAFWLAEMLRLGILPEGYIYPKQERPVRDLLRKRGHLVRLRTSLVISLQNILSRNLGRKVNVNDVKALREDRVTPLLESSEELALAGRVSKEAIDFLTHQIRRIEGVVEKKIELKEAYRYLLTLPGVGKILALTVMLETGPIVRFATVGDYVSYCRKVPSQWTSNGKRKGSGNKKNGNKYLAWAYAEASELARRFYPEPRAYYNRKMQKTNAPVAHSALAHKLARAGYYVMRDQVPFESQRLFGRGRGWNGEPELGLVKSHEA

SEQ ID NO: 226709 - protein, 431 aa, unidentified
MFVAVPPGRDESPVRVFATFTEDLEHLTDWLEQCGVTTVALECTGVYWIPLFEILEQRGIRPCLVNGRHMKNVPGRRTDWHECQWLQFLHSVGLLRAAFRPGQDICAVRTVLRHRNELVSAASQHVMHMHKALTQMNLQIQHVISDITGVTGFAIVDAILAGQRDATELVKLRDPHIKADPETIRKSLEGNWRPEHLFTLRQSRDLFRIYQQQIVNCDLEIEKMLRQFESRTDPTEKPLPPDRKQNRAGSKRRKKNGHPHPEFDLRTETYKLFGVDVTQIPGIEENALPLFSEVGRDMSRWPTAAHFVSWLALCPDNDISGGKLLWRGARRVRNRAGHLLRLAASSLHHSPTLLGCYLRRMKAKLGPKAATMATAHKIAVILYTMVKNQVEYDETLWATRDAQREKRFEAKLKRQAKQLGYDLVPIEPKAA

SEQ ID NO: 226710 - protein, 479 aa, unidentified
MNSEKYIGLDVHQATISVAVMDCRGKVVMESILETKAATLLEFLAGLRGTLSVTFEEGTWAAWLYDLLKPHVQKLVVCNPRKTALLKHGNKNDRIDARKLADLLRLNDLEPVYHGETGVRRLRELARSYLTLVKDLTRVMNRLKAMYRSWAIPCAGRDVYYTRHRAEWLSKIREAGVRRRAEHLYQQLDMLQHLRQQARRELLAESRKHAITAKLRKIPSLGPIRAALAVALIQTPHRFRTKRQLWAYSGLALETRTSGEYCYVRGQLRRSKKQVSIRGLNKDHNHDLKGLFKAAATRASVQPGPFQDFYQRSLAKGIKPTMVRLTLARKIAAITLTLWKKGENFDVEKLGKSSRRVPRGLRGRHVVKEHQGKLRTSRGLPRPMRIGTAMASRISRQAAKSGCAREWGGWGRLSDDGPGQHNPDRSEGPWGRAVGAARTEVPYSRIVPDTERGVHGESSGHEGRWQTRFLGRPCLIFRP

SEQ ID NO: 226711 - protein, 313 aa, unidentified
MLRTVCGVDVSKSKLDACIEPGGRLASFDNDAAGIVELAKFCREHAAELAVMEASGGYERRAFVGLWEAGVSCALTNPRSVRRYAEAMGILEKTDQIDASVIAPFAHAKRLAPTPLPSQAQQRLKALVARLRQVTDDLTVQKQRRASLLDNPEMLTSLDEVIALLKRQSRSLEGEIASMIDDDPLWALLAQTWRSAKGVADRTVAWLHAELPEIGTRSNKAIAKLVGLAPLADDSGSRKGKRHIRGGRAGVRSILFLVAAIVARYDKSLADFRARLVAAGKPKMVIRIALARKLLVRLNAKARDARIAYANAT

SEQ ID NO: 226712 - protein, 485 aa, unidentified
MNVWQASSSLPSRPALASEEEESVDQMTLGIDVACRAAHQASLADERGRFAWTGRRFRTTAADLERLWAQVPAGAKLTVVMEPTRNAWVPLAAWFRRRGAVVILVPPEQSADLRDYYSKHAKSDHLDSRMLARLPLLHPEGLRPSPGLGPADGLRRATKLRASLVKRRSTILARLDAYLELLGPAWHAALGGDLALNTPLRFLAAGYADPHALRRLGKTRLTRFIWRYSHGAWGEQHATRLLAAAAETLQLWDGELSYPDLAEDIATEARLALQITTEIRDLEQKIAALLHDRDPAGIMTSAPGVGVINAAQILARLGDPARFQSLAGARSFTGLIPSLSASGTSGHHGPPTKSGDAPLREALFMAADQARRTDPTLAARYHRLMVHQGKHHNSALCHISTVLLTRIIACWRAGTPYQLRDTDGTPITPTQGRQIISQRYQISAELRAQRRTSHTSTRRRTGEERSRQALRHQPASPHATTRPPA

SEQ ID NO: 226713 - protein, 352 aa, unidentified
MNSPFTIGIDLAKEVFAICVLDERGAVLERRVLRRAAFERWAVQAPDGVIAMESCSSAHHWGCWFSARGHVVRLIAPEFVTPFRKGGKNDAADAEAIAVAARQPTMRFVTVKTVEQQAILSWHRARQGWVDERTALINRLRGLLAEFGIVLGRSRSTLRTALPRLTEDARLPAQVRALLLEAREQFAALDDRVARCDAEIAAHLVDSAPAQRLRALLGIGPLTASALVATVSNASSFKNGRQFGAWLGLTPQQHSSGGKARLGKVTRHGDGYLRSLLVQGARSALQSALRCLPERLSRLGRWIVDLCHRKGYHKTLVAIANKHARMLWAMLAHDETYDPLAWQRYRAPAATV

SEQ ID NO: 226714 - protein, 330 aa, unidentified
MKSWNVILGVDVSKLTLDICWAEHNLHVKIDNCTKGFTVLKKWCRTNQIDLKETLVVLEYTGGYEYRFLQFCESLPVAYCRIPGLEIKQSMGMTRGKSDQADAFRIGQYGEEKRKRMMPSKPLDNNILRLKQLLSFRKRLVREKAGLESTVKERKYMYSINKADTIIRIALDKIKANKKHILQLEQEIMEVIKSDELMLLNYRIISSIKGIGPVNAWMTIAYTENFTSFTDPRKYAVFVGVIPFEHSSGTSIKGRKRVSHLAHKGLKNELNQAAKTAITHDPEIRAYAERKLKNKAYPLVLNNVKFKLILRMFSLVKRGEKYVENYRKAA

SEQ ID NO: 226715 - protein, 358 aa, unidentified
MKQYVGLDVSQKETSVCVVDEVGQILFEGKAKSAPGALAALLRKRAPQAERIGFETGAMASWLWHELRRVDLLVVCIDARHAHAALSVRMNKSDQNDARGLAELVRVGWYREVKVKSEESQKIRAILVARSRLVSMRRDIENQVRSLIKEYGLLFPRAIGQQFRNLVSELLGDNHPLLSVISPLLLIHEHICQQQNKFDDEVRQLAKADETTRRLMTVPGVGVVTALTFRHTIDDPLSALTVGAYLGLTPRRNQSGETDINGKISRWGDRLLRTYLFEAATVLLYRTKKWSSLKAWGMKLAKRIGMRKAKVAVARKIAVILHCIMAHPSTGGSRSQSDICSQVPGPVCRTGDVPLGRC

SEQ ID NO: 226716 - protein, 319 aa, unidentified
MTIKQNEKNNINVGVDVGKAQLDIYIHERQLHFCVNNDKQDIRDALNRLNRYQVERIVCEATGRYEHLLVEMAVDKQLPIIVNNPILIRRYAGAIGQLAKTDEIDSRIIAQYAAVLKPPVRKHKTKQVIKIKDLLVRRRQLIEMMTMEKNRVQIMPTFLRGDIQRHLKHCQKQLDKLDKKLNALVDDNEAWREKRERLLSVPGIGPVVVNTLLGDLPELGELTNKQIAALTGVAPYNRDSGKLQGKRRIRGGRATVRTILYMSMLTSIQHNPVIKNFYQRLVAEGKHKKVALTACIRKMIIILNAMLRDGTNWNEQMTK

SEQ ID NO: 226717 - protein, 345 aa, unidentified
MELHTIGIDLGKTVFHLVGINLRGEVVVRKKFSRKQLLHFTSNLQVELIGMEACGGAHFLGRALREQGHEVRLMPAQYVKPYVKTNKSDYIDAEAIAEAVGRPKMRFVPIKSDDQLDLQSLHRVRERWVMRRTAVINQIRGLLLERGITLRKGRCHVDAALPGILEDASAKLSGALRVLLAQLKLELDHLQMRIDEADTVIKKTAGENEACRRLVAIPGIGPITATAIIAAIGNGAAFKKGREFSAWLGIVPGEYTTGGKQKLLGISKRGNSYLRRLFVHGARAVLQQSAKQSSGLSSWLAQLTTRTHRNVAAVALANKLARMAWAVLAKNEPYRPPILVGTTTA

SEQ ID NO: 226718 - protein, 367 aa, unidentified
MIVIGADVHKSTHALAAVDAATGQLLGEREITAREQGHLEALRWAHELGAEVVWAIEDFRDLSHHLEQALIAAGEQVVRVAPKLMGASRRGEREPGKSDQIDARAIARAVLREGIERFPAAFLDQEAAEIRLLCDHRDSLVNERTRLINRLRINLVVLDPELEATVPSRKLDYPGQLQRITRRLRALPQTARVRVARQQVKRIAALSREAEVLKRELRDLIHAHRPELLAETGCGPLCAAILIGQTAGAERFASDAHFARVAGVAPIPVSSGRHDRHRLDRGGNRQLNRALHVIAITRGRLDPETRAYLARKEAEGKSRIEAMRCLKRHLARRYHQLLLRPPAIPHNSSVIFGTAPMRCAIQRDPVI

SEQ ID NO: 226719 - protein, 335 aa, unidentified
MTASMDEEAPAMESMRWVGVDVHAKESVAAVLDQATGEVSTHRIAGRPDVVLDWLTTVAQPFRAVYEAGPTGYGLVRRASERGLDVVVCAPGHILKNATDHIKVDKRDAVRLARLLSAGELRLVRIPEPDQEQLRDLVRSREDVRVDLTRIRNRIGKFLLRRELYPPQHAESWGVLHRKWLQQLRFEDRASELVFQDAMQAHDILVARREQLERALAEIAASSPWSRTVARLRCLRGIDTLSALGLVAEVGDFRRFVHPRFLSSYLGLVPSEHWSGDKRRQGGITKAGSKHARRLLVEAAWQYRHVPRRKRSTVVAVAVGRELAAYCWEIATLTG

SEQ ID NO: 226720 - protein, 382 aa, unidentified
MDLLLDCCAGLDVHKKTVMACVRRTGPDGVVTSQVRTFGTMTAELLALSDWLEAQGVRHVAMESTGVYWKPIFNMLEGCFEIILVNAQRLKKVPGRKTDVKDAEWIAQLLQYGLLSPSFIPPPEIREMRDLTRQRTQLIRDRAAVVNRIQKVLEDANIKLASVASDVLGVSGRAMIRAIIDGQDDPEELAELAKRRLRGKLPELKQALHGRITEHHRFLLRALLDQIEALEGLIARFDAQIDQAMVPFAVAAERLQGIPGVGEQAAEVIVAEVGTDMAKFPSAGHLASWAGLCPGNDQSAGKQRNGKTTKGSQWLRTTLVQVAWAASHTKETIFSACYHRWAKRLGRKKALVALAHKILVVVYHLLKDRTEYREQWAPAKLA

SEQ ID NO: 226721 - protein, 346 aa, unidentified
MKINRVGVDLAKNVFQLHGVDRNGKALWKRRLTRGKWLAVLCDTVEPGTEIGMEACAGAHHWARQLMQRGYPVKVIPPQFVKPFVKSNKNDANDAAAICEAMGRPDMYPVKVKTVEQQDLQAMHRIRDEIKGHRIAKANQIRGLVTEYGLVAPQQLSALRSAIPDWLEDADNGLTFRFRQLLQGLWGDLYALDQRMTELDKQVAVVAQEDPTAKRLQQLRGVGPLIATALVATVGDGKQYRKGRDMAAALGLTPRQHSSGGKDRLLGISKRGDAYLRCLLVHGARSAMRTAKDKDDRLSRWIINLQARRHANVVAVAMANKMARMAWVIMTKDVDYDPDLAAASVN

SEQ ID NO: 226722 - protein, 366 aa, unidentified
MKKISTVRVNGNMIFKGHKFTIGLDLGDRWSCYCVLDEAGKIILEQKVAMTPEAMKQAFAKIPRSLIALETGTHSPWVSRLFTELGYKVIVAHAQKVQLITKSNRKDDRHDARTLARLARIDPELLGPVRHRSAQAQIHLTVIRARAELVRARTSLVNAARGLVKSYGQRLPKCGTQQVSRELGVGLNAELREVLEPLLKEVESLNERIQEYEVRMEKIAKESYPQVELLKQVKGVGTQIALTYVLTLEDPHRFPKSREVGCFLGLCPGRRDSGESQPQMRISKEGDRYLRTMLVQGAHYILGPFGEDSDLRRWGLKLAARGGKNAKKRAVVAVARKLAVLLHRLWVSGEVYEPLRNSQKAMRAAA

SEQ ID NO: 226723 - protein, 391 aa, unidentified
MRKPKTKTVNDFSRCLDPLDMDATVIAVIEMSQSSWLVAGIVPGVERQPLKKLAIDEHGLLNLLNRWRAEAEKQGHRITRIAVAFEAGHDGFWLARWLAARGVEAHVIHASSVAVTREHRRAKTDRLDTELLKRGFLGWLRGERGHCKMVAVPTLAEEDSKRPSRERETLVGEASRIITRVKAAFVRLGIRGFNPKLKAAATRLETLRTPEGEPIPPNTLAALKRDLERHQIVKKQIREIEQTRLDVLKQAPEKGPHAMVLLLARVIGVGVETADMLVREVLSRTMRDRRAVGRYAGLTGSPDESGAKRRDKGLARSGNARVRHGMIQLAWRFLLFQKDSALARWYRQRTADAPSMRKTLIVALARKLLIALWRLARDGVVPEGVRMRPAA

SEQ ID NO: 226724 - protein, 343 aa, unidentified
MSEITVIGLDLAKHVFQVHGADLDGRPVLRKRLRRGQVLGFFASLSPCLIGMEACAGSHYWGRELQALGHEVRLIPPQYVKPYVKTNKNDAIDAEAISEALTRPTMRFTAVKSAEQQSVLMLHRTRELLVRQRTMLVNALRGHCGEFGIVAAQGLSRAGDLIKRIEDPADTALPDLARQALQCLTSQIRAIQEQIALIEKKLLAWHSYCEASRRLAEIPGVGLITATAVVASVGNATQFRSARQFAAWLGLVPQQHSSGGKERLGHISKRGDGYIRRLLVHGARAHLSWSRRKKQIRSAWLTGLLARRPTNVVLLAMANKTARIAWAMLSRGERYQEMFAAAA

SEQ ID NO: 226725 - protein, 440 aa, unidentified
MNQEDRSRLEEFRQFRKEVRGSGEYLLVGVDIAKDKHYAFFGTAQGKTFLRRLVFENNLEGFRRLLAQAKALRDQNGLKRIVFGMEPTGNYHKPLGEHLIRCGHLVVLVSGVAACENRKTLDGRWDTNDTRDAANVADLMSQGKCLFYEFPVGALSDLRNLLSLKRRFRRVEHGYQVRIRNHLLAKYFPELDRYYRRPSPTDLAIVRWCLDPSVIAGLEYKEFVQRVWTGRRGVGKERRLQAIWKLAGDSVGCEAGVTVEFEAKVMVEGLKQIRESIGEIEEKIQEICSSFPEYEYLLSIPGFGPDVASKVLGAVGNPFRFQNGRQVLKLAGFDLCAKRSGKSSENAVPVISRRGKADLRNGLYQAALIASLKNPGFIEYYTEKLRGREREPGIKYKMRVKLAAKFLIIAWTLMKKRTPFHPGFIRAAGPSFWVGRRGER

SEQ ID NO: 226726 - protein, 364 aa, unidentified
MGLERTSVGLDVHARSVSAAAIDGVTGELIRQRLVPDQRVVLDWVRGLPGPAAVVYEAGPTGFGLSRAFTAAGIRCEVAAASKISRPSGDRIKTDARDAVLLARLLRLDDIVSVRVPTVVQESARDLVRAREDVRVDLMRIRHRISKLLLRHGHVYYGGEAWTGKHQQWLNQIHFDGPERAGTQAAYDAEREALTLTLLRRRRLDAQIAALAADSEFTPVTRRLCCLRGISELTAFALAVEIGDWDRFTGASIGAYVGLVPGEHSSGGSRHQLGITKTGNSHVRRLLVEAAWHHQPGYRIGTTMRARWAQAPAAAQARGHAGNLRLHDRWAQLATRKKKHTVACVAIARELAGWCWSLATLPDD

SEQ ID NO: 226727 - protein, 369 aa, unidentified
MEKDTTYVGLDDSKRKIVAGILHPGAAQPELREIANDPRQIRRLFERLKREGPVAACYEAGVSGYDLYRQISALGVACAVMAPALTPRRPGQRIKTDRRDAAKLVRLFRAGELTAIHVPAEAEEAVRDLVRCRDDIRRDVLRWRHRVLKLLARHGRAYLAGKNWSQAHWRWVREQRFDLPPLQRAFEATLFALEQALARQAELDKEIQALATTAPYREPVGWLRCFRGIDTLSAMILVAEVVDFQRFRRPRELMAYLGLVPSEYSSGETQRRGALTKAGNSHARRVLVEAAWHYRHRPTIGRALASRSQGQPDEIVSHAWRAQQRLHRRYRHLVGHGKRTPVAVAAIARELVGFIWAALTRHESRRQAA

SEQ ID NO: 226728 - protein, 345 aa, unidentified
MEIRTIGIDLGKTVFHFVGVNARGEVVIRKKGSRTQLLRFTSNLRECLIGMEACGGSHFLGRALREQGHDVRLMPAQYVKPYVKTNKNDYIDAEACAEAVTRPTMRFVPIKTDDQLDLQSLHRVRERWVVRRTAVINQIRGLLLERGITIRKGRHHIEESLPRILEDPDNKLSGALRVLLRQLQLEMQYLHGQVEESDQLIVRIAGELEPCRRLIAIPGIGPITATATIAAIGNGAAFKKGRGFAAWLGVVPGEHSTGGKQKLTGTRRRGNKYLRKLFVQGAHSVLLQRTKQSSGLSMWLANLVTRKRKQVATVALANKMACMAWAVLFKGEAYRPPLLPQTVAA

SEQ ID NO: 226729 - protein, 401 aa, unidentified
MQDTQQRDAVDVFVGVDVGKGHHHAVALDRNGKRLYNKALPNDEAKLRALIAELKTHGRLLFVVDQPSTIGALPVAVARAEGVLVAYLPGLAMRHIADLHAGEAKTDARDAAIIAAAARSMPHTLRSLRLADEQLAELTMLCGFDDDLAAQVTQTSNRIRGLLTQIHPALERVLGPRLDHPAVLDLLERYPSPAALAGTSEKTLANRLTKLAPRMGKGLAAEIVQALSEQAVTVPGTQAATIVMPRLAQQLAALRKQRDEIAAEVERLVLAHPLWPVLTSMPGVGVRTAARLLTEVAHKAFASAAHLAAYAGLAPVTRRSGSSIRGEHPSRRGNKVLKRALFLSAFAALRDPVSRAYYSRKIQQGKRHNQALIALARRRCDVLFAMLRDGTIYQPKSVPNA

SEQ ID NO: 226730 - protein, 367 aa, unidentified
MRAGVREVLCPPVPAGGAIPIGIPAVEEDDMPRIADSAQAVTGGVDTHAEVNVAAVVDAIGRVLGTEEFPTTAGGDQAVLAWMRRHGRLVKVGVEGTGSYGAGLARYLAAQGVEVVEVIRPNRQARRQRGKSDAADAVAAALAALNGEASGRPKTHDGAAESIRMLRVARRPLRERLAPLPTNERVAIAARFRPGELTDPTEAAKAAMAIVARRHQTLTAEIDQLDARLDALVEHAAPPVFLAKQGVATQVASALLVTVGDNPTRLDSEAGFAALCGASPVDASSGKQRRHRLNRGGDRQANSALWRIVTIRMSHDPRTRAYVARRTAEGKTTKEIIRCLKRYVAREIYKALVAHPGQRPAVTGQLP

SEQ ID NO: 226731 - protein, 294 aa, unidentified
MDVASQDLGSSKVYSNDTKGVKQLFKDLKEHPVHLVCEATGGYESLLIEQAFAHNLLISRVNPRQVRDFSRAKGYLAKTDKIDAEMICQFGQLFKPDAMKPLSETEKSLSAAVRYRSKLIKQQTRETIVLKTERNSFVRKELKASLVSLARRIERCESEIYRLVASDEEKKKKCARLEEVKGIGKLTSAIVIAEFPELGTLDDKSVASLVGVAPMNRDSGKCRGKRKIQGGRGNIRKSLYMPAMSARRFNPVFKEFYDRLIERGKCHLVAITAVIRKLICLLNRMLKDPDFCLS

SEQ ID NO: 226732 - protein, 428 aa, unidentified
MKNRNTQKLEAITPGTLIVGVDIAKETQWAQFVNYRGLELRKFLKFKNHKNGFDSILASIEEICKNRRLDNIIVGMEPTGHYWKPLANYLLKNKVNVVMVNPYHTKRAKELDDNSQTKSDKKDALTIARLVRDGRYYEVYMPQDIFAELRVLSNSRISLMKRSNALKNTITAVMDEYFPEIVTVFKHPLKGKAAMQILKSCPFPSLILELGIDGVLVEIKKAVKKTVGRKKASQLVKTAKSSIGVGYGLVSVKLKLGLMIEELELLTKQLKQLEKAMEKALTDTGHDELILSIPGIGVVTAASFLGEIGDPMRFDHPRQICKMAGYNLIENSSGKNKSRTVISKRGRKNLRSILYQMAMTMVAVNHEMKELYRYLKTRPHNSLKKKQALVVISKKIVTVIYNLIKKQTEYRAELVLGEFRKKQIKQAA

SEQ ID NO: 226733 - protein, 408 aa, unidentified
MNTLYVGIDVSSKSNVVYLMLPNGDKHSNFSVANSHEGSTQLVKRILSALTSHSLDTVLIGLEATSVYGDNLVYFLREDATLAPFNRKIHVLNPKQVKKFHDAYNDLPKNDYVDSFVIADCLRFGRINKEVYMGDYRYKALQNLTRARFFAVQNLVKEKQRFMNVLFKKYSTMTQEKVFSDTFSTTALAVYDEFESAEALANMDLHELTDFIIEKGKNRFPDPDAVAKAIQKAARSSYRLPKTVNDSVNQVLSISITSMKALESQIKEFDKAIKAQMELLPNVLISIPGIGPVYSAGIMAEIGDINRFNSQAALAKYAGLAWKQHQSGGFESEVTRLIPSGNRFLKYYLCEAAFSLIRCDKEYSDFYHLKYKEVNRCQHKRALALTARKFVRLVFRLLKDNRLYCPAK

SEQ ID NO: 226734 - protein, 417 aa, unidentified
MSLNIVGALFFVGIDWAAASHAVCVLDAAGRPVAAFTVEHSAAGLAELIRRLARLGDPEQMPVSIERPDGRLVDALLEAGYPVVPVKPNAIKTWRESETGSGAKSDAGDAEAIADYLRCRAHRLTVAAPYSAETKALRTVVRSRDDLVDMRVAATNQLSALLDAHWPGAKAIFADVESPIALEFLTRYPTARHAQHLGAKRIAAFCAKHGYSGRRTGEQLLARLRAAPAGVLDETMCEAVRDAVTALVTVLKALNAALKDLGRSVVAHLGEHPDAETFTSLPRSGQINAAQMLAEWGDCRQAYDGPESIAALAGATPVTNQSGKHRAVHFRWACNKRFRQAITTFADNSRHDSAWAATVYADARARGHDHPHAVRVLARAWIRVIWRCWIDQVPYDPARHGNAARLVQPDQPKQFAA

SEQ ID NO: 226735 - protein, 386 aa, unidentified
MQKLNDLSRSLIVLEPAVTLIAVIEMSLSSWLVAGIVPGVERQPLKKLAVDESALLKVLHRWREEAEKAGRRIERIVVGFEAGRDGFWLARWLKARSIEAHVIHPASVAVSREHRRAKTDRLDTALLKRAFLGWLRGERDHCKVVAIPTLKDEDAKRPNRERESLVGDQSRIVNRMKAALIRLGIRGFNPKLKRAAGRLDSLRTPEGEPIPPNTLAELRRDMERRRLVSNQIRQIEKARLKHFEQAPNDGPHAMVRLLARVIGVGIETADMLVHEVLSRNMRDRRAIARYAGLTGSPDESGRKRREKGLARSGNGRVRRGMVQLAWRFLTYQKQSALAQWYRARTENALGARKPMIVALARKLLIALWRFVRQGVVPDGLVLRPAQ

SEQ ID NO: 226736 - protein, 398 aa, unidentified
MLVGWDWASETHDVTVLDEAGMVVDRWVLRHTERELEEALRRLARHGRPGELPVAIERTTGLVVERLLRAGHPVVPVHPNAFHAARSRWGASKAKSDPGDSYKLADYLRTDGHRLRRLRPLDARTRELQALCRMRDDHVAARTAATNQLGALLEAHWPGAKAIFSRLGSEIALAFLEDYPTPEAAGRLGEARLAMFCRRHSYRGGRAPAELLERLRSAPVAPVGISPETLAELVRAQVRLVRATLSTIAELDQALGAALLGHPKAPLLAPLPRVGEVSLAQLVGEVGPILERSSHVEQASAEAGAVPVTKESGKAKSVQFRLATNRHARKALTAFADNSRHASPWAAALYADARRRGKRHPHAVRILARAWMRVIWACWHNDTPYDPSQHGGERRLAA

SEQ ID NO: 226737 - protein, 418 aa, unidentified
MDRNMDVLHERCAGVDISKKDAKACVRTPSAKRRGTFTTQTTTWGATTNAVLALREHLLAAEVTLVVIEATSDYWKPFYYLLADELNVILVNARQVKNLPGRKTDVSDAAWLAQLGAHGLVRPSFVPPQPVRELRDLTRARTQMTRERGQIAQRLEKLVEDTGIKLAAVASDIMGVSGRAMLEALTSGERDPQVLAELAKRKLRNKIPELTEALTGRFRAHHAFLTRLHLDHYDQLTDAIRQLDARIEEAMTPFHPALDLLDTVPGINRAVAEVIIAETGSDMSRFASAKHLASWAGVCPGHHESAGRAKNTKVRPGNPYLKGALGLAAFGAVRTKDTYLQARYKRLTARRGPLRALVAVEHSIITAIWHMLTDHVPYQELGGTYFTQRDPERATRRAITALNQLGYTVTLNSLESAA

SEQ ID NO: 226738 - protein, 334 aa, unidentified
MQNITLIGIDLGKHSFHIHCQDKSGKALLRKKFIRTKLMQFLATCPPSVVVMEACAGAHFMARCISDFGHETKLISPQFVRPFVKSNKNDFVDAEAICEAASRPSMRFVQPRTETQQAMRALHRVRESLIRDKVKTTNQIHGFLLEFGISLPIGDAVIKRLSLVLAEHEIPEYLSRLLVRLHTHYFYLVEQIAELESELSQSINADDTAQRIMTIPGVGPITASLLSSQLGDGKQFSCSRDFAASTGLVPRQYSTGGKSTLLGISKRGDKNLRRLLVQCARSFIMRLERKHGKLAEWVREQLNKKHSNVVTCALANKLARIAWAITTQKKEYQA

SEQ ID NO: 226739 - protein, 358 aa, unidentified
MSKHSENQEVKVMGIDLAKRQFHVHGVDVGGRKVLSKKFSRQKLKEYLVTLLPCTVAMEACAGAHYWGRLLRSYGHEVRLIAPQFVKPFVKSNKNDAADAEAICEAAQRPTMRFVAVKEVEQQDIQSIHRMRSLAVERRTAQINQIRGLVLEYGIEIPTGRFNLLKRLPEILEDAENGLTEFFRKELFGLYEELRHLDARIKHYDEKLKQIAQADERLQRLQTIPGIGPVIATALLAAIGDIQAFKNGRELAAWLGLVPRQHSTGGKATLLGISKRGDVYLRQLIIHGARAVLRWADRKTDRTSRWAAVLTVRRHKNIAIVAMANKMVRVAFALLKKGENYRVQPLVAHNTPLGPIEA

SEQ ID NO: 226740 - protein, 338 aa, unidentified
MTLYAAIDLHSNNGVLSVIDEQDHVLFERRLPNDLQRVREALAPFTAELKALAVESTYNWYWLVDGLQDAGVNVRLVNTAATPQYDGLKHGNDYTDARHLARLLRLGILPEGYIYPREQRGVRDLLRRRFLLVRQGVTLTNSLQCAWSRRTGHGLRSRDLQQLSAQTVEATFPDVHERLAVLSELKLLEGVRAQIDQMEGWVTDAIHHTPALHALRSIPGVGVILGSTILLETGDIARFASVGQYASYCRMVESIRLSNGKKKGQGNAKCGNRYLCWAWIEAANFAIRFSPEIRRWHDRKAKRKPRPLAIKAVAHKLARAGYHLIKTGGHFDVKRAFG

SEQ ID NO: 226741 - protein, 340 aa, unidentified
MTITTIGIDLVKNVFAVHGVDQNGKAVLIKSRVTRTALPGLIAGLPPCVIGMEACSGAHYWARLFRQYGHEPRLMAAKFVSPYRMAGKSGKNDAADAQAICEAVCRPHMRFVPVKDESQQAMQCLHRTRQGFIEEKTATYNRLRGLISEFGVIAPQSTDALRHMVSAQKDSLPLQVQQCVDDLLEHVARIEANIAEYDRILFRMAKTDHRSQRLMELKGVGPTTACALVASIGNAHDFKNGRQLAAWLGLTPSQYSSGGKSKLGRITKVGDSYLRTLLVQGARSVLSGAEKRTDSFIRWVCSLVERRGYWRAVVAIAAKNARLCWASLHYGDDFRLYSAS

SEQ ID NO: 226742 - protein, 398 aa, unidentified
MRVERVWAGVDIGKGHHHVVVIDAEGARMLSRRVINDETVLLELIGQVTGLAEEVRWAVDVSTGGAGLLLALLVAHGQQVFYLSGNQVNRAADGYRGEGKTDAKDAAIIADQARMRRDLASLRVDDELIVELRMLIARRRDLTGDRVRLVNRLHDQLLGISPALERVLDLTNRGPLVLLTRVQTPAAVRQLGTTGLTEWLRSQKVRSASALAATVVAAAESQQTTLPGEQLAAQLVADMAKGVISLDEQLKQTDKLIEGRFRRHRHAAVLLSVPGIGVLLGAEFLAATGGDMTAFASADHLAGYAGLAPAPRDSGRISGNLHRPRRYHRGLQRALYTSALVSIRCHDQSRNFYDRKRSEGKRHTQAVLALARRRVNVLWALLRDQRCFESTPPHAVAA

SEQ ID NO: 226743 - protein, 348 aa, unidentified
MTLVGCDLHSRKQQVAVLDTTTGEVLEQELVHDGDAVERFYRALRPPVTIGIETTGYTQWFHGLMHRLGHTVLVGEAAKIRAMVVRKTKTDRRDARHLLDLLKHDRFPTVWMPDPDTRDLRALVAHRVRLVRMRTMVKNGLQAIALNQRLAIGSKLWSQRGLAQLRALELAPHTRRRRDDSLELLAWITSRTDQLDAQIADVVAHDPRARLLLTHPGVGPLTALTTVLVLGPLARFPAGKHVVSYVGLAPAINASANKQHLGKITKQGNALLRWVLGQAEPLAARADDDLRRRYFAVLHRRGRPKARVALARKLLVRLYIMLRDHIDYDEFRRRGRAASAQHAVMTIT

SEQ ID NO: 226744 - protein, 366 aa, unidentified
MKKHTTINQSLSADVSTCMNVAVDLAKKVFQVAGEDALGQVIFEDRIKSREAFQAFLQKLPASVTVLVETGPGAQAWARLLQAQGNPVCILPAQHVANHRSGPKNDRNDALAILRAGRDCTISAVPVKSAAAMAMQALHRARQGYIRRRTAVGNQMRGLLLEQGVSMAQGETAISQRVPRILEDATQPLPDLLRELIAELLGEWDQLGERVNVLTGRLETAAKQNETAKRLMTVRGVGPIIATALPAKQTEPERFANARQFAAYFGLVPSQHSSGEKIRLGKMSKQGDAYLRSLAIQGAHAVLRQVRPDSEQPDDQRLQRWISRLGRKEAAVRLANRNLRILWRLLQNDQTYRRQPGNSQEATMSH

SEQ ID NO: 226745 - protein, 339 aa, unidentified
MKITVIGLDLAKSVFQAHGVDESGRTALVKKLHRKQMLPFFSNLPPCLIGVEACATAHHWARTLSAMGHEVKLMPPSYVKGYVKRGKSDALDAEAICEAVQRRSMRFVPTKTVEQQAILMAHRTRSLLVRQRTMAANALRAHLAEFGLVANPGIANLAKLSEKALAEPDGLPAYARRALAILVRRLVELTEIGALDREFGAWHAQNEASQRLATIPGIGLITATAIAATVTDPKQFRSGRQFAAWLGLTPQQQSTGGKTRLGGISKQGDRYLRRLLVVGATAVMRYAKDKATPLADWIRELLAKKPFRLVSVALANKLARIAWAVLTRGETYRPKAPAH

SEQ ID NO: 226746 - protein, 444 aa, unidentified
MRAIGLDIHRDFCEVAIAEEGRVRAAGRIGTAPAEIEAFAGGLRPDDTVTLEATGNALAIVRILEPHVRVVLANPRATKAATRLRAKTDRIDARTLAQLLASGFLPEVWVGGEATHALRRRVGRRVHLVRQRTKAKNQVHAVLLRNLAGRPPVSDVFGTRGRAWLGRLVLPADERETLEACLRTVDFLDAEVGQLDRALAPLVLGSPDMRRLLTLPGVSATTAATLIGVIGDIGRFPTPGRLVAYLGLDPRVSQSGNDPARHGRISKQGASEARHVLVEAAWVATRTAGPLRAFAQRLAARRGWNIAIVAVARKLVVIAWHMLTRGEDYAFARPILVRAKLREIELRSGAPRARGRSIGVAPTAAERQLERELAVAAEVAYERLVKDWVPGRKQVREPQAGRASHDALRQPARQGSAPTLRFGSASLPHQTDYAPDPGMRQDGT

SEQ ID NO: 226747 - protein, 331 aa, unidentified
MQYVGLDVHKAFCQASVLDQDGEELTNIRIPTRKEELESFLCGFDEAKFVLESTGVWEFVYEIIEKNGFEVLLAHPMKVKAISSAKIKTDKVDAMTLAQLLRMDMIPASYVPDRPVRDLRELVRHRKALVEKSTAFKNRVKAELLRRGIRRPEELKTSWSGRSMDWMRSLGIPVIDSNLDVINALQDQIKSVNDLLIPEYWKNESARIISSMPGIGYYGAVLIASEIDDVRRFTDAQHLCSYAGLVPSVHQSSTVSYLGPISKQGSRHLRWILTEAVLIHVSNEPDSKLSDFFRRVARKKGKQVATVATARKMLTAIYWMLIKKEKFKITG

SEQ ID NO: 226748 - protein, 343 aa, unidentified
MEAYAGKQFVGIDLHRRRTVIVRTTEAGEVLEAVRIVNDVQRLASVMARAGDCPEVVLEATYGWYWAVDALQAGGANVHLAHPLGVKAFEYRRVKNDVRDAQDLADLLRMGRLPEAWIAPPATRELRELVRHRAKLVGLRSHCKAEVHAVLAKCGVQVLMSDLFGLAGTELLDRLELPAPYAARIASLRRLMDDVDFEINLFAGIIRGRMAQEPGYTAVQKIPGIGPTLGAVLVAEIGDITRFASASKLTCWAGLTPKHHESDTHVRRGRITKQGSRLVRWAAIESVKTVSRGSEVGVLRERVADRRGRNIGSVAAARLQLEFVFYALRDGHVRALEHLPRVA

SEQ ID NO: 226749 - protein, 368 aa, unidentified
MKQQTSAAPETRNKGRRIIDFSGKTIFVGIDIHKKDWQVALFYEGITLENFRMSASSSQLMSHLTKRYPGASLRCVYESCAWGFTLQRQLAAAGIDCIVVHAGDVPGSNKEKANKTDKVDALRLARHHAAGLLQGIHVPEEDLQKQRNLIRFRKRLTGDLNRCKNRLKSLLKYQGIDIPEQLDKSKWSRNFITWVEEQSEKDEILKDVILLMLEEVQQLRQLLLKTMKKLRSLMGTDRYSENIDLLISAPGVGPTTAMLFLMEIGEIERFKTFDRLNNFVGYYPGSNSSGEKEQDTGISKRKHKELRTALVESAWQAIRIDPALMEAYQQLCKRMKGSEAIIRIARKLLRRMRAVLLKKQKYEKGIVS

SEQ ID NO: 226750 - protein, 350 aa, unidentified
MSTMAQCEMVVTVGVDTHRDVHVAAALNERGGLLGTGSFPATATGYAALVRWAVGFGAVERFGIEGTGCWGAGLTRYVTDQGFDCVEVIRPNRQHRRRYGKSDSADALGAARAVLSGEATGRPRGGEGPVEGLRTNRVALRSATKARTQAINQLKSLVVTAPDKLRRVLEGLTNKQLVATVTRFRVTGDLGVINTTKMAMRSLSRRVESLEEEITELKAFRESLVTQAAPTELLNEYGVGPDVAASLLITVGTNPDRVATEAAFAALCGVSAIDASSGLQQRHRLNRGGDRQANHALWRIVTVRMAHHQPTRDYIARRIAEGKTKKEAIRALKRHTARRIWRILHPLDKQ

SEQ ID NO: 226751 - protein, 325 aa, unidentified
MTNETREPVYVGIDVSKDSLEVALADKAASVRFINDEQGVKALLEHLAGHNVAVVLLEATGGLEKRCAHALYLAGMTVVVANPRQAHEFAKSMGYLAKTDGIDARILSHFARTLHGSERFDKLQLKMATPQQEQLQALVTRRSQLVQMRVAESNRLALAHALSAKSIQAVIKLLDKQIKTLDEDIGNRLKQHFAQKLKLLEGFKGIGEGTKAVLMAALPELGQLNRREIGKLVGVAPLNHDSGKMRGKRSVWGGRADVRSALYMAALSAVRFDPTIKAFYERLRAAGKPPKVALVACMRKILSILNAVIKSNTAWEQRCPQASTA

SEQ ID NO: 226752 - protein, 428 aa, unidentified
MDELDRNRLEQFRQLRGEIRNSEQYLIVGIDVAKDRHHAFFGTATGKTLLKRLVFSNDQEGFRKLLDQAEALQVRHGLKEVVYGMEPTANYHKPLGEYLIHLGRCVVLVSGVTVKRNRETLDGRWDKHDGKDSANVADLVSQGKCLYYEYPRAALRGLRGLLSLKRRLKKQEHGYRVRIRNHLIAQYYPEMDREYERLGAEGLAIVRWCFPPSEMTVLEVEEFVQRVTTRSVRMEKRRRLEGVWEKAGETIGCDGVPGVEHEARVMVEGVRQIREMLKETEGKIEELCKEFPEYEYLLTIPGFGPDVSAKVLGAIGDPDRFQNGKQVLKLAGLDLSADRSGKDSDKAIPEISKRGKADLRYGLYQAALIASTRNHGFMVYYTRKLRGREKEKGIHVKMYVKLSAKMLLIAWTLMKKKEAFDPAYLNAE

SEQ ID NO: 226753 - protein, 349 aa, unidentified
MKQSNKMPQHMPETIGIDLGDKVSRYCIVTSNGEVVEEGSFRNQISSIEKHFSGEPRRIALEAGAQSAWISRQLKQLGHEVIVANTRELKWITSCDTKNDPGDARKLALLARADVRLLAPVEHRTAEQQAELALIRARDAILRARTLLINMARGIAKGFGMRLPKSITGTFGQRAVEGLPEFLTTALNGVLEQIDALSRQISQYDHQIGQAAVRHPEVKLLESVPGVGTLTALTFRLTLGRAERFAHSRDVAGFLGLRPKQRQSGERDPQLGISKSGDPYLRKLLVQCSHYILGHWGPDSALRRWGLSKAAGGKNATLKAIIAVARKLAVLLHRLWVTGEFYKPFPQMG

SEQ ID NO: 226754 - protein, 438 aa, unidentified
MSNKVIFNLDDLFISVGIDVGADFSWMSIALPNQQFVGKPYKILHNSIDSLTTAVSKIKEAEELYSLESRIFLESTGIYHYPLFCYLRDKGFNCSVINPIITKNSTNINIRKVHNDRFDSKKAALVGLKPDLKVSLMPSDLALNCRNLCREYYDLMDNRSAYVNKLQGELRMAFPQYLGIFSKVTVNTSLTLLETYTSPSAFLKADKQEIIDIIKSTARFGLTYAQNKYNAIIQAATDANQFGYIIDSNIKRIRLYISFIRKYDEEINNILESLHELVDANEDADFVKQIHLIETFKGAGFLSAVSIMGEIGDFSAFSKPKQLFAYFGLDPAVKQSGKFEGTKVQMSKRGSAIARRVIHTLTLQSISISRNGEAKNPVLREYYLKKCDSKPKLVAMGAVSHKVCNMIFAILRDNKSFEIITPQEHIKQYNASKCDMAA

SEQ ID NO: 226755 - protein, 327 aa, unidentified
MYVCILDTTGQVLLHRNVKSTPEAFLESVAPYRKDLVVAAECMFTWYWLADVCAAEDITFVLGHALAMKAIHGGKAKNDKIDSHKIVGLLRGGLLPQAYVYPDAMRATRDLLRRRLHLVRKRGQLLAHIQNTRAQYNLPAFGRRLAYPANREGVREHFPDRSVRKSIEVDLTLIEQYDTLITDLELTIVREAKRHDGDAFHRLRSVPGIGKVLALTILYEIHDITRFDRVQEFASYARLVKCKKQSGGKILGTSGAKMGNVHLKWAFSEAAVLFLRHTKDGKKLLAAIEKKHVKGKALSILAHKIGRAVFYMLSRGTVFSTEKFLAA

SEQ ID NO: 226756 - protein, 336 aa, unidentified
MDFDGLIDYHISTFQNKEDGDMEEVIIDKGCGLDVHKETVVGCVMGSGIKKEIRTFSTMTGDLFRLKAWLSEKGITHVAMESTGPYWKPVFNVLEDSFEVILANARHIKNVPGRKTDVKDSEWICKLLRSGLLAASFVPPKAIRELRDLTRYRRKLTQSISAEKNRVQKVLEDANVKLSSVVSDTFGVSGSRMIEALMAGNLSVDEISDLAIGKLKGKKEDLKKALVGNFQEHHRFMIQASLDHVRSLEKIIANLDQEIDRKLEDYHQEYELLQTIPGVKEQGAASIIAEIGVDMERFPSEGHLSAWAGMSPGNNESAGKKKVERRPMAIRTCGQY

SEQ ID NO: 226757 - protein, 375 aa, unidentified
MSDSNKTLFVGLDVHKDSIVVAVAETGRGPARVVATIPFEWKALKKVLEKLGPKAAISCCYEAGPTGYGLARSLRAAGWACDVIAPSLVPKKPGERIKTDRRDAAKLAQNHRSGDLVAVAIPDEACEAIRDLERARDDAKKAERVARHQLSKFLLRQGRRFPGKTTWNDAHRAWIASQQFAEPAQNHVRGDGLAAVEAATLRVSQLTERLRELAATWDRAPLVKALQSLRGVEFVTAVTVAAEVGDLRRFPTAGDFMGYVGLIPTEQTTGATRRRGPITKTGNAHVRRLLVESAWHYRRQPRMSKALRERSVGIAPGVCAIAWKAQTRLHNRLKKLIGRGKHPAEAVTAVARELAGFVWAIGREETLLASPAAAK

SEQ ID NO: 226758 - protein, 336 aa, unidentified
MSKKATLKQCLGIDVSMKKIDCCLSFYTEDLKIKVVATSGFENGPEGFVKLREWLNRKQDNGLALYVNMEATGTYHEEAAYFLAGVGYRLSVIQPTKGKQYAKSLDEKNKTDKIDAGMLARMGLERELLLWSRPNEKLRILKRMSRERIGLIRDRNALTNQLHALNHSFDAFRDSVDRLKERIALATKQLSEIEAQMRDLTESDPELAKRTKHAITIPGINFLTAITVIAETDGFANVSNRRQLVSYVGLDVVMKESGTLTWRPHISKRGNAYIRAGLYMAAVSSIIHNKTLKTYFNRLKEKGKPGKTGIVALERKLLVLIYTLYKNGQDYIPDYN

SEQ ID NO: 226759 - protein, 371 aa, unidentified
MEHTRFVGLDIHKERISIAVAESGRSGAVEYLGEIANEPSAISKLCDRLRRPGKPLAFCYEAGPCGYGVHRQLTSLGHRCDVVAPSLIPTKAGDRVKTNRRDATMLARLHRAGELTPVWVPDADHEAMRDLIRLRSVIRQIATRARQHLQGFLLRHGRKHGRGTAWRMAYRRWLSTLAFEHPAQQIAFQDYVDAVMDAERRLKRVEEQIFSLLPEWTLRPVVDALQAMRGIALINAVVLVTEVGDFTRFSNPRQLMAYFGMVPGERSSGETTRRGGITKTGNTHARCALVEGAWAYRMKARIGRHKVDRIEALPKDVREIGWKAQVRLCARYRRLSARGKTANVVNVAIAREMVGFIWSIACTVQSAPKAA

SEQ ID NO: 226760 - protein, 411 aa, unidentified
MTVFVGIDWGGGSHAACVIDATGTIADRIEVGHDRDGLAKLVAWLARHGKPGDIRIAIERPSGLLVDTLVEAGFVVVPIHPNVVKACRPRYRAVSAKSDPGDAYILADILRTDGHRLLALKPQSDAIKALRGLVRGRDDLVATRVALANQLTALLDSFWPGAAAIFADVASPIALAFIERYPNPESAARLGPKRLAGFLAQHHYFGRRSPEALLERLHAAPRGDPGEAESDAKGELVRALARTLHSLVTEIGKITGRIEHMVADLPDGKIVMSFPRASKICAAQILAELGSVRGRFQTEDQLASEAGVAPVTSQSGKSRGVGWRWACNKRLRAAITCFADNSRHQSPWAADIYKRASARGCDHPHAVRILARAWIRVLWRAWSNGETYDPTSHAGATPFLADNQNDHIAAA

SEQ ID NO: 226761 - protein, 391 aa, unidentified
MLYLGIDIGKNNHVASLIDSQSKSLFTGFSFANTTEGGENLTARLSHFINSPSDVEIGMEATGHYWLSLYSFLAGLGFVVYVINPIQTDGWRKGIEIRKRKTDKIDSFLIADLLRYGDFVETSLSDESIMSLRNLTRFRHYLVGSIGDLKRKAICVLDQTFPEYQGIFSDTFGKTSSELLLHFQTADDFASITAEQLETVLAGVAKKSFAKNKLTQISEMAAKSFGLKFCKDSFSLQLKLLIEQIRFIEAQVFDVEAEISVILEKLNSPITTIPGIGTVIGATILSEIGDISRFSNPSKLVAFSGIDATVMQSGESSGTYKMSKRGSPYLRKALFQAAVVASNHDPVFKTFYQRKRAEGKHHLTAIGAVARKLCYTIHAILKSSTPYEVKQ

SEQ ID NO: 226762 - protein, 331 aa, unidentified
MEEVKRFVGIDVAKVALDVFIGSAGAAFSVTNDEVGVRELLRQMKPADFVILEATGGLETPVASALAAAGIAVAIVNPRQVRDFARATGKLAKTDRLDAEVLARFGEAVRPEARPLADEQAQALEALVTRRRQLVEMLTAEKNRRARAPKVLHRSIDEHIRWLEKRLSGFDDELGELIRNTPLWRERDELLRSVPGVGKVLSSTLLAQLPELGMLNRKQIAALAGLAPFNRDSGKLRGSRCIWGGRAQVRRVLYMATVAGVRSNPTIRTFYLRLRTNGKHAKPALIACMRKFLVILNAMLHDKTHWQTPALTSPTSPLSPLLAAVSEHGCC

SEQ ID NO: 226763 - protein, 351 aa, unidentified
MKIIRVGLDLAKQSIQVHGVDRDDRVVLKRSIKRDAVLKLFATLPPCVIGMEACSGAHEWARQLSRLGHQPKLMAAKHVKPYTQGQKNDANDAAAICEAVSRPTMRFVAVKSVEQHDLQALHRIRSQCVEQRTAKVNLIRGLLAEYGIVVAQQISQLRNALGVLLEDAENGLTGDFRELLVGLQQDLYFLDDRITELTARIERHVKVHDTTRRLLAIPGIGPISASALFAAVGDGRAFANGRHLAAFLGLTPKQHSTGGKNTLLGIHKQGDSYLRGLLVHGARAVQRMAVKKTDPRSTWLNALGKRRHKNIATVAQANKTARIAWAVLQGATYRPEPARRLTPDAHIELAA

SEQ ID NO: 226764 - protein, 428 aa, unidentified
MNEERSLENSMSAQDIAVWVGLDWATEEHKICSYEVETGKIQSRSLKHSAEALSQWLVDMRKQYGGAKVAVVLEQSRGAVLYALMNCDFLVLYPVNPQSLASYRKAFYTSGAKDDPDDAMLLMEMVRKHPDRFRAWKAEDEETRTLRLLVEGRRKLVDQMTSLTNQLNSALKNYFPQALDWVGELGSLQACDFLQRWSTLSAIQKVRPEVLRKFYVRHGSRKAEIIDRRIREIKRAVPLTSDQAAIMTGSMMVKAIVAQIRPLIDSVDEYDQQIKQLFQKHPDRSIFESFPGAGSALAPRLLAVFGVDRERWISAAEIQTFSGIAPVTERSGKSCWVHWRFACPKFVRQTFHEFAGSSIVWCKWAKGYYQSMRERGKPHQAAVRALAYKWIRILFACWKNRTTYNDGIFMQSLARRGSHLVGRTAELH

SEQ ID NO: 226765 - protein, 355 aa, unidentified
MSKTKYIGLDVHQASISVAVLDENGKLVMQSVIATRASAILEFLDGLRGTLQVTWEEGTYSAWLYDLLVQRVSKVVVCNPRKNALLKAGNKSDRIDARKLAELLRGGMLSPVYHGENSTRTLQELARSYQALTQDTTRVMSRLKAIYRSQAIAYGGKKLYTQSHRQQWLQQLQQPGIRRRAERLYEQLDLLDQLRRQAKQELMVESQNHAVCARLRSVPYLGPIRAAVLVARVQTPYRFRSKRQFWAYCGLGLETRSSADYQQSQGQLKRSRKKVLIRGLKVDHNHDLKNIFKGAAMSASIFPGPLQQFYQLRLAAGIKAEMAQLTLARKIAAIVLTIWKKGERFDPTRLNAQAA

SEQ ID NO: 226766 - protein, 413 aa, unidentified
MDVFCGIDWAENHHDIALVDRDGELLARRRISDDTAGLAMLLGLLAAHGDSAGDPVPVAIETPRGLLTACRRATGRQIYPINPLAVARYRDRHSVARKKSDHGDAVVLANILRTDRAAHRPLPADSEPAQAIAVLARAQQDAVWDRTTAHNKLRSHLREYFPAFLAAFADARGGIMRPEARAILAAAPAPAQAATLTKAQLTALLRRAGRSRGIDAEATRLREAFRTAQMRQLPLVEDAMGRQALALLRHLDAACASADDLEQAVTTSFDQHPDAGIITSFPGLGALTGARVLAEIGDDRSRFADAKGLKAYAGAAPVTRASGKTIAVLHRRVKNQRLAAAGYNWAFAALTASPGARAHYDRRKTAGDRHAAAQRNLFGRLLGCLHQCLATGQHYDEATAFPNLTAPTRTVAA

SEQ ID NO: 226767 - protein, 339 aa, unidentified
MKLYVGNDLHSSNNYLAIIDETGKRIFHRKLPNDTATIIETLSLYEGSIAGIVVESTYNWYWLVDALMTEGYKLHLANPSAIKKYEGLKHADDKHDAFWLAEMLRLGILPEGYIYPKEQRPIRDLLRKRSHLVNLRTSLIISLKNIISRNCGLTLTANDVRKMREDKVSPLLAYNEDLALAGQVSKDSIDFLTKEIWKIETFIGNKVKLNEPYTNLVTLPGVGKILAFTVMLETGPIDRFQEVGNYASYCRKVSSKWTSNNKTKGSGNKKNGNKYLAWAFSEAAELARRFDPDARAYYNRKLQKTNFMVAHSALAHKLARAAYYIMRDNVPFMPEKLFT

SEQ ID NO: 226768 - protein, 349 aa, unidentified
MTRVGCDLHTRKQQVAVLDTETGAMYERQLSHAGDVLEQFYRALPGPVTVGIESTGYALWFHELMQRLGHTLLVGEAAKIRAMVVRKTKTDRRDALHLLDLLKHEHFPLVWISDPATRDLCALVTHRMRLVRMRTMVKNGLHAIAMNRRLTLGPSLWSQRGLAQLRDLALSPHTTQRRDESLQLLTWLTARIEALDDRVAAAAQADPGARLLLSHPGVGPLTALTTVVVLGPVARFPDSKHVVSYTGLAPAVHASADTCRLGQITKQGSPLLRFVLGQAGLIAAHAEVDLKRHYRTLLRRRGRPKAIVAIARKLLVRLYIMLRDQIDYEEFRRRGRTPRGQEVPPPALA

SEQ ID NO: 226769 - protein, 390 aa, unidentified
MQALYPRPDEHAAVRTDLKAIFVSLELSRSTWVITSLSPGGGEKMSKHAVPSGDIPALLARLSQLKEKARARTGQVFPIIVIQEAGLDGFWIHRVLQQEGIESHVVDPASIATSRRRRRAKTDKIDGEALVRALLAYKRGEPRVCAMVQAPTPHEEDRRRISREREVLTAERVQHVNRIKGLLFAQGIGDYEPLHRNRRERLAELITGDGRPLPECLKAQISRELDRLELLIEQIKAVEAERDAVLAQAQASPGVPAPAAQLLALRGIGPEAAATLWSEGLFRTFNNRKQVAAYAGLAPTPWQSGSVHRDQGVSKAGNPRLRTIMIQIAWLWLRHQPQSALALWYRARIKRTGGRLGKTMIIALARKLLVALWKYATAGVLIEGAVLKPA

SEQ ID NO: 226770 - protein, 337 aa, unidentified
MQITTVGLDLAKNTFHVVCFDARGHEVKKRMLRRANLLAFFAQLPACRIGMEACASAHYWARELLRLGHEVKLIPAQHVKAYLRGNKNDYNDARAIAEALARPSMRFVAVKTAAQQDLQALHRVRAQCVRDRTALCNSTRGLLGEYGLVVARGVSVLRRAIPEFLEGAENGLSEQFRALLARRYQQLLELEEHLAHYTKELHRISRADEACQRLQTIPGYGPIVASAFVSTVGDGSAYRRGRDVSAAVGLVPAQHSTGGKPRLLGISKRGDRYLRKLLVHGARSVVYQAQRKNDRLSRWLQRLCAERGVNKATVALANKMARIGWAVLRYNTVYQGA

SEQ ID NO: 226771 - protein, 349 aa, unidentified
MSQQCSTAIARMGIDIGKSVFHVVGLDAKGKPVFRNRFTRERLLEFLARASPTIIGMEACPGSNWLARKAIGQGHQVRIVPAQFVKPFVKSNKTDIVDAEAIAEAISRPTMRFTQPKTEAQLDLQALHRVRQRLVSSKTAIVNQARAFLLEYGLTIGAGPAYFVRDMPSILADDGNGLTPAMRDLLQEQWQEYRSIEARLLQLRRQIEAIAGADDVATRLISVPGIAHLTATAITAFAGTGTQFKSGRHFAAWLGLVPGEFSTGGKQHLLGITKRGNPYLRKLLIHGARACVLHLDRTKDHLGLWISQMEAKGIHRNKIIVALANKLARIAWTILTRRGTFYLRQPQAQ

SEQ ID NO: 226772 - protein, 371 aa, unidentified
MKSILSVGMDVHKNSFSLCAYDGYTGEIVSESTFASDVKLVIKFIEALKSRYENDVEIKCGYEAGCLGYSLYKSLTARGVDCVILAPTTMQVSAKNKMVKNDRMDALNIAKNLASGSYKTVYIPDEEDVEIKEYIRMIHDFKKELKRVKQEICAFVLRHGYQYDGKSKWTIRYMNWIRELEMSEIQRETLNEYIAEMENLNDKIDRFMNRINEIYQSERYHEKVSKLRCFKGIETFAAMTIQVETADFERFPSAKAYASYTGLTTGEHSSGDKNNRIGITKQGNTVIRKTLVECAQALVKGNVYAKKSQRLKSRQKGMDVNIIVYADKATERLKKKYQKLIERNVPRNKAIVAIARELACFIWGMETGNIH

SEQ ID NO: 226773 - protein, 375 aa, unidentified
MGHHSEVFIGIDTSKLRNAVAVAEAGRKGEVRYLGEIDTSEAATRKMVAGLAAKHATLTFCYEAGPTGYGLQRLIESLGHSCIVVAPSLIPTRPGDRVKTNRRDAEGLARLLRAGELTAVWVPDARHEAMRELTRARDAARQDLTRKRQQVSSMLLRLGQHYPGIKTWGARHRSWLANLKLEHPEQRFALEEILQAERQAAERIGRLEQAIRDAVANWSLGAIVPALMAMRGIDLVSSVTILAEIGDLSRFENPRQLMAYLGLVPSERSTGDSVKRGGITKAGNGRARRVLVEAAWAYRHPPRVGYEKQALVAAAPRPAREIAWKAQVRLCKRFRTLSRAGKKSTVVATAIARELAAFIWAIAREVRNGTPARAA

SEQ ID NO: 226774 - protein, 393 aa, unidentified
MSVVGIDVGRSQHVAAVCRDQAQEAERGVLRVASGREGFDQLDAWMARQGEVALVVMESSGHYWMPLASHLWARGQPVAVVNPLRAKYFAKSRLQRTKSDPADARMLAVLGMSTQPTPREPLAGGELREASRFVMTLVQEQAKVCQRLQRLIDLGFPELGDVFEDPGCASALAVLRVAPTAAAVRRKRAASLAAAKAPCGRRSLGARKAAELKALAERSVAPPELEEQVAFEISVLIGQYDLLESQIKGAEARLASLLDDDVARRLQSIPGVGPATAATLMAEIGDIWRFDDVDQLLAYAGVHPREASSGQKGSNPETSWHMAKSGNAHLRTAVYRMALVGTQHNPVIAAHYRRKREAGKSKMNALGHCMSKSLSLVWGVWRNGQPFDPSYRA

SEQ ID NO: 226775 - protein, 408 aa, unidentified
MQVLYTRCAGLDVHKDTIVACVRCVSPPMHQEVRSFGTTTTQLLELADWLGEHGCTHVAMEATGVYWKPVWHVLEDEFELVLANAAHIRNVPGRKTDVNDAMWIADLLAHGLIRSSFVPPHAIQQLRDLTRTRKQLVREVSQHSLRIQKVLEDANLKLGSVLSDVLGKSGRAMLDAIVAGETDPARLAALAQGTARNKTAELREALRGRITEHHRTMLRLHLQVIDALHRTLGELDTAVGKALAPIQQRTRLLTTMPGVSDLTASVMVAEIGVDMSRFPNAGHLISWAGLCPRSDESAGKRRSTRVRKSGTWIKTTLITAAWAAVRVKTSYLRAQFLRIKARRGAKKAILAVAASMLTAAFHMLRDGTEYNDLGSEHLDRQDRSKTIRRLLKRLQDLRCEVPQMAHET

SEQ ID NO: 226776 - protein, 353 aa, unidentified
MAVYIGVDLHVRTETVCWMNTADGEIHQHTLDHSRDDLRAFYAQFTAPAVVGIESSGYALWFHQLMEQAGHRLLVGDAYAIRQFARRRQKNDRRDAELLLDLLRRDEFPVVHRPAPPSQDTLALLRYRHRLVRMRTMVKNGLQAVALNHQLRLGFRLFTVRGQQQFAALPLSGAYATQRQQSQVLLTTLEAQIAAVNQELATRAAADARVVRLRTHPGVGLQTALAVVHTLEPVTRFDRARRIAAYCGLDPSEHSSGDTTRYGHISKQGNRLLRFLLVEAAWSAVQHEEDLGRFFRRMRARKKPHAVAVVAVARKLVLRLYRMLREGIDYEEFRRRGRDARRARECASPAQRG

SEQ ID NO: 226777 - protein, 398 aa, unidentified
MLYGGMSMLICGIDIGKNHHEASMIDQEGRLLAKSFRFANTTPGAESLLEYINRCNAEKDVVVIGMEATGHYWLSVYCFLFDAGFQVNVINPIQSDAIRNLFLRKTKNDAKDSFLIAETIRIGRYSKTEMADEDILSMRQLCRHRMDLVDYIADQKRKIIGVLDRVFPEYHTFFSDTFGKTSTELLSKAVTPEELLAIPTDELCKMLKSNSRGRFGEAKAEELRQAAKTSFGITIGTAAFTMQLRQLLEMIELLERQLVELETAIEQYLLKLNTPITTCPGVGNVLGAVILGEIGDISRFSEPKKLVAFVGIDPSVKQSGEFTGTQNKMSKRGSPHLRRAIWLAANVAAFHDPVLSAYYQKKRAEGKHHYTAVGAVARKLTFIIFAVLRDNRPYIPNC

SEQ ID NO: 226778 - protein, 448 aa, unidentified
MSKPLVIDDQEYERIFERVAAVDVAKASGVVCARGPHPSRPSARCSTVWEVPATVNAVRVLAARLAGEGIEMVTLESTSDYWRIWYYVLEEAGVGVQLVSASQAKNLPGRPKTDKLDVMWQARLTEMGLLRPSFVPPAPVRVLRHYTRARTHLTQDRTRCWQRLEKLLEDALVKVSAVASKLTTASAQDMIKAMIAGERDPAVLAGLARARMRAKRAALTEALQGMFTSHHAGLAQLLLDQIGFLDQKIAWLAGRIDDAITAIPAAWGIDADGTSGPCAGNGPQAIIVPAAWRLDEIPGIGPDLACSIIAETGLDMTRFPTAAHLVAWAGLCPRTIQSGTRTRDGKGHGNTYLRGYPGQAAAAAARTDTFPGERYRRIARHRGAAKAQVAVARSILVIIWHLLADRGARYADLGPGWYQSKIDKNRKARGHIHQLEALGYTVTLTQAA

SEQ ID NO: 226779 - protein, 412 aa, unidentified
MPKIVYPICCGIDVHKSFIVVCIATTDEKLVTTYKSKRFSTFTGDLRRLSDWLVQYNCRDVCMESTGKYWIPVYNILESTCHVVLAHPKYVKTIKGKKTDKRDAKWIADIFKHDLINGSFIPPVDIRQLRDLVRYHYKLTGYTTGEKNRAQNCLTVSNIKLDDVFSDVFGKAASAITERLLENSEPFDVKPYLTKGIKASPEEIQLAVDGVMCVNQAEKLRIIRSHMASLELCKANLESEILSIAEKFLPQINFVLTIPGIQTFSAIAIIGEIGADMSVFETSRHLCSWAGLAPQNDQSAGKKKTTRISRAGVYIKPLLVQCANCAIRSKTNPEIANRYNAIKKRRGHKKAIIAIARMMLTAIYNILKKNEPYNAELYRKADAPPQNRQVTPEQGLCILQRQGYVILPPVPA

SEQ ID NO: 226780 - protein, 347 aa, unidentified
MESTVNLPVVGMDIAKNVFQLHVVDTKTGEVQRHKLKRDHVAAFFANHERSLVAMEACGGAHHWARTLRRLGHEVKLLPAKHVRPFVLRDKTDARDAQAIWVAAQQPHIRAVPVKSEQQQACLALHRMRAQLMKMRIMQTNALRGLLYEFGIVLPEGHQALLKRIPDELAKAQENGRLSEIVVVSVQEQLKRISHLQQDIDQLDRRLVQLVKQNFQMQAIQTIPGIGPLTATALVATATELSSFDSGRQFAAWLGLTPRQTGTGGKTRQLGISKRGDAYVRTLLMHGARAVICRSRQTAWIQQLLARRPFSVVVAALANKLARTVWALLTRGKAFDQAQWEVAGATV

SEQ ID NO: 226781 - protein, 353 aa, unidentified
MLIIGCDYHPSFQQIAFVDRETGECGARKLTHKEEAESFYRDLNGRSVRVGMEATGQARWFERLLAEQNFELWIGDPAEIRAKRVRKQKNDRQDAEHLLQLLVEDRFPQIWVPSPENRDLRQLLWHRHRLVQMRTRVKNQVQAIALNEGIRRKTGLWSKLGRVQLESLSLAPWSARRRQDLLELLDRLNPKIDELSTAIQQAAEQRPEVQRLMTHPGVGPITALAFVLILGVPERFQCGKQVGSYLGLIPCEESTGGRQRLGHISKQGNTLLRFLLIESAHAVVRYDPDWRRRFLHLAMRRGRPIAKVAMARRLAVRLYWMWRKAWDYQQTLKFGSQGRKLSSHNVVTTGSTR

SEQ ID NO: 226782 - protein, 321 aa, unidentified
MSEEIFVGIDVCKAWLDVAQVPAPVTRGRSALAVRVDNQEPARAALVRQLSELRPTLVVMEATGGFETALASELCAAGLAVAVVNPKRVRDFARAAGILAKTDRLDAQVLAVFAQRMRPQVHALPDEGQQEIMELVDRRAQLVAMRAQEKTRLATVKPIARKSVREHIVWLDARIKQIERDLDGRLKDSPVYQPKYDLLDSVPGVGRVTITTLLGRLPELGTLQRKRVAALVGVAPFADDSGKRRGQRYIQGGRADVRCVLYMATLSAVRCNPALKAMFERLRNAGKPFKLAMTACMRKLLIILNAILRSGLPWRNADVPR

SEQ ID NO: 226783 - protein, 412 aa, unidentified
MEILYAICCGLDVHKDSITACLRRLEAGGQGTRELRTVGTTTAELLTLLDWLVAAGCTHVAMESTGVYWKPVFNILEGHFQQVLVVNAQHMKALPGRKKDTLDAEWIAQLLQHGLLRGSFVPPAPIRALRESTRYRKQLIRTRADEANRIQKLLEGANLKLGSVATDILGGSGRAMLAALVHGATDPTALARLAKGRLRKKHPQLVAALTGCISPVQRTLLGQQLAHVTYLDHAIAELDTLIASLMAPYQAEATRLRTVTGIATRTAETLIAELGADMAVFPSDRHCASWAALCPGHDESAGKRRSGKTRKGSPWLRAALIEAGWANTRTRGYLGAQYRRLARRRGKKKALVAVGHSILVIAYHILKDGTTYRELGPDYFDTRESARLQQRLIARLETLGLRVTVQPALQAA

SEQ ID NO: 226784 - protein, 366 aa, unidentified
MDKRTTVGIDLAKDVFAICVLDAHGAVLDRKVLRRAAFERWAESLSEPCTVAMEACGSAHHWGRFFAARGHTARLLAAEFVVPFRQGGKNDGNDALAIAIAARQPTMRFVPVKTVEQQAILAWHRMRQGWIEERTALLNRVRGLLAEFGLVPGRSPAVLIAAMARIVDEAAAPEPMRAIVQQAREQLAQLDARLVACDMQIQAHARCSPQAERLRALLGVGPITASAVVATVPDATLFRHGRLFGAWLGLTPRQHSTGGKTRLGASSKRGDAYLRGLLVNGARSALQAALRAAPDKATRLQLWMVGLARRCGYQKALVAIANKHARMIWAMLARDERYDPEAWRRHARTQPSDATGMPMPSAVGMS

SEQ ID NO: 226785 - protein, 347 aa, unidentified
MNIKKVEKQVVGIDIGKDSFYACYKVLLSDKSVTIKGIKSFNNSIPGMKEFYTWCDKRNKTPEVDPLFVMEATGVYYEELAYFLFHQQQQVSVQLAQKVKYFAKSCNLKTKTDKVDSKMIADFGIEKTIVGAGLWTPPSKDFKMIRDLTREHTSLKQAQIAAKSQLHALNYAHGIYKEVLKLKEQQISFYEQQLGAIETEISNLVELDVKLASKLKKITTIKGVGFITVIKILAETNGFLLFKNIRQLVSYAGLDVIENESGNHKGKTKISKKGNSRIRTALYMPAMTASQHNQNLKTFYDRINEGRVIKRQGLIAVMRKLLILIYTLWRKDEAYIEDYLINQVVPR

SEQ ID NO: 226786 - protein, 342 aa, unidentified
MTFVGCDLHTRMQQVAVLDTETGEVSERRLPHDGLAVEEFYAALPGPVTVGIESTGYAVWFHALMQQLGHTLLVGDAAKIRAMVVRKTKTDRRDALHILDLLRHDRFPAIWIPDPATRDLRTLLMHRLRLVRIRTMVKNGLHAIALNSRLTCGSTLLRQAGLIQLQALALPPHTAQRRDQSLELLAGLTSQIRELDEAITTAALAHPDAPRLITHPGVGALTALATVVVLGPVARFHDSKHVVSYVGLAPAVHASADKAHLGRITKQGSPLLRFVLGQAAAHAARMDPDLKRTYGALVHRRGRPKAKVAVARKLLVRLFIMLRDQIDYDEFRRRGRPAPASA

SEQ ID NO: 226787 - protein, 370 aa, unidentified
MKTQPIAHPKLYIGMDIHKKSWSVHLRTDISDHKTLTIPSDCGVLYDYVEKHFQGHEVSLTYEAGCCGFSASRYFLNLGWNVLVVNPADVPRMDKQNYQKTDKIDCRNLAKQLHAGQLKGIYIPTESQDLLKSLVRQRAESSKQLRSIKANIKSLLLYHGIEIPKEYDNPNWSIAFIKWIEQIKWTHVTGKICIDSKLRMREVIHKEYLQLANELRSYCRKHHKKDYYLLKSIPGVGGYLASAILAEIGDLRRFNNETQFASYIGIVPTMRNSGGTEKIQGVTPRCRGLLRSYIIESSWVALRMDPEMQAYYRKHIGRNPKSIIVKIARKLLNRMLAVIKTEVPYHTNYSLNHGKETLRVPQGRHENTND

SEQ ID NO: 226788 - protein, 453 aa, unidentified
MTQRDLKVSAKSGKSRTALTITHPNAAGIDIGSAAHFVAVPPDRADQPVREFPSFTTDLNVLADWLKACEVDVVAMESTGVYWIPLFELLESRGFTVLLVNARHAKNVSGRKSDVLDCQWLQQLMSYGLLRGAFRPTEQVCVLRALSRQRAMLLRSQARHVQHMQKALTQMNVQLTNVISDVVGETGQKILRAIVAGERDGQVLGLMRNNRIHASVEEIAKSLQGNWRDEHLFALKQALAAFDFVGTQMTECDEQIDAQMRRLQAYDGEPGKRKRRSRSRNESKFDLRKQLYQMCGVDLTRIDGIEVTTALAVISETGSDMSRFPSAGHFASWLGLCPGTKITGGKVMSGKTQRSSNRAAQALRLAAAALRASQSALGAYFRRLCARMDKPKAITAAAHELARLIYTMLTKGEEYVDQGQDYYEERYRTRVLHQLEQRAQRLGMTLVAQEQSA

SEQ ID NO: 226789 - protein, 381 aa, unidentified
MMILGVDPHKSTHTATAVDPSTNRAVASIRIAATLADYRQLMKWARQFENRRWAIENAEGLGRHLSAWLLARGEQVVDVPSTATARIRQLSRGGGRKTDQIDAAAAASVAALQGDERPLHPEGVPDALALLDESRTNLTQSRVRLVNQLHALLRDLIAGGAPTDLTAATAAALLRGVRPIGAAEKVRKQIASGLVGQIRAVDALLKANQQQIKELVSASGSTLTDTVGIAAITAGRLIGRTGMASRFPTAAAFANYAGTAPIEVASAERSRHRLSRGGDRQLNAALHTVAITQIRTAGSRGHAYYAAKLAEGKTPRDARRCLKRRLADHVWRTMLADEQRAGLTGHSGATTEPCATSSTPTTGSLGKSQPDPLVTSLRPLT

SEQ ID NO: 226790 - protein, 319 aa, unidentified
MQSKLTFGMDIGKNEVVVACHEGAFAILKMANAVAGLRRWLGSVPAGSRLGLEATGGYHEPVAELAYSLGFTVYILNPKDVHFYARALGARGKTDRLDAQIIAAYVAEHCARLHPFTPLSADEKLLRELARRRATLVNAKSMLQQSLRVLPGFEREGRELLRAMGSFADRLERKLAQIAARSSERATLVKRLQTIDGVGTLTSIRCATLFTRVPFHSSDAVVAFFGLDPRPNDSGQHRGRRRLSKRGPSEDRRLLYNAAMSAIRTPTWRPLYQHLRNRGLASTEAIIIIARRMVRIAFAMYQNHSDFNPRLVPRPYCPA

SEQ ID NO: 226791 - protein, 321 aa, unidentified
MTETTVSIFVGVDISKASLDFYLPYSKEAIRIENAIAPIDALCAKLKKKRKLMVVMEATGGYEHLLRSRLGKHGVPAAVVNPRQVRDFAKGIGIDAKTDPIDAIVISTFGSVVKPRPTAMKSDNDEKRSALVTRRSQLLELMNQQQNRIRQTWDDEAKQSIREMLEFMRKQLEIIDTRLAQMIPNDKENARIIEILDSVAGVGPVMISTILAQLPELGKLNREEIAKLVGVAPINRDSGKSTGKRYIGGGRSYIRRVLYMSTLAAIRCNSKFKAVYKHLRTMGKERKVAIVACMRKMITTLNALIKNNELWQNERSVSAKS

SEQ ID NO: 226792 - protein, 449 aa, unidentified
MSNGNGVSRGDRNRNARLSRLRELVPACNAIVGIDLADRKQMVVVTDHDSKVLARRTFRCRAWDLGVALDWAAERAARAGFVGVTVSCEPTGHRWRVLGQLAADRGMPFVCVQTLMTSWARRSEDLTFDKTDEKDAVLIARLTAQLRCYVPEPVDETWGRLRHLGARREQLIGESTSQVQQMRDLLECVWPAALDTAQQPFRSRTWAAAMTVIVERDDGDFDRTRRLGPGRFEQAVRREITRRGGQRPCLRIVRKLFVALADPAGVLAHRLGALERVQLLLADWREARRRLHETEARMTAVLDELNLTELATSITGLSALGAAAILAETGDVTRFATARALVKHAGLAPREKLSGTFVGRTKLTGQGRPGLRLAAWRAVWGAQRANPVYDARYTHLTSRDNNKLTPTQAQAVIAAAILRQLYAVITTGRKWDPMIATHGTNHHPMPMAA

SEQ ID NO: 226793 - protein, 309 aa, unidentified
MLALHPDLDVVIGVDTHKDTHTAAAVGATGAVLEHLTVPADPAGYRQLIAFGRRHDARLWAIEGTGSFGAGLTTALHACCERVVEVDRPQRPARRGGVKSDDIDAVRAARQALAGVGLSEPRRRGDREAIRVLLATRGQAITFRTRAISTLHALITSAPDALRQRLRTLPLGELLQTCAGLRDSSRRSVEESATVLAIRSTARRALACEREAAELEVQLDRLVQRLAPELLGQLGIGPVVAGQLITSWSHHRRIRSEAAFAKLGGAAPIEASSGTVTRHRLNRSGDRQLNRALHTIVLVRMRQDSATKE

SEQ ID NO: 226794 - protein, 418 aa, unidentified
MIPIIKVKGTSSLPVIRLPSCVNTLKEAAMDRPIEMTASRIVGLDLSKKTLVGCILSKEEGFQKTRFINGKMNPRGREELLKDLSDDDWVFMEGGTSSFTLARYLLNNTGMRVFVLNPMQLHIIYQSMCKTDKQDAAKIAKYARDANPENWCLIPIPTEQESAERSLINLHIGYSQERVKQVNRLHAIFNGQGYPDLKKSDLKNPETRRRWIDEFLTDETARFSAFLLADQIDSFEIQLECIHDRIRSILLSHPVEARAWLSIPGVGDITAATAIAYIGDGRRFGTASQLRNYIGLLPRRDQSGTVDKKLGVSKFGCMPMRRHIMQGAWGIKKSAVDCSLTHYWQELQARGKRGQKASIAIANKMVSIAFALLKNHETYGMPDQERYFRRKLSCYKLEALNDSPASTKSTVKESLTLE

SEQ ID NO: 226795 - protein, 394 aa, unidentified
MAFKIFCKNCCGLDVHKTWIYACIGITDTNGRTEYKQARFSSFTKGLQELADWLAKYDCNDVCMESTGKFWIPVFNILEKTCWVTLAYPKYTKPQKGNKTDHKDAKWICDLYMCDMVNPSFIPPPDIRQLRDLMRYRSKLTNAMTSEKNRALNCLTVSYLKLDDVFSDVFGKSSRSIIRYILEHPGETFQVAPFIDRRCKHPVEKIQAVVDGAISHQQAVKLRECLQHLDELEVHKTNVEKEILCLVQQYPYQLELLQTVPGFSGNIMTAIALISEIGADMSVFPSAKHLVSWAGCCPRNDQSSKKVKSTRISRAGVYLKPLLVQVAIQPFTANADKLSAAGALEIRCQICDGRFLSMWAALFIFLGCPLPPCPKNLHVHNGRIVILASVAWIF

SEQ ID NO: 226796 - protein, 352 aa, unidentified
MTIVAQKYDFVAGVDTHARSHCVSILSQTGHSIDTASFPVTSSGLSRAISWVGRRTEPDMSVLWVIEGAATYGATLVDAVTTAGYDTVEAPRMDRRANHGVGKTDTLDAQKIASVTLTLETSQLRHLRLDSGVRGALRTLITAREDISVERTAKVNALTALLRRVSLGIDARKPLTKTQIVSVTCWRTRVENIHTATCRSEAIRLAKRIVCLDVQLTANAATMTTLIKQSPASILLNMAGIGPVTAGIIYTTWSHPGRVHSEAAWAKIAGVCPIPASSGNTTRHRLNRAEDQRLNNAFHMIVLTKMAHDLETKTYVQKRTEQGLTKKEIQRCLKRHLARRTYRALTASHTQT

SEQ ID NO: 226797 - protein, 319 aa, unidentified
MIMTYIGIDISKSWFDCFNSTSGKHHKYNNNVQGWGEFVESLPDEVWVVMEASGPYYLGLASLLADQKIPVSVLNPLVIRRYSQMRLSRTKTDAKDARLIAEYASEQPLSRWNPPSSANQTMRQIISLSQGLIRQRSMLLGQKEAFTNTPAADPFVMEVVDEQINHITSVLNKLEDRLKQLTLAHYRSCFEAVTSIPGIGPKTAILLICLTDGFSKFDDARKLASYVGICPRIFNSGSSIKGRGSICKLGSSQLRKLLYMCTWTAKKCNPGCKQMYDRMKQAGKPERVIKIALAHKLLRQAYAVGTSGEHFMKKKALAT

SEQ ID NO: 226798 - protein, 323 aa, unidentified
MTDAERWIGLDVAQAWLDGATAPAGPTWRVANTAEARAGLVAELVALAPRGIVLEATGGVERDLVADLLEAGLPVAVVNPRQVREFARASGKRAKTDRLDAHMLARFGLALQPAPRAPLDAAADDLQALLARRRQLQSMLIAERNRLTRARAVAQPSIAAVVAVLQAQVAELDGELRTRVAADARWQAAQTLLCTVPGVGLVVSATLLGELPELGLLTRQQVASLVGVAPWNRDSGRTQGRRQTWGGRRSVRGALYMGTLVATRCNRVIRAFYQRLLAAGKPKKVALIACMRKLLTILNAMKRTGQSWSPPIPSPATETEAPA

SEQ ID NO: 226799 - protein, 298 aa, unidentified
MEHYAGIDVSLERSSLCVVDATGRIVREAKVASEPEALVAWFRGLGCEIVRVGLEAGPLSQWLYAAMRDAGLAVELLETRHVRDAFKAMPVKTDRSDARGIAQLMRLGWFRPVHCKSVPAQETRALLTARKLLQTKHHDVEMSLRGVLRGFGLKVGPTTARSFAGRIRELVGGHPTLTAIAEALLAARDVLGEQLRGLDKRLCKQAREDNRARLLMTTPGVGVIVALSFSAAVDDPCRFRSSKMVGAHFGLTPRKYQSGETDVTGRVSKIGDASVRTALYEAANVILTRPVKGSELKS

SEQ ID NO: 226800 - protein, 393 aa, unidentified
MYYVGIDIGKNNHVASMMDSSRKTVFKAFTLANTREGAQSLLEKIQFYMTDLMQVEIGMEATGHYWLALYSFLFDAGYVLHVINPIQTDGWRKGIEIRKRKTDDIDSLLIADLIRYGEFMETKLTDEGLLSLRTLTRFRSYLVDSIADLKRKVLCVLDQVFPEYESIFSKVFGATSKEVLLTYTTPAELERVSVEQLTELLAGLSRQKCGAVQAQRLSQAAAHSFGVTFCRDTFAFQLRALLEQMNFIEQQVTDTEKQIKALMDTLASPITSITGIGPVLGAVILGETGDISRFDSGSKLVAYAGIDASVSQSGQFESTSNRMSKRGSPYLRRALYQAAMVAAFHDPELSAFYQKKRAEGKHHSVCIGAVARKLCYIIFAVLKENRPYVKRQP

SEQ ID NO: 226801 - protein, 453 aa, unidentified
MSTSLPVVDPLAAFVDVGSEKMYVSIAGGPPEVFGSVTGELERLRDRLREREVSSVAMEATGVYWLPLYGVLEAAGMRVLMVNGKHTRNLPGRKTDMSDCQWGATLHAHGLLPSGFVPPAQIRTLQDYLRLRQDHLSMAASHVQHMQKALERMNVKLHDVISNLVGASGLAVMEAILAGERDPERLLGLCDVQIRNKKADRVKEALRGTWAEEHLFALRQALASWRHYQDQVRECDRQIQGVLEKLEASLPSTPPVAGGSTAKPSGASKAKKPAGVNAPAIEGLGGLLVRLWGGKDLTTLPACTGYSMLQLIGEIGLDLTCWPSAKHFTSWLGLAPGNHQSGKRWRRTGRKRNRAGRLLCVIVRSLARSKDTGLGGFYRRLAARRGGLVAIIATARKLAVLIWQAMVNGLAYVEQGLKSYEARVLESKERTLHRLAKQLGFAVQPAVPTPNAH

SEQ ID NO: 226802 - protein, 354 aa, unidentified
MIIIGCDYHPGFQQIAFVDTDSGELQERRLQHREEAETFYRELVAQGVGVRVGMEASGQARWFERLLAELQIELWIGDAAEIRTKRVRKQKTDRQDAQLMLKLLLEDRFPRIWVPSGENRDLRQLLWHRHRMVQARTRIMNQLQAVALNEGLRRKKGLWREAGRKQLEGFRLAPWASRRRHDLLELLDRLTPTIAELTQAIEREVEKCPEAQRLTTHPGVGSLTALAFVLIIGRAERFQCGKQIASYLGLVPAEESSGDRQRLGHISKQGNALLRFLLVEAAQVTVRSNPEWRRKFFHLAMRRGRKIAKVAMALRLAVQLYWMWRQEWDYEQLKKFSPHAGQPGTGVGVQSNTE

SEQ ID NO: 226803 - protein, 387 aa, unidentified
MPQPNDLSRSLVALDQNSTIMAVVELSQSSWLVAGMLPGIERQPRMKLEPSPERLLALLHRGRAEAVRAGRTITRIALAFEAGRDGFWLARWLEARGVEAHVIHASSVAVSREHRRAKTDRLDTELLKRGFLGWLRGERGHCSMARVPTIAEEDAKRPNRERDCLVGERTRIVNRIKSTLARLGIRNFKPTLRKAAERLATVRTPEGMPLPPNTLAELQRDMARLGFVVSQIREIEEARQKRLEQQHETGPDAMVRRLARIVGVGIETADLLVHELLSRPMRDRRAVARYAGLTGSPDESGARRREQGLARAGNARVRRAMIQLAWRFLMFQKESGLALWYRARTADSRSGTRKTMIVALARKLIIALWRFVTTDEPLEGVVLRPVS

SEQ ID NO: 226804 - protein, 426 aa, unidentified
MKVMHDRVAAIDVHKDMVKVAVRVPGAKRGSRKTDVLEFRTFYGVLEEMGRELRRRGVTNVVMEASGVYTEPVYYALAGLDFTEVMVINPAHAKALKGHKTDARDEIRLLDLYECGLLSGSYIPAPDLKEVRDLARYRMKTVQARASEIQRLQKTLETAGIKLSSVVSDVTGVSATAMIEALIDGERRGAVLAGLAQGRLRTAGKMADLSMALAGRFTDHHALMCRLHLDRIQVLGEAVAGLDAEIAPRAARHAREAALLKSLPGFGDVIVAGWLGAIGPAPHQHFATAQRLASWATVCPGNYMSAKKSKGGRTGDGGNYIKPLLVQAAWAAVRVPGRLQARFHRLVRRFGGARNKGAIKRAIMAIAHTLLKIAYQVLKTGTPYTDLGADFYASRETPQARQDYLIRQLQKLNPGCVITVTPAEAA

SEQ ID NO: 226805 - protein, 410 aa, unidentified
MQTLVERGCGLDVHQATVVACLLIVLQNGKVQKQIRTFGTTTRELLSLREWLLSEGCTHIAMESTGVYWKPIYAILEGALEIVVANAQHVKKVPGRKTDVKDAEWIADLLCHGLLRSSFVPPKPIRELRDLTRYRRKLVESQTAERNRLLKLLETANIKLASVATDVFGVSGRLMLEALVEGKATPQEMAELAKGRLRQKIDELGPALEGKLKASSRFLLRLQLDRLEAAEKDLAVLEQRLQEKLKPYAEQLTLLDEIPGVDWTLAAVIIAELGVDMSVFGSVSQLASWAGVCPGNNESAGKRKSSRIPKGNVYLKTALVEAANSAAKAKGTYLRDKFYRLKARRGYKRAAVAVAHKILVAIYHMFSDRVCYNELGDVYLDKLNKHHLTRNLVHRLERLGYTVTLEQKAA

SEQ ID NO: 226806 - protein, 336 aa, unidentified
MKSNTYGLDIAKNVFHVFTITEDGEILKKKLSRGNLLKYFAKQEPGLIGIEACGSSHHWARELIKLGYDVILMNAKHVKAYLKGNKNDFNDAEAIFDAVSQPNVRKVGIKTIEQQDIQLVHSLRQELVKRRTAMVNQIRGHLRERGVVIPVGINAFLKAMPEILENNDKLLSQMSLSLFRQHYESMKLIDENIKQRDNDIALLCKTDELSHRLSQVRGVGPMIATITAADLGKSRVYDNGRQYAASLGLVPGQHSTGGKPHLLGISKRGNKYIRTLLIHGARAALIQIGDKKDKLSCWLRNLVQRRGFNVASVALANKNARILWALATYGTTYEKA

SEQ ID NO: 226807 - protein, 360 aa, unidentified
MLAELIDAVVGVDTHRDTHEVELALPTGTAIGIRKISNDNSGFAELLAWILDHAPGPRVVVSIEGTRSFGVGLARAVAAAGLTVIECEQPNRKARRGKGKSDPIDAHLAVLAALRLDADRLPVPRADGDREALRILLGTRHELTVVTTAQTNRLRALLLGGKDSERDLARATLTDPVLLAMVRRREPPQASREQAVRHGEIRRLAHAIRAGRHALTANRAQLQAIVDQIAPELTERRGIGAVTAAQAIVSFSHPGRCRSDAAFAALSGTSPLQASSGKTVRHRLNRGGDRALNSAIHTIAITRMRCCPTTKNYVARRTAEGKSSREIQRCLKRYIARELYRALNASTTLTTQTSAAPTPA

SEQ ID NO: 226808 - protein, 337 aa, unidentified
MRFCGIDLHSNNSVVVITDEMDKVLASRRCPNDLSRIVAVLEPHKDELAGVVVESTYNWYWLVDGLMAAGYEVKLANTVAMKRYDGLKHSGDEDDAAHLAHLLRLGILPTGYIHPPSERGLRDLARKRIQLVRSRTQHVLAVENILARELGATLSSNTIKRLRIEQVDTLRLSADVALAVKSNVAVIEVLTREIERLEVRLLESAKLRPEYALLKSIPGIGEVLAIVIMLETGDISRFAQVGNFASYARCVDSAHYSNGKKKGAGNTKNGNAYLVWAFIEAANFARRFSDEAKHFFDKKKTKTNSVVATKALAHKLARASYHILKEKQPFDVKRCFA

SEQ ID NO: 226809 - protein, 345 aa, unidentified
MDVAYDGRQVVGMDLHRRRSVLVRMTMDGRKLGTARIENGPAALRRELAKAGRNPLVVLEATYGWYWAADVLEQSGAEVHLAHPLGVKAFSYRRVKNDERDAADLADLLRMGRLPEAWIAPAQVRALREVVRYRHKLVGQRTSCKDQVHAVLAKCGVPVTHSDIFGTGGGLWLDQLVLPEPYGAKVASLRALIAVLDGEIARLGQQSAQMLAAEPGYAALRELPGIGPVLAAVVIAEIGDVTRFRKPGQLCSWAGLTPRHHESDTKVIRGHVSKQGSRMLRWALTEAIQRQPEGAKPRTVKDAIVARRGKEARNIAKTAAARILLTQVFYVLRDGHVRRASIPAA

SEQ ID NO: 226810 - protein, 364 aa, unidentified
MSVYVGIDVHRKRSQVAVVGEDGRVALNRNVVNGSQPMLGLLGGLPSGTPVAFEAAFGWGWLAGLLEDYGFEAHLVHPLRCKAIASARLKNDKVDAATLAQLLRADLLPEAWIAPPEVRALRALLRHRIQLVRLRTLLGNRIHAVAADHGYDRPAGYWSGPGRAWLASLDLPPAFRQVIGDDLALIDALAAPIAALDEQVHQRAKADPAVKVLTGLPGAGEFTALVILAETGDIARFGSARKLAAWAGLTPSSAAPTALSATATSPNRARPGCGGPWARQPRPPNAHRNSPPPTRPSPPAAASRSPPPRSPASCSPAPGTCSPTRASPARKPAHCHAYHREGRKPRASSPKYMSRRHRRARVAD

SEQ ID NO: 226811 - protein, 320 aa, unidentified
MMAQNEVVVVGIDVAKDKVDACIRALKLRQTWLSTAQGHRKLVAWLRKHQVNKAVMEASGGYERDWARVLREAGIGVRIVDPKRVRSFALSAGRFAKNDAIDAEMIAWFAETFSEAPSQPHDAASEELQALVKARLDLIDFRMRLVSQSEHAAPGLVQKAHAHILKSLASEIAKLEAAISAKIKSTPDFAERAEIIESVPGFAQTSSANLVAGMPELGQVSDEIAAALIGVAPYDDDSGKRRGERHIKGGRRWVRNAIYMPCVGAATQNNPVLKAYYQRLLAKGKEPKVAIIACMRKLIVILNTMIARRQKWDPSRYVLS

SEQ ID NO: 226812 - protein, 354 aa, unidentified
MNIKYIGMDIHRETISIAVMNGEGKVVMESIIETKASTILQCIQGIHGDLHVTLEEGTWAAWLYDLLKPHVTELVVCDPRKNALMKEGNKSDKIDARKLADLLRGGYLRPVYHGENGLRTLKELARSYLTISKDLTRVMNRVKALYRSWGILCGGQQVYAPRHRTEWLNKIGEAGVRRRAEFFYQQLDALRELRQAVRKDLLAESRKQSATKLLRQVPSIGPIRAALLIALIQTPHRFRTKRQLWTYSGLAIETRDSAQYRYVGGQLQRSKKPQQLRGLNQNHNHDMKTIFKSAASMASSQEGAFHDFYQGLLTKGMKPAMARLTLARKIAAITLILWKKGAHFDAEQLKPQAA

SEQ ID NO: 226813 - protein, 350 aa, unidentified
MLIIGCDYHPAFQQIAFVDTDTGELQERRLQHREEAEKFYRDLAAQEMKVRVGMEASGHARWFERLLGELQIELWIGDAAEIRTKRVRKQKTDRQDAQLILKLMLKDDFPQIWVASWENRDLRQLLWHRHRMVQARTRIMNQLQAVALNEGLGCKKRLWREAGREQLEAFRLAPWASRRRQDLLELLDRLNPTIADLTQTIEREVEKCPEAQRLRTHPGVGPLTALAFVLIIGRADRFQCGKQIASYLGLVPLEESSGNRRRLGHITKQGNSLLRFLMVEAAQVTVRSIPEWRSKYFHLAMRRGRKIAKVAMARRLAVYLYWMWRQGWDYEQLKKFGPRAGQPEHRDGVQ

SEQ ID NO: 226814 - protein, 316 aa, unidentified
MSVTENFIGIDVSKRTLEVAVHESSYRFRCANQENDFAKLIAELFALHPQRIVLEATGGLEIPATAALHGAGLPVVVINPRQVRDFAKALGHLAKTDRLDAVVLAHFAAVINPPLRPVKSSADQELDALLARRSQLVEMLAAEKNRRGVAPTSTVRQEVAAHIEWLEQRIATIDSQLKAQLQNSSVWRVKDDLLQSVPGVGPVVSLSLLAELPELGTLNRQQVAKLVGVAPLNCDSGEHRGTRHIYGGRTRVRSALYMAALTAIRCNPVIKQFYERLVSKHKPFKVAIVACMRKLLTILNVMLKTQTSWRLAQQSA

SEQ ID NO: 226815 - protein, 367 aa, unidentified
MNGVPVQVQDLGGAGVVVGVDTHQLVHVAAVIDSRFARLGDREFPATAAGYQALVQWACSFGPVAGFGVESTGSYGAGLTRHLLTRHLSHKTGEVGAFEVFEVNRPEKATRVRHGKSDPVDAYSAAEQVLTARASGRPKVRTGIVEAIRTIKVPRDAAVKNRTAAYSQLRDLITAASGKLHDDLIGLSGKKRVARILTWRPDPHRIADPDHAVRHALRALARRITYLDGEIAEADKHLTALVEQACPTLLAMPQVGVQCAARLVISAGENINRMRTEASFAKLVGVAPLPASSGKTHRHRLNPGGDRQANSALYMITVGRMRSHEETRAYVERRRAEGLTTPEIIRCLKRHLARSVYNALRTDLMTT

SEQ ID NO: 226816 - protein, 427 aa, unidentified
MTKRNKNLKEIRSVHTLIVGVDIAKRTHWARTLDGSTGIEVGSAFSFQNSINGFSRLLGRMHRVKEQIGAQNIVVAMEPSGHYWKPLASYLINTGIPVVIVNPYHVKKQKELDDNSPTKNDRKDALIIATLTWEGRFFHCYLPKGIWAELRGYTQNRHQQKAKLNSAQNNLVAILDEYFPEYRRIFKNLLGKASLYILTHRPFPADLKQLTVEELTAELKAASSGKVGQKRAVLLLAAAQESIGVSEGLDAARLRLTQCLEEISFWQKQLTQTEAAMEKALAKTGLAEYLLSIPGIGVVTAASFLGEVGDLTRYEDWRQIRKLAGYNLTINQSGDSKKGVTKISKRGRAGLRSILYQAALVLVAKNPQFKALYAYLKTRGENTLKSKQALVVIACKLLRVMFTLTKEKRLYDPEKVLGSYRRQQLAT

SEQ ID NO: 226817 - protein, 370 aa, unidentified
MSDVSVSYAAFVGVDLHKCTVSLCAVDARGETIAALTCDTKCVERIEQWLAALPRPSRLAVEAVGFVEWFIDRFRSCVDKIDIADATELANRRGKRRKTDRKDAADIAQRLARGECPLGWIADEPTLQLRKLGRHWRHLSRTLTRAKHAMQSMLLAANLRGPKFDGASAQKWLLAHGDLLKDVQREAFGNLLDIVCLIERQRETLRRRIIFANRDPKFCALTTILKSVPGIDEIWACVIAAEVGDFARFPNADALEFWAGLTADLKESAGRTQSGHITKAGSPCLRWALCKAAATLCRSDAKQEAIRQRLIQRMPKAKANVAMGRRLLRILFAMVRDGALYQGQVKTGHEKAASQARFKKINKRKELLPA

SEQ ID NO: 226818 - protein, 405 aa, unidentified
MDVIIERACGMDVHKDNITACIMTPDGKEIQTFPTKTVFLLKLIDWIKEHDCTHVAMESTSVYWKPIVNLLESEGIEFLVVNAQHMKALPGRKTDVKDAEWIAQLLRHGLLKASFIPNRIQRELRELVRYRRSIIEERARQHNRIQKVLEGANIKLGSVVSDIMGVSSKDMLRAIADGEDDPEKLANFARRTMKKKKAELELALQGYVNPHQRLMLKTILTHIDFLTEQIEMLDQEIAQRVNSYEEDIERLDSIPGIARRMAEQILAEIGTDVKNQFPTAAHLCSWAALVPGYNESAGKRKSTKSKKGNKYLRSALTEAAQSVRGSKNYLGALYRRTAGRKGNKRAAIVVAHAILRIAYYLLTRKEMYVDLGEDYFDKQRQVSIVRHSVRRLENLGYTVTITEAS

SEQ ID NO: 226819 - protein, 416 aa, unidentified
MPSVNRKTICNDPQVCRIVDLPVYYELETNNGNRDYRIQIGGHYMNYNTVYVGMDVHKESFTLCSCKYEDEKASHYQRTPASYKNVLRYLAFLRTIYGEDTRFVCGYEAGCLGYSLYHQLENFNVECVILAPTTMLEQRSKRRIKTDKRDAEIIARSLAQHNYSPVHIPTETDNQTKEFIRMRDDHKAELKKIKQQILSFCLRQGYQYDGSGNWTAKHVKWLRSLKPAGLYKEILDEYLLTYTILTDKLNRLDQRIEELASKEEYKESVSKLTCFLGIKTHTALSVIVEVGDFQRFVSARKFAGYLGLVPGQHSSGDDRNGLGITKAGNTHVRRLLVESAQSYTRGKIGYKSRVLRSRQAGNSPQVINYADRANERLRRRYYKMVLKDGKKYNIAKTAIARELACFIWGMMTDNIY

SEQ ID NO: 226820 - protein, 352 aa, unidentified
MRIIGCDLHARQQTLAVLDTTTGEVMEKTLTHSGTNVEEFYSTLPGPVRVGIEATGTMQWFLGLMEELGIECQVGHPAKIRAAEPRKQKHDRRDADLILKLLVENRFPSIWRPSKDLVDLRALLLHRHQWVRMRTRIQNALQAIALANGLRRGPSLWSQAGQCAIASLPLAPHTAHRRNELQAMYAKFEVEIEKLNQRVAEQAGERPGARLLMSHPGVGPITALATDVFLGDPTRFADGKALASYVGIIPSEYSSGGRQRLGGLSKQGNPLLRFLWCEAAAHAVRRDPELQRFYRRKLIQKGLGKARVAAARKLGIRLWILLRDQIDYHEFCRRGQMQQNSGDARAGMPGTR

SEQ ID NO: 226821 - protein, 370 aa, unidentified
MEEGIKFFVGLDVHKDTIAVAVAETGRAPARLVGSIAHDVNQLLKRLARYGEPAQVHVVYEAGPTGYGLQRALARRGYQAQVIAPSLIPKRAGSRVKTDRRDSLRLAELSPAGELRAVWIPDPADEAIRDLARAREDAVNARTQVRQQLKGFLLRHDVRYARRTSWSKTYYRWLATLHFGETGVQTAFTDYWQAVSAADERVGRLTTALVGSIAGWRFASIVAALQALRGIDQINAIGLVAEIGDIGRFAHPRQLMSYLGLVPTEASTGERVVRGSITKTGNAHARRLLTEAAWNYRFQPRIGMRAQRRAEDLPQAIRDVAWKAQLRLSGRFRRLHTRGVHLNKVCTAVARELAGFVWAVARARSELPQS

SEQ ID NO: 226822 - protein, 415 aa, unidentified
MKRSCGIDWAEGHHDVAIVDSDGKLVAKKRISDDPAGFSALTELLADSGDSPEDPIPVAIETPRGLLVAALRGTGRPVFAINPMAVARYRERHSVARAKSDHADAMTLANILRVDAHLHRQLPADSELAQTIAVLARAQQDAVWRRTKAGNELRSMLREYYPAFLDTFAGKSATNLAKPEARAILTIAPTPAHAARLTKARIAAALRRAGRKRGIDDLATDILQHLRIPQLRQPDLVEKAMGRQAMALLAMLDAACAGADDLEQAATEEFRKHPDYAVITSFPGLAEVTGARILAEIGDDRDRFADGRALKAYAGSAPVTRASGKVTSITHRRVKNDRLAAVGWVWATYASINPGPARTHYCRRRDHGDRHAAALRHLFNKMIGQLYHCLQTRQTFDAQKAFSHSADTPQNEAAA

SEQ ID NO: 226823 - protein, 423 aa, unidentified
MWLHTKYRASNGDGMRGPASSGMQYIAPMKNALDGAETETGHMKQDSSTKVKNDSSAKGKVVSAQTRNSKRALYKRAAEERLTIGLDLGDRKCAYCILDAAGDVLSCDTLPTTKTGLLSLFERMPRSRVALEVGTHSPWVSRLLTEAGHEVIVANARRVALIGQSTRKNDKVDAATLARLARVDPRLLAPIRHRSEQAQKDLLVIRARDALVEARTKLINAARGLVKPLGERLPSCDSEQFDEDLSKGLSDEMRVTLQPLLRSVAQLSEQIAEYDVRIRDLAGRYPETKLLQQVHGVGPLISLAFVLTIEDPGRFAHSRDVGPYLGLVRKTRDSGESEPQLGITKEGDGCLRRLLVQGAHCLLRNNAPDSDLRRWGLEKIRQRGKKEKKRVVVAVARKLAVLLHHLWVSGEAYEPLRNRTAAA

SEQ ID NO: 226824 - protein, 343 aa, unidentified
MQTITTIGLDIAKSVFQVHGVDAGGQVIIRRQLKRRYVLSFFQKLTPCLVGIEACASAHHWSRELQALGHTVRLMPPAYVKPYVKRQKNDATDAEAICEAVTRANMRFVPTKTPEQQSGLVLHRTRHLFIRQQTAVINAIRAHLAEFGTVAPVGRHGVEELLNVVADPNDKRVPEIARACLSALGAQLRRIKEQILEFDRLIRAWHRSNEMSMRLDEAPGVGPVLATALVAAVADPKSFRSGRNFSAWIGIVPKQHSSGGKNRLGNISKQGDRYLRGLFVAGALAVIRYAKIHGTKHRPWLTALLARRPTKVAAIALANKIARMVWAMMAKGERYKEPVALAR

SEQ ID NO: 226825 - protein, 323 aa, unidentified
MNKNIKVVGIDLAKNVFQLHGTDSKGKCILKKRLSREKLIEFMAQLPPCLVGIEACGGSNYWGRTFQGLGHNVKMMSPQFVKLYIKSNKNDCNDAEGINEAVTRPTMKFVPIKTIEQQDMLLLHRCRELAIKQRTALSNHIRGLLSEYGVVMTKGLCHMRNLPVMLELNKNKLTPHAEAVFIRLYEQFKMYDTQVDVHEKEIKQQAEQDPRYKEIQKVEGIGPITASAMIATLGNAKYFKNGREVSAWLGLVPKQHSSGNKIRLGSISKRGDRYVRTLLIHGARTVINRCNNKTDKKVYGLQIKKSAVAITKQPSLWPIKMRV

SEQ ID NO: 226826 - protein, 448 aa, unidentified
MATVNNAITTGQPFAAIIGLDWADQKHVWSMRTADGHRQRGELVNSPEAVEIWAAELALRFAGQPVAIGIEQSRGAVISMLSKYSHFVLFPVLSTSVSNYRKSFTPSGAKSDAKDSDLILDLLIKHPEQLPPLRPDTVETRSLQFLTEERRKLVNLHTSQVQTLTNWLKQVFPQVLHWFEDVSTPLVHDLLLRWPTLPDLQKVSSKTLLNFFHRHNCRSQERNQQRLAEIPHAVPATHDPALLKAGVLCIQNTVRLLTQMRTGISALENQIAEVFRSHPDRAIVESFPGAGPALEPRLIAAVGTQRDRFPSAQSLAAFVGIAPVTEASGNSLWIHWRWACPKFIRQTFHEWANCSIKSCAWAREFYDQLRARGKSHHAAIRALAFKWIRIFFRCWRDRVPYDEQRYLRSRQARNAETPAPVPPAHGKAQPRFLFKTCGDFQKIAEISY

SEQ ID NO: 226827 - protein, 412 aa, unidentified
MSDGTVSWFAGVDWGSEKHQVCLLDAAGKVVGEREFRHGGAGLAALCDWLVSAAGEPGRVAVAIEVPHGPVVDALLDRGFAVHAINPKQLERLRDRVSLAGAKDDRRDARVAAGGLRTDPHLFRPIEAGDPAVIALREWSRLAEELQQERMRLGNRIRQQLWRYYPQLLEVSDDVTVEWVLDLWTLAPTPAKAARLRASTLVRLLQEHRIRRVDAEKVLGLLRQPAITVAEGVTEAAVLHLRSLGARLRLANREFHQAERKLDALCATLREKTAAAGGAPCDAAVLRSLPGVGTVTLAILLTEAAGPISRRDYPALRTLSGVAPVTKRSGKSCSVTMRYAAQIRLRNAVFHWARVAVLNDPKCRSRYATLRARGHSYGRALRGVGDRLLGVACVLLRRGMLFDPDYGSSAAA

SEQ ID NO: 226828 - protein, 347 aa, unidentified
MALTIVEARAITGGVDTHADTHVAAALDPVGGLLGVREFPTTPAGYAGLLGWLGGFGTVCLVGIEGTGSYGAGLTRHVTAAGVRVVEVDRSDRQDRRRQGKSDPLDAVSAARAAQSGRARGAPKGRDGTVEAIRALMVAKRSAGSERTQTINQARSLILTGPDDLRARFARHTVAALVAETASLRPRPGDVVGYAVRVALRELGRRAEFLDGQLQRLDELILPLVTAHAPGLLALYGIGPNTAALLLIAAGDHPERLRSEAAWAHLCAAAPIPASSGKTVRHRLNPGGDRQANHALWRIVFTRLGSHPATRAYVERRTAEGKSKPEIIRCLKRYVAREIYPHLRAAR

SEQ ID NO: 226829 - protein, 453 aa, unidentified
MLFIGDDWAEAHHDIEVEDDSGRVLARRRLPEGLAGITTLHELVAEHLDPTAEPDQVQLGIETERGPWVQALLAAGYGVFAINPLQVARYRERHSPSGAKSDAADAHLLAEIVRLDRAHHRRIAGDSEIAEHVKIAARAHQSMIWSRVRQVNTLRSLLREYYPAALAAFGTDLASRDALAVLSVAPHPELGRRLSPARIETLLRRAGRQRNVSTTAATIRAALRSEQLAARPGVIGAYTASASALLAVLTAMAAQTEVLAGQVEQGFGQHPDAEIYRSQPGLGDVLGARVLAEFGDDPGRYADAKARKNYSGMSPITKASGTKRVVLARYARNRRPGDALFLQAFAALNNSPGARVPRPATSPRRHPLPSPPHPREPARRHPPRLFTNPHPLRRAPCLAQRTRQTQPCSLTASGRGMSSQRLFSTRSFGHRAECEPNSKSPRSSRSGSRERPR

SEQ ID NO: 226830 - protein, 345 aa, unidentified
MNITTIGLDLAKNVFHVVCFDRTGKELKKRMLRRNQVAKFFANLPPCRVSMEACASSHYWGRKLREMGHDAKLIPPQYVKPYLRGNKNDYNDARAIAEASGRPSMPFVAIKTVEQQDMQALHRVRSKCVKSRTSLCNSTRGLLGEYGIVLTRGIATLRRGIPELLEDPDNGLTDRFRQLLQRCYEQLVELDAHISFYTYELERLSQQDEACQRLQTVPGFGPIVASAFRSAIGDGSAYSRGRDASASLGLVPRQHSSGGKDNLLGISKRGDKYLRSLLVHGARAVVIQAARKDDSLSRWINRIREKRGWNKAVVAMANKITRIGWAVLRNNTTYKPALAATAITT

SEQ ID NO: 226831 - protein, 340 aa, unidentified
MITIGIDPHKSSLTAVALQPSGEVSATIRLEVNRDTVTRLQAWAQQWPQRQWAVEGAAGLGRGVAQGLAAADEPVVDVPAQLAARARLLNTGHARKTDPIDAAAVATVAQHHRRLHPVRAEDDSLVLRLLSERRDDLAGERTRTVNRLHALLRDLIPGGAKRNLTAEQAAALLRSVHPVTAVDTQRKQLSRELVADLRRLDAALGRNSEDIAAVVTVSGTTVTQIHGVGPVLAAKIIGHSGAIMRFPSRHHYASYCGTAPIEASSGEQRRHRLSRAGNRQLNRALHLVAVCQIRTSCSGREFYQRKLGEAKTPAEARRALKRRLCDTIYRHLVQDQHAAT

SEQ ID NO: 226832 - protein, 465 aa, unidentified
MTPTKHLPENRRQRKELARRLRSEDPGLAVMHPEAAGIDVGNDAHYVAVRGDRDAEPVRRFDCFTADLYRMASWLRSCGVKTVAMQSTGVYWIPLYDILEDFGFEVFLVNARHTKNLPGRKSDVQESQWLLKLHTYGLLNNSFHPSSDIRVLRTYWRQRAEHAVSMATCIHRMQKALTQMNIQLANVISDLSGRTGQAIVRAILAGERDAIKLAELSDCRIRATKEEIAKSLQGNWRSELLFVVQQQLEMYDIYQRRITECDQKLEQHLSTFADTAFPVTKQTLSEANKSKRYRYMPQFPLSGELLRITGVDLTHIDGINVMTAQTIISEVGLDMSRWKTEAHFASWLGLCPDNRISGDKVLGRGTRRVVNRAATALRIAATTLLKSRTYLGAQYRRLRTKLGAPKAITAMAHRLARLVYRMLKYGKEYIDKGAEYYEQKNRQQQINFIQKKAAQLGLVVTAVSS

SEQ ID NO: 226833 - protein, 355 aa, unidentified
MTASYDYHIGVDYHKSYSHLVVQDSSGKTLRSGRVKNDRQSLGGFLERYRENSHAVVEATRNWMVMYDWLDDICDDVVLAHPLKVKAIADAKIKTDKIDATVLAHLLRADLVPEAWAPSDKARELRVALRERMFYVRLRTMTKNRIVTVFDRYPEQTAQLKKLGDLFGKAGRVQLAQVKVSEIDRIQIDRGLDFIGDIDGRIKQSETTIRAMTKANGNVKLLKTIPGIGEFFARLIDAEIDDVSRFRNAKKLAAYAGLVPSTYSSGGKTFQGKIIKQGNKWLRWAFVEAVTPAIASDAQLRAQYEHLKFRGVNKARVAIARKLLTIAFQILRDQRAYEPRGESNMESTSTISRLS

SEQ ID NO: 226834 - protein, 340 aa, unidentified
MKLSVIGIDVGKTVLHVHGADAQGKPVLRKKFGRSALVEWLAQQAPCLIGMEACGGAHHLARVLTDSGHTVRLIHPSFVKAYVKSNKNDFRDAEAIAEAVTRPTMRFVAIKTVAQQELQALHRLRSGAVAQRTAVINQIRGLLLEFGITVPQGPTALRRRLPEILETADGGLDALGRELVAELQQEWVHLDERIAALEQRLKQHTQTSEPCRRLQTIPGIGLLGASAFVAAFGDGRQFASGRDCAAALGLVPRQHSTGGRSQLGGISKRGDAYLRTLFIHGARAVLRYADRHDDPRSRWIQAVKARRGIRVAAVALANKMARTAWAVLTRETPYQVPAAA

SEQ ID NO: 226835 - protein, 432 aa, unidentified
MNAFSVSSPPSNVAAWVGLDWADQQHLVCLYDVGTGQTELSTLEQKPEALQSWLSQLRQRFGGQPVAVVLEQARGAVIYALLSVDFLVLYPVNPQSLASYRKAYATSGAKSDPTDAALLMEMVRNSPQRFRPWKPDDADTRSLQLLTQNRRQLVNQCTAFTNQLTGLLKSYYPQALELAGELDSLQACNFLQKWPTLEALQQAPPAQIRKLYLDHGKPRSELLEQRLEQIRRARPLTTDPAAVLSGTMMVRALIEQIRPLLATLERFDQQIAALFRKHPDRLLFESFPGAGAVLAPRLVAAFGTDRDRFQSAQQIQQLSGIAPVTEQSGKQRWVHWRWACSKFLRQSFHEFADHSRKWCSWAKALHQRLRRSGKGHHAALRVLAFKWIRILFHCWKTRTVYDEQIYLKSLEKRNLTLWAEAQALPPRKKKAA

SEQ ID NO: 226836 - protein, 367 aa, unidentified
MKKVSTAAVKQSKNFSQQKLTIGLDLGDRNSWYCVVDEAGQIQLEQRVRTTVNALQEVFGAMPRSRIALEIGTHSPWISRLLSELGHEVIVANARKVRLIGESRKKDDRLDAQTLARLARIDPELLYPVKHRSAQAQTDLLMIRGRAGLVRSRTALVNTARGLAKSYGERLRGCNVRNMNPEKAEGLSPELQAALEPLLNAIESLSERIVEYNERIENLAQQSYPQVALLKQVKGVGTLIALTYLLTLEDPHRFQKSRDVGCYLGLQPGRRNSGRSEPQLHISKEGDPYLRTLLVQGAQHILGPFGIDSDLRRWGLRLAERGGKSGKKRAIVATARKLAVLLHHLWVSGEAYEPLHNSSRTTVAAAA

SEQ ID NO: 226837 - protein, 346 aa, unidentified
MLAGNSVGIDYHQQSLQVCVMGSNGSVLGMRKLRNSVPEVMKFAASYGAVGSAAVEACTGSANFAEELKRTSSWTTRLCHPGYVHRMRHNPDKSDKSDAYLIADLNRVGYLPEVWLAPEWLRDMRNLMRYRRQNVDQQRSVKLRLRALLRLNRVSAPEEYGLWTKRGWEWLRTVASTKLPTEAGWVLENHLLELEQIAARVRATEKRLFQALAEDALTKRLAEEPGVGMVTAAILRLELGTFHRFRRGKELSRFCGLTPRNASSGERQADAGLIKAGSNILKTALIEVAHVLRRISPRWSEMSNRMKAAGKKGSVITAAVANRWLRELHHRMVAFEESRGGQTQAA

SEQ ID NO: 226838 - protein, 341 aa, unidentified
MLSIGVDSHKDSLAASAVDELGVERAVGSFANTRAGHRQLRAWLPPGARRIGIEGSAGFGAALAQSLLAAGELVLEVPPQLTVRERRHAGRPGKSDPADALAIARITAREQRLRVVQAPALSDELKLLVTAREELVAERIRHANQLHADLVVLRPGYGARLPHLRGSRQLAIAGRLLGSGAHLRCQLARRRLARLRRLDAEIAGLERQIAARVRASRSSLPGLTGVAALLAASLLAESGDVRRFRSAAAFAAASGTAPIPASSGQHQRHRLNRGGNRRLNRALHAMALVQARCDPRARAYLARRRAEGKTWREAMRALKRQLADVVFRTMLADARAADLTI

SEQ ID NO: 226839 - protein, 410 aa, unidentified
MMRVGIDAHKKNCTTCVFRDSDVLSSAPSERFVFKTTMRGVAEFMEKIPEGAMVVIESSTTGKAISKLLSGKYEVHMIAPPERKPSIKTNKRDAERIIKEDMLGYVRRAYIPSQRIEELRLIVAKQMEIAGKISAVKNQIHALLERNLLQSEFEDLSDIFGVEGLERLASVELPKHEKLTFAMYLEELKLYTSQHKQIETEIAKIAEADIDCKNLMSHPGIASFVAVAIKARTGDASRFPTKKQFCSYAGVVPKADNTGEHVSEHNRVKHGDDVLKYALTCGVNAAVNANTHSAVKRFYLRHLAKGKSPQDAEVAAARKLACIVWKILTSKQRYVEEDRYLTARKMRRVSQIARRSLKHTTKPEDVSTLITSLKSETDVLQRYSEKMHAMSDAVNETLLRSNVHWKREER

SEQ ID NO: 226840 - protein, 311 aa, unidentified
MNNTIGIDVSKDKLDVFDLVGLEHHQVANNSPGLKMLQKMIAKLGASLVIFEASGVYHRELETSLAKNAVPYTKVNPRQARRFAEATGKIAKTDRVDAEMLARMGAILQLKPQEPKVEYLNDLREMLVARRGLIKDRVAVKTRSQTTTQTLLKRHLKERLSQIERHLDQLDCRIKDLVAQDEQILARFNFLTSIPGISSITAFSMLIEMPELGSMTGKQAACLAGLAPISKQSGRWQGKERIQGGRAFFRRAMYMPALCTIRHQLSSKAKYDQLIKAGKPPKVALTAIMRKLVVVANALLRDGRMWSENRA

SEQ ID NO: 226841 - protein, 341 aa, unidentified
MNIKRVGIDLAKSVFQLHGVDGQEKVILRKQLRRTQMPDFFKKLPPCLIGMEACSSAHYWGRELQKLGHTVKLMAPQFVKPYVKSNKNDANDAEAICEAVARPTMRFVAIKTIAQQDIQAIHRIRSELVQQRTAKVNQIRGLLAEYGIVVGRRVEVLGKALPLLLEDAENGLSADFRLLLDGLRQDFATLNGRIDEMDKTIKALADSNADAKRLQQIPGIGPITATALVCAIGDGKQFKRGRDLAAWLGLTPRQHSSGGKDCLLGISKRGDAYLRTLLIHGARAVLKVAGQKDDPRSRWLQNLCSRRNKNIATVALANKNARIVWALLSKKTDFLPEGEPA

SEQ ID NO: 226842 - protein, 368 aa, unidentified
MGRKSSKLFVGMDVHKESIDIALAEEGGEVRHYGGIGGEQSALIRTVRKLESLGKSLVFVYEAGPCGYWIYRLLQERGHPCWVVAPSNTPRRVRDRIKTDRRDSLKLAGLARAGELTPIYVPDAADEAMRDLVRAREDAVATQRQARHRLAALLLRNDIRYGGKTAWTEAHRRWIARLHLPGAAQRIAFEEYLLTVDEATASVQRLTRSMEQELGHWRWQPVVHALQACRGIQLIHAVRIVAEVGDLSRFTHPRQLMAYLGLIPSEDSSGERRRQGPITKAGNRSARRALVEAAWAYRHHAAVSPLIVRRQTGLAKPVLDIAWKAQLRLCARFRRLSARGINRNKIVVAVARELAGFVWAIGQRVKLN

SEQ ID NO: 226843 - protein, 323 aa, unidentified
MNKDTNYLGIDISKDVFDVMTEKGIHYQFKNTKKGFSNFLKTLNAKSHCVMEATGYYHYQLAYFLVENNIRVSVENPLSVKRFIQMKLSKIKTDKSDAKMICEYAQSVTLKLWKGESKDQQECLQLIRMLGVYGKQSTMLKNKIHGESTLGNTNTLVVKSINRSLKSIKKEVDLLEKQLLGIVKETHQDLLTRLESIPGLGRKTSLMLIVLTDGFNRFETASALCCYSGLTPTIRQSGSSIKGRSRISKMGNPKLRNLLFMCSFTACKHNKACKAIYDRIVAKGKSKKLALITVCNKLLKQAFAVAKSGLPYDENYRSALVKN

SEQ ID NO: 226844 - protein, 345 aa, unidentified
MQLHTIGIDLGKTLFHLVGLNQRGEVVVRKKFSRKQLLHFTANLQVKLIGMEACGGSHFLGRALREQGHEVRLMPAQYVKPYVKTNKSDYIDAEAIAEAVERPKMRFVPIKSDDQLDLQSLHRVRERWVMRRTAVINQIRGLLLERGITLRQGRRHVDEALPGILEDASAKLSGAVRLLLAQLKLELDHLQMRIDEADAVIQKIAGENEACRRLVAIPGIGPVTATAIIAAIGHGAAFKKGRGFSAWLGIVPGEYTTGGKQKLLGISKRGNSYLRRLLVQGARAVLQQSAKQSSGLSTWLAQLTTRVHSNVAAVALANKLARMAWAVLAKNEPYRPPMLVGAATA

SEQ ID NO: 226845 - protein, 347 aa, unidentified
MRFYTKQHRYYCGIDLHARSMYVCVLDSQGEILMHRNMTCSPELFLKAIGPYREDVAIAVECIFTWYWLADLCARENIAFVLGHALYMKAIHGGKAKNDKIDAHKIAVLLRGGMLPMAYVYPAVMRSTRDLLRRRMHLMRKRSELLTHIQNTNSQYCLPQFGKKIAYKRNRHDLPEHFTDSSVRRSIEMDLSLIDHYDKLLAEVELYITQNAKVHDVNAFNRLRSVHGIGKILALVMLYEIHDIKRFPTVQDFVSYARLVKCSRESAGKRHGSSGAKIGNVHLKWAFSEASVLFLRANPKGQRFLDKLSSKHGKAKALSILAHKLARAVYYMLQRDKAFDMNKFFNS

SEQ ID NO: 226846 - protein, 414 aa, unidentified
MNTQTVNFDQLIERGCGIDVHKNLIVATIKGVGLQEQTRSFDGFTESLELLREWLKESGVTHVAMESTGVYWKPVYNVLEEDFEVILVNARHIKHVPGHKTDKKDSKWIAKLLLCGLLKGSFIPPKPIRELRDVTRYKRKVVDQIASEKNRIQKILEDANIKLSSVVSDMSGAVATKIIKALIDGEENVDELVKFHHGKMHCTKEELAASLRGKLTDHHRFMLQTVKESIAEKERLITKLDEQIEKMLKANELELDAKLLETIPGVGKDGAAYILAEIGNDMSRFPNEQHLASWAGVSPGSNESGGKKKSTRTTHGDKYLKSILTQFAWAATRTKKTYLRSKYESLVGRRGKKRALVAIGHKILVAAYFILKDKTAYKELGAEYLDNRKKDRQIQRYLDKLKELGVEIPKEMVA

SEQ ID NO: 226847 - protein, 429 aa, unidentified
MRTESTPGARGPVFCGVDTHADSHWLCVLDWRGRKVLSRQFPADAAGYEALAGAIAAAGEPACVAMEGTSSYGAGLTRHLASLGMPVREALSPARMQRRRPGQGKCDEADAERAARAAMSGSKLGTPKSQDGWVDGVRCMLAARSGAVKARTSAINTARSLLTTAPEGLRSRFRGMGGPRLMEELPSVRAEGALGAALGALADLWAAARDTALDMERAIEASLEENCPALLAMYGCGPVSAAKLAVAAGDNPGRLRSEASFAAICGACPIPASSGKTVRHRLNRGGDRQANSALHEIARQRVMRDPETAEYAERARGRGKSDREVMRCLKRYVAREAYRALMHPHEIRRPEDASELVAARRAAKVSQVRAASILGTSEKYISMLERGQRELKPIRRAYEAWVEAGLPLDWDRRAFEAERKMDFKKHLAK

SEQ ID NO: 226848 - protein, 449 aa, unidentified
MRQSSAGISLEYIEHNAAGIDVGATEVYVAVPPGRDAEPVRRFKTFTGDLRAMAAWLVQCGITTVAMESTGVYWIPPHQILEEAGIRVCLVNSKHVKHVPGRKSDVQDCQWLQYLHAVGLLKASFRPDSQICALRSLSRHRASLVDSAAVHVQHMHKALTQMNLQIHHILSDITGLSGMAIIEAIVAGERDPHQLAAKCHQNVRSSRETVIKSLVGNYRSEHLFTLKQSLTAYRHYQELMAECDREIDRLMRSLNSRIDPTQQGPMPSPDPKAQKRRKNQFHFQMGPELNRIFGVDLTAIPGISALTAHTLLAEIGPDLSRFPNVAAFASWLALCPANKKSGGKVLSSKTRQTSSRASRALRIAAQTLARSRSRLGSFYRSMRARLGSPQAITATAHKLARIVYHLLTTGQSYDESVFLMEDQKQAQRHEKRLRKQAKTLGFQLVPIAA

SEQ ID NO: 226849 - protein, 304 aa, unidentified
MDAKRFIGIDVAKAQLDVALGPNGERFSVTNDERGISALLKRLQPADLVIIEATGGLEVPVAGALATAGIGVAVVNPRQVRDFARATGQLAKTDALDAQVLVRFGEAVKPQVRALPDAQAQALEALVNRRRQLVEMLTAEKNRRANSPKVIHKSIDEHIRWLEKRLAGFDDELAGLVRETPIWRERDELLRSVPGVGQVLSTTLLAHLPELGALNRKQIAALAGLAPFNRDSGSLRGSRCIWGGRAQVRRVLYMAVVSAIRSNPVIKNFYAQLRARGKYPKSALTACMRKLLVILNAMLHNKTH

SEQ ID NO: 226850 - protein, 435 aa, unidentified
MASKLQKIHAQGAGIDVGSRQFFVGIENEEVKSFDTFTSGCHQLVEYLQQHSITSVAMEATGVYWITLHDMLRAVGISVDVVNGRHVKHVPGRKTDVKDCMWISELHSYGLLKKSFIPDVMVKEMRHYVRLRENHIEQKVKAVQRMDKSLVMMNIRLSSVVSDLQGQSSLRIIQAILQGQRNADELLSLCDTSILKHKKEQMQECLKGFYKPEQLFALRQSWEQYEFFEKQIAGCDQCIDQLLQTLTIHKAEPELNQKPKRIYHHKPKIENLHKMVQQLYNGKDLTVLPGITSYSLLKFFSVTGNDLTSWPTENHFTAWLGLAPNQYQSGKMKKYRRIKTNTEGGQILKECVQPLLRSKHLALGVFGKRIASRRGPSVAIKAMARKLACWIYRIINKGLEFVENGIKQYEERQRKDTLKWLEGKAKQLNYSLTPC

SEQ ID NO: 226851 - protein, 342 aa, unidentified
MQVTTIGLDIAKNVFQVHGIDAAEKVVVRKQLRRRQVLEFFKALPPCLVGMEACATAHYWARELTKLGHQVRLMPAKDVKAYVKRNKNDAADAEAICEAVRRPTMRFVQIKSTEQQGRLMLHRARDLLMRQRTQVINAMRAHLAELGIVAAQGRDGIKELLKIIASEEDARLPVDAHASLVVLAAGLHAVQTMIRSIEKRIMVQHRSNEASQRLESIPGIGVIGATAIAATVPDPKAFRSGRDFAAWIGLVPREDSTGGKQKLGPISKRGDRYLRRILVVGACAVLRYARHKPEKYPWLTQLLARKPFKVVAVALANKMARIAWALLAKGGTYRVPALATAV

SEQ ID NO: 226852 - protein, 395 aa, unidentified
MFIVGIDVAKRNHEVTVITSAGQVVCKGFRISNTCTGYNRMMERLGKLTNLKSQFIFAMESTAHYWLALYTRLKKDGHQVVILNPIQTHTMREMFLRKSKTDAKDSLVIAEVIRFGRYAASDVPQEKLLALKELCRNRAYLMDMASDLKRKAVAILDRVFPEYETLFDSAFCKTSLAVLAKYPTPDKLSRVQLGKLTEVLQKSSNGRFGEWKAREIKELAHGSFGVADCEGVYSTLIQLFLEQIHTLLETCSSLERQINELLLQFDTTLTTIPGVGTLLAATILSEIGDISRFSSADKLAAYIGVDPAVNQSGEFVGSHVHMSKRGSPYLRRAVWMASMIAVQRDPMFKAYYEKKSSEGLRYMNIIGHVTKKMTAVIYAIMRDNKAYVPVMPVVA

SEQ ID NO: 226853 - protein, 348 aa, unidentified
MSQSNQYVGLDVSLKETSICVIDDADQIVWRSRVDSTPNAIALAVKQHAPHAVRIGLESGQLSSWLFHELKETGLPVICVDARHAKAALSLKVNKTDANDALGLAQIMRVGWYREVTVKGIDCQAVRALLVARAQIVSQITTLKNSVRGILKSFGRVLPKGLRSQFTARVRAAIDGHPVLGAIMEPTLLVLEATRAQLLVYDRAVIQRARSDDTARQLMSAPGVGTVVALAYITGVEDPTRFKRSSSVAAYFGMTPRRYQSGEVDYAGRISKCGDGMVRGLLFEAAKVLLSRSARSSALKTWGEALGKRIGAKKATMAVARKLAVILHRMWITGTTFQWNVEAETQAA

SEQ ID NO: 226854 - protein, 346 aa, unidentified
MEHYAGIDVSLQLSSVCVVDAQGKIVKEAKVASEPESLIAFFAAFGFAVKRIGLEAGPLSQWLHAGLTRAGFETVLLETRHVKAALSAMTVKTDRKDARGLAQLIRMGWFRPVHAKSMGSQEVRALLVARKQLLGRLIDVELSIRGILRGFGLKVGPVTRKGFEARIRELVTGQATLERITEAMLSARSALKAEYGKLHKSVLAIVREDAVCRRLMTVPSVGPLVAITYKSAMDDPNRISKSKAAGALFGLTPRKYQSGEKDVTGGITRAGDEMVRTALYEAANVLLARITRFSKLKRWGMDVAKRRGSKRAKVALARKIAVILHRMWVDGTTYRWATAEPIAAQA

SEQ ID NO: 226855 - protein, 342 aa, unidentified
MVYVGVDLHRKSSHVKSSHVAVLAGDGELLASRRIASQPDEFLRLFGELEAQPVGVAFEATYGWGWFADLLSDVGIPAHMAHPLATKAISSARVKNDRVDAKTLAHLLRTDLLPEAWAAPPEVRDARKLGRTRVSLARISSRLKCQTHALLADQAITPPVTDVFGPGGRRFLQDVRLRPIPQARLEANLRLIDLLAPEIAQADRELRELFRGDPRVARLVPIPGIGFMTAAVVIAEVWDVTRFPSPQHLSSWAGLTPTERSSAEHTRRGHISKQGSRWLRWAMVESASRPHLNDPVLRGFRDRIARRRGGKIAKVALARRLLTLCYYALRDEGGCRAYPVAR

SEQ ID NO: 226856 - protein, 429 aa, unidentified
MRNESTPGARGPVFCGVDTHADSHWLCVLDWRGRKVLSRRFPADAAGYEALAGAIAAAGEPACVAMEGTSSYGAGLTRHLASLGMPVREALSPARAQRRRPGQGKCDESDAERAARAAMSGSKLGTPKSQDGWVDGVRCMLAARSGAVKARTSAINTARSLLTTAPEGLRSRFRGMAGPRLMEELPSVRSEGALGAALGALADLWAAARDAALGMERAIEASLEENCPALLAMYGCGPVSAAKLAVAAGDNPGRLRSEASFAAICGARPIPASSGKTVRHRLNRGGDRQANSALHEIARQRVMRDPETAEYAERARARGKSDREVMRCLKRYVAREAYRALMRPHEVRRPGDASGLVAARRAARVSQVRAASIPGTSEKYISMLERGQRELKPIRRAYEAWVEAGLPLDWDRQAFEAERKMDSKKHLAK

SEQ ID NO: 226857 - protein, 367 aa, unidentified
MKKNSISRKQSPKRKQNRMQSPITIGMDLGDKTSRYCVLNENGEVELAAAVATTRKAMLEKFKGLPKCRIAIEVGTHSPWVSRLLSELGQEVIVANARQVKVISSSSRKTDKVDAEMLARLARADLQLLRPIRHRSEKAQADLMTIRIRAALVEARTALINSLRGIAKGMGERVPACAADYLGLDQLEALPEKLKETLKPLMEEVETLTAKIKACEAKIEQIARKDYPETILLQQVSGVGTLIALTFVLTVDDKDRFQRSREVGCYVGLRPKRSESGESAPQLGITKEGDRYLRTLLVQGSHYILSRKGPDTDLKRWGLKLAASGGPRAKKRAIVAVARKLAILLHRLWTTGEVYEPLRNAQLLKVA

SEQ ID NO: 226858 - protein, 409 aa, unidentified
MRIIGLDIHRAFAEAVAWDDGKLRRLGRVDMRRDLLTAFAEQLSADDVVVVEANGNASAVVAVLAPHVKKVVIANPMQVRMIAHAKIKTDTIDAGVLAQLYASGFLPEVWVPDEPTQALRRQVTRRNQIVRQRSRLKNIIQSILHSHLIPSCPHADLCGAKGRAWLVEQVVPEDERLAIERHLREFDRLGEDLKVIERDLARSALADESVKRLMTVPGIDMVVALALTAAIGEVTRFDEPQKLVSYLGLNPSVRQSGPGPAHHGRITKPGRGHARGMLVEAAWAAARAPGPLRAFFLRVRARRGQHVAAVATARKLAVVIWHLLTKSESYVWARPSLHAKKLRDLELKAGYKAARGQKGAAHAYNSKSHRDEERRWVEQAETVYARFVTGWNPQGPKKVRTGAATEVRR

SEQ ID NO: 226859 - protein, 353 aa, unidentified
MATALMIDVVAGVDTHSETHHVAVLDSVGRLLGTREFRAQPAGYVELASWVGSFGRVVVIGVEGTGSYGAGLTRCLRDHQIRVIEVNRPDRRTRRVRGKSDPIDAESAARRALSGVEKVVPKDTSTVVESIRVLRVARTGAVKSRTAAYNQLKDLIITAPEPLRSSLRGKSLHRVSQEVARLRPDSTQLAAPLQATKSALRSIAVRVGALNSEIAELDKHLKTLVAAAAPRTLALRGVGIEHAAQLLITAGGNPERLRSEAAFAALCAACPIPASSGKTSRHRLNPAGDRDANRTLYMITISRLRYCARTRAYVERRQADGLSKREAIRCVKRYIARQTFHTIRADLAAKANP

SEQ ID NO: 226860 - protein, 343 aa, unidentified
MGDYIGLDVSMKETAISIRRAGERVWRGKCSSDPSRIAQIVRKHAPNVVRVVFETGPLSVWFYHALKEEGLPAICIDARHAKAALDMAANKTDANDADGLAQLAEVGFYREVRVKGFDSMLARSLVAARTKLVRITVELSNQLRGLMKTFGLIVPSGKGRNFEANVRRLLIDQIELSNILLPMLDAWHDIRMRAADLTKLLLAAARKSHACRLLMTIPGVGAITATSFTTAIEDPSNFKNSRAVGAWLGLTSRRYQSGEVDYSGRISRRGDRHLRGLLYEAALVILTRSSADSDLRSWGLKLRERLGFKRAAVAVARKLAVTMHAMLKTGTAFNLAIDAKVTQ

SEQ ID NO: 226861 - protein, 268 aa, unidentified
MMRCKTVGIDLAKNSFYFITLNEHGKQVAKKKLSRNKVIPFFANHEQCTITMEACGSSHYWGREFQKLGQEVQLLPAQHVKAYLRGQKNDYNDALAIAEASQHGSIRQVAVKSLGQQDEQRILQTRRLLSVEQTRLINHIRGLLSEYGIVIEKSVPAFKRELPLVLEDATNGLTDTFRMLLNRQHQRLLELCEELQWYHDYIKSVAKEDDTCQRLVTMPGIGPIVGMTLKAWMGDGQHFKRGRDASAALGLVPRQHSTGGRETPFAWN

SEQ ID NO: 226862 - protein, 428 aa, unidentified
MKNRNTQKLEAITPGTLIVGVDIAKETQWAQFVNYRGLELRKFLKFKNHKNGFDSILASIETICKNRRLDNIIVGMEPTGHYWKPLANYLLKNKVNVVMVNPYHTKRAKELDDNSQTKSDKKDALTIARLVRDGRYYEVYMPQDIFAELRVLSNSRISLMKRSNALKNTITAVIDEYFPEIVTVFKYPLKGKAAMQILKSCPFPSLILELGIDGVLVEIKKAVKKTVGRKKASQLVETAKSSIGVGYGLVSVKLKLGLMIEELELLKKQLKQLEEAMEKALADTGYDKLILSIPGIGVVTAASFLGEIGDPMRFDHPRQICKMAGYNLIENSSGKNKSRTVISKRGRKNLRSVLYRMAITMVAVNHEMKELYRYLKTRPHNSLKKKQALVVISKKIVTVIYNLIKKQTEYQAELVLGEFRKNQIKQAA

SEQ ID NO: 226863 - protein, 419 aa, unidentified
MWTEVDLVHPRCAGLDVSKRDAKLCVRVAGEGRAGATQTVTTWAAMTNQVLALREHLIAEGVTLVVMEATGDYWKPFYYLLEDAPFEVMLVNARHAKNMPGRKTDPLTDSMWLAQLGAHGLVRGSFVPPPPIRQLRDLTRTRTAVVRERAREYQRLEKLLEDAGIKLTSVATDISGVSGRAMLEALIAGQRDPGVLADLAKRRLRSKIPALTEALTGRFDEHHGFLARLHLDLIDQHTHAVEELTARIEVMMQPFRGARDLMVSIPGISTGVADVIMAETGGDMSRFPTAGHLAPWAGTCPGSNESAGRVKSTQTRPGNPYLKGALGIAAMSSAKGKNTYLAAKYRRIAARRGPMKAIVAVEHAILIAIWNMLTTGEPYSEPGGDFYINRNPDRAKQRALDQLRQMGYEVTLTALPAAS

SEQ ID NO: 226864 - protein, 344 aa, unidentified
MWIIGCDYHPSFQQIAFVDQATGEYENRRLEHKGGETEQFYRSLAGQQVRVGMEATGGTRWFERLLGELGFELWVGDPARVRAAAARKAKTDKQDAELLLRLLLEKRFPRIWVPTVEQRDARQLVLHRHRLVQTRTRAKNQLQAIARNEGLFPKRRVWSQAGQTELMALPLSPWATVRRQDWQELLGELNQRIDPLDRALQQEAKQRPEVQLLMTHPGVGPVVATAFVLTIGEPGRFQTSKQVAAYLGLVPLENSSGKGRQRLGHITKQGNSLLRGLLTEAAHIASRYDLQWRRKFLRLAMKKNRSIATVAVARCLAVRLWWMWKLGLDYGQMQESRSHAEQLA

SEQ ID NO: 226865 - protein, 415 aa, unidentified
MKKRSWKQHLLTEKTLLATVDIGKNQNFGYCRSRDGGDVPTFRFSNCGEGFKKFYRRLQQALEQFELTEVVVGFESTGPFAEPLMHFLRKRGVRLVQVSPAHVKRVKELTDNSPNKTDEKDPTVIANVIELGAALTVVIPEGAAAELRRLSQARERTLANRNALHNQLHDLVFVTFPEFLRVFPKLTRKSARMLVAECPTPAQLLKLRLEDLTERLRRLSRGRWQHTHAEAIYRAAQESVGVFEGQQSLALEIQHLIRQYEACEKFLAEVETEMCSQLTHIPYSHFLRSLRGLGTVTLAGLVGEVGDFNNFKTVAELLKYAGLNLFEISSGEHKGRRRISKRGRPLLRKLLFLAALNMVRAGGIMHARYQRYLDNGMVKLKALVAICRKLLGLILALVRQQCEYIANFQSSLQPQ

SEQ ID NO: 226866 - protein, 360 aa, unidentified
MNTTLTAPSATTVAIDLAKDVFELAYVDADGRIVARQRLGRSAFAKVFDNRAPLRLVMEACGSAHYWGRRFRRLGHGVELLPAHDVRPYVHRTKTDRADAAGLWEAARCAAIRPVPVKTVEQQGIQGLHRVREFHKAQRTAAINLLRGLLREFGVVIPAGAAKVRPAVLAALEDGDNELPMALRDTLQELLDAVVAANTAMAAIETRLQEFAERDVRSQRLQRAGGVGLLTATALSASVGEFERFPSGRHFASSLGLTPREHSSGSRRRLGRVTKRGDVYLRTLLIHGARAVLRGAKVAHGKSRPLDRTQAWALALAARIGHNKAAVALANKTARRLWAAEHHRTSFDPDHVSAMPATAH

SEQ ID NO: 226867 - protein, 450 aa, unidentified
MARRTNRFDEVQRYVAGIDLAGHADHYVCGPRKDDGTHDIEHFGTTTNEILRMVAWLKERKVVSVAMESTSVYWIYVYDMLEKAGIGCLLVDTRTVKMVPGRKSDVKDCQWLQKLHSCGLLRGAFRPPEEFNAVRSVIRESENVRQMRTQSIQSIQKSLDQMNVRVHHAVSDIDGVTGMRILAAIVGGERDPRVLAKLRDKRCRKSEAEIAEELTGNWREEHLFNLKQAYDTLCFLDERIADYDRQVRDMYAKIAAKFPPVEPPPGGTGPKKPKDKDDAKAKADLARICGGFDMTKIDGIGYDNAAAILSELGPCLDAFPTESHFVSYVGVAPALGKSAGKNVSSRKKHKNTSRVGLVLKLAASTLTRSESSLGARLRCTRSRTCSRTAIKDVAREMAKRIYRGLRFGQAYVDEGEQAYLERTRERTIKSMKKKILKLGISAKELGIFAA

SEQ ID NO: 226868 - protein, 391 aa, unidentified
MILVGIDVAKDKHDCYIMTSDGEVLFKSFTISNSMEGFDQLYEKILSVTNNLDKVKIGLEATGHYSYNILGYLLDKGLTPFVINPLHTNLYRKSLSLRKTKTDKIDSRTIASMLMSDVSLKPYSDTLYHNEELKSLTRYRFDKVQQRARLKTSISRLVTILFPELEKLVPTLHMKSIYSLLYEFPSAKAISKAHLTKLTNLLYASSKGHYGKEKAVSIREAAINSIGSYMSAKSLELKHTIKLLEELTSEIDEIEKEIKSIIDKLNSPILTIPGIGYSLCAQIIAEIGDFKNFDSPDKILAFAGMSPSTYQSGKLYSSNAKMEKRGSKYLRSAFFIAAVCVCRFEPNFALYLAKKKAEGKHQYVAISHVVKKLVRLIFHLEKTGEDYVTLT

SEQ ID NO: 226869 - protein, 378 aa, unidentified
MSKAKHNACLGTQTTMSGRKLEFTHTRDGFRRFEQALQAHLVKNGRQRILIAMEPSGIYWQALYARLTSCAYEVCLVHCQAVRNNRKTMQDGTSKTDEKDAYSVFDLLRQGKFFLPVERDSELQAAYRLMQRSMALKKRVSQLRNQLRAAIHLAFPELNSLIKDLTQPTALRFFQTTPTPESILRHGRPHFLEQWQPRQRCGQWRPETFHRIYDLATASIGLQDPARLDEFEITMLAADLVDALTKQHLWLDKAIAMLAHRADYQLLLHLPRIGQPTAAAILTAIGDIHQYTNGKQLVKLAGLDIRLYESGSSIRKLPKMSHVGSAYLRHWLYYYALRLVAHEAHFQSYYARRKHQSPGKGAGQRALMAVCDKVIRMI

SEQ ID NO: 226870 - protein, 474 aa, unidentified
MGVRRVPHLDQQADVESRIARPRFSQAVGKIPASCSGCRDAGGVQKNFAASLDEIAERDAAGKPIEVWFQMLWGRTLPPRLFKLAGVRNQIGEPAAMPSESTVHIAIELSVSSWLIAARLPGAEKSRLHRIEGGDTAALLALFAELRSRASAKVAGEANVACCFEAGRDGFWLHRLLTAHGVAAYVLEPTSILVNRRARRAKTDRLDAEGMLRVLVAWLGGDRQVCSMVRVPTPDEEDAKRTHREREHLVQEKLRIENRIQALLFTQGIRARPSLRSWARDMAELRTGDGRALLPLLRTELNRLRRRLVLILELIRELEAERAEALAAAANDAMVRKITALQRIRGIGSNFAAVLVREVLYRSFANRRQLASYVGITPMPYQSGGMDRDRSISRAGNPRARTTLIQLAWLWLRYQPGSALAAWFRERVGTLQGRTRRIAIVAMARRLLIALWRYVETGVLPEGVEIRAEAAPMA

SEQ ID NO: 226871 - protein, 412 aa, unidentified
MMGEVITAVGIDVSKGKSMVAVRRPGGEVILPPTQVNHTAEELAHLVERLREIGGNIRIVMEHTGMYWRPIAHALKEAGFFVSVVNAILIHNFSDNSLRKVKTDKADALKIANYCLAFWTELRNFSDEDETRQMLKMQCRLYERTQKTSVELRNGLISLLDQTFPGINKVLPSPYCSKRGHYKWVDFVKTFWHKDCVKKHSLNAFSNSYQRWCKKEGYRFREAEAEKIYNAAQNAVATFPANESTKILIVQAVDCLNAVYESKAVLRAEMRRLASLLPEYEVVMAMQGAGDITGPKLMAEIGDVRRFTSKRALVAFAGVDAPPFQSGNFEAKSRHVSKRGSSHLRRTLFQIMSVVMQHSSVDNAVYLFMDKKRAEGKHFYVYMVAGAAKFLRIYYARVKEYLAASEAGRSAA

SEQ ID NO: 226872 - protein, 420 aa, unidentified
MINTRSLTLAKNVMNKPNYEVKLMPQLEKACGLDLHKDKIVGFISDKEGNQQELTEYGTFTDDLLRIKDWLLTHDIQYCLMESTGVYWIGLYNVLTEAGIQVVVANPLHIRQIPKRKTDRKDARWLCTLLLNGLARQSFVPDAIQQRLRDLCRNRLFYTQSQTKTTNRIVKILERANIKIRSVSSMIATKSTLEIIRLMAAGENDIEKLLTCLRGKLKSKKENMRLALKGVLSESDRQILGLLLADYDHAEKQKQQIEKITKEVIKERYQEIYELLQEISGVGPKGAEIIIAEIGDNMQQFPSADHLTSWVGVAPGNNESAGKARTVGTKKGNKYMRVAMVTIAWGAVRTKDSYWKALFEHFRKRMKAQKAIIAIARRMLKVIYKVIDQKIKYQEKGINHFLDLQRRNAERVQLSRVPNN

SEQ ID NO: 226873 - protein, 334 aa, unidentified
MPKRNAPRPAAVYGIDIGKNIFHVVGLGSDGLPVQKVRFRRDTLLQFFERAAPTIVGMESCAGSQWIARKIQALGHKVRLTPAQFVKPYVKSNKTDIIDAEAIAEAATWPTMRFAALKSEEQADLQALHRVRDQMIGTRTRLINQMRAFCLEYGIALRQGAGLFKLDLPQALEDQSNDLSSAIRKLLADLFTDLRQLEQCIGDVTREIEVIASREDVARRLMTIPGIGALGATALLAAVGSGRQFQKARDLAAWLGLVPREYSTGGKQKLLGISKRGNRYVRKLLVHGARSCFRHLDRQEIDWGAGWMAFRLGCTRIKRSSHLPLKWPGLSGSS

SEQ ID NO: 226874 - protein, 360 aa, unidentified
MFTERTSVGLDVHARSVAAAAIDGVTGELFQTKLTPAHDHIRSWIAELPGPVAVTYEAGPTGFGLYRSLAAAGIRCQVAAPSKLQRPAGDRVKTDAKDAVHLAKLLRLDEITAVAVPSVEQETARDLVRVREDCRGDLMRARQRLSKLLLRQGIVYYDGKAWTGRHDGWLRRQRFDRAALELAFESDYETVITTTARRDRLDAAIKAMAADSEFTAVVRRLSCLKGVSTLTAFALAVEIGDWGRFSGNSIGSFVGLVPSEHSSGSSRAQGPITKAGNTHARRLLVEAAWHHRTRYAPGKTLRDRWELAPPAARVRGDQGNRRLHARWVRFTDRKKMPVIANVAIARELAGWCWSLAVMEE

SEQ ID NO: 226875 - protein, 351 aa, unidentified
MEYVGIDWAYRRAAWCAKREGGAIVDEGFVAADEDGLARLVLTLGPEVRACVEMMSGAVWVRDRLQAAGWEVEVADARKVKGLAPLACKTDKVDARVLAELCRRDLVPAVWLPSLDYRALRERLKRRMHLVRMRTMARNRIHGVLTQWGLKIPVTRLRAPDGLELLEARGVPEVWRRSVAEALAVIDWLDERLAPLERELGPLARADPRVVLLETIPGIGPLLGLTIATEIGDIARFPSARRLVGYAGLAPKIKQSGQSSRTGPLSKAGSKALRWAAVEAAQQAWRETNPWHELYRDVAKRQGKTNAGKAAVARKVLIAAWHVLSRNEPFKPSRPRGADPVPASSHFHLAA

SEQ ID NO: 226876 - protein, 355 aa, unidentified
MNSEKYIGLDVHQATISVAVLDSKGKLVMESILETKAATILEFFAGLRGTLSVTFEEGTWAAWLYDLLKPHVAKLVVCNPRKNALLKQGNKSDKIDARKLADRLSLDDLKPVYHGETGVRTLRELARSYLTIVKDLTRVMNRLKALYRSWAIPCAGRDVYYTRHRDEWLSKIKEAGVRRRAEQLYQQLDMLQHLRQQARRELLAESRKHSITAKLRQIPSLGPIRSALAVALIQTPHRFRSKRQLWAYSGLALETRTSGEYRFVNGQLRRSKKQISIRGLNKDHNHDLKGLFKGAATRASVLPGPFQDFYQRSLAKGIKPTMVRLTLARKIAAITLTLWKKGENFDVEKLKSQAA

SEQ ID NO: 226877 - protein, 309 aa, unidentified
MKQAIVYIGIDVAKAHLDVAWAGTFRRLPNERSGHAALVRWIKQSATPVQLICEASGGYEQALLESLQKSEVKVTLVQAVRVRQYARAAGILAKTDRIDAKVLAAFGSALQPQPTSPLSGEQKRLRQYEAQRRHLSRILVAEENRLAQLSCTELRTLSRSLISKIKTQIKTLDRGISDLIAQDQTLCVKAQKLTAISGVGVRTAALLLAQMPELGQLNRRQAAALAGLAPFNHDSGSVRGKRAIFGGRPALRSGLYMAALSAARFNPILSSFYQRLRAKGKPHKLALTAVMRKLLLALNQTLKPLPCST

SEQ ID NO: 226878 - protein, 331 aa, unidentified
MICVGIDIAKDKHDCCILDSDGTVRADCFTIPNNMDGFKQLLQTIRNCTKKSGKIKVGLEATGHYSYNILGFLLDNGLPTYVINPLHTNLYRKSLSLRKTKTDRVDARTIATMLLSDVDLKSYTDIAYHNEELKSLTRYRFEKVRERAKLKQSVSRLVTILFPELEKLVPSLHGASVYALLSEYPGAKQISEVHLTKLTNLLVTASKGHYGKEKATLIRETARASIGSVMPAKSLELKHTIKLIQELTSEINEIEDSIQKIIDELNPPILSIPGMGVNSAAVILAEIGDFSNFSSPDKILAYAGCSPSTYQSGKLTNCYAHMEKRGSRYLR

SEQ ID NO: 226879 - protein, 411 aa, unidentified
MRQLIERCCGLDVHKKTLTACARVPDREGNVVEVPRTFGTTIPDLLALSDWLMGLGVTHVAMESTGVYWKSPYYILEADFEVLLVNATHLKHVPGRKTDAIDAAWIAELLSYGLLKASFVPPPPIREQRDLTRYRSALTRERSREVNRIQKVLEDAGVKLDSVATDVMGVSGRAMMRALICGETDPDALAALAKGKLRAKLPELKKALTARFRDHHAFLLERMLAHVEQLEADIDEVSVRIEAALAPFSREVELLDSVTGVGVTAAQVILAEIGPDMSRFPTPGHLASWGGRCPGQHESAGKRKSGRTRKGSRALGDVLIQCARSAARTKGTYFGEKYRQVARRRGDKRAIGAVAHEILVASWYVLSKNEPYRDPGAGVLRARAEEDTRRRAINQLERLGHQVILQKHEAA

SEQ ID NO: 226880 - protein, 333 aa, unidentified
MNKIINYVGIDMAKASFMAAFNETDEPWQFENINHGINSFFNHLKQLGFNQAETILGVESTGSYHLKLSVACQSNSYQIKVINPLIVKKYNQTTLRRVKNDRKDALLIRYCLSQGYGYPFNTTQDEFILKALIRQRNSLTNTKIQIHRQDQDIQLKQSAIKTKINSIYKDIEKTIDKKIKTIEKQLKDFDQPVQALLKTIPGVGPITAASFVSEITNIQRFKQPKHLTAYIGIDPRVYQSGESIKGKGYITKRGNKILRTILFNASSVAVLHNNMFQRFFQKKRSEGKPYRVALVATMRKMAHVIHAVWSNNSPYQDNYRQYHLSTREGLTGI

SEQ ID NO: 226881 - protein, 434 aa, unidentified
MRQVPRALVKFNSSKFLIRKVVISLSNSLLVGIDVSLKDNKVRILHPDGTSLAKFVVLNSVPGANTLSKKVTQLAEKNNFDSITIGLESTSVYGDPLVYFLKQDTSVNRFNTKIHVLNPTQVNKFKAMYPDLPKTDDIDAWIIAEHLRFGRINKEVYMDERYKALQKLTRARFHTVQNLSREKNWFLNNLFLKFSSLAQEKIFSDTFGATSSSIIEEFFSVDEISYMPIEELVDFISKKGKGRFDNPDEIAATLQKAARSSYRLPKTVTHSVNQVLAVSFSAIKAYKEQLKIFDKAIEEQIKLIPNPLTSIKGIGPVYSAGIIAEIGDIHRFKDHAALAKFAGISWTKHQSGNFTASNTKLIKFGNRYLRYYFMEATNKVRLHDHELKRFYELKYSQTPKTAHKRALALTARKFVRLVYALLHSNRLYIPPKGD

SEQ ID NO: 226882 - protein, 285 aa, unidentified
MTITTVGIDLAKNVFAVHCVDQNGRTVLVRPKVSRAALPELIAGLPPCVIGMEACSGAHYWARLFRQYGHAPRLMAEKFVSPYRMAGKSGKNDVADAQAICEAVHRPHMRFVPVKDESQQAMQCLHRTRQDFIEEKTATYNRLRGLISEFGIIAPQSTDALRHIVSEQKNSLPLQVQQCVDDLLEHINRIEDNIAEYDRILSRMAKADHRSQRLMELKGIGPTTACALVASIGNAHDFKNGRQLAAWLGLTPSQYSSGGKSKLGWITKAGDSYLRTLLFRGPVRF

SEQ ID NO: 226883 - protein, 343 aa, unidentified
MQTVTTIGFDIAKSVFQVHGVDAAGRVIIRRQLKRRHVLAFFQKLPPCLVGIEACASSHHWSRELQALGHTVRLMPPAYVKPYVKRQKNDMADAEAICEAVTRANMRFVPTKTPEQQSCLMLHRTRHLFIRQQIAVINSIRAHLAEFGIVAPVGRKGVTELLQIVADTNDKRVSEVARACLAALGTQLLSIKKQILEFDRMIMAWHRSNQTSKRLHYIPGIGPMLATALVASVADPSTFRSGRNFSAWIGLVPKQHSSGGKERLGSISKQGDRYLRGLFVAGALAVIRYAKIHGTGHRPWLTALLGRRPTKVAAIALANKIARMAWAMMAKGERYKQPVALAA

SEQ ID NO: 226884 - protein, 347 aa, unidentified
MRFYTQQHKHYCGIDLHARMMYLCVMDAAGAVLLSRNIECSPRAFLAAVKAFRDDLVVAVECMFTWYWLADLCEREGIGFVLGHALYMRAIHGGKAKNDRIDAHKIAALLRGGMIPQAYVYPPEMRATRDLLRRRNHLTHKRSELIAHIHNTVSQYNLPPLEQRIDKRCDRVGLLSHFPDPQVQNSIALDLALIDQYDALLPKLERHIRACAKQHDRKSFVLLRSIHGADLILPLVILYEIQDIARFPRVQEFLSYCRLVKPARESAGKIQGHAGGKIGNAHLKWAFGELATTFLRANPPAQRLHERLKARHGKGKALSVLAAKLARAVYFMLKRGQVFDETKFYQD

SEQ ID NO: 226885 - protein, 364 aa, unidentified
MKRKVYVGMDVHKETIQIAILPSNTKALVKEQQIKHEEGQIKKFIQKLKSEGTEIHCCYEAGVTGYPLYRYLKTLGVNCIIAAPGKIPRQSSDKIKTDKRDAIKLARLLRSGDLESIHVPSEEDEAVRDYLRSRDSLRLDLGRNRQRLMKFLLRKGIKYSTTKYWTASHYKWLNNLHFENEILQATFNDYYSRVRVQEENLKAMDQKIREIAESEPYREKVGILRCFRGVDYLTAMFLLSEVNDFKRFKTAGSFMSFLGLVPGEYSSGPKRKQTSITKTGSPRLRRILVEAAWQHRFPGTGSKVVAARRVGQSALVVSLAEKASLRLHKKFKSMQLRGKTPQVMITAVSRELSGFLWAAMNLVA

SEQ ID NO: 226886 - protein, 441 aa, unidentified
MDKRYKRVAGLDVHKKTVVATRMRVTPDDRVEWETVTYGTMTSELLELHDWLAAWECTHVAMESTGDYWKPVYNLLEDTFEVLLVNAQHVKRVPGRKTDVSDAEWLAELQLHGLLKASFIPPKPQRALRELTRYRSKLIQERARTVNRVQKLLEGANIKLASVVSDIQGVSAQEMLHRLAGGETDAEALAQLARGRLRKKIDALEKALTGVVQPHHRFLLAKQLAHIDFLDEQIADIGAEIARQVTTMSQPPDEPPAGNAGAETGGGAAPASVTWEQAVVLLDSIPGIDARAAEMILAETGIDMRQFPTDKHLAAWAGVAPGNHQSGGKRYSGRTRDGNRQLQTTLVQVAWAAVRTKGTFLKARYHRLAARRGKKRAIVAIAHSILVSIWHMLSQGVAYRELGADYFDQRSKDAKVAYLTRQLEKLTGGNVVVNAESPVAA

SEQ ID NO: 226887 - protein, 977 aa, unidentified
MSVPYAELQVTTYFSFLRGASSPIELFEQAKALGIEALGICDRNSLAGMVQAHVAAKETGIRLVVGCRLDLADFLPVLVYPTDRAAYGRLCRLLSLGKARAGKGKCHLLWEDLVAWGEGLLVILLPDTADDACALHLRKLKDAFADRAYMALTLRRRPNDQMRLYELANLAHQARVPAVVTNDVLFHTHDRRILQDVVTCIRNHTTIDEAGFARERHADRYLKPPAEMARLFSRYPEAVARTMEIVERCRFSLDDLAYQYPDEVSVPGQSPQQALEALTWEGAAAAYPEGIPPEVRKTLSHELALIGRMDYAPYFLTVHSIVRYARSQGILCQGRGSAANSAVCYVLGITAIDPARTSLLFERFVSEERREPPDIDVDFEHARREQVIQWIYGHYGRNHAALTAVVTRYRAKGALRDVGKVMGLPEDLIRTLSGQIWGWGRKLDEGALNETGIDLSDRRIRLTLDLTRCLIGVPRHLSQHPGGFVLTRDRLDELVPIEPAAMDGRQIIEWDKDDIDVLKFMKVDVLALGMLTCMKKGLDLLAEHKGQHYTLQTIPAEDPRTYAMIRKADTIGVFQIESRAQMSMLPRLRPRVFYDLVIEVAIVRPGPIQMGWTASMRHQCAMLGSEDHSEETARMKVTIIGLDIAKSVFQAHGTDASGKCLLKKKLGRSEVVPFFEKLERCQVVIEACSTSHHWARVIRDTGHEVKLIPPEMVKPFVKRGKKNDAVDAAAICLAAIHPDTRFVPIKNREQQSLLSLHSTRTLLVKQQTMLVNALRALAAEFGLIVPLGNARLPELLAKIETSSNLPDALKQTTILLFEQYGRLSESIESLEGGIRTHAKQDEDARRLLTVPGIGPVTASLIVASITDIAAFDTARHFAAWLGLVPRQHSSGGKTRLGRITKTGNREIRKMLVLGATSMLYRAQKWNSAAGAWLCKLLERRPGRLATVALANKLARIIWALLSRKEIYRPAGRSVATV

SEQ ID NO: 226888 - protein, 479 aa, unidentified
MHLPVNEPVETRLPVRSTEVPLRRLSAVNGLVPWRGSPCRKSNGESAPAPERQYRDRCSSRRVEPRVKEERILHNDFHFFAGIDWGSERHRVCLVDQQGHPVAERWIDHSGSSLAELVDWLRERAEPRSLAAAIEIPRGAIVETLLEHGFAVYSINPKQLDRFRDRYSPAGAKDDRRDAFVLADSLRTDMLCFHAVRLDEPVMIRLRELSRLEDELSEEFNRVANRLREQFHRFFPQLLQFSESASDPWLWTLFEIAPSPDRAAKLTEAKITRILGQHRIRRIDAKQVRAVLKTRPFTLAPGAAEAASEHALLLLPRLRLLHQQRTDLARRVQAILDQMATPTEPQSSQHRDAAILLSLPGLGRKVAATMLSEASEAIAARDYHALRCYSGTAPVTVQSGKKKVVTMRMACNKRLRNALYHWARKSILWDPKSKSTYAQLRACGKSHGTALRSMADRWLKVLVSMLRHNTLYDLQHRAA

SEQ ID NO: 226889 - protein, 343 aa, unidentified
MQMITTVGLDIAKSVFQVHGVDAGGQVIVRRQLKRRYVLTFFQKLSPCLVGIEACASAHHWSRELQALGHTVRLMPPAYVKPYVKRQKNDATDAEGICEAVTRANMRFVPTKTPEQQSGLVLHRTRHLFIRQQTSVINAIRAHLAEFGIVAPVGRHGVEELLTVVANPNDRRVPEIARACLSALGAQLRRMKEQILEFDRLIRAWHRSNEMSMRLDEAPGVGPVLATALVAAVADPKSFRSGRNFSAWIGMVPKQHSSGGKQRLGNISKQGDRYLRGLFVAGALSVIRYAKIHGTKHRPWLTALLARRPTKVAAIALANKIARMVWAMMAKGERYKEPVALAR

SEQ ID NO: 226890 - protein, 394 aa, unidentified
MKLVGIDIGKNKHFFCIMDKDSGEVLLQPSSFSNTKDGFDSLIQKLSSYSKDSILIGMEDTGHYHFALLKYLLEKNFTVALINPKTTDYTRKIQNGITKNDKLDTLTICDVLDTPVRKKQYRITKVNSFDLYEQKQLTRHHHNLKEELNVYTNRLQKCIDIVFPEFNSLFSSKYGIIYMNVLKTFGSAENIASTDIRTIRKCFEIKGRGNRISLTAQQLKDSAKSSIGISSAAEVIKIKHLISQIELINEQLAETDKKIEEFSIQNNSPILSIPGISHFSGTSILAELGEISNYSKPSKIIKAAGVAPYHYESSQYNAQHTAITKKGSPYLRKTLYQIILPVINNNPVFKQYYDLKISQGKGHHCACGHCVRKLLRIIYHLSSTNQQFDDALLR

SEQ ID NO: 226891 - protein, 408 aa, unidentified
MRYLIGIDAAKAKNDIAIFNSDMGLVRKPFTVSQSQSDIQKLAKSFAAIDGDVRAVVESTGRYHLPIVEQLSKERIFVSVVNPKLIKQFGDNSLRNVKNDPADAKKICRYGILNWDSLREYTNMDELRTQLQLYNSQFEFFTSQKVSVKSNLIALLDITYPGINQLFNSPVRPDGSEKWVDYAELFWHVDCVRSLSLHAFSEKYRHFCEKQGYHFQQSKCESLYASAQDLIAVFPKNAQYKALVKMAIGNLKEVITHVETLRAAMNEIASQLPEYPVVMEMKGVGPSLGPQLMAEIGDPMRFKHREALTAFAGVDPGVNQSGTLNQGSNSASKTGNPRLRHTLFKIMEVLIKLHPEEDKVYQFMDKKRSEGKPYLVYMTAGANKFLRIYYGKTREYLHALEADKETNE

SEQ ID NO: 226892 - protein, 430 aa, unidentified
MGRLKIVFPICCGMDVHRDFVIACIASTNSQGVTEYQSKRFSTYTGDLRKLAVWLRENHCFDVCMESTGKYWFPVHNILEKDFHVVVSHPKFVKAIKGKKTDEKDAMWIADLFKHDLVRGSFIPPEDIRQLRDLCRYYQKLVWNTTGEKNRAQNCLTVSNFKLDDVFSSVFIKSASAIISQLLEHPGEAFDVAPFLDKRCKASPQEVQKAIDGVFSPWQAEKLKVIRKHISNLDDLRDALQKLIFKLAEPYSRQIELLLTVPGISDPMTAIRVIAEIGADMRQFESSKHPCSWAGLTPQNNESVNKKKTTRIGKAGQYLKPLLIQCAIAASNPRSKLYPEILAKYQILKKRRGTKKARVAIARRLLTAIFHILLNDTPYQPADSSAKDSAPEQRIISLSQAFALLTRIGYVTSEVADISDLPLVESAPSS

SEQ ID NO: 226893 - protein, 405 aa, unidentified
MHELEQKEHVVIGVDPHKLSATIEVVDQHERFLGSGRFTTDRAGYAAMRTYAKAWPERVWAVEGSNGAGRPLAQRLLEDGEQVVDVPAKLAARVRLFDTGHNRKTDARDAHSIAIVAVRTRTLRTLQLDGELEALRMLTDRREALTRRRVQTVDRLQALLAELRPGQAKRDITTGQAKTILASVRPRDIAGKTRRRIAVEELAELVAVEAKIKKATAELKAIVLERGSHLMDLHGVGPVVAARVLADVGDVTRFADRNRFASWTGTAPLDASSGEQNRHRLSRAGNRRMNHMIHIAAISQIRLDTDGRAYYLRKRAEGKKPLEAIRCLKRRISDAIYRQLLEDALGAVDTGPGGHCGATQESSAVDLPPHIDTSDQPLPGPAQPTLRPAPMLRKTDTERDLEPIP

SEQ ID NO: 226894 - protein, 339 aa, unidentified
MVHVGVDLHKRSSQLAVLMPDGEVTQQRLENDPTQLERFFAQIPRGARVAIEASGTWWWFVDLVERLGHHAILSNPKQTKAIAAARLKNDRVDAERLALLLRGDLLPTVWIPPAGLREARELVRHRVSLVWVRTEIKNRLLALLSRRNLQPTSSKRWLTVRGRRELEGLPLGAIPSTVREDCLALLRVLDEQIRRLDHELVQRWGDDPRVQRLRTIPGVGPFTAILLILELGEIQRFPSAKHLASYVGLTPRVRASANRVRMGHISKEGNRLVRWALVVAATQAARRPGPLRAWFRAVQQRKGMKIARVALARRLAEIVYQIWKQDMDFVTLVRGGVRR

SEQ ID NO: 226895 - protein, 337 aa, unidentified
MRYIGVDLHSNSITVCYLTKKGQETLATFALSNLQEFKKSLRRTDRVAVEATGNTRWFVGEIREKVGQVVVVNPNQFEVIRKSVKKTDRHDARALARFLSKDLLPEARLKGELASQINSLAETRDKLVKLRTTFVNKLHALHRARGIISRKSQFLSQKGLKAALELEWEVTTRVEVEVIIGQIRSINEGIARLDTELVASGKQLKGHGNLVSIKGIGARAASVLLSVIGDVADFESDDKLFSYFGIVPRVSNSNETVQHGRITKRGSKLGRTTLVQCTLVAKKYSSYLNNFYERIKAKKGGGKAIIATARKFLGVIYRTLKNNWVFADFPNFVLAED

SEQ ID NO: 226896 - protein, 412 aa, unidentified
MILIENMYVGIDVSKDSLMAHAMDQDGKDIFHSFKVRNNKPGCNKLIDFIYKHAKQSDFELIKVGMEATNVYWEHSHRLINNSEKLNSNFKLITYILNPKVVKKFKDAYNSLPKTDSIDAWVIADKTRFRVPKPTIPEEVYRPLRELTRFRYKLVKNIRSEKNRALSLVFLKFSDLKEDVPIDIFSEASMTILESFTLEEIADKDLEELAAFLHENSNNRLGGSTPLNKIITDLKKAARNSYRLKPKMNQAITQTLSMTFDNIRFLQSQLNRSKKVLARELKAIPQTLDTVDGIGVILTSGIIAEIGDIDRFHNQAALASYAGLTWTKHQSGSFVAEETSMTKTGNKYLRYYLVEAANSLRVHNDEYRSYYYKKYHESQKHKHKRALVLTARKFVRLVFALLSKGEIYQPRR

SEQ ID NO: 226897 - protein, 311 aa, unidentified
MIIHPGFIGIDVSKHHLDIFNATTQHVERIDNTPQAITSTFERLRADPIKLVAFEATGPYDGPLRTALASLQLSLVRINPARARDFAKSIGLLAKTDAIDARMLAAMAQCLNLQADPADDPHRQQLALLHKRRDQFVATRKQELTRLAQADMAQIRDSLLDHLAWLEAAIASLDQHITRLIARHDSLEQRRQLMCSTPGIGKVISTTLLALLPELGQRSPKTIAALAGLAPFNRDSGLMRGTRKVIGGRRRVRQALYMAAVSASRSKSNFAQTYRALRQAGKPPKLALIALARKILITLNAILRDQAPFKA

SEQ ID NO: 226898 - protein, 400 aa, unidentified
MRTVFGIDVSKASSEVAIVINGEKIHGYTMPNDAIGFTRLLDDLKTVQKPEIIFEARGVYSRRLKAFLEKNGYAYTQLNPLEAKEQLDSLRVRKTDKIDAKTLAISQFVLNRKPTYIQEEVYQELRDLSRFYQNLTEDIVRTKNRLHKILQVTFPEMENILSTPTREQYWNLVMTFPYKDFVLELSKDELLEGIRQSTSKRISDKRVAYLAQKLAALANQSYCAVKKNSPILEEVRYYAKELLRLSEQRQAVLEQMVELAQPLPEYEILLSIPGIAETTATSMIGELRDIRRFQSANQINAFIGIDLRHYESGNFLAKEHITKRGNPYARKILFKCIHNIAAASHTNPCHIADFYEKRKRQSQTTSTKPHTIASIHRLIRTMYYLITHNKLYDYTSTQNR

SEQ ID NO: 226899 - protein, 348 aa, unidentified
MALTIVETRAITGGVDTHADVHVAAALDPIGGLLGVREFPATAAGYGRLLSWLGGFGTVCLVGIEGTGSYGAGLARHVTAAGVRVVEVDRSDRQDRRRQGKSDSLDAVSAARAAQSGRARGASRGRDGAVEAIRALMVAKRSAAGERTQTINQARALVLTGPDDLRARFTGHTAAALVAELASLRPRPGSTVGYATRIALRELGRRAEFLDGQLERLDELIGPLAAARAPGLLALFGIGPHTAALLLIAAGDHPERLRSEAAWAHLCGAAPIPASSGKTVRRRLNPGGDRQANHALWRIVFTRMGSDPATRAYVERRTAEGKSKKEIIRCLKRYVAREVYPHLRGTAG

SEQ ID NO: 226900 - protein, 428 aa, unidentified
MARAKSQSVIQTDDDTLYYERCAGIDVHKNLLVVCLRIGRKTESREHGTTTGEIREMVRWLKESGCQMAAMESTGSYWKPLYNIFEQEGLPAMVVNAYHIKNVPGRKTDWNDAFWIAKCLAQGLLKPSFVKNREQRELCDMTRFRKSQIEERSRNINRLQKFLEGANIKLGSWLSDVEGKSATELLELIIGKSDFTIDEVKARMHRNMKSTPEEIFAAIDGYITPTQRKFFAHVMHIIREQTRLIEITDAMIKSSLNDEQQAAIASLDDITGIGVISAEQIVAEAGTDMSHFRNQHAFSNWIGVAPGNNESAGKRKSGKTTHGNKTLKSTLTQCAKSAVKNKRTFFSAQYSRLVSHRGKNRATMAVAHSMAIAVYFVLQGRQFKDLGADYYNQFNREKKINSHFKQLQKLGISIPDEALRELIHLSSA

SEQ ID NO: 226901 - protein, 412 aa, unidentified
MTVTNQFAAHVGLDWADKKHDVCVQFKNGERVFDVIEHTAEALDAWLTELHQKVKGRIAIALELKKGPVVYALQKSPFITVFPVHALSLARYRQAFSPSGAKDDPQDAELALELMLRYPQKIKAIEPDNADIRLLQQLVEQRRQLVEDKRRFVNRIINTLKQYYPQPLEWFSHRGSLLLCELIIRWPSLQQLKRARRDTIRNFLNAKGGRAMALTEQRVASIDNAIPLTTDPSVIEANALMAAALATQIKVVSEIIKTYDERIETLFDTLPDAGLFKSLPGMGPCMGPRMLAALGDNRDRFNSAEEIQNYAGIAPVTERSGQKSWVHWRWQCAKFVRQTFVEWAAKTVNSSYWAKLYYQGLREKGKSHQSAIRALAFKWIRIIYRCWKARTCYDEAKYLLALEARHSPLLKP

SEQ ID NO: 226902 - protein, 389 aa, unidentified
MFFLGIDIGKNSHVASLIDDKKKVIFKAFFLSNSTEGANSLIKKLEPFCDSLDIAMEATGHYWINLFSFLLQKNFSVHLINPIQTDGWRNSTEIRKRKNDTIDSILIADLLRYGDFVESTLSNEDYLSLKNLTRFRSYLISSTGDLKRKTIALLDQVFPEYEKCFSDIFGKTSKEILLSFTTPQEFENISSSKLTKTLENITLKKFVKKKIEELSEKAKTTIGIKFCLDSFSLQIKILIEQISFIETQVESIEEEISTIMSKLDSPITTIPGIGSVIGVTILGELGDISRFSNASKVVAYAGLDSVVSQSGNYEAKSMSISKRGSSYLRKVLFQAVLRAEFCDPVFSDYYQKKIAQGKHHLVATNAVARKLCYTIFAVLSKNEAYKIQE

SEQ ID NO: 226903 - protein, 419 aa, unidentified
MNRIETKKRRIVNARTLIVAIDIGKTMDTGYCRCPSGEDMKPFEFPNNAEGFKILWDCICRMKMSHHLEEVVVGFESTGAYGEPLVHYLRQKPVKLVQVNPMHTKRMKELEGNSPGKTDRKDPKVIADIIGLGHALSVVVPEGAAAELRRLTSARERGIGRRTALYNQLQDLVFILFPEFLQVFKDVKSKTAHYLLRHYPRPQDITKCGIEALSSILKRVSRGKMGSAHAQALYEAATESVGLREGTQGIVLEMEEILSALEACNRFIDKLEEEMLPHLEQIPYRDSLLSVKGIGVITVAGLVGEVGDFRHFHTLREVMKLAGLDLFEISSGNHEGNRHISKRGRPLLRKLLYFAAINTVRKGGVMHACYQRYLERGMPKTKALIAIARKLLRVLFALVRDHSQYVESYSKKEVLKLAA

SEQ ID NO: 226904 - protein, 371 aa, unidentified
MSLLGIDLHSNRITVARLAVKNEAFETIMSTYTFQWDSFQRFLDSLSENDYVLVENTFNAFWFHDQIADRVKKCLVYNTNEARREGNKSDKIDARKLVKKLGYYLMMGERREDLPTVYVVDAEIREIRGLFTTYQLYKKTKVQLKNRIHSILKQNGICIERGKIDRKDFEARIDGFEISEIWKFQIRSALKTLKSVHEEQKEIKDQIYFLGYKLFKEEIELLMSIRGFSAFTAIALMSDMVDVNRFSGARKFCSYLRATPKVKSSNRSIQIGHVNRQSRPLTCSLLTQSILQLSEAGEHMSEFYGRVKVGKSAGKSRIALIRKILVSAYHMLKRKQKYHWVEAKLYSKKLEDLQKKIRKLELLAEEEKKPA

SEQ ID NO: 226905 - protein, 410 aa, unidentified
MEVLHAHCAGLDVHKESVVACVRHMADSKVTTVVKTFKTTTQELMALSNWLSAEGATHIAMEATGVYWKPVWHILADGEFELVLANAAHVKNVPGRKTDVNDAMWLTDLMAHGLIRASFVPGEPTQQMRDLLRTRKQMVRERSSHVQRIQKTLEDANIKLDSVVTDILGLSGRRIIEALIAGQTMPQALASLAHRRIHASADELEAALRGRVTRHHRFLLKLHLDQIDALDAALARIDEEVGANVEPFRTAVEMLSTIPGISTLSAEVIVAEIGIDMSHFETAGHLISWAGLCPKNDESAGKRRSNRMKKGAPWLKTTLIQCAWAASRKKNSYLQAQYLRIRSRRGAKKAIGAVAASMLTAAYHMLKDGTLYQDLGANHFDNRAKGKHVLRLVNRLQNLGFDVQITPLAA

SEQ ID NO: 226906 - protein, 440 aa, unidentified
MRQKKSVKRKEMELPKHLEHINRYAAGIDIGSRSHFVAVPEGTDEKPVREFLTFTGDLETMAEWLISCGITTVAMESTGVYWIPVFEILERRGLEVKLVNARHVKNVPGRKSDVLDCQWLQQLHTYGLLHGAFRPADEVCTLRAYVRQRSSLVRSAASYIQRMQKALTQMNLLLHNVVTDITGTTGMRIIKAVLNGERDPEVLASMRDPRCRNTTATIARSLKGTYRPEHLFSLQQAVELYEIYQRKIADCDRRILDQLKSFDDRDEPPVSVEDALIRMSGVDLTSIDGIDTTTALKVLAEIGTDMSRFKSSKHFASWLGLSPGAKISGGKVLNSATKPVANKAAAALRMAAFTLFNSKSALGAYLRRQRARLGAPKAITATAHKMARLIYAMLTHGTAYVDAGQEYYEQRYRSRVIHNLKRKAQELGFDLVALQKAATA

SEQ ID NO: 226907 - protein, 364 aa, unidentified
MKEYIGVDLGKRKAVVVKKDRVGNVTGKATLAATEAALEKYFSKQDPRSKVVVEATGNWMYLYETIEKHVPEVVLAHPLKTRAIAEARIKTDTIDATTLAELLRLDGIAKAYIPPQEVRDTRELLRYRASVVSLRMGLKNKVHAVLTKNGIECSFSNVVGKKSRQWLKTLSVRDCYRRELDGYIRLAELSTALIQEITTKIKEVVSVTPQAQLLMTVPGISYYSALLILSEIGQIERFPSAKHLRSYAGLVPSVYSSGRKSFHGRITKQGSRWLRWICVEISIHAANGDARFQSLYRRILRRRGLATAKVAVGRKILTVIYAMLKNNEPFRRRRPRQLILAKAWSKKSKESSGHPPGVMIQASA

SEQ ID NO: 226908 - protein, 421 aa, unidentified
MNQLSGEPYTAYIGIDWASSKHDICRQLAGGEERVFERIKHTPEAIEEWAQALYQRLGGPIAVALELSEGPIVSALQKYDFLVLFPIDPKRLAKYREAFVPSGAKDDPTDAEFALDYLMRHPEKLKALKPESVPMRKLRYLVEARDRIRGDQSRCVNRLIQALKHYYPQAVDWFNDHNTLVFCDFLQQWPTLATVQRARKARLERFFKEHNVRFARLIEERIQAIKAATPLTRDEAVIEAHQLQVEILVEQLRLTIQAMKCFDKEITAIATQFPDYGHLFTPLPGAGKVIAPRLLAAFGEDRDRYHCAAQLQKRSGIAPITKRSGNSTWVHWRFQCPKFLRQTFIDFAAQTINKSAWAGAYYRQQRDKGASHHMAVRALAYKWIRVLYRCWQERTPYDESKYLETLRRRGSPLLKQLAEAA

SEQ ID NO: 226909 - protein, 391 aa, unidentified
MPMYFVGIDISKYKHDCCIISAADQQIISKFTITNDKDGFEQLLTALNSLSNPEDIKIGFESTAHYALNLELFLENAHHSFMEVNPVLIKEYKKSTTLRRTKTDSVDCESIARWLITVEYKPHSKGFYHAYSLKSLTRLRDRLIRQRSFYLVKITNVLDHTFPEFKPFFNERLSKTALYLLENYGSAEKMARMNSASYNKLRCISRGKFSIQQFLRLKELAANTVGVNNSIFDLELNTLLTLYKSLSDEINTLETEIIKLIEEVHPHYMSIPGIGPISAAVIYAEYGDISNFSNPGQMLAFAGIEPGINDSGTESHGGRMVKHGSSQLRYVLLNACLPLIRFDLTFATYYEKKRAEGKKHRVAITHVAKKLIRVIYALERQDVDFNAQKLR

SEQ ID NO: 226910 - protein, 358 aa, unidentified
MVDKVTEAAVVGGVDTHKDLHVAAVVDQNNKVLGTQYFSTTRQGYRQMLAWMTSFGTLKRIGVECTGTYGSGLLRYFQNAGLEVLEVTAPDRMERRKRGKSDTIDAECAAHAAFSGIRTVTPKTRDGMIESLRVLKTCRKTAISARRVALQIIHSNIISAPDELREQLRNMTRMQLIRTLGSWRPDASEYRNVTNVYRISLKSLARRYLELHDEIADLDVMIAAIVDELAPELIKRNAIGYESASQLLITAGDNPQRLRSESGFAALCGVSPVPVSSGKTNRYRLNRGGDRAANSALHIIAIGRLRTDAKTKEYVARRVAEGHTKMEAIRCLKRYISREVYTLLRNQNRRINSIQITA

SEQ ID NO: 226911 - protein, 350 aa, unidentified
MLIIGADYHPGFQQIAYVDTESGELQERRLQHREEAEKFYRDLAGQGMKVRVGMEASGHARWFERLLSELQFELWIGDAAEIRTKRVRKQKTDRQDAQLILKLMLEDRFPQIWVPSWENRDLRQLLWHRHRMVQARTRIMNQLQAVALNEGLRSKKRLWREAGRAQLAAIRLAPWATRRRQDLLELLDRLNPTIGELTRAVEEEAEKCPEAQRLMTHPGVGPLTALAFVLVIGTAERFGCGKQIASYLGLVPEEDSSGERRRLGHISKQGNSLLRFLLVEAAQVTVRSNQEWRNKFFHLAMRRGRKIAKVAMARRLAIRLYWMWRKKWNYEQLTKFGSHAGQPGNPHGVR

SEQ ID NO: 226912 - protein, 350 aa, unidentified
MCSLPVFVGLDYHDASVRVCVLDTDGRELANADRCNDWKAIAEFADRFGRPVRAAIESCCGAADLAEELVSCAGWSVDLAHPGYVQRMKQNPDKTDYQDAQLVADLERIGYLPRVWLAPQHIRELRQVVRYRLQLTEQRRATKLRVRALLREQRCRAPQGVNAWTKAWDHWLRHSADLSAEGRWVANQHLQELACLATRIRQVEKRLERLTANDVEVQRLQQQVGIGPVTAWTIRAEIGHFDRFRTGKQLARFCGLSPRNASSGQRQADAGLIRAANPALRAVLIEAAHRLVNYDRYWQKFAQRLRAAGKPGSVVAAAVANRWIRRLYHEMKTPSGELAVAVRSARSEDS

SEQ ID NO: 226913 - protein, 466 aa, unidentified
MKNNTTTLHDCTLESIRFGGCGNSEAMVWKLGLDIELRAVAVAMQCGRGVIGPGAKWSREQLLQWVKEKRARGEAVHTVYESCGFGYTLHEQLSAAGANSLVTTPMRLNLERKRKNDRIDARELCVRLSRYLDGQSHELRPIRIPSRCEQQRRELGRQREFWKREVRRLENHGRALRIEHEHETLEAGWAGPRKWKRLAPQCSQFVREQLTPVVAQIRSAKAQLDRLSEQIESLVKKEQIPVGLGALTVSLIEGEVCQWERFAHRKAVGSYTGCCPSEHSSGPIQRFGAIDRHGNKHLRVLLVEAVWRLLRWQPHWHARQKYLLKLRHGSKKKIAVALARQLAIDLWRWRTGRASAQELGWSLPTLPLPEQPKPALVFTKPHQPRQSVPQGGTLLDAAADPKGSSLRMGAFHPQALPQVQARHHGRRSPLTTARIGAGDREKPPHINGKPPIAEQTDPWEKPQKQK

SEQ ID NO: 226914 - protein, 341 aa, unidentified
MIIIGVDFHPEHQEIASVNTDTGEYQEKRLTHPREAEEFYRSLASTGQAVRVGMEASGQGQWFERLLEGLGVELWRGDAEVIRAKRGRKQKTDREDARHILKLLLKDDFPRIWVPSWENRDLRQLLWHRHRMVQARTRVMNQLQAVALNEGLRCKKRLFRAGGRQQLECLQLAPWASRRRGELLELLDRLNPRIAELSQAIEREAGKSPEAQRLMTHPGVGALTALAFVLIIGNTERFGCGKQVASYLGLVPLEKSSGNRRRLGHITKQGSSIVRFLVVEAAQATVRSLPEWRSKYHHLLVRRGRKIAKVAMARKLAVRLYWMWRKGWDYEQWKKFGSHVG

SEQ ID NO: 226915 - protein, 394 aa, unidentified
MVLTLTSFTMRNIIKQCVGIDISKASFTACVSGKLLSGEVLTSPVENFENSKHGFNQFIKWSRKTTDPSVEALFLMEATGIYYEGIAYHLHKLNLPVSVILPNKVKHYAKSLNIKTKTDIVDARLIARMGSERELPHWHPPSTIFKQLRDLTRLYTDLKKERTVYLNRIECENAGAAAMPFVSNSYHSILKELEKQIVKSEKEIERLLFAEEWLAEKIRKLLTIKGVGLITLAITIAETQGFALVKSRKQLASYAGYDVVQRESGTSIKGKTKISKKGNSRIRAALYFPALVASRHNKELKDDYQRINVGKASKMIGATALQRKILLLIYTLWKNNEIFDEKKERTSGNQEIKSLLRQRDIVSKKVGNSEELPTQDELPYNLSTEVLLRQLQSS

SEQ ID NO: 226916 - protein, 346 aa, unidentified
MKHYAGLDVSLKETSICIVDETGSICREMKAPSHPEDLARVLQDPTWRLARIGLEAGPLSQWLFSGLAEAGLPVVCIETRHTKAFLKAQVNKSDRNDARGIAQMMRVNLFRPVHVKSVTSQLRRALLTARKLLQEKAIAIENDIRGLLRNFGLKVGIVGAAKFDIRIRELLDCLPDLAEIIEPLLASRRKLREEFERLHRKLLSIVRDDGVCRRLMTIPGVGPVVALAYSSTIDVPARFRSSKAVGASLGLTPVLHQSGESNRIGRVSLCGDGMMRTLLYEAAQVMLTNVHVRWSWLKAWAMTIAKRRGGRKAIVALARRLGVIMHRIWSDGTVFRGTRESIPAAV

SEQ ID NO: 226917 - protein, 477 aa, unidentified
MARKKQQQAQNKAARKRERSRKPKHGMCGQDRPILEPNSAGIDVGAREMYVAVPPDRDSDPVRVFRTFTDDLDRLVNWLLECGITTVAMESTGVYWIPVYEMLADHGLRPCLVNARHMKNVPGRRTDWHDCQWLQYLHSVGLLRPAFRPEQAVCVVRAILRHRSELVQMAAQHVQHMQKALAQMNLQIQHVISDITGFTGLAIVDAILAGERNPEQLAGLRDPRIKADQETIRKSLVGDWRHEHLFTLRLSRQMFEHYQQQILACEKEVQKQLGEFSWRVNPDERPLPPDNKHKRNRRSRLSKKRAGDFHFDLRTEMYKLFGVDVTRIPGLDALALPLFSEIGRDLSRFPTAAHFSSWCGLCPDNDVSGGTVWKGGRRINHRVGHIFRLAAHSLHHNLTPLGDYLRRMKAKAGPKAATTATAHKIAIIFYTLVKNQVEYDENIWSARDAARHKRFEEKIKRQARKLGFELVPAQSAA

SEQ ID NO: 226918 - protein, 353 aa, unidentified
MNDDKYIAFDVHQATTVVSVMNAAGHECDTTILPTKAQPLLSFLAGVRGKLHLTLEEGTYSTWLYDVLQGRVAELVVCDPRRNALLKEGSKTDHQDARKLADLLRTGMLRAVYHGSRSLRNLQELAHAYQALVRDTTRVMNRIKAFYRSHGIDCAGRGVYSRKQRESWLVRLPAGASRVRGELLHDQLEQLRSLRRRARHELLAESRRYTVAARLRGVPGFGPVRVALLIAGMQTPCRFRTRSKLWSYAGLGLVQKGSSEYRLVEGRAVRRPGALQLRGLNRNRRAGLKEIFKSAALAAIRQPGPFKDYYQSRLQRGVDPAILRVSVARKLAALVLSLWKKGGRYRAEGMKQA

SEQ ID NO: 226919 - protein, 356 aa, unidentified
MFTNKISVKSKKDNSSLTVTDSYDQYIALDWSERNMAIARLGKKETEPKVIDVPSDLKELKLYLANLKGKKILTIEETTTSQWLYVELYNYAEKIFICDPYRNRLLSDGPKTDKIDAGKLCKLLKNGMMKEVYHSTNELYELRKLVSYYDDEVRAGVRLLNQKSALYRAEHKSYKKKEEIEDSRINKFIVTQLDEKISSYVEKKKKYENEFARVSKKNKVIKSLQSIPGLGPISSVTILSIVIDGKRFKSSNHYLSYCGLVKHEKFSGGRSYGERIPRYSRRLKGVYKSAAIRVISTENPLREYYEYLLKEKKLAEHNARNAVARYIAKISLGIIKSGEKYKPYKWRNNKREKEAA

SEQ ID NO: 226920 - protein, 420 aa, unidentified
MNKEVRAWIGIDWADEKHDVSLYEVATGRQERLEVKQSPEALAEWIGQLRTRYGNAGQVAVVLEQGRGALLNVLMGCEFLVLYVINPKSLSCYREAFYGSGAKSDPVDAELMREMVRQNPERFRAWHPDDVLTRSLRLMTEGRRDLVNQATAVTNQLTALLKGYYPQALRWIGALDTHWACDFLDQWPTLQALQSSSRRQILRFYEKHPRHHLDLEQQIQQFHQALPLTGDEAVLQYSTLMVQALIPQLRALLDSIDEFDRKIAEVFRKHPDRPIFESFPGAGAALAPRLTAAFGADRDRYAAASEMQQFSGIAPVTEKSGKQHWVHWRMACPKFIRQTFHEFADHSRRWSAWAKAYYQLQIERGKKHNAAIRALAYKWIRILFRCWKQRVPYNEQVYLASLLKHQSALLLKAAPAVEKL

SEQ ID NO: 226921 - protein, 418 aa, unidentified
MEIIYERVAGIDVGKKIIAVAVRTPGERPGKRRQQLRKFDTYYQTLTEMVAWLIAEGVTHVSMEATGVYWRPVFHALCETERALEVLLVNARHVKNVPGRKSDALDAVWLAELTECGLLRGSFIPPREIAAIRELTRYRKKLIEQRTSELQRLAKVLEDGGIKIDSVASALTTLSARDMIEALINGERDPSVLAELARGKMRRKIPDLRLACAGRFGAQHALMCTLHLEHIDHLTDMIARLDTRIDEASLPFVQQTTSLATIPGISERAAQVIISEIGIDMARFPTAAHLASWAGLCPGNNESAGKHRSGRTRKGNKELRALLTECAWSAGRTSTYVGAQFRRFHRRFGSKGGKKAATATAHTLIVIIWHVLAEATAYRDLGSDYFTRRLDSPEARKRRLIHELEALGHKVTIEPAAA

SEQ ID NO: 226922 - protein, 309 aa, unidentified
MKEQLVYLGVDIAKSYLDAAVGNEKRRFSNDAIGHRELIKWVKQLKAPVQVICESSGGYERALVQGLARARVKISLVQANRVRQFARAAGILAKTDRIDAELLCEFGKVMRPQTVTAAKLEQEHLRELESQRRHLTHLLVTELNRGARVSDASVQRLNRSLINQIKKQIEQLDLLIKGHIDQSHQLSAKAAKLTSISGVGARTAALLLAQLPELGELNRREIAALVGVAPFNRDSGRMRGKRAIYGGRKPVRHGLYMAALVAAHHNPILRNFYLRLRAAGKPAKLALTATMRKLLIVLNSALKTDLSYA

SEQ ID NO: 226923 - protein, 418 aa, unidentified
MFKIFRKNCCGLDVHKTWIYACIGITDANSRTEYFQARFSSFSKGLQELSLWLDKYHCMEVCMESAGKFWIPVFNILEKTCLVTLAHPKYTKPQKGNKTDRKDAKWICDLFMCDMIKPSFIPPPAIRHLRDLVRYRGKLTNMLTGEKNRAQNCLTVSNLKLDDVFADVFGKSARSITEYILAHPGEPFDVAQFVDRRCKSPLSEIQAAVDGAVSPEQAVKLRQCLDHIDQLRLLRQRLEQEILRICEPFADILQLLRTVPGLGNDPMTAIAVLSEIGGDMSVFPTAKNLCSWAGCCPRNDQSGAKVKSTRISRAGSYLKPLLVQVANALIHSRKHPEFAERYRRIKARRGHKKAIIAVCKMLLTAIWNILSKLVPYSPAGFLSTSHDLPPSKSLTVAQGLSLLRRRGFILTDDPLSAP

SEQ ID NO: 226924 - protein, 315 aa, unidentified
MEHLPAAPSFVGIDVSKDRLDVHILPTGQTRAVQRNEKGFEDLVSELRKLAPALIALEATGGLEVTVAAALASANLPVAVVNPRQIRDFARAVGRLAKTDALDAQAIALFAERVRPEPRPLADADSQSLAELVARRRQVVEMIGMETNRLHQARNLRIQRMLRATLRTLTAQLAQLDREIDDLIKRSSLWRAADDLLTSVPGVGDVTAHTLIADLPELGQLDRRRVAALVGVAPVNRDSGQLRGRRTIAGGRIGVRNTLYMATLSAIQWNPVISTHYHSLVNRGRPKKIALVACMRRLLGILNAIMRTKTPWQCA

SEQ ID NO: 226925 - protein, 433 aa, unidentified
MLKLNYMSTLFVGIDVSSKTNAVYAMDFEENKYISSSFGNNQPGADQLVNMIAECMHKHKNLDTVLIVLESTSVYSVHISNFLSTSEVLMPYKPYVFCVNPKATSNYRKSYIGMEKTAPTDAYLIADFGRVGRTKKLEPWRGGQFISLKRLTRHRMHLSECITREKTYMVSNLYLKFSELQLLEGDDKPFGSLYGATSSAVLTEFLSPQEIIDMPEEELLTFLAGKSRNRISDLSKTSELLRKAARDSYRLDKCMYEPLSISLASSFNCIHAYQKEIKLIEQAIEKCINGMNPNALLILQSIPGIGPIWASGILSEIGDITVFHSSDALAKYAGLYWPKGDSGDFTSEDNKMSKAGNPYLRCYLGEAANSVRKHIPEYADFYARKYAEVTKHQHKRALALTSRKLVRLVFGLLVKNQLYTGEKLDTEYNIESN

SEQ ID NO: 226926 - protein, 352 aa, unidentified
MFERTSVGLDVHARSVVAEAVDWQTGQVFSQRLVPASEEVLGWVRRLPGPAAVSYEAGPTGFGLARAFAAAGVRCVLVAPSKLERPGGDRVKTDRRDARRLAHLLHIGELPAVRVPTVAEEHARDLVRAREDTRGDLMRARHRVSKLLLRQGIVYTGGTAWTVVHHQWLHAQHFDSPDLRIAYREALDAVACCVDRRDRLDTAIEQTAHADPWAGTVARLECVPGIATLTAFGLTVEIGDWHRFTGATIGAYLGLTPSEFSSGSSRSQRPITKAGNTHARRLLVQAAWHHRRPTSGPSRTLRARRAAVSPAIRARARAADTRLHHRWIALEARNKRPTVAAVATARELAGWC

SEQ ID NO: 226927 - protein, 327 aa, unidentified
MKNVYVGIDISKATLDFCVVEPKRISFHKIKNNVAAIGKLLKTIKEIDPQAYLCMENTGYYNFNLYEVLEKFSFRTYVIDPKHIKRSIGLVRGKNDKIDAKRIAIFIERNHQDFESWKPIGESVKAIKILLSQRRFKIKQRTGLKQQNSDLKSVTFSKTTDKLIRINEKSIKEINKHIVEIETLIKKEINADHQLRTEINRIKTIPGIGDITAWTIAVKTEGFKRLCDPRKLACFAGVVPFEQQSGTSLRTKPRVSKMADMTLKSVLQMAAMRAVRMQNDLRIYYLRKVEEGKNKMSVLNAVRNKLIHIAMVLIKNQTNYKNRLQLS

SEQ ID NO: 226928 - protein, 335 aa, unidentified
MQIKHFIGIDVSKDTLDLSVVINGKNLHHYRIKNTTKEIKSTIIRILKSLNESFEDTVFCMEHTGLYNLPLVKWLNANGGNMWLESGVHIRRTLGLVRGKNDKVDSSRIAMFAYINRHQIRLWKPPRKVIERISMLLSQRSRLIKAKKQLQTANLEQRKFVDKDIMHSLNNYTKRTIVVINKQINDLENEIREIIRNDEKLHQLYNIITSVSGIGFVTASHILVTTNEFININDPKKYACYCGVAPFEHTSGTSIRGRNRVSHFANKSIKTLFHMSAMSAIGTPGDLQDYFYRKVEEGKNKMCVLNAIRNKLILRIFACVKQNREYEKIYSYKFA

SEQ ID NO: 226929 - protein, 344 aa, unidentified
MLYMGVDLGKKKSRIAVLDERGEVYTEVKIPNRKQTFQKFLKHIKEPVEMVCETGNKCFWLADLMQDSGVGVHVAHAYKVKLIAEARTKTDKVDARILAELLKARFIPEVYIPEQDIRTWREIFRGRSHIVRMRTQLYNRIHAILDRYGIEYETQQVRTKGVGSWIETLELPDPIKKSMQQYVQLIQEITEQVKELEKRLKEKIKLDDRARHIVELLESIPGIGWLSALALYLEIVDISRFKSAKKLHKYIGIVPGVHQSGEVHRGGRLTKDGNSLLRWMMVEDAWRAVAKDRYYDNLYERHKRKLGKTRAILPVTRALLYAVYQVWSKEKRYEEIFTVNRKVR

SEQ ID NO: 226930 - protein, 416 aa, unidentified
MELQWFVGLDWSKSHHQICLVDRERQTRGETVIPHSGAGFQQLAAWLAEKTRHAPSERIGIVLETSVGSVVKSCQTLGYEVYAINPIQLDRFRDRHYPAGAKDDRREALLLVTALCLEPHLVRPVEIEDEDTMQLRLRNRRRNAFGTTRSALITQIRQLLEEYFPSFETMFGDHLASPFAATLWHRIPNPQKAHQTRVSTVVTILKQHRMRRFKASAILEQLRAEPLPIPQYVMTARQQELTMLWEQMHLVNKQIQTLEQQIAEQLDARVNALHDVANPATEEPARPTDEAILASMPGVGKTVLATLFGEAGSVIRNRDYQALRCLTGVAPVTKSSGKYRRVQRRRTANRQLSDSVYHWGRVAMIHDSVCREKYQRLRAKGHTHGRALRSIVDRLLYVACAMLNNGTLYQNPATES

SEQ ID NO: 226931 - protein, 384 aa, unidentified
MKVVCGLDVHKDSVFCCILCANGEKIQHKFGVLTEELVTLRDLMVSEGVEECAMESTSIYWIPIWRVLEGSVKLHLVNPYFIKQLPGKKSDVNDAEWIATCLSKELIASSFVPDDKIQRLRQYDRRIFDLNASISRNLVKLDQCIQRCNIRISNYISTTDSKGYRSIVKLISQGVTDAEVLVKELHGRTINRHGRETLVKALTGVVSETDIDIINQLVEEIELQQRHKDEAQQKMTALCMEWFPQEVENLQTIPGVKERSATSIIAEIGTDMTHFQTPKKLVSWVGLRPRNEESAGKIKARGITHGNRFVRKTMIECSWGAARMKDSFFAEFSYRQCIERRKNKMKVQVAIARKILVAVWYVLSQGTQYIKPTDHYTAAHMTAV

SEQ ID NO: 226932 - protein, 414 aa, unidentified
MSHLIAGIDVHKKMLAVVIADVGGEGVGPFQHRRSGATPEELRVLGVWLAELGVQEVVMESTAQYWKPVWQELEGRFHLELAQAQSNRGARGRKSDFLDAERLVRRYAADELTLSYVPDPEQRLWRTLSRTKQRWCREKSQLQSRLEALLEEMRIKLSSVVSDLLGVSARRMLEGIAKGETDAQRLAEMADPNLRAGKEQLCNVLQAVGHLDPRYRRVLKQYLDQLELNERQVQELEVQLAESLQPHAEAVERLAEIPGLGVDSAQQIIAEIGPAAEKFPSAGDLSSWVGTCPGQDVSAEKSGSEASPKGNQSMRSILDQAANAAVKAKGTVFEARYKRLRGRDPKRHNLAVWAVAHHLCRVVWKILHAKVRYEERGNRNNPRADKRRAARLLRELKLLGYQVKATPLPSEIRG

SEQ ID NO: 226933 - protein, 379 aa, unidentified
MIVIGADTHKRSHALAAVDEGTGRVRGQREIGADEPGHLAAVRWARGLDEERVWAIEDCRAVSRRFEQALLAAGERVVRVAPHRMGESRKGERRPGKSDQIDALAIARAVVGDGVEKFPAAHLDERAMEIRLLLDHRGDLVAERTRAVNRLRWHLLELCPELERGVKPGAFNQARVLDRVDRRLRKLPAGARVRVAREQVAHIRQLNRHIEQLKRELLELVRAHRPQLLAETGCGPLVAAILIGRTAGAQRFRSDASFALQSGTAPIPCSSGKRTQHRLNRGGDRQLNHALHVIAITRAHHDPVTKAYLKRKQAEGKTKKGALRCLKRHLARRFHHLLSLPAETPQRAPSNGPSVHADPPRPADSSTVGAAPAPMPCLS

SEQ ID NO: 226934 - protein, 475 aa, unidentified
MNIKGSKKKNQVLSVNIFEQQEIIAKADAIKAELKASTWHELETKGKFDKNDKLSFVSDDMLILGCDIGSETHYVRAIDTRGRELSKSAFGFSNTAEGFESMLDWSTKLAAANDKKQIVLGLEPTGHYWFCLTTWLVAKGISVVQVNPYAVKQTKEVEDNSQLKDGKKDPKLIANLVKDGNFGMPYLPEKLYADIRRLSMFRDQLNEDRIRNLNRLHREMKIYFPEYKDAFGKIDGAFSLELLKEAPFPDELAALGTEGMKQIWHEAKLRGRGYANASSILEYARKSVGIKDGADAGRQAVKWFVSRIIELDEQLSDIENQLNQRCNEIPYAKNILAISGIGENILSGILAEMGDISRFDNVKEIQKLSGLGLVACSSGKHTGETKISHRGRKRLRYWLFQAAKSAVAHSEEFKELHVYYTTRKQNPLKKMQSLIVIACKILRVIFTILTKGTTYDPKKLLGDIVRSDQSIPQAA

SEQ ID NO: 226935 - protein, 392 aa, unidentified
MYIIGIDIGKNHHEASIVSPEGKQIGRSLRFATTHKGADSLMRFIFKNIGNSPCVFGMEATGHYWYPIYSFIKAKGYTIYVINPIQSDSLRKMYIRQTKNDSIDSFLIAEVIRFGQFGTTSMADENILAMRQLCRYRDSVISSRTEIKLRIGTIMEQIFPEYEKQFSSLWVSTSMGILEKYLTPENIENTPIDELFEIIKDKSHNRLTKAKAISIKEAAADTFGIKIAQDAFSFQLKQLIDRMNFLDKQIEALDCQILEYYEKFDCYLHTIPGIGMIAAATILAEIGDINRFKSSSALVAFAGIDPTVRQSGEFSSTHNHMSKRGSPYLRHAIFLAATTCSFHNSPLNAYYKKKREQGKHHLTATGAVARKLTTVIYAVLRDGKPYEPKSFC

SEQ ID NO: 226936 - protein, 408 aa, unidentified
MLKIVYPICCGIDVHKTFVVACIASTNDKGVTSYQTKRFSIYTKNLNELSDWLAANNCTDVCMESTGKYWHPIWNVLERTCHPVLAHPKYLKAIRGKKTDKKDAKWIADVFKHDLVSGSFIPPVIIRQLRDLMRYRSKLTNYTTGEKNRAQNCLTTSNIQLDHVFSDTFGKSATKILDHILEHPGEHFDVAPFVHRGCKTPIDEIQLSIDGNITPEQSEKLKIIRSHMDSLALCKANLESVILFLVEPLLPQVNLVASVPGIKDFSAISVIAEIGSDMSVFPTAKHLCSWAGLAPQCNESGGKKKASRVSKAGAYIKPLLIQCANAVVKSNKHPEIKNRYLSIKKRRGHKKAIVAIARMLLTAIFHILSKNEPYNPDLYRNSDVSPVDSIERAVKLLEKCGFIVSKSA

SEQ ID NO: 226937 - protein, 323 aa, unidentified
MPHVTSIGLDVHARSVAAAAFNPFTGEVVRRSFGTDASEIAEWALGFEDPRACYESGPTGFHMARELRALGLDCAVAAVSKMQRPAADARRKNDRRDAEFIARMLATHNIVEVPLPDAAVEAARDLDRALDDATVEYRRARQRLNMFLIRLGHVWDERNADGTRKGSWTRAHWRWISGIRLEGPQRDVLEYYVTAARCAESDRRQLEKKVLALARTDRWRPAVEALSCIKGIDTLTAFRLAAEAGSFTRFRTAPAFASWCGLVPSERSSGETERRGGITKTGNRLASVSVNLFFTSFAKQARRSRKGGFTGCANVFSPIPVTA

SEQ ID NO: 226938 - protein, 357 aa, unidentified
MLGMGDSAPRKGADAMTFVGCDLHTRMQQVAVLDTGTGEVSERRLDHDGMAVEEFYAALPRPVTVGIESTGYAVWFHALMQRLGHTLLVGDAAKMRAMVVRKTKTDRRDALHSLDLLRHDRFPTIWVPDPATRDLRALLTHRMRLVRIRTMVKNGLQAIALNSRLAWGSKLLRQAGLVQLQALPLPPHTARRRDQSLELLAGLNTQIRELDDAVTTAALAHPDAPRLITHPGVGALTALTTIVVLGPVSRFHDSKQVVSYVGLAPALNASADKYHLGHITKQGSPLLRFALGQAAAHAARMDPDLKRTYGALVHRRGRPKAKVAVTRKLLVRLFIMLRDQIDYDEFCRRGRSAPASA

SEQ ID NO: 226939 - protein, 423 aa, unidentified
MDIIHPHVAGIDVHKKQISVAVRLPGQMPGERQQTVRTFRTFWRALRQMADWLAELGVTDVAMEATRIYWWPVYFALTATGSIQVCVANAAHMKNVPGRKTDVKDAQWIAQLHEHGLLQPSLIVPREVRALRDRTRYRKKLIEERTREQQRLAKVLETAGIKIDSVASTLMSKSGRLMMEALIAGERDPERLADLAQGVMRRKLDELAMACDGQFTDQHAEMCRLHLAAYDHLTTSIAELDVLVERHAAPFAALIARLVTIPGIGTRTAQVIIAETGGDMSRFPTPGHLAAWCGLAPANRESAGKRMRAGSRKGNVHLSSIMVEVAWATARTKTRPGARLRRLIRRFGEDGKKKAAVAVAHTLLRIVWAVLKHDTDYREDGADYYDRPVDPARQTSRHISALHRLGYDVTLVPISPPPEQPAA

SEQ ID NO: 226940 - protein, 440 aa, unidentified
MAGKKAAPLEVVHPDCAGIDVGKRKHYVAVDPSRFEDPVRNFGTFTGDLEAMAEWLGACGIRQVAMESTGVYWIPVFEVLDRAGFEVHLVNPRATKQVSGRKSDVLDCQWIRQLMSYGLLRGAFRAPDALCPMRSYVRQRGQLIRDRSRSVQHMQKALTQMNVQLDNVLSDIMGKTGQLIVRAIVAGERDGAALARYRDGRCKADEATIAASLRGNWRGEHLFALEQALARHDVLQGQIEACETRVDAELDGQARDGAANEPSTTARSGRERLLRERLQQMLGADLTAIPTVGVETALTVAAEVGADLSRFATAAHFCSWLGLAPGTRISGDKRLGGPSARQTNRVGQALRMAASTARNSKTTIGAAHRRRLSRMDSAKAVKATAHQLGRLIYAMLTRGEEYVERDLAAMETERRDRQIKHLQRQARHFDLALVPAEQAA

SEQ ID NO: 226941 - protein, 347 aa, unidentified
MRFYTKQHRFYCGIDLHAKKMYVCVLDSAGEIVLHRNINTEREIFLAVIEPFRENVVVAVECMFTWYWIADLCAKEAIPFVLGHALYMKAIHGGKAKNDKIDSHKIAVLLRGGMIPMAYTYPAKMRATRDLLRRRNHLMRKRAELYAHIQNTRSQYNLADSFGRIAKPQNREGIAERFEDPAVQNMIATDFAVITAYDPIIAKMERDIISMANHHDPVAYALLKSIPGIGKILGLVILYEIENIHRFPTVQDFVSYSRLVKCSKESNGKKYGSSGKKIGNAHLKWAFSEAAVLFLKGNEPAKRYLNKLTAKHGKGKALSILAHKLGRAVYFMLKNKEPFDQKKFLGL

SEQ ID NO: 226942 - protein, 325 aa, unidentified
MEKISTIGLDIAKNVFQVHGIDGDGTVVVRRQVKRKQLVAFFSRLQPCLVGMEACATAHHWARELVKLGHEVKLMPPRYVKPYVKRNKNDMADAEAICEAVTRPTMRFVAIKTAEHQSVLMLHKTRQLLIRQQTMLINAIRAHLAEFGIIAGTGRTGVEKLLAIIKAGEDDRIPAAARECLVVLYDQLGLVKHHILDADRRIMVAHRSNELSRRLADIPGVGPLIATALATSVPDPRTFRSGRDLAAWIGLVPKQNSTGGKERLGHISKAGNRYLRTMLVVGALSVIRRARQLGYTRRPWLARLLERRSTKVAAVALANKIARIA

SEQ ID NO: 226943 - protein, 350 aa, unidentified
MIIIGADFHPEFQQIAAVDTDSGEFQERRLQQREEAERFYRELATRGVAVRVGMEVSGHARWFERLLAELQFELWIGDASEIRTRRVRKQKTDRQDAQLILKLLLEDRFPRIWVPSADNRDLRQLLWHRHRMVQARTRVMNQLQALALNEGLRCKKRLWRERGRQQLESFQLGPWASRRRSDLLQLLDQLSPQITELTEAIEQEAEKRPAARRLMTHPGVGALTALAFVLIIGDAERFRCGKQVASYLGLVPLEESSGNRRRLGHITKQGSSMLRFLLVEAAQVTVRSLPEWRSKYFHLMMRRGRKTAKVAMARRLAIRLYWMWRQGRDYEQLQRFGSHAGQPGNRDGAR

SEQ ID NO: 226944 - protein, 430 aa, unidentified
MNESGSEQPLSPKVAAYVGIDWADEKHDVVLRSVDDPAKSEHQIIKSEINALNDWIAQMQKRFEAKGKVLVCLEQSRGALIYQLMAYELFELYPINPSQLANYRKTFFSSGAKDDRPDADLLSELLMCHRDRLKAWKPDDQLTRELASLNEGRRSAVDRRTELANEIKSELKVYFPVALQILDNDITTALAADLLVKWPTLAELQKVSPGKLRKFFYGHNSRQEKKILQRLALIKEAKPLTTDLAIIRPNALRVKLLARQLKSLLPFIAEYERRIAEIFGSHPDRFLFDNLPGAGPALAPRLLTAFGTDRDRFEVAGDLLNLSGIAPVRIASGKKTGKNASVHCRRACPKFLRQSFHEFGECSIRYCPWAQACYQAQRSRGKGHHAAVRAVTFKWIRILFACWKQRTPYDPQRYFQALQTRGSDYAQITA

SEQ ID NO: 226945 - protein, 339 aa, unidentified
MEITTLGIDLAKSVFQLHGTDAGGKVMLRKRLRRNQVLEFMASLPHCLVGIEACGTSHYWAREIQALGHDVRLIPPAYVKPYVKRQKNDMADAAAICEAVTRPSMHFVPVKTAEQQGVLVLHRTRKLLSRQRIMMLNAFRSHLAEFGIIAPKGAYHVAQLANALRGGEHDLPEVARLALLGFADQLAALSTEIKSLDAQLLAWHRQSALSQRLQTIPGVGVLTATAMAASIPDATVFRSGRQFAAFLGLVPKQNSSGGKERLGRISKMGDPYLRTLLVNGATSVVRRITNAEGPTAIWIRRLLEKKPTRIATVAIANKTARIVWAVMARGEEYRRPAMG

SEQ ID NO: 226946 - protein, 347 aa, unidentified
MKFYTKQHKYYCGIDLHTKKMYVCILDAEGQIRLHKNVKTEPESLLRTLTPFREDVVVAVECMFTWYWIADLCTQENLPFVLGHALYMKAIHGGKAKNDKIDSHKIATLLRGGMLPQAYVYPARMRATRDLLRRRNHFMRKRAELFAHIQNTRSQYNLPDPLGCIAKPQNREGIVERFDDPSVQKSMAVNLEMIKAYDRLLTQLEHDIIASAKEHDLRSYALLQTIPGVGRILALIILYEIESIQRFASVQDFVSYCRLVKCIKESNGKKYGSSGKKIGNAHLKWAFSEAAVLFLKGNEPAKTYLERLARKHGKAKALSILAHKLGRATYFMLKNKEAFNQKKFLGL

SEQ ID NO: 226947 - protein, 341 aa, unidentified
MRDYTTKTVYVGIDVHKKSYSVTAVCDRQIVKKDRLMADPNLLATYCKNKFKGAKIITAYESGFCGFSLHRALVRFGIDNRIVHAAGIEVAARERVKNDRRDSEKISTQLAEGRLSGIYIPTVEREGYREISRLREVFVRKKSRSAAQIKSFLHRQGLFTEIDDKGLSKRKVELLMKKELGRDLSYTLCKLCEEWLYLTEQIEKIKEKLGEQAEEDALEKTYRSLPGVGPVVARVLANELGDLSQFSNEKQLFSYTGLTPREHSSGEHRWIGHISRQGKSIVRKMLVQSAWRAVQVDKGLGNRFTELSKRIGSRRAIVAIARIMIGYARSCFKENRMYEER

SEQ ID NO: 226948 - protein, 423 aa, unidentified
MEIMHRRVAGLDVHKETVVACVRVMDGRRPTRECRTFTTTTQGLLELLGWLTASRVTHVAMEATGVYWTPVWKILSEGDFTLIVANAAHIKQVPGRKTDMNDAMWIADLLACGLLKASFVPPEEIHELRSLMRTRKQLVREQTRHVQRIEKTLEEANIKLGAVLSDLMGVSGRRIIEAMIAGERDPHRLAALAERSVKASPNALHDALHGRLREHHRFLLQLHLRQWDALDAAIRQIDEQVSDHIERVDEEAADGQPPFRELIPRLCAIPGVSFQSATAILAEIGRDMSRFPTAGHLIAWAGLCPGHNESAGKRKSSRLRKGAPWLKTMLVQCAWAAKRAKHSYYSAQFHRLCGRRGPQKAICAVAASILTAIYHMVQSGTPHRDLGADYFDRRTPEAKAKRLVAQLAKLGFAAQLQPLAEAA

SEQ ID NO: 226949 - protein, 354 aa, unidentified
MKRFHFIGIDMHSQFCQIAVMNSAGKVVQQERCDTTIPALMAVLDQVPRPCSVVFEEGPMAGWLWRNLRGRVDDVAVAEPRRNRLISHEGDADDDIDAEKLALLHRGGMIKLVHQVESLEQAVFKQLVSVYHYRVRQRVREAHRITHLLRQHGVVVREKGYATGEDRKKLLARLPANNILRQMVRSLWLSYDALVKRERQCRRRLARAAQQIEVVRRFEELPGFGWIRSATLYAYMDTPWRFHSKEAMWKYLGIGLERKHSGKGPVYLGVPKITHRLLKCTILGAAKSAAAKKDNPFADLYRRWLQNGLSRQLARRNVARRLSATMTGMWKNGTAYRPELVVATTATTAAKGSR

SEQ ID NO: 226950 - protein, 350 aa, unidentified
MNVNHYIGFDVHKKSVSYCVKLADGTIVEEGKLRATHDVLRQWAGERTEPWRGAMEATLFSGWIYDTLQPFAAELQMGHPALMKAIAASKKKNDKLDARKIADMVRCDLLPACYVAPVEIRELRRMLRYRNLVVGQATRLKNKMSGLLMEVGAEYNKERLHGKQYFTELLDTVAEVPDSVKDLLRLSRGAMEMFETTQQQLLLRLRKDPLLSKRVMVLESIRSVGEVTALTWALEVGDPQRFSSVAHAVSYCGLTSALVSSADKQQRGPLSKQRNAHLQTVLIEAAKLAPRWNPQLATVHTRELTRGNRNRATLAVARKLVAYLLAVDKSGQPFEIRSTPAVETEAQEVA

SEQ ID NO: 226951 - protein, 404 aa, unidentified
MNYTAAFDVGMGKSYMVLYDEQACILQKWISHSKESFMQLKRLFDVHFYNEFDSLDIVFEATGVYSKPLERFFLTEGYRYSKFNPLEASFQAKTLRRNKNDKADAHSLAKSYMVNKTNFYKSSDKRYDELKQLSRYYSEIDEELSILRGRLHSCIQATFPELEQLFTTKSHLFLNIVQIYPHPQLILKDSKTIIKNKIIKHTQKNISSSRAQNKAKLLIEAAQNSYPAVDELHPVILQVQHYARRYQELMTQKDEITDLMYTLTKGLPEYAILLSFPGIGVNSAVRIVAELGDIRRFDNSKQINAFVGIDVRRYQSGKFQMRDKINKRGNKKLRKILYLVILNMIRNKSTEKNHIKEYYYKLKADPMNKCHKVAIIAAINKLLRTIFYLVKQDVLYDYEKAITH

SEQ ID NO: 226952 - protein, 411 aa, unidentified
MEVIYKRCCGLDVHKEIVVACLVIREGGKVVKEIRTFLTMTSDLVVLHDWLQAHQVTHVAMESTGIYWRPVFNLLEGSFTVLLVNAAHIKTVPGRKTDVKDCEWIADLLSHGLLRGSFIPPEPIRDLRDLTRYRKSLTDERVREVNRLQKFLEGANIKLSSVATDVMGASGRAMLEALVSGSTDPQVLSELAKGRLRKKLPELKKALEGRFRPHHRFMVAEILTHLDFLDEAIERVSQEVTYRIAPFSSKVELLDLVPGINQRVAEGILSEIGGDMSCFPTAGHLASWAGLCPGNNESAGKRKSGKTRKGNQWLRRYLTEAAWAATRKKGSYLSALYHRLVVRRGKKKAVVAVAHRLLVIVYHMLKDQASYRELGSDHFDKLNAAYVQRHHVKRLESLGFKVTLEPLSLAA

SEQ ID NO: 226953 - protein, 350 aa, unidentified
MDKELYIGVDVSKQTLDLAYYDGESIDWKKAHIKVSNNNAGFKKIGSWVAKVSKGVDIVLFCMEYTGLYTQNFRLWLEEKHYIYRMVEPRKMHRFEPDLDDGLRSLDRIKTDELDSFRIAIYCEQNHRKILRNPSKLPPPVYFKLKRLLAEHKQTVKQSVLYKQQLHDICAYDTDLSVERKNGQLKTLNDALKGIDNEIDMYIKEDADISKNFSLLTSIPGIGRVVALETIVLTENFMAIDNPRKYACYIGVAPFKKESGTSVRKGSSVSKKGFKQAKADLSIACLVCMQHIPNIRDYWERKRKEKCSGIVFNAIKFKMILRMFAVIKRGTPYVETDNYRNGKNKQPGVN

SEQ ID NO: 226954 - protein, 355 aa, unidentified
MKRHHFIGVDVHCKFSEVAAVTETGQLVHQERCATSIVALVQELEKIPQPRFLVIEEGPLADWLWRHLQAHVKEMVICNPRRNHLIAKEGDKDDPIDAPKLAQLYRGGYVKAVHHGDSLERSVLKQHVSLYHDRVRHRVSEALRALSLLRRHGVFVRERAFVNVADRPALLQRLPQNRVLRDAVRLLWKGYDAAVAQEEWMRRRLVQLAKQEEVVRRFTDLPGIAWVRAVTLFVWLDTPFRFRSKSALWKYLGIGLERRHSGAGAEQLRVPRIVNRQLKCTILGAAKSAVAQGDNPFADQYRRWIEQGLSPRLARRNAARSLAATLWGLWKSGSAYCPSWVGVAGAAGNAAEVST

SEQ ID NO: 226955 - protein, 312 aa, unidentified
MITTSVYLGADIAKESIDLFCLELSVPRTIANNAAGYRQLLKCLGRLPTPVHVVCEATGPYHKAFVAALHQAKVVVSVVNPRLPRDFARARNRLAKTDAIDASLLADYGRTMKPAPTPVPDAPMVLLDELVTRRAQLVADRAAERTRLQQTSRPELVASVRLHLRHLDGQIEKLWARIAELIQSTPALHAKVKLLVEVQGVGELTASALLAALPELGTLSANEVTALAGLAPFNRDSGAFRGTRSIAGGRAEVRQALYMAALCASRANPILKAVYQRLRSAGKAHKVALVAVMRKLLVYLNRLIKKHALASA

SEQ ID NO: 226956 - protein, 357 aa, unidentified
MDYGVYCGVDFHARQQTICCLTTEDGVIATYELKHDNKKAVRDFYAQLPGPVLVGLEAGGYSLWFEQLLEELSHEIWLGDASEIRRCARRRQKNDRRDAALILDLLVRGEFPRIHRQTALSREILRMLRYRHRLVKIRTISKNCLQALAIQSGLALKSQLFTEAGRQQLASLAMSPAMQCQRKHWLELLATLDERISTCEKWLSDQALADQRVRRLRTHPGLGLLTALAVLHTLDPVSRFPNQRKVAAYGGFDPCEDSSAERKRYLGISKAGSKLLRFLLIEAGQTAVKEDADLKRFYWRLQQRRNKPKAKVAVARKLLIRSYILLRDEIDYAEFQRRAVAARLARENARLPCLSSD

SEQ ID NO: 226957 - protein, 350 aa, unidentified
MRHVIGCDVHKRYSVFVAINAHGKLSKPTRVEHERDAFRAFLQALPPHCEIAVEATGHWYWIIDEMEKAGHQPHLANPHESKKRMGKPNKHDALDAGGLAILLHNGTLPESWIPPGELRDVRELLRTRMALRDLRTALKHRIHAAIDRYGLHNDAISDLFGKAGREFLLHQLSGLPPETHAMLLLELDAMDDLTPRIETIEARIAEVIVPSEEVQLLLTLPGAGKILAPLLWLEIGDVTRFPRAENLASYAGLVPRVFSSGGHTVLGHTNRYVNHYLRWAFVEAATCAAHLHAYRESHIGVLFQRLLPTRGYGRAIVAVARHLAEASYWMLRKRQPYRPPKPKLPSSRIG

SEQ ID NO: 226958 - protein, 345 aa, unidentified
MNSYYIGLDIHKRSISYCIKSAGGQIWAEGKFTSNRSELIRAQSQWLRPWIAGMEATIFSGWIHDVLKECGQQVRVGDPNMMRAIAASKKKSDQLDARKIADLLRADLFPDVYVACPQVRELRQTLRYRNLLVREIVRFKNRACGMLMEAGIGYERERVHGQGYWARLMEELVADEMPSGWIDLLRLNRNTIQPLQQLEGRLVESLVKHPRLAERVKRLDTIPGVGPLTALTWALEIDDPKRFANVRRAVSYCGLCSAQRQSGDRTGRGPLSKQRNKHLQTMLVEAAKKGARRDAKLNEIYEREKQRGNPNQATIAVARRLVAYLLACDRENRAFRPEFAETAAA

SEQ ID NO: 226959 - protein, 351 aa, unidentified
MGKITTIGLDLAKSVFQVHGSDSEGHPVLRKKLRRSQVFRFFSDLPPCLVAMEACGGAHHFARELQKLGHDVRLIPPQYVKPFVKTNKSDVADAEAICEAALRPTMRFAPIKSREQQAVLMIHRTRDLLVRQRTMLINALRSHMSEFGIVVAQGRCNASKLIDIVEDDSDGCLPALARQTLRTFVEQLRQAGLQIAELERRLGAWHRANEASRRLTSIPGVGIITATAIVATIGDASQFSSGRQLSAWLGIVPKQNSSGGKERLGRISKHGDGYLRRLLVHGARAVLRWSRRDKEKRSVWLEAMLARRPTNVVLVAMANKNARIIWAMLSRGQEYRHEWPNGSCQISECSA

SEQ ID NO: 226960 - protein, 430 aa, unidentified
MPHRLQVGIDFGQKRADFCLLLPDGRSLEPHLSFANSSSGYSLAKRLLLDALDSYSFDGVNVSGEATGYFWLPFFLQLAADPDLAQHDLKLFLLNPRWVKWFKKCFSQDHKCDEKDSFYIAERTRTRRPDVAWSPLNSLSLRFYTRLRFHLVQNLAREKCYFSSFLFLKASSYRCLKPFSDVFGATSRIVLSQAPGLDDLADLPVEDLAVHLHELSKHHLRNPLGNARKLKRVAQESFSLDETLALPVQRILDLTLEHIRFLEGQIEQVNAWIATEIEAHPAIAQLATIPGVGPVFSSGIGAEIGDIQRFLQGSKWDRRRKRYRPRNLRDAEDAVAKIAGLWWPRFASGDFEAEDRRMAKTGNRYLRYYLIQAADHMRKHIAEYAAYYARKYKEASKHHHKRALVMTARKSVGLVVGLLHRNESYRSKGA

SEQ ID NO: 226961 - protein, 400 aa, unidentified
MIDISGIGAFLGLDVGKGEHHATAVTPAGRKAFDKRLPNSESKLREVFAKLKTKHTTVLVVVDQPASIGALPLAVARDTGCEVACLPGLTMRRIADLYPGEAKTDARDAFVIADAARSRPHTLRAIEPADETVAELEMIAGFDDDLAGEATRISNRLRGLLTQIHPSLERVLGPRVQHPAVLKLLDQFGSPALIRKAGRRRLVNLVRPKAPRMAERLVDDIFTALDEQTVVVPGTDAATLIVPSLAGSLQAVLDQRKLLAMRIEELLESHPLSKVLTSMPGIGVRTGARILIDVGDGSSFPSAAHLAAYAGLAPATRSSGSSIRGEHPSRRGNKQLKRAFFLSAFAALADPVSRAYYDKKIAQGKHHTQALLCLARRRADVLFAMLRDGTLYHPKPAPTG

SEQ ID NO: 226962 - protein, 469 aa, unidentified
MGNNVKRKRKNKKHQKMDLSQLEQFNINAAGIDIGSELHYVAVPSGRDPEGEDVRHFSTFTADLHKLANWLTRCKIDTVAMESTGIYWIPLFEILDSQGFDVRLVNPRNVKNAPGRKTDVVDCQWIQQLHTYGLLQSAFRPEDQICQLRAYLRQRSMLLSYASHHIQHMQKALEQMNIKLNQVISDITGVTGMKIIRAIISGERNPVKLAKMRNPRCNSSETVIAKALEGNWRPEHIFALKQAVELYDFYKKQIIECESCIQRHLNSFDDRSNGSPLQKPSRKSGGSSNKFHFDARAYLHRMTGVDLTRIEGIEAPTALNIIGEIGIDMSAWPTEKHFASWLGLCPGSKISGGKVLSSKTKPSANRAAHAFRLAAYSLQRSKSAIGAFLRRKKAQIGAPKAITATAHKIARIFYNMLKNGTDYVDLGQQYYEQRYQERVIANLNRKAKQFGFKLVNIKEHKTLIQHPAT

SEQ ID NO: 226963 - protein, 377 aa, unidentified
MATTRTVLREQLTAKPGDLYMSFELGDKHWHISIGGERRSVSHYIVEAGHTEEVADCIAKAAARLHTARVHSCYEAGRDGWWLHRWLSELGVDNIVVDPASIEVNRRARRAKTDRLDADKLLAMLVRHHRGERVWSVLREPSPSDEDARRAHRELQRLTHERIAHTNRISSLLVLHNLRSRIVIGGRDWSAWWNEHREQVPPTLRAELEREAVRLKVVKEQVRAIEATRARELAEGKQPLVAQLVRLRAIGAKGAWVLVKEVFGWRHFANRRELAGSLGLVPTPYASGDSEIEQGISKAGNRRVRALLVELAWSWSRLQPGSALTQWFNRRFAGAGKRMRRVGIVALARRLAIALWRYLQTGEIPIGARLKPAGSAI

SEQ ID NO: 226964 - protein, 433 aa, unidentified
MLVCHGKGEGVVLQEDPQGEEIVARVAALDIGKAELVCCVRVPHEAKPGRRLQEVATYSTMTRSLLAMSDHLRCLGVSRVVMEATSDYWKPVFYLLEAQGLDPWLVNARDVKHLPGRPKTDKLDAVWLCKVAERQMIRPCFVPPPEIRRLRDVTRYRIDLVGVRTAEKQRAEKLLEDAQIKLSVVASDIFGVSGRQMMAALIGGQTNPKALAQLARGRMRAKLDALEEAFTGHFTDHHALLLTKMLARVDALDTDIAELDTAIEEMIAPFAPTVERLDEIPGVGTTAARVIIAEVGMDMSRFPTAAHLASWARFAPGVKESAGRKKGSHTTGHGNRYLARALGEAAVAAGKTGTFLGERYRRIARRRGKKRAIVAIGRSISVIIWHLLSDPQARFHDLGPDFYDNRIGPERKKRNHIHQLEALGYKVTLEPAA

SEQ ID NO: 226965 - protein, 439 aa, unidentified
MSDKLYLGVDIGKQTNSISFYFQRKEVLKRKYFDNNIYGFIDIKNAVDDLLVKYNLSCDDCIMGVESTGHYWKNLAYFFESNDINVVMVGTKAVKSMRELTYAKGKNDSVDSKAIAQCLESGNYFDIRKNDKYYLILKRLTRSRDDFAKSLAQVKNRINAWLDVNNQSYYRHFKDIDSKTGFSLIREYPSPSDVVDISVDEVIENIKKHMTRVSKKRITLYVEECKELSCYKNSITDAEIIEIQYYIKQYDMFENALQELEKKIIEFAKENLPVYSKLENMAGMPNIFLISMLAEIGNVDTFNTARHLLSYCGLTLKTKQSGNIQGETRITKVGSRRIRKYLFLISTSLVTHNDSFRKLYCYYKSYNRKHLNKNKEMLIAVGCKFLRTLYGMIKNDTEFDENILLSYLDFENCDREKFIEEYNRERKSFNKDELICYFK

SEQ ID NO: 226966 - protein, 428 aa, unidentified
MSENSTTHPEPEFVGFVGIDWADQKHAWCSPRAGATQREQGELEHTPEMVEAWVSQRAQRFGPGPIAVAVEQGKGALVFMLNQYEGFHLFPVPSTMSASMRKSLYPSGSKDDPRDAELLLDLLLQHRKKLRRLMPDKEVTRRIQNLVEERRTWVDEKTTQLNRLTGYLKVYFPQMLEWFEKLDTKLVCDFLERWPSLEELQKVAPAELRKFFRQRRGRHQELTERRLEGIRPAMPGIRDRAVLEAKQAMVQVSAQLLRTLLEGIANLDSKIEEAASAHPDFFIFKSLPGAGSALAPRLLAAFGSQRDRYGSAEEVQKHSGIAPVMERSGKKKWVHFRWACPKFLRQSFHEWAGHSISQSAWARAYYQQQRGRGKDHHAAVRALAFKWIRILYRCWQDRVAYDENKYLAALARRGSPLSFVLTVTAPTL

SEQ ID NO: 226967 - protein, 342 aa, unidentified
MTAIGIDTHKATLAACAVDELGRPVAEATFANDPAGHLAFIAWARSISPEVTIGVEGSSSFGAPLARSVQSAGLTVREVPPHLSRVERLRTRRPGKSDPGDALAIARVTAREKNLPPIRLPDRTTELRLLLEAREDLVDESTRARNRLHAHLLTLAPGYGGTVANLVAARHRATAGRLLRGVGGVQAELARGLLLRLARLAREVKALTSRIEMLVAGHPLLGLPGAGPITAARLIAEVGDVNRFRSADALAALAGVAPIPASSGQVQRMRLNRGGNRQLNRAFYVIAVIQSRFHPAAKAYVTRRMEVDGKSWREAIRALKRLLVRPVFRLLVEGAALQLAAA

SEQ ID NO: 226968 - protein, 350 aa, unidentified
MTDSREPVIVGVDTHDQNHVAVLLDRLGRRLGKIEIPAERAGYQKLLSWCCAQGPLESAGVEGTGSYGAGLARFLSDKGVEVFEVRRPKRQYKGKSDSIDAEAAARSVLAKESTGLPKHKTGIVESIRILRLLRSSAVKARTQTGNQMRALVVSAPEDVRKLLRPLKSLDRIQRCARFRPDKGWRPETILKKALRALARRWLQLDAEARERERELSSLVQAAAPRLLSQPGIGPESAAKLLVLAGDNGDRLRSDAALAALCGASPLEASSGKRKRHRLNRGGDRQGNNALWTIAMNRLHHHPETRAYARRRRTEGLSDKEILRCLKRYLARRLYPLLLADLNNANSLLLT

SEQ ID NO: 226969 - protein, 387 aa, unidentified
MAKVDDLSRSLTPLDQSSTLVCVVELSRSSWLIAGRVPGVERQPLKKVEPDAPALMRVIERWRSEATKANPAIGRMVLAYEAGRDGFWLARWLRARGVEAHVIHSTSVAVSREHRRAKTDRLDTAMLMRVFVGWLRGERGHCTMVAVPTIDEEDAKRPGRERESLVGERTRIINRMKAALARLGVRGFKLELRNASAHLETLRTPENIVIPPNTLAEIRRDVARLAVIREQIKAIEQARVESLRRDPHRPAHVMVRLLAHVIGVGIESADMLVREVLLRNFRDRRAVARYAGLTGAPDESGPKRREKGLAKSGNSRVRRGLIQLAWRFLVFQKDSALARWYVERTSGAKGARKTTMIVALARKLLIALWRLATTGVVPDGFVLRSAV

SEQ ID NO: 226970 - protein, 338 aa, unidentified
MTPIRICFDIAKNVFQVHGVDDKGTVVIRKRLRRPDILRFFASLPPCLIGIEACSASHHWARELIRLGHDVRLMPARYVKPYVQRGKSDALDAEAICEAVSRPTMRFATIKTAEQQSVLTLHRSRELLVKQQTMLANLIRGCLGEFGIVAPVGIRRVSELIAVINDDADTRILPEARIAMRAVADQLCDLQKRIKEIEQAIRAWHRGNEASRRLATIPGVGSITASAIVATVANATEFKSARHFAAFLGLTPKQCSTGGRQRLGRISKQGDVYIRRLLVLGGTSLVRYARGAGGSVWAKQLLARRPTRIVTVALANKAARIIWALLTRGDVYRAPQAA

SEQ ID NO: 226971 - protein, 320 aa, unidentified
MTITLAAGVDVGRDWLDVGLAPSGKCFRAPNSAAGIAVILTRLRRAGVERVVLESIGSLALNLVRRLAAAGLEVGVVDPRRIKALRTAEGGRAKTDRLDAKLIARFALLMSDAIRPIPSAESLELRALSTRRRQLVEMIAMEKTRLKQVIDPVLLASSRAMILVLGEERKRIEAMIEAATGSSPEGRRKGELLRSIPGVGPAISSILMADLPELGARDSKAIASLAGVAPHIQESGARQGRAHIQGGRPCVRTALFMAALTAVRHDAHFKAEYQAMREAGKPAKVALIAIARKIVVAANSILKHDKPWTPSPPRRQTQSP

SEQ ID NO: 226972 - protein, 311 aa, unidentified
MTEHTIGVDISKSHLDVFDAERREATRFENSISGFRAFEKWLGKAHIARVVYEPTGPYHRNFEERFCDKLPLVKVNPLQARRFAEACGTRAKTDALDARGLARMGGTLELEPDIPVAKVTRILKDLQVARAALIKERTRLNNRAHVQTNPVLKRQTKARLALVEKQLCELDREIDALIKADKTSARRRQIVQSIPGLGSVASAAILTYLPEIGTLDRRQVGSLAGVVPYNRDSGQWRAKSFISGGRKPLRDALYMPALVAMRYNPDLKAKYEALRAAGKPAKVAIVAIMRKLIETANALVKADRIWVPKTS

SEQ ID NO: 226973 - protein, 332 aa, unidentified
MYYIGMDLHKQDLVMAVEDERGPVGRVRRIACRDTGAIRAAVERWRPFRAVVEASASYRWLYDLLSPQGEVVLAHPLRLRAITAARAKTDKLDARLLARLLRANLIPAAYVPPAPYQRLRDLTRCRARLSHGATLAKNQMHALLARANVHPPLKTPFGKRGRRWLAGLDLGLSGNLARDELVRRLEHYGREIATLDAHLEAVASEFPQAEALEVLHGIGRYSALLVVAEIGEPERFRNARQVGAYAGLTARVHQSGKTEHRGGISKQGSRWLRWILVQAAMKLVRRDERLANFYQRVRKRAGRNVARVAVARKLAGICWVRLRRWQREQAAA

SEQ ID NO: 226974 - protein, 355 aa, unidentified
MDDKKYIGLDVHQATTSVAVLDASGKLVMECVIATQAATILEFLGGLRGSLYLTLEEGTWAAWLYDLLRPHVAQLVVCNPRKNALLKEGNKSDRVDARKLAELLRAGLLSPVYHGESGVRRLKELARSYLALSKDLARVMNRIKALYRSWAIPCSGQTVYAPRQRAAWLAKLPESGIRRRAERLYEQLDQLRKLRLQARQELVAEGQKQGAAKWLRQVPYIGPLRAALLIALLQTPQRFRTKRQLWAYCGLALRTRSSADYRYTAGQLQRSPKPPALRGLNENHNHELKNLFKAIATVAVGGSGPFHEFYAALIAAGKKPTMARLTLARKIAAITLSVWKKGARFDPGQLKRQAA

SEQ ID NO: 226975 - protein, 422 aa, unidentified
MSTRQKIRTKKFKTINEKTLIATVDIGKVMHMGYCRCPDGGEIKPFEFFNNGRGFNEFWKCIRKTMKTSHLEEVIVGFESTGPYGEPLTHYLRKRSVNLVQVNPLHTKKLKELQGNSPNKTDKKDPKVIADIIELGHALTLVVPEGVAAELRRLTHARERNITRRTVLWNQLQDLVFLLFPEFLQIMKDIKTKSAQYLVKHYPTPEDITEYGLNSLAITLRKISRGKLGEKRAQALYKAARGSVGIKEGQKSMLLEIKSIVTLIEASNRFIDDIEGKMSSYLKQIPHSRFILSMKGIGEVTVAGLIGEVGDFSKFNTISEITKLAGLDLFEISSGKHKGKRRISKRGRPLMRKLLYFAALNVVRKGGIMHEQYQRYLKRGMLKMKALIAVARKLLAIIFALVRDHSEYEISCPKIQNLLDAA

SEQ ID NO: 226976 - protein, 346 aa, unidentified
MEHYAGIDVSLEASSVCVVDAAGRIVREAKVASEPEALIGWFAELGLELARIGLEAGPLSQWLYAGMQQAGLPVELLETRHVRAAFKTMPVKTDRKDARGIAQLMRLGWFRPVHCKSLSAQETRAVLTARRLLQSKLHDVEMSVRGVLRGFGLKVGPTTAKSFDGRVRELAAGHATLELVAEALLSARAALAREYAALDRQVRAMARADRRARLLMSTPGVGAIVALTVSAAVDDPARFRSSKAAGAHFGLTPKKYQSGETDITGRISKTGDKEARCALYEAAHVMLTRPVRASQLKSWALAVAKRAGMRKAKVALARRLAVVLHRMLADGAEFNPGLGGPAARAA

SEQ ID NO: 226977 - protein, 340 aa, unidentified
MQITTVGLDLAKSVFQAHGVDETGATVLVKRLHRKQMLPFFSKLPPCLIGMEACGTAHHWARTLAAMGHEVRLIPPSYVKPYVKRGKSDALDAEAICEAVQRPTMRFVPVKTVAQQSILMTHRARSLLVRQRTMVANALRAHLAELGLVANPGIANLAKLAQQALSGESSLPSYARTTLDILIRQILVFADEIAALDQQLLAWHADSEASRRLSAIPGLGIVTATAVAATVTDPEQFRSGRQFAAWLGLTPQQCSTGGKTQLGGISKQGDRYLRRLLVVGATAVIRHTKDKATPLANWIRKLLEKKPFRLVSVALANKLARIAWVVLTRKEAYRAHEMIA

SEQ ID NO: 226978 - protein, 420 aa, unidentified
MQKNSLSRELSAGYSEGKLPRERVTGVLIMEKAWLGVDAGKESHWAHMLDASGTVLLSRKVENDEAQISKLIDDALLLAEEVVWAVDQPGGSVALLLALLWERNQRVLYVPGLTVDRARDAYRGESKTDARDARVIADQARMRSDLSELRAGEQELAELQLLLARRRDLITDQSRTITRLREALLSLFPALERALDLNSKGPLTLLTHYQTPTHLRRAGHKRIATYLRNRNVKGSEKVAHKALSAARSQSVSLPAQEVASRIVAELAAQVLYLKERIESIDEEIGQRFFARPEARILISLPGMGPILGAEFLVAVGEISAFESADRLAAYAGLVPAANDSGKRVGNHKRMRGGNKTLKRVFYQSAFASLRGCAESRAFYDRKRSEGKRHTQALIALARRRVNVVWAMLRDGTTFEDRSTA

SEQ ID NO: 226979 - protein, 347 aa, unidentified
MDHIIIGVDTHKSNHIAVAINAQGARLGVVTIPTNRQGYRDLEIWAAKFGRIKAFGIEGTGSYGAALSRDLLVKGHTVLDVMRPNRQLRYLHGKSDSVDAESAARSVLNGQASALAKTQTGSSEMIRHIKIVRDSAVKVRSQAMITLKTMIINAPAELRDTLDQIKGPISLIRHIAVPRPGDIASPTASAKWAMRALARRWLALHEEIQAHEVELERMAREKAPELMKSHGISTQTVAEMLILVGDNPERIKSEAALAKLCGVCPIPASSGKTNRMRLNRGGNRQANAALYRVAIVRMRNDEKTKTYVTRRIAEGKTRREIVRCLKRYIVREIYRHLCVHPTAASST

SEQ ID NO: 226980 - protein, 317 aa, unidentified
MTDTETGAFIGIDVGKMYLDIAVWDSEIYWRVSNDGAGIEKLINRLQKLSPVLIVVEATGGLELPVVTALALAALPVAVVNPTRVRDFARSTGQLAKTDKLDARVLAHFAQAVRPQVRPLRSEEQEYLAALVTRRRQVVQMLTAEKNRKSSARPQIRKRVQKHIDWLTEELRALDEDIAKFIHSHPLWREKEALLRSVPGVGPVTACTILAELPELGTLNRQKIAALVGVAPLNKDSGRKRGKRRVFGGRASVRRTLYMATLTATKFNPVIKSFYENLLRRGKEKKVALTACMRKLLIILNSILRHQRPWQVRPARP

SEQ ID NO: 226981 - protein, 425 aa, unidentified
MNKDVLSTLFVGIDVSSASNYFCAINFEGKHILDFSITNDLPSSEIAVERIFNALQENDLKYVTMVLESTNVFSFHIANFLASNNSLFNFNSKVFVINPKESSNFRKTYSDMDKTDPQDAFVLADMARCGRINQQPYKASQLFALQRLTRQRFHLVKTIMREKAYMMSNIYLKFSSLYIAKKEDEPFSNLFGNTSKSIIADFTPDDIVNMSDEDMINFIMEKGKSRFSNPQENVKLLKKIARDSYRLDKVAYDPINVAISSSFNTINTLEDNLKVIDKAIEKNVKGLCDNEFTILKSIPGIGDVYAAGIISEIGSIDFFKDNNALAKYAGLTWRKTQSGYFEAETTRMTKTGNKYLRYYLIEAVSSVKNHSKEFNDFYTRKYNEVSRGAHKRALALSARKLVRLIFGLLHHNQLYSATKLDNRSN

SEQ ID NO: 226982 - protein, 371 aa, unidentified
MKYVGIDLHTNRFTCCFLDEEGHKRIKTFELNKKDIALFLDSVDVYKTRVLVEATVNTFAFTGLIKDHVKEVIVANTFELKNISFTSKKTDKVDAYKLARILKAQIMSGEEQIHPVVVPPEHIQDLRALFTTYRLLRKQIGITKNRIHSLLKQNLKPFTKEYIFGKKSRKKIRVLCKDSSILYYQINFLFDQLEQIELQVVQLKDKIKEEGHYYLKEIDILTSMRGISVFTAIAIISDIITVKRFSNSKKFASYLRSAPKVESSNEKTIIKSTNKAGRKVSITLLSQALNHYRDASPNVKRWYDRLRIYKKAGVVRMGLCRRMITEIYQMLKKEEYHYFRDKSNHTKKMDEYCKFLLHIGVLNSEYIELSA

SEQ ID NO: 226983 - protein, 400 aa, unidentified
MRKTSGLDVHKDTVFCGIYDGKLQSEVKEFSTTTVSIYSLGEHLQMQGVQEVAIESTGIYWIPVWNILEEMGFSLMLVNPYLIKQMPGRKSDVKDAQWIATLLHKGLVRGSLIPCQRIRELRTYSRKYIKLQQKQASVMQELERTLEMCGIRITSLVSNISSVSVRHIIEQTIEGEDDPLELVKHIHGRIIKRQGRDKVIESLTGFVMPHHRFVLEQALEEYDLLIMQSDRFLSKMKELCQLHYAQEFELLQTMPGISEISAMIIIAETGADMKAFENSGKFTGWTGLRPRNDESAGKFKSTATTKGNKYLRAILVQVAWAASRTKNSCFKEKFNKLSIRKPRKKALIAIARKIGVVIYCILDKKEPYNPSLLIVPQTEKVKNQVIYHKKELERLEKILN

SEQ ID NO: 226984 - protein, 354 aa, unidentified
MKTYYVGMDVHRASISIVVLNGAGKLVMQSVIETGAERVRGYLKQLRGKVYVTFEEGTQATWLHDIVRPLVTEVVVCDPRHNKLLQSGNKNDRVDAQKLAELLRNGALKAVYHGDHGMRTLKELVRNYDCLVGDTTRVMLRLKAIFRGRAIPCAGHDIYRSDRRAQWLEQLREPGARQRASFLYAQLAALKPLRHEAKLVMVKEVRRQAAYPWLMSVPQLGSVSVAQLMAVVGTPHRFRTKRQFWPYVGLAVVTRTSADHEIVNGVLRRSRRPIATRGLNRNHNHLLKKVFKSAATSACHSGPFKAGYDARVAQGMDPSLARLTIARQLAAITLAVWKRGEKFNMQMMNQQLAA

SEQ ID NO: 226985 - protein, 285 aa, unidentified
MQAVTTVGLDIAKSVFQVHGVDAHGNVVVRRQLKRRQVLAFFEKLPPCLVGLEACGSSHHWSRELQALGHTVRLMPPAYVKPYVKRQKNDAADAEAICEAVTRANMRFVATKTPEQQSCLMLHRTRHLFIRQQTAVINAIRAHLAEFGVVAPVGRKGVEELLKIVADACDERVPEIARTCVAALGAQLRMLKAQILAFDRRIMAWHRSNAASKRLDAIPGVGPALATALVACVADPRAFRSGRDFSAWIGLVPKQRSSGGKDKLGAISKQGDSRLPTSSPGWRGP

SEQ ID NO: 226986 - protein, 419 aa, unidentified
MTQREDSKIIEIVHPICCGLDVHKESISACVIFPGKDGADQYDIKEFGTFTDDLQRLRSWLLEHECFVVAMESTGIYWRPVHNVLEDVVDVVLVNARDIKNVPGRKTDIGDSKWLAGLLRHGLLRGSFIPSKTVREWRDLTRLRKKYVQTVGDYKKRTHKLFESANIKIDSVVSDLFGVTGRNLMNLLVSDGRRLTLLDIEGCVRGKLKSKEKELYRSIQGFFCDHHRFILKRLLKTVAMLEEEIAGFDHQIRRLMEDQKDLLDRMKKAAGISDVSSCDILAELGPDLSRFRAGAALASWSGLCPGNNESAGKRKSGRSPVRKHHLKTIMIEVAWAAIKKKGSYFKDKYYRLKARRGAKKAIVAIAHRILLGIYHVIKHGVEFRDLGADYLTQRNKSQKMSYLRRQAQLIGYDLVPQTT

SEQ ID NO: 226987 - protein, 341 aa, unidentified
MAEYVGLDVSMKETAVSIRRDGKRIWRGKCGSDPRLIAEVIRRRAPGAARVVFETGPLSVWFYHALTAEGLPAICIDARHAKAALDMAPNKTDAHDADGLAQLAEVGFFREVRVKGFDSMLGRTLGAARTRLVQITTELSNQIRGLMKTFGLVVPAGKGSRFEAHVRALLADQEGLAPILLPLLEAWRAVRLRAAELGRQRVTSARRSEACQILMSGPGVGAVTATSFATAVEDPENFRRSRSVGAWLGLTTRRYQSGEVDYDGHISRRGDTHLRGLLYEAATVILTRTSAESSLRTWGLKLKERIGFKRAAVAIARKLAVVMHAMLRSGQLFDRTAGMAA

SEQ ID NO: 226988 - protein, 342 aa, unidentified
MNRVYVGLDLGSSNFHQVAISENGAVTRNCVFATSEANLVKACSGMRGEIHVHLEAGELAPWASEIIRPLVKRVVCSHPQTNAWIARDRDKSDRIDAYKLASLLRLNEFKEVHYPHEQQRRDFKAVVQHYDELTTQQARLKTKIKARLRMQGVITRGEQVFSVHGRKAVLAEVKSQVVRTAIQQLYALLDQSLVSQAEARLLMLRAAQALPEIRILRTAPGMGPIGACRFSAYVHAPQRFNSTRKLWKYCRLSVSHRSSNGKPLRRPRIDRSGCGRLKDVSRKAFEAALRRKDNNGFQRAYYRALEQTHDPVHARLTVQRKIVSTLRAMWINQTPYGDRLMH

SEQ ID NO: 226989 - protein, 320 aa, unidentified
MNKEQKYVGVDISKDSLDMAVLDSDQRRHFNNSTIGIERAIATLEVLKPVLVVFEATGGMEIPFWEALSKAGIDSAPINPRQIRDFAKAKGRLAKTDAIDAQVIAHYAQAMKPRPQPFPDTQALKEVMARRSQLVEMISAEKNRLKATRRESIKKDIQAHIEWLETRLDNVDKELRKAIEASPVFREKDQLLRSTPGVGPVLSATLLTQLPELGELNRHQVAALVGVAPLNRDSGLMRGKRTIWGGRGRIRAALYMAALVATRCNPVIRAFYERLCYLGKPKKLALTACMRKLLAILNSMVKHHTLWTHNSTLILIGSCQ

SEQ ID NO: 226990 - protein, 343 aa, unidentified
MELYVGMDVSLKETSICVVDGGGAIVSEGTVISEPTAIAAFIAAQADGAKRIGLETGPTATWLWHELRALGLPVICIDARHAKAALSMQINKSDRKDALGLARIMQCGWYKEVQVKSVACHEIRAALNSRAQLVKIKRDLENQIRGLLKNHGLVIGKAGGKVFQRRAEVLAGEQGLLWLAVRPLLEIREIVRREIAGLYRQLLSLARNNLDSRRAMTVPGIGPITALAFQSAIDDPTRFRRSRSVGAYVGLTPRRHASGEVDWSGRISKCGDAMVRTYLFEAAGVLLTRVPSWCQLKAWGHKLWKRIGFKKAKVAVARKLAVILHRMWRDGTDFNWSSKEAAA

SEQ ID NO: 226991 - protein, 409 aa, unidentified
MQVMHPRCAGLDLGKDVLAAAVRVQDADGVKRECRTYGTTSHWLGELSAWLHSRGVTHVVMEATGSYWKSVWHALEGQFELTLANPVQIRNVPGRKSDVNDATWMADLLAHGLIRGSFVPSAEIGALRELTRARKQFGREIARHTLRIQKILDIANLKVTGTISQILGVSGRAILKALIAGETDPEKLADLAHPRVRVSRARLVESLRGHLTAPQRQLLKMHMTLIEALEASIEQLDRDIAKAVTPFRQTVQRLKGVPGLSDINVPAMLGEIGVDMTRFKTHRHLVSWARLCPRLDESAGKIHSTRTMKGAAWIKTLMIQAAWCAIRVKDSYPRAQFLRLRARRGTKKAIVAVAASLLTAVYYMVRDETPYKDLGIGYFEKHDRSRVARRFVARLQQLGFNVHLTEAVA

SEQ ID NO: 226992 - protein, 323 aa, unidentified
MDIKVVGIDLAKNVFQVCVCLVDHSIKSNQKVRRNKLLDKVRQFPQGTLIAMEACGTSHYWGRKFKELGFDVQLIPAQHVKPFVSSQKNDANDALAICEAAFRPNIHKVPIKTVDQQDIKSLRCVRARLVQNRTATVNQIRSLAGESGVIFSAGRIKLQASLIDALEDGSNDLSYTLRSLLKSLYDDLCALNYRIEQIERDIKALCQNQPRYEALLSIPGFGPLVTASFISEIGSGLQFKNGRQLSAWCGLVPTQSSSGSKIRLGSITKNGSADLRVLLIHGARAVGRFANKRQDKLGQWFNALAVRQGKHKAVVARLCCLIR

SEQ ID NO: 226993 - protein, 410 aa, unidentified
MIYVGIDWADDHHDIFVTDDSAKTLDQFRIDHTCDGFALLHSHLANHQTSPGLVVIAIETSRGLLVHELLQKGYTVYAINPKAVNRYKDRHVLSKAKSDVLDALSLGHILRTDRHLFQPLKPLPEDYRLLDRLCSDLRKVVDEKSRVTNQVISCLKEFYPKALDIFSLDSQIFIDFVKAFPDHRALSACTKKAFLMFLKKHRYPCPAKAEELWKTIQAPTLQPDKVVARSGRLRLRMLLDQFENLKEHIIHYEQEIQAILDKLPESTSVKSLPGVGERLAPELVATLGPNSKDGHHRFQAAEEIAKLSGCVPVVRESGKWKTVSLRYACVKPLRRTFHDWAFASISRSSWARAFYDYHKERNQSHCTILRNLGKKWIKILFAVWSNGTSYDETLHIQNLKARNVPWAMAL

SEQ ID NO: 226994 - protein, 422 aa, unidentified
MIDQEKFTWFAAIDWGTESHQACVLDAGGGIAGERAFSHDGAGLALLCDWILSIAGSATGVAVAVEVPHGPVVDSLMDRGMAVHAINPKQLDRLRDRFSVSGAKDDRRDAYVAADGLRTDRHLFRRLHVADPRLIELREWSRLAEELQQERVRLSNRLHNQLWRYYPQMLKLTDDVAADWLLDIWTLAPTPTKSKHLRKTSVERLLKRNRIRRIDAETVLHTLRQAAIKVADGVTEAATIHIRSLIARLRVVNRELRDATHKLDELCAGLEETPAAAAEHGGEQHDVKILKSMPGIGRINLAILLAEASGPLSLRDYQALRTLSGVAPVTKQSGKSRVVVRRYAAHGRLCNAVYHWARIATQHDPKSRSRYVALRQRGHSHARAIRGVADRLLALACTLLQRQTMFDPDFGTTEVPELNTVP

SEQ ID NO: 226995 - protein, 355 aa, unidentified
MNEAKYIGLDVHQATISVAVRDSDGKLAMEAILETKAETILQFIHGLRGSLHVTFEEGTCAAWLYALLKPHVTQVLVCDPRKNALLKVGNKSDRIDARKLAELLRANLLSSVFHEDTGLRAVKELARSYLTMTKDLTRVMVRLKALYRSWAIPCATKQVYAPRHRAEWLAKIREDSVHRRAELYYQQLDALRALQQQVKKELLIEGRKHSATKLLRQIPSIGPIRAVLLLALIQTPHRFRTKRQLWSYCGLALETRTSAEYRVVHGQLQRSKKPVAIRGLNKNHNHDLKNLFKGAALRAAAVEKPFQEFYAALVAKGIKPEMARLTLARKIAAITLIVWKKGARFDAEQLKQQAA

SEQ ID NO: 226996 - protein, 419 aa, unidentified
MKPWNELTHFAALDWADDHHDLVVVDTKGQIVLELTFSHTAEGWQQAQAALAAWPGLPVAIETSAGPAVDQLLQRGFAVYPVMPKAAARYRERKRPSGSKDDRHDAWSLADALRTDGPHWRALSPLDPLTAELRALCRDEMALIEQRTALVNQLLAALKEYYPAALQAFEDWTAPYTWAFVLAFPTPEALAQAGQRKWEKFLHTHKLWRPQTAPERLKIFAAARTFKGTPAITAVKSLLVRSLARLLQTLEQQLTAYRARIQDLFVQHPDHDLFGSLPGAGSKLAPRLLAELAGSNWAEVNQVQARAGTAPVNYQSGKIQRARIRRACTLPLRATLHLWADLSRRYSSWAAAYYQAHRDKGQSHACALRCLAHRWLEIVAAMCRTRTPYDVERHLREIQKHGSWVLRLLPAQPITKTCE

SEQ ID NO: 226997 - protein, 345 aa, unidentified
MPIVGGLDIHRKQLTFDYLDTVTGEVKRGQIAPADRVHLRAWLARFAGRDDVAFALEGCTGWRYVAEELAGAGIAAHVAEPADTAFARGRKRHAKTDKTDSRHLRQLLAQGRLPECWIPPSRILECRALLETYHDLRAEHTAWVQRIHAVFFHQGAPALGDGALRTGRDLQAVRAAAACHLSPAGQLQVATALDMLAGLEARLDVLRHRLLDAARHLTGAKVLASRLYGVGPVTALAMTCWLGGAGRFSSARKAVRFAGLDITVWSSDRKGPPGRLSRQGPPVLRWAVYEAGKTHARASAPDYRYYAAVKDRQDGKRAALSEARKILRQACHILTELGDDALSAA

SEQ ID NO: 226998 - protein, 351 aa, unidentified
MEEYIAFDSHKRYTWVEREEVASGKLRQFRLAHAPGAIRNALVGCAAGTAVAIEATANWYWITDEIEQAGLQPRLVHPRKAKLMMGLTNKTDRLDAHGLNQLQRNKTLPTVWIPPGPLRELRELTRTRVVLVAQRTRWKNRITATLTKWGLPASEYSDAYGKSARGELQTRIESLPTQTRWVVQQMLAQLDVLGEQIRQFEQRLKELVEVTPEMQRLESLPGVGEILAATIALEIGEIGRFLSAERLASYAGTVPRVHASGDRVRYGRTRVDVNRYLKWAFAEAANSVAVNYKRRPERHVSRLYARLRAKKGHSKAVGAVARHLAEATFHVLSGRQDYRDPAVAVGRTREV

SEQ ID NO: 226999 - protein, 415 aa, unidentified
MEKQRNKVCGADIHKKFLVATIISRDGIKMTKRFGMTLEDLLEFKSWVVENQCEQVAVESTGVYWIPIHAVLEDAVDLIVANAYKIKHIPGRKSDLIDSEWIAELCLNGMIEPSRIFPKEDRELRRLTRAREGYVTDMTREKNRIHHALESCGIKLSSVLADVFGKSGRYLLNSLLDGVELEEMIKGIPVKSIRKKADQIREAVRGSLETTQIILIRGGLEQIESIQRRIDELEGEIKNRIASRREDLKIAMSIPGIGFTSAVTILAEIGDFKDFAKAEQLAAWAGLVPAVYQSADKLVTGSITKHGSKHIRWILVEVAQAIARTNKSELKRFFRRVQAKKGYNVAAVALARKVLCILYHLLMNQEMYQEDEVIKTKSIGIDPSSLPTKMGFEEMIQVLVKAGYEIRKTSSGTGG

SEQ ID NO: 227000 - protein, 309 aa, unidentified
MSSWVGIDVSKNTLAVWVRPSGVNFIVCNSSEGHQALLLNLADIQVERVLLEATGGYERAVMGCLVQAGHSVVRINPRRARAFAQAMGKLVKTDPVDAGVLAHLAQVIEPSACQTVSLARDELQELVRRREQVVKLRDDERRRLTLARSGVVQESLQTNISQLNEQIARLNSAIEAAAQRTDNQLVKQLGAIAGIGPVTVASLLAYLPELGQLNRRQIAALAGLAPYNNDSGQHSGKRCIKGGRASIRRVLYMATWSVIRCHSSFGARYASLRARGKCAKVALVACMRVLLIRLNAMVRDHSSWRAEAV

SEQ ID NO: 227001 - protein, 411 aa, unidentified
MRLFVGLDVSSFDMRVCFLNGEGQKLDTFAVSNDLPGATLLKERLMTRLIGQEVDVLKIGLESTSVYSFHPSMFLHHDEDLKRFGAQVFVMNPKQIANFKKSYSDMDKTDKIDAFVIADYLRFGRNQLSVVKESQYVALQQLTRSRYHLVKALTKEKQHFLQHLSFKCNTFTQEVDASVFGNAMMELFLEKFSLDEVAEMPLEELAAFLQEKGKNRFNDPACIAASIQKATRSSYRLDQVVEDSMDVILGTSIELIRTFNRQIKELDKSITKLMAGLTQTLDSIPGIGPVFAAGIIAEIGQIERFEDETQIAKYAGLYWRKHQSGTFTAEATSLSRNGNHYLRYYLVEAANSVRRHVPEYQDYYAKKYREVPKHQHKRALVLTARKLVRLVDALLRSHQLFTPGKGREAVT

SEQ ID NO: 227002 - protein, 343 aa, unidentified
MQSISTIGLDIAKSVFQVHGVDAAGQVVVRRQLRRGRVLAFFEKLPPCLVGIEACASSHYWSRELQVLGHPVRLMPPAYVKPYVKRQKNDATDAEAICEAATRPSMRFVPTKTVEQQSCLMLHRARHLFIGQQTAVINSIRAYLAELGIVAPVGRRGVEQLLEIVADTTDRRLPEVARVCLAALGSQLRALKAQILEFDRRIIAWHRSSATSRRLDAIPGVGPALATALVASVADAKAFRSGRDFSAWVGLVPKQNSSGGKDRLGSISKQGDRYLRSLFTAGALAVIRYAKIHGTRHRPWLTALLARRPTKVAAIALANRLARMAWAMMARNERYKEPAALAA

SEQ ID NO: 227003 - protein, 420 aa, unidentified
MDVLLERCAGIDIGKNEVVACVRTPGPGGKGRMKRTRTFLSFTGDVEAMADWFAAEGVTDVVMEATGSYWKPVWYVLEERAFEQLVNAAHVKILPGRKSDVLDAEWLAELLEHGLLRGSFVPPPAIRELRDLTRYRKRLVQAHNSECQRIQKTLEDAGIKLDSVASDVLGVSGRLMLAALVAGERDPEVLAEMAKQRLRSKIPELRRALVGRFRDHHALLIGLCLEHIAHLEAAVAKLDERVDALFAANQSEAGVPFAQARDRLDTITGIGKRAAECIIAEIGVDMGRFPTAGHLASWAGMAPGNNITGGKRHSGKTTKGDVWLRDILSQCAWAAAHTRDTYLSAQFWRLARRIGKKKAAVAVGHSILVICWYLLTDDCDYEDLGGDYFARRVDPDRARDRLVEQLQHLGYQVALRKAAA

SEQ ID NO: 227004 - protein, 350 aa, unidentified
MPRKNTDTIATIGIDIGKNTFHLIGLDKSGAIVMQARLSRGQLGRRLANMSRCLIGMEACAGAHHLGRTLEALGHDVRLIPAQYVKPFLKGHKNDYRDAEAIAEAVQRPTMRFVRIKSPVQMDLLALHRVRSRLVSQRTGVINQIRGFLIERGIAVAKGPRSLRKALPEILGSRSDVLSPMIVRIIEQLCADWRRLDEWIDQATEEIEQLAGQDTCCQRLMTIPGIGPTISSAIVAAVGDASGFASGRDLSAWLGLVPRQMSTGDRTILGRISKRGNRYVRTLLVQAAQVILVRRPQTVKRGLCDWIEAVSKRLHRNILVIALANKLARICWAVLARNATYQPKGISQTG

SEQ ID NO: 227005 - protein, 523 aa, unidentified
MSAANRLTTSPSAPDAAVEPPPYIGIDVAKDKLDVSRSEAADAVVDTFANDAPGIVQIVGRMLAARPAMIVIESTGGLERPLLEALLDDGLPVALVHPGRVRYFAKGLGVLAKTDRIDARVLARFGKLAAPRLREKRSKTEAELRDLVACRRQLVTTRTQQSNRRGATVSRAARKSIDAVLATLDKQIASLDKQIRALIDADDDFKHLDKLLRSVPGVGPTLAATLAAELPEIGQADRQRVCALVGVAPFADDSGTTRGKRSIRGGRASVRNVLYMATLAAIRCNPVIKVFAQRLEVNGKLKKVGIVACIRKLVSYAFHLILARFPRARPRKIWQNVGPSRRPYMTVTVRDPSDLSKLRELARAEGNAKQRDRYRAVLLAMEGDADGGGGELEGDQIAGRLGRSPRFVDEWLARYRRAGLEGMKPGKAKGRPAKLNAQQQQAFKARILAGPDAQADGGVCTLRGPEALRIIATEFGVEMKLSGVYALMHRLNLACLKPRPKHRKNDPKAATEWLERAPLFPAS

SEQ ID NO: 227006 - protein, 369 aa, unidentified
MDYPISVGLDVHKNSVSAYSYNILTEEKRERTFGSDTAPLIGWLQEHKDSYRVVYEAGYSGFSLKRALEASGIVCEIAATSKIERAKSDKVKTDKKDAAALAHLLAAGRLSFVFVPTIESEGLRDLNRAYVDARDAAAREKQHISKMLDRYDIRCALDVNVWSDSHLAWLNNVIFPSRGANMAFLHYLDELARLADEKKRLDLLIKQYCAEKPLQPTVDALRCLKGIAHNTAFCLITEVSDFTRFSPPSSFASYLGLVPSEYSSGERQNRGNITKSGNSLVRKQLVESSWSYYRSKRAYKHPVEGVPDELARMANKANKRLFYKAQALKDEKKKPCVCVVAIARELALWVAAIAWTCQTGSLELVEGCR

SEQ ID NO: 227007 - protein, 340 aa, unidentified
MDLHKSTSTFCAKTKDGHIVSEQKIVTSPEEVATFITSLGNSRKSLVLEPVSQWHFFADYIESLGVTVVLAHSTKVRAIASARIKTDTIDARTLADLLRADLIPRAWRSPVEVRSWKELARCRAALVHDRTQMKNRTHSVLFKNALESPYATLFSKKGRLWLDDCVLPAHYRRSLNTYLTLVDDYTTQIHVLEQEIHTLANTLSGMQYLLSIPGVGYISALTIMAEVGDITRFPSAKKLQSYAGLVPSTYASGGTVRHGKITKQGSKWLRFIMIEVAHAQPRCRHTKGFGGYYNRIRLNKGSSTAAVATARKLLAVVWRVLTDNRPFEERSPVVHQAIIV

SEQ ID NO: 227008 - protein, 345 aa, unidentified
MPIVGGLDIHRKQLTFDYLDTVTGEVSRGQIVPADRPHLRGWLARFAGRDDVGFALEGCTGWRYVAEELTAAGCAAHLGEPADTAAARGRKRHAKTDKTDARHLRQLLAEGRLPECWIPPAQILECRALLETYHDLRRERTAWAQRIHAVFFHQGAPQLGEGALRSEAGIAALRAAAACHLSPAGQLQVATALDMLTAVEARLHVLRHQLLHAARHLTGARVLADRLYGAGPFAALAMTCWLAGAGRFSSARKAVRFAGLDITVYSSDGKRTPGRLSRQGPPVLRWALYEAGKTHARTSAPDHAYYAAAKDRKNSKRAALSEARKIIRQACYILAEPGDDALTAA

SEQ ID NO: 227009 - protein, 432 aa, unidentified
MSQFLNDFVVGIDVSSEFSIVAMLAPTGELIRKPFRIDHNPVGFHKLLDILKKEEERLKRKPIYFVESTGIFHLPLFFFLKSNDLKGFVLNPLCVHSTKNFDLRKVKNDNKDSEAIARLAKYQDVKVSMMPEPQILVLRMMTREYYAVSDMLTMMKNRLCTDLYLLFPGFLNVFSGPFGKTALAVLKSYPSPRAIRDADTDVLTLLIAKTSRKGSEWASNKVALLRDCAQLASSMPSEFSMLDTKIKIHIDGIEHMQASLNGIEAQVKLMIKSKEFPAQAKRNIELLDEIPGIGFFTAATLIAEIGDFSLFNSPKALTAFFGLDPSVNQSGKFNGDRNKISKRGTRIGRRILFTVAMASIRRTRNGRAINPVLREFYASKCVSKKKKVAIVAVMHKLLHYIFAVLRDQKSFEFRKPEDHQSWRENKLQPTAA

SEQ ID NO: 227010 - protein, 408 aa, unidentified
MNTLYVGIDVSSKSNVVYLMLPNGDKHSNFSVANSHEGSTQPVKRILSALASHSLDTVLIGLEATSVYGDNLVYFLREDATLAPFNRKIHVLNPKQVKKFHDAYNDLPKNDYVDSFVIADCLRFGRINKEVYMGDYRYKALQNLTRARFFAVQNLVKEKQRFMNVLFKKYSTMTQEKVFSDTFSTTALAVYDEFESAEALANMDLHELTDFIIEKGKNRFPDPDAVAKAIQKAARSSYRLPKTVNDSVNQVLSISITSMKALESQIKEFDKAIKAQMELLPNVLISIPGIGPVYSAGIMAEIGDINRFNSQAALAKYAGLAWKQHQSGGFESEVTRLIPSGNRFLKYYLCEAAFSLVRCDKEYSDFYHLKYKEVNRCQHKRALALTARKFVRLVFRLLKDNRLYCPAK

SEQ ID NO: 227011 - protein, 336 aa, unidentified
MLHYCGIDLHSNNHLVVVIDEEDKRVFEKRLNNDLSLTFDALSPFQASLQGVAVESTFNWYWLVDGLQEQGYDLRLVNTAAVKQYDGLKYSGDRHDAFHLAHLMRLGILPTGYIYPKEQRAIRDLLRRRLFLVRTASALLISVQSQIWRTTGLRMASANLRKPDVVVPPVDIYTHQAVQAGLAVYQTIQREIDGLEKTAHQAVKLTGEFKLLQTVTGIGKILGLTIMLETGTIERFAGPGNFASYCRCVDSKRMSNGKKKGEGNAKAGNKYLSWAFSEAAHFAVRYEPLAQRFYERKKARTNGIIAIRAVARKLSRATWMMLKHEVPYDARLMFPG

SEQ ID NO: 227012 - protein, 366 aa, unidentified
MYIGMDIHKETHAAYGQDCFGTVCLNKEIKNDELGFNHLVQTVNKLTKENGLVPIFGLEDTGGYGRKLAKYLVQENHIVKSVNPIMVTRERSRTTHPEKNDLLDAKGVAKVLIHEGIDTLPNYRVSEKSDIAKGLRNIINDRTYLVKEQTRIKNQLHILFCDKYGFDYKTKYFKNVFTQKALVFFLKDSKAKKKGKDTQVSILELTILNSQIRRKVERVIGIQKEIKEIESEIRSLVDLTNIKLETIPGCGIVTAAIIIAEVSDIKRFESASKLAKYAGLAPREKSSGKTKNMFKSKAGNKRLKGAFHTIAFSQIGRYGNITGKEYYQRKVDEGKTKMQALTHLKRKLVDIVYMMLKYETNYLYKV

SEQ ID NO: 227013 - protein, 352 aa, unidentified
MSNVKYVGMDVHKQITVIVVLNELGNMESLSKVKTKTENICDFFRGLSGKVEVVFEEGTHSAWLHKLIKPLVASVTVCDPRHNKLIEDGNKSDDDDAETLAQLLRIGAVKAVYKGDDEQQQLKELCRAYENLVSDATRAKNRLQAIYRGRGLDPGRAIYRADRRQEWLAKLNDEAMRFRAESLLDQLAALRELRKRAKQRFVLRVRQHPDYRILSGLPGFGPVRVGQLIATVGTPHRFRTKRQFWPYCGLAVVTRSSADYQIAEGKIVKSQKKVSTRGLNRNHNPQLKHVFKSAALTSLRYEECKAYYRRLVEDGTRPELARVSVARKLAAAALALWQRKEEYDPKKFFATA

SEQ ID NO: 227014 - protein, 392 aa, unidentified
MYIVGIDIGKNHHEASIVSPEGKQIGRSLRFATTHKGADSLMSFIFKNIGNSPCVFGMEATGHYWYPIYSFLKAKGYTIYVINPIQSDSLRKMYIRQTKNDSIDSFLIAEVIRFGQFGTTSMADENILAMRQLCRYRDSVISSRTEIKLRIGTIMEQIFPEYEKQFSSLWMSTSMGILEKYLTPENIENAPIDELFEIIKDKSHNRLTRAKAISIKEAAADTFGIKIAQDAFSFQLKQLIDRMNFLDKQIEALDCQILEYYEKFDCYLHTIPGIGMIAAATILAEIGDINRFKSSSALVAFAGIDPTVRQSGEFSSTHNHMSKRGSPYLRHAIFLAATTCSFHNSPLNAYYKKKREQGKHHLTATGAVARKLTTVIYAVLRDGKPYEPKSFC

SEQ ID NO: 227015 - protein, 346 aa, unidentified
MLYAGLDLSRKRLDFHLLDGEGATLEVGAAPPDGDGLDRLTERLARYGAPIRAAIESMNGARFVHDRLELAGWQVEIADAQKVKGLAPLACKTDRIDAWVLAELSRRELVPAIWLPDPAVRGERERARWRLHLVRHRSSLKQRVHAVLLAHGKPCPVSDLFGVRGRELLARLALPEPWQGSVEASLRLIDELNREIAACERELQRLGAYHRYVPLLPTVPGIGWVLAYTIAAEIGDIDRFATPTKLTGYTGLCPRVYQSGERDLRGPLAKQGPRYLRWALVEAATHACSAPVYRDRYQHTKQRLGKQRGAKVAQIDLARRLAEAIWHMLTRNQPFAPAGAADPLAA

SEQ ID NO: 227016 - protein, 417 aa, unidentified
MKLIVGLDVSSTELDVCFLTDDDNFPVLKEASFENDQISATQIKNFILHYVEELNIDQIVIGMEATSLYSFHPAMFFHEDPELSALNTSVFVEQPNKIKKYREVFEESKDDRIDAFYIADYFRVNRNGVSILKEEQYVALQHLTRTRLQLVEGLVRTKQHFTENIYYKCNTLSKELKSDDQNTSIFSATIMELMTADYTLDDLKALSLEEFSSLVNQLGRGRFKNPEKVAKSISKAIRGSYRLGKTHEESVDQVLSVLVRQIRSFEKSIKEIDKAIEDIVETLPEYQCLTSVPGIGKVYAGGIIAEIGQIERFDNQAQIAKFAGLFWPHKQSGKMKSDNTYLAKRGNRYLRYYLVEAANSVRRYESDYRAYYQKKYNETPKHKHKRAIVLTARKLVRLVDVLLRNHQLYAPPKERIK

SEQ ID NO: 227017 - protein, 310 aa, unidentified
MEHRRIVGIDVSKDRLDVHVLPTQEAWASRRDAEGLAELCRRLGDTADLVAIEATGGYETIVAAALSSHGVAVVIVNPAQVRAFAQALGQRAKTDPIDAGVIARFAEATRPQIRPLPDGAARLLGDLVARRRQIVEMIASERQRLHRTELARVRKSIERLLKALERELASIDLDIDGIVRSSPIWRAKEDLLASVPGIGRIIARTLLAELPELGRLDRKQIAALAGLAPFTRQSGTWKGKARISGGRAVVRTALFIGAQVAKRWNPPLKAFYERLIAAGKAKMVATIAVARKLLTILNAILRDKTPWQNA

SEQ ID NO: 227018 - protein, 347 aa, unidentified
MRFYTRRHARYCGIDLHARTMAVCIVDNDGHILVERNIRCDPAGFLSLIAPFREDLVVGAECVFCWYWLADLCAAEGLDFVLGHALYMRAIHGGKAKNDRIDAFKIASLLRGGNLPVSYVYPAEMRATRDLLRRRLHLVRERGFLLAHVQNTHHQYNLVPQASRIAHKCNREGVAERFADPAVQKTVAVDLDVVGHLDGVIGDLERHLERAVKVHDQDSFYLLRSVPGIGKVLAMTILYEIHDITRFPRVQDFASYARLIRPGKESAGKRTGGGGGAKIGNAHLKWAVSEAAVLMLRHGDVEKLMNRLRKKHGKAKAMGVLAHKLGRTIYYMLLRRKPFDLERFLAA

SEQ ID NO: 227019 - protein, 358 aa, unidentified
MAKNTATHTQETIGCDLGDKKSEICVLGADGKVKERASVRTTRKAVSEWFGRGAAHVVIEVGTHSRWVSALLRELGHRVTVANPRRVKLISASDSKTDRHDAELLARLGRVDEQLLSPVVHRKPQVQADLAVAKARDVLVATRTKLINHVRGTVKAFGERLPACSTESFLAKTRALVPVILKAALEPIYEALARLNEQIREQDKMIERVGKKYPDVDVVSQVAGVGILTALVFMLTIEDKDRFDKSRMVGAFLGLRSRKSASGDGDPQLRITKAGDPFVRRLLVNAANYILGPFGQDSDLRRWGLELAKRGGKNAKKRAKVAVARKLAVLMHRLWVTGEVYEPLGYHQRQVEEKKRAA

SEQ ID NO: 227020 - protein, 323 aa, unidentified
MSAFVGIDIAKNSFDIATPLDNGKFRTKAKLPNKPSGFQELEAWLEKHAKPDAWLVMEATSVYHQGVADFLYSKGYRVCVVNPAIIHSFSKQDLRRVKTDKADAKLIATYARDKQMDLRAWVPEPLPRRRLRALVRRLGDLQEILQMETNRLEVSESSVQKSIQSVIDHVKNEIVETKKAIKDGIDDDPDLRQKRDLIVTIDGLGETTAAVILAELGDPLDYRGPRAIVAFAGLNPLVNTSGNWTGPTHISKTGSTRLRTAFYMPGIVAMRYNPAVKALADRLKARGKAPKQIVCAAMRKLLHIVYGVLKSGKPFDPKLALAH

SEQ ID NO: 227021 - protein, 371 aa, unidentified
MNSIVYVGMDVHKEQYTICCYSYETDKVEYKQTIPSDYKLVLKYIDQVRSRYDGEVTFVCGYEAGCLGYSLYHQLKEHAVDCKILAPSTMAVTNTHHVKTDKKDAANIARCLAFHTYSEVYVPDNDDNDVKEYIRMRDDQKLYLKKVKQQILAFVLRQGKHFECGKTYWTIAHLKWLKTLELSALQRETLDEYLLTYEYLTEKISRFDERIEELASAERYKEKVKHMSCLIGIKTHTALSMIVEVGDFERFEKAPKFASFLGLVPSEDSSDARVNRYSITKAGNCHLRRLLVEAAQSYTRGNVGHKSMALKQRQKRNSPEVIAHADKASERLRRRFYKMTLKKGVNRNVATTAIARELACFIWGMMTEHVS

SEQ ID NO: 227022 - protein, 368 aa, unidentified
MTEIEVFVGLDVAKAKHAVSIADDGRAGEVRYFGEIGADAASVRRMVAKLEKPGRRLHFCYEAGPTGYGLHRQLTAMGHLCDVIAPSLIPRRPGDRVKTNRRDAIQLAKLLRSGELTPIWVPDEVHEAMRELIRSRDSAVDDLRRKRQSISSMMLRYGRIYPGKKTWGPRHEQWLHTQKFEHPAQQLVLQDLIWAARHAAERLDRVDSSIMEFLPKWSLAPVVDALQALRGIRAVTAATIMVEVGDLRRFETPRKLMGYLGLVPGERSTGESVKRLGITKAGNGRVRRALVETAWSYRHLPRTSKLKHYIHERVPPEVRDIALKAQARLCARYRALSGRGKKLTVTITAIARELVGFIWAIGRMIPST

SEQ ID NO: 227023 - protein, 324 aa, unidentified
MKNYVLNVGIDVSKSTLDICVLSSSSRESYDINNDRRSIQTFFKGYKGLDIRVCCENTGKYNWVLLEVLTDYNITCYQVNPLHLKRSIGLVRGKDDLIDAYRIGLFISKNYQDLTVYQPMDQDIMKIKVLLSKRDLLVKQRSQHKANSKEDKLFKEINLKFLEDYTTPLIEFLDVKIKELEGMIRKIIKENVLLKKQHNIIASIPGVGSIVSWNVLVKTNAFQNITNAKKFACYSGVAPFQFQSGSSVYSRPKVSHYADKSMKKLLHMAAMSAIQTNNDLRFYYQRKVAEGKNKMLVLNAVRNKIIQRIFAMIKSEKKYQFNLD

SEQ ID NO: 227024 - protein, 306 aa, unidentified
MGSVKGGGRSGHFMSALVCGLDVHKDSTYATILDPSGKIVNQTRMSNERVLSYLMHFDVSKVGMESSNQIAPLYRRLASRGYSVVVSHPKKTRYIAEAKIKCDRVDSKAIAELVRLDALPLAYFPDEETAVLREKVRRRAFLVRSRVKLRVKIKSVLTYEGLKWPSDHGLFTKKGVEWLHGLNLQPVESYLRVMKPLNDEIMLLSKELRGMAEEDEDVKLLMTIPGVGYYTALLMKSEIGDIDRFPFGERLCSYAGLVPSTHASGKTVRHGCITKEGSKWLRWVMVEAVQTHVHKYDTSITRAYNR

SEQ ID NO: 227025 - protein, 410 aa, unidentified
MLQTLIRCCAGLDVHRSIVVVTLLKSQPDEQITKKVREFSAFRRSLQEMARWLKVESVDLAVMESTGIYWKAVFEALEDEEIEAMVVNARHVKNVPGRKTDVMDSEWLAELARCGLLRPSFIPPRDIRELRLLTRYRSKLSGILSGEKNRLHKVLDDCGIRLGAVVSDIDGVSAREMVRALLEGDPPQEIAKLARGRLRKKLPELELSLDGRISDRHRLLLRTISSHIQGLVREIEAIDRQVFAAMEPYQEEWQLVQTIPGMDQTSAAMLLVETGVDMSRFGGGDRLSSWAGMCPGNNESAGKRKTGRSRKGNRYVRAILCEAANAARKTDSQFKGLYQGLVIRRGHKRAIIAVGHRILEIVYLLLSRKEPYKDPSVDYEALMVKRNAPRWIEALRKYGYISQHDHQAAL

SEQ ID NO: 227026 - protein, 359 aa, unidentified
MTQTTTDPLVLTTGLDLGDRTTHSCTLDPNRRVVERAKFSTNRTSLKHQFEGKPRQHIVLEAGSQSLWISHFLTELGHDVMVVDPRCIKAITASDRKTDRRDAETLARLALGVPEMLSCAQHRTLALQADVSVLRSRDLLVRMRTKMVTHVRGTLKSFGVKVPACSAGCFFTRAAEHIPESLVPALVPILAMLEDLEHRIRALDKTAAKLAQERYPASKVLRQVRGVGPLLSLAFVVSLGDPGRFARSRSVGTWVGLVPKKRSSGDANPQLRITKHGDRYLRRLLVISAQYILGPFGEDCDLRRYGMKLCLRGGGNAKKRAVVAVARKLAVLLHRLWVSGAPYERLRNSERAKQHEEVA

SEQ ID NO: 227027 - protein, 422 aa, unidentified
MHEERRWFVGIDWASQEHVVTLCDAQGNKIGEREFAHGGTGLSDMIAWLLKASGGEAGEIHVAIETPHGPIVEALLERGFNVYSINPKQLDRFRDRFTVSGAKDDSLDAYVLADSLRTDMHLFRKLIVSEPLIVELREWSRIDEELKAECVRLANRLRDQLWRYYPQMLELADDLSGEWVLDLWEAAQTPEKAARVREATVARILKSHRIRRFDAAHVISELRKPALSVAQGTTEAATAHIRLVVAQLRLLNRQLADAGLQLDRLCKKLAEPIAGDEGENVPGQRQEHRDVTILDSLPGVGRTVLVAMLAEAPDALQRRDYHALRNLCGSAPVTRRSGKSCLVMRRRACNRRLRNAAFYWAQTASQCDPTSRAKYKALRARGHGHARALRSVVDRLLYVACAMLENRTLFDPSFGEKKATAA

SEQ ID NO: 227028 - protein, 342 aa, unidentified
MSTVKNLTRIGIDLGKNVFHLFGVDEAGLPSLKKKLSRKQVLPFLANLQPCLVGLEACGGSHYWARQIAALGHDVRIMSPQFVKPYVMSNKNDYNDAEGIYEAVGRPTMRFVAVKTVEQQDVQALHRMRQAIVKARTAQANQIRGLLGEYGIILPEGIGWLRRRIPEVLEDGENGLTERFRRWLSELYQELRALDERVRQCTREIVELFRTDEACQRIGAIDGIGPQTATALVSAYGQAREFSSGRQFSASLGLVPRQHSTGGKPRLLGISKRGDTYLRTLLIHGARSVVRHATNKSDRRSQWIQRLVAERGTSRAVVALANKNARVVWALLSKGDQYHAAA

SEQ ID NO: 227029 - protein, 344 aa, unidentified
MDYYAGIDVSLEYSSVCVVDASGKVVREARVVSEPEALVGWFGSLGLELARIGLEAGPLSQWLYAAMKQTGLAVELLETRHVSDAFKAMPVKSDRNDARKIAQLMRLGWFRPVHCKSITAQEIRAMLTARKLVQSKLLDLENSLRGILRGFGLKVGKTTRTNFAGRIEELVKGHPNLQTIGQALLRARAALLAEFNSFEKRVRAMSRLHDKARLLMSTPAVGPIVSLTFACAIDDPSRFTSSKQAGPHFGLTPKKYQSGETDYTGRISKHGDASVREALYEAAHIMLTKPIKSCSGLKSWAMRIARRAGTNKAKVALARKLAVIMLRMLKDNVPFNPAAKPATA

SEQ ID NO: 227030 - protein, 425 aa, unidentified
MDFNQNQKINQVTERTLVIGIDIAKRTHYACFVDDRGRVLQKSFSVSQSQEGFNLFYQRILVAMKEHEKTEVIVGIEPTGHYWLNLAYFLEERGIPLVMTNPMHVKRSKELDDNLPTKHDRKDALVIARLIKDGRFSYPRILKDMEAELRVGSTFRNKLTEELGSVKNMIIRWLDRYFPEFTQVFPSFGKMAMAVLECTPFPSDLHQKLPDEILTIYREVEGLKSPQRPKALRLIEVAASSIGVTEGREMARIEIATMVRRYHQLEQDIESITEQLVKLVQTSVEYEWLSTVPGLGDTTIVDLLAEIGSFSHYEDPRQLMKLAGLTLRENSSGLHKGQKRISKRGRRKLRALLFRVMMPMIRHNEAFRKLHEYYTNRQVNPLRKKQSIVVLCGKLLKVLHGISTKHKAFDAQRMLRDIPSLAEAA

SEQ ID NO: 227031 - protein, 421 aa, unidentified
MKPQAPEAFAAFVGLDWADATHDICLQVAGAARREFLRLAHRPEGIDAWVCTLRTRCHGQPIAVCLELNKGPIVSALQNYDFLVLVPVNPLTVATYREAFTPSRAKDDPTDAELQVEILLKHRDKLTPLVPQSPTMRALAQLVEHRRRLVGDKVRLTNRLTSALKNYFPHVLQWFQEKDTAIFCDFLSRWPTLKAVQLARRATLESFFRAHHVRSADVITTRIEAIKNAVALTTDAGVIAPNTLLVQALVAQLRVTLQAITDFDTAIAQRAQAHPDFPLFDALPGAGAVFAPRLLVAFGEQRERFTSAEDLQKYAGIAPVTERSGKKSWVHWRWQCPTFLRQTFVEWAAESIRHSFWAQVYYQQQRDKGKAHQAAIRALAFKWIRILYRCWQERTPYDESPYLQALTRRGSSLLQNLAKAS

SEQ ID NO: 227032 - protein, 323 aa, unidentified
MTYIGIDISKDSFVAAFPKVSGYQTQTYPNTVKGIRKFIGSLSVTEHHCVMEATGNYGFLLLYLLDRQGIASSMVNPKQIKHFSRMMMTVTKTDPKDACMIAMYGEKMNPPVYKMPSEAVMLLKQKKTIIRQLKKQLTASKNLKSSLVMLPFQDKNGMKALDKTISFLASQIESLESELADLASSEFDRQVKLLTSIKGIGITLATALIVATGGFSYFNNAKQVSRFIGICPTYRQSGTSVHIKGGINRNGDASLRSLLYVASWSALRGNTTCKECYARLKANGKPSKVALIAVANKLVRQAFAVIKSDAPYVDGFVSTHQTK

SEQ ID NO: 227033 - protein, 391 aa, unidentified
MPMYFVGIDISKYKHDCCIISAADQQIISKFTIANDKDGFEQLLTALNSLSNPEDIKIGFESTAHYALNLELFLENAHHSFMEVNPVLIKEYKKSTTLRRTKTDSVDCESIARWLITVEYKPHSKGFYHAYSLKSLTRLRDRLIRQRSFYLVKITNVLDHTFPEFKPFFNKRLSKTAIYLLENYGSAEKMAHMNSTSYDKLRCVSRGKFSIQQFLRLKELAANTVGVNNSIFDIELNSLLTLYNSLCKEIKVLETEITRLIEEVHPHYMSIPGIGPISAAVIYAEYGDISNFSTPGQMLAFAGIEPGIDESGTESHGGRMVKHGSAQLRYVLLNACLPLIRFDITFATYYAKKRAEGKKHRVAITHVAKKLIRVIYALEKQDIDFNAQKLR

SEQ ID NO: 227034 - protein, 337 aa, unidentified
MKYCGIDLHSNNAVVAVIDDQDRVLYCKRLTNDLQLIMAALEPHRDELQGVVVEATFNWYWLVDGLIAAGLALHLANTAAIKQYEGLKYAGDERDAVFLAHIFRLGLLPEGYIYPPAERALRDLARKRLQLVQQRTLHILSIESLLARQINLRMNGEHVQRLDDKAIRAFGLPAHVERALMANMVVLRTLRSEIVALETILHHEARLRPEFVMLKTTPGIGNVLAATIMLETGTIARFASVGQFSSYCRCVDSKRISNGKKKGEGNAKNGNKYLAWAFIEAAAGALCYCPQARSFYDRKKARRLPVVAMKALAHKLARASYYMMRDGKPFEVKRCFN

SEQ ID NO: 227035 - protein, 350 aa, unidentified
MLIIGCDFHTRYQQIAMLDTDTGKLTERRLEHENGEARAFYASLPKPALVGMEATGHAQWLERMLAELGHELWIGHASEIRAGVVRKQKTDARDANHLLHLLLEKRFPRIWIPSPAERDTRQLLRHRYKLVCFRTSVKNQLHALAMSQGICRKKKLFTAQGREELEKLSLGPWASRRRQELLEMLDRFTPLIDELDRAVQQQAESHAEAARLMMHPGVGPVTALAFVLTLGPVARFRRSKHVVSYLGLNPKEHSSGGHQHLSSISKQGNTMMRWLLVEAAQTAVRFDPELLRLYQRLKFRRGASVAKVAVARKLAVKLYWMLRATASCAQMAPMQGSPGGTLVPQVGSRC

SEQ ID NO: 227036 - protein, 327 aa, unidentified
MPYTVTLDVHKRETQACIANATGQLIRETRFRTTAKSYKKALKKYADGPAILECVGFYRPVAAWLEQLGFDVHLAHVGKIPKPRLKTDKKDAHHLLRLWRGDALPEAYLPPQEVQRLRDIARHRMFLGQQSRRLKSKLKQDLNKHGHFLKTNPVETKKGREFLQKVDAPEIQSTLRLLDIVLAEQEELQARIEQETTELPEAQLLMTVPGIGAYTALLILGEVGDFSRFDTGDHLGAYAGLVPSQHQSGDHDRKGSITKEGNPILRWALVEAARNHVMHCPDSRLTKRYEEMAEKKGHAKAIVATARVLVTVLKAMVEKKEGFKVNP

SEQ ID NO: 227037 - protein, 461 aa, unidentified
MKKKRSNFRRRHPGRGRVIEVARKEQAWERINHHAAGIDIGAESHFVAVPPESTPTPVKQFGVFTRDLYALADWLEECGVKTVAMESTGVYWVPLYEVLEERGFEVKLVDAHKVKNVSGRKSDVLDCQWLQQLESYGLLAGAFRPADEIVVLRGYTRQREMLVKSASTHIQHMQKALQQMNLRLDNVVSDITGETTLRILKAILSGERDVEKLGEMRNYRCHASAREIAESLVGNYRQEHLFALKQAVELFEFYQAKISECEAEMGKYLQSLPHQREDEPPPLPKGEKHSRVSFNVREEAWKLTGVDLFRIQGLNAETVLRITSEVGVEVASRFPTEKNFSSWLSLSPNHKISGGKVLSSKTKVSRNRAAQAFRQAAVSVERSESELGAYYRRMKARKGPAQAVTATAHKIARIYYHLLKTGEEYVDGGARAYEEKYRERVVSNLKKRARGLGYELVAVAP

SEQ ID NO: 227038 - protein, 349 aa, unidentified
MTAPNPSADFIIGVDTHKHSHTAAVVNPLGAELATSTQPVTTAGYAKLLSFAQTHAGQQRLWAIEGTGSYGRGLTTYLLAQDESVIEIDRPARPARRNGAKNDALDAVRAAREALSRDRLAEPRCRGDRESLRLLLRTRNGAVDAYKKALCHLKALVVTAPAALHDRLTPLKTDALLKQCSRLRICPGHAAEYRTTVLVLRSTARRAQALDAEAEMLKNEIDELMNRLAPTLRAEKGVGAITGGELLCAWSHPGRFRSEAAFATLAGVAPIPASSGQMTRYRLNRGGDRQLNRALHTIVLSRLAHDDETKRYAERRQAEGKTPREIKRCLKRHLARRLFKLMERMPMPA

SEQ ID NO: 227039 - protein, 334 aa, unidentified
METHYFLGIDISKKTFDAALTCDGINFHPVQVDNQPKSIALFFRDLKTKLSSLKNLVVCLEHTGVYCQPLLDFIVKNDIKVSVQPALQIKQSQGMTRGKNDQVDAKRIALYAYKNRENLAFWKPLRHPLQKLKALLVTRERLIKVRVQLEVPISECEDFIEPSIRKDMIKHCRASIAALQNDIDKIEKSINQLIKEDSIINEQCALITSVPGVGKITALNVIISTGEFTKFREAKKFACYAGVAPFEHRSGSSIRGKTRVSKMANMTLKRLFHLAAMSAIQCCDELKAFYRRKVAAGKNKMSAINAVRNKLISRIFACMIGNRKYQKIYQHALA

SEQ ID NO: 227040 - protein, 414 aa, unidentified
MIGIVNKSCGLDIHKRFLIATILSKSGEKQQQRFDRNDEGILALKNWVVSEECDVVACESTSDFWVPIHDSLIKHLPVIIGNARDMKAFTHKKTDKIDSEVIAQLALNNMIQPSRVFPKDQREFRSYIRLRLALVRKRTDIKNEAHAILTSEMFNLHDVLADIFGKNGVAILSGISSGKTVDQIIESLSPNVRKKSSQIRETLDREISQSAAIRLQICLKLIKHLDDEIEVLEKEIFIYSYGKHKREMDILMSIPGIGEIGAATLISEIGNLRDFPSGDKLASWLGIVPNVYQSADKYYKGRITKRGSKVARWILTQIAQAAARKKNSRLKEFFNRKMKSIGYAKAIIALARKIVTIIWHLITNDEMYQDETGYQKGEVHKRKIVETEIFSVDERIKIISGIIAIMEKKEEEST

SEQ ID NO: 227041 - protein, 390 aa, unidentified
MSSSPAVAAASTIYLGLDVHKDSITIAVLPNEAKAPTRLERLPNDLPRLKRFLDRCARDGALAACYEASGAGYVLHRAMREWGYACTVIAPSLIPQRAGVQRKHDKRDACDLARLFRAGELTPVRIPSAAEERVRDVVRCRETFQREILKSRHYILKFLARRGFVFRDGTNWCTPHLRWLEHLTSETSPLAPADRLVFREYHALLAYKLQRRDELDRQIEHLALTPALAGAVARLQCFRGISLHGAMVLATEIVDWRRFERPGQLAAYLGLVAREYSSGDRERKGSITKAGNSHCRHVLVQAAWTYHYRPHLSVEIQRRQHNQPPAVVTHAWKAQQRLHQRYQHLAFRKRPQIAVVAVARELVGFLWAVMQDLPQDLPQDLPTAEGRTIA

SEQ ID NO: 227042 - protein, 428 aa, unidentified
MSEQPFDSFTHFAGFDWAHQEHQIVIVDRAGTIVLNLRFKEDAQGWASLREKIKDVSPGLAVAIETRCGPAVERLLEMGLAVYPLNPKVAQRYCDRKSCAGVKSDERDAWSFGDALRTDGHGWRRLQPQDPLTAELRLLCRDEIALIEQRTALVNQLRATLYEYYSAALEAFDDWVTPSAWDFVLTFPTPGELVDAGKRKQNNFLQSHKLYRPQTGDKRMEIFSRADKFASPSSAVTRVKSLLAVTLAKQLRTLQAQLHEYRQRITQLFNDHPDKDCFGSLPGAGPKLAPRLLGELGADRQRFDSPDALRCYAGTAPVLKQSGKTRFAVLRRACNTTLRATVHLWADLSRKRCAWAQAYYRQKKSQGLSHASALRCLGQRWLKILWKMWQENMPYDEARHTQNQVQHGSWVIGLTVPSNPSKMTLASA

SEQ ID NO: 227043 - protein, 410 aa, unidentified
MYGKAGPMIYAGIDIAKNDHVVGATDEHGRDASKPMRFANSAGGFDRCVAYLEGLAESKSDLLVGMEATGHYWLPLFCRLQDAGYAVVVINPMRTDAMRRFKGSSRVKTDIVDCVLVAETLRCGGFQPSRLGDEAVIELRQLTRLHQALKESVADLKRQVIVAFDQVFPEYDSVFSDTFGESSKAFLKRCPTPEECLAVRADSLAKTLERASHGKLGRSKADEIKGIAKASCGIGLATSAFSFQIKLLIDQIDFIEGQASEVEARIRAGIEKVEPLILTIPGIGYTLGAQIVSEIGDVRRFRNASSIVKYAGINPSISQSGKFSSEENHITKQGSPYLRRALYLAAMAQLKLKSPFYDYYAKKRADGKSHREALVAVARKLVHVIYAVLSKQEPYDPNAAKSPELASRSE

SEQ ID NO: 227044 - protein, 401 aa, unidentified
MNAVGIDVSKGKSMVCVMRPFGEVVLEPFEVLHTAQNLHDLAEKLKALDGETRVVLEATGNYHKPVAFVLHDAGLFVSVVNPVLIHDYDNNSLRRVKTDRKDAVKIANYTLDKWTRLRQYLPEDDTRLALKNCYRQYQQAVVIRTMLKNNLISSLDLTFPDANKLFTSPAKSNGCEKWVDFIGDFWHSECISSLSANAFAKKYLKWCQKHGYVFTRSKSDEIYACAVNSASLPKSPTSKLLIQQQVAQLKAVSQSVAAFRQEMLRLSQQLPEFDTVMEMYGVGPSLGPQLMAEIGDVRRFSSKKSLIAFAGIEPQPNDSGKVVGNDKGISKVGSAVLRRTLFLIMTVILQTQPQDEPVFQFMNKKRSEGKPYKVYMMASANKFLRIYYARVKAVMDSERSQ

SEQ ID NO: 227045 - protein, 426 aa, unidentified
MTNISTTFAALVGIDWADHQHDLCLALPDGSSMEHSTIEHTPEAIAAWVTELQKRFGCGQIAIALEQSRGPLLYALCRYANLVLYPINPKSLARFREALKPSGAKDDRSDAALLVQLLLHHRDSLPVWLPDDAPTRKLAALVEARRGFVNLRTQLLNQLTAALKGSFPQALQLAAEDLSSRLATDFLLKWPSLSSVQKVKPATLRAFYYGHNCRRETLIAERIELVKSAVALSDDEAIVAPSVLLIQTLARQLAALRPAIAEYEKQIDLLFAAHPDQPIFASLPGAGAALGPRLLAACGSRRERFPDAASLQRASGIAPVTERSGKGQHWVHMRWSCSKFVRQSFHEFAGCSIHFCDWAKCCYDQLRARGKGHHAAVRAIAFKWLRIIWRCWRDHTVYCDMTYAAQLQKRGLRMYANLTTPHVNNL

SEQ ID NO: 227046 - protein, 366 aa, unidentified
MKKSITPIGTPVGIDVHKRRCRVVELQKGKVQVRKSIANTREDWRELLTELPPDAEIGLEVSTAGYFAMSVLEEAGWRERSHWIHTAGIDSNRRQKNDRLDAERLARKLAAHHLDPLPEAWFPPPEIRALRLRARARCGLVALRTQCKNHLQSLLGMQGLQAPGSDPFGAAGQRWLAEQKLPLPLTESLPQIQRLLKLLEEEIKTSEQYVRAVEGQFPEIALLRTIPGIGPILAPLIWSELGTMERFRSAKALANDTGLVSSFYDSGDVQVSGGITRQGSRWLRWAFVTAASVAMQYPNPFARRYHRLRRGKKPNVAKAAIAHSLARCAYGVLKHGCPYREDRWGRKVGAREQETRAGARSTKTVV

SEQ ID NO: 227047 - protein, 352 aa, unidentified
MDRYVGLDAHPTSCTFGVMGPSGKRLKSMVVETNGAALVEAVKSIPGRVHLCLEEGTQSAWLHELLSPHVAEAVVAVAPENKGAKDDLRDAWARADELRTGSIRTRVYKAPLHLAALRNAVRGYGFAVRDAVRAMCRLRSVFLSRGVAVNDGIYNAKGRLRWLGKLTPPHRRLAESLGRQLDQLVPLREEAEKWLLEEAKTHPIIRTLATAPGMGPIRTAQVVAITANPHRFRTRRQYWSYCGFGIVTRSSSDWVQGKDGRWERSQVLQTRGLTRKRHPLLKAVFKGAATTVITQLPEHPLHKDYERMLAAGIKPNLAKLTLARRIAATVLSMWKHQEVYDPQRHRAVSDKA

SEQ ID NO: 227048 - protein, 340 aa, unidentified
MNEITRVAIDTSKSVFTLHGVDGGGRAVLRRNLRRKDVLAFFEKLPPAEVVLEACGGSHYWGRSLAALGHRVRLIPAQYVKPFVKRGKNDRNDAEAICEAASRPGMHDVGIKSAESQGRAMLLSARELLVRQRTQMVNALRGHAAEMGLVAAQGDKGLAALRAAIAGDASLPEPARETLRLLGSEVDRIEARLAEADKRLMAQLKVDAGARRLAEIPGAGPMIALSFALRVDATQFASGRHFAAWLGLVPRENSTGGKQRLGGISRAGDERLRQLLVLGATSVIRYAKPGRPGVSAWLLALLERKPRKLAAVALANKMARVIWAMLTSGEAYRRKTPVAA

SEQ ID NO: 227049 - protein, 348 aa, unidentified
MVVIGVDSHKRTHTAVAADGTGRKLAEKTVVATSTGHLELVRWAGRFADRSWALEDCRHLSRRLSTDLLIAGEAVVRVSPKLMAGARRSSREPGKSDPIDALAVARAALREDLPVATLDGPDREVRLLVDHREDLVAERTRAQNRLRWHLHELDPGSEPVTRSLDRSVVLAGLERDLAVAPGTVGRIARELVTRIRELTATINGLEREIARLVADLAPSLLALTGCGPLTAAKLIGETAGVGRFRSKAAFARHNGSAPLPVWSSNTERHRLSRTGNRQLNVALHRIAITQLQREGPGKTYLEHRRAKGDTKTEAIRALRRRISDEVFRRMRHDETNRAATRAPLAAAA

SEQ ID NO: 227050 - protein, 348 aa, unidentified
MSKHSVPAGEVSGLLRRFAELRRKAAARTGRDFPIIVIQEAGLDGFWIHRVLQSEGIESHVVDAASILTSRRRRRAKTDRIDGETLVRTLMAFKRGEPRVCSMARAPTPQEEDRRRVCRERRTLVGERVRHVNRIKGLLFAQGVFGYEPLRKGRRERLEDLRTGDGRPLPVHLKAQIMRELDRLEVLLEQLKTVEAERDALLKPATDEAASPAAMLARLKGIGPETAAVLWSEGLFRQFDNRRQVAAYAGLAPTPWQSGSIDHEQGVSKAGNPRLRTTMVELAWLWLQNQPTSALSLWFHERVRRLGGRMRKTTIVALARKLLIALWRYTTAGVVIEGAVMKAAPATI

SEQ ID NO: 227051 - protein, 339 aa, unidentified
MYPFYLGIDLHLKRTYMVLMDAKGEVIDKERISNKEIREYLQEKVPRETYAVLEATRNWPFMYDLLNEHVQQVDLVHAKGVRAIANAAVKTDQIDASTLAHLARMNYIPKAYAASKETRDLRQLLRHREWMVNQRSKAKNRIHAVLAAYNLVSPVTDLFGVAGREYLRKVMEKELRPSARQVVEDHLAMIDHLGERIRSLEKSISLNDKQDHIVNILKSMPGVGKLIAMILLAEIGDISRFHSPKSLCSWAGLTPKVHNSDAVVQHGHITKEGSRYLRTAMVRAATVSCRVSPKWYRVHEHMALRCGRRAARVAVARRLLTVIYYMWKRDQPYQENYGQ

SEQ ID NO: 227052 - protein, 402 aa, unidentified
MTAPARPAPLVVGGADTHADTVHVAAITTLGREISDREFPTTAAGYRAAVAFLTSHGPIDQVGIEGTSSYGAGLARAVMAAGLQVIEVNRPNRADRRRQGKSDPLDAYQAARAVLSGRATSDPKDQSTEAIRSLHNTRRSAVKASTAATNQITAMLITAPEPIRAKYRALKGQPLIKALARCRTTVPDPVDAAVLTALKALAHRHQFLTTQSDELSTLIDALVTTANPALRAAYGVGPDTAAQLLITAGANPDRLRSEASFAALCGVSPVPASSGKTTRHRLSRGGDRHANNALYRIAMSRMAHEPRTRQYVARKVAANRSTKEILRMLKRAIAREIHRLLTHKVALPEYADLRPARQAKNITVTAAAKAFNMWPAAISRIELGQRRDDDLANRYRTWLQAA

SEQ ID NO: 227053 - protein, 367 aa, unidentified
MLYLGIDQHKQQLTVNVRSEEGLVILKRQVSTQWEKVRAFFADLAEKARPEGGFMAIVEVCGMNAWLLEMLKSYGCAEIVVTQPTSRSKQKTDRRDAGELSHGLWVHRQQFVGGKHPSGMRRIEPATPQEADDRQLTRLRATLTKKRTAVLNAIHKILRKHNREQECPTKVFQTQKVRRWLAEMELPGVDRLEMNLLLPQWAMFDEQLEVVEAKIAGRAAADEQARLLESMPGMGHYSAVAIASRIGRIERFKGPGSLANYFGLTPGCRNSGEATNRLGSITKRGSKIVRYLLGQAVVKVLRFDAAMRRWYKRIRQRRGSKIGRVAVMRRMVTIIWHMLKRREKYHYELPLKKHREFEAFGGEPVAA

SEQ ID NO: 227054 - protein, 403 aa, unidentified
MSPEHSIDIFLGLDVGKSEHHACALDRDGNKVFDKPLPQLESELAGVFHQLQELGTVLVIVDQPNTIGALPIAVARDCGCEVGYLPGLAMRKAADLYPGRAKTDKRDAFIIADTARTMPHTLRAVDRNDEVLSALKMLSGFDDDIARDCTRTVNRLRSILTQIYPSLERVFAGSTLTRTPILELLIHYKGPQGLKRAGYQRVLNWMIKHTRKDPTPLVDDIFAALKAQTVTVPGSDAAELVIPQLAANIKALKEQRNTIAEQVEEMLADFPLCEVLMSMPGVGIKTAAQILLAIGDGSDFDSAGHLAAYAGIAPVTRRSGSSIRGEFPARSGNKRLKNALFYSAFAVIRSHEPSRRYYERKRAEGKRHNAAVICLARRRCNVIYAMLKNKEFFREIPPRPVAA

SEQ ID NO: 227055 - protein, 448 aa, unidentified
MTSSLQCIKPNAAGIDIGSKSHFVAVPQGRDEVSVKEFKFFTQDLYHLSDWLKKCKIDTIAMEATGSYWVPLYDVLEKNGFEIYLVNGRHVKNVAGRKSDVQDCQWLQQLHSYGLLKKSFIPDSITKQLRHLVRHRDNIVRSSARQIQIMQKTLVEMNMQLHNVISDISGDTGMAIIRAIIAGERDVKVLAEYRDTRCKNSKGVIEKSLEGNYKEESLFTLTHAMQTYDHYQMQIRECDVKIEEQMKKFSDKSHGKEVPKAKREYKKNKYNFDIQSTIWKSIGVNLMAIPGMNTRVAMTIISEIGPSVSDFRSAKHFVSWIGLAPNNKVSGGKKLSGRTVSTSNKIKEVIRTAVQGLERTESSLGRFLKRMKGRVGAPKAVTAVARKIAVLVYNIMSHKTVYDPEYGAEFEQQYKYKYEQRLKKQAKNLGFILVPIMCNEGLINATIT

SEQ ID NO: 227056 - protein, 349 aa, unidentified
MLHVGLDLSRRRLDVCVLSDEAELVEELAAPPDPEGLGYLVSKLARHRQPVRAVIESMTGARFIHDTLEQLGWDVLIADAQRVKGLAPLACKTDRVDARVLAVLSHRNLVPAIWLPDPRVRAEREQARFRLHLVKHKSMLKHRIHATLMTFGHPCPVTDLFGLEGRKLLERLELPQPWRETLDASLYLIDYLESEIDAIERDLRATGADHPYVPLLLTVPGIGWVLAFTIASEIGDISRFPSAKKLVGYTGLCPRVRQSGDSDRRGPLSKQGPRYLRWAMLEATMHALRHPAYRDRYQRTKKRLGKQRGAKVAQVELARKLTEAIWHMLTTNQPFDPAAAGGATFRLAA

SEQ ID NO: 227057 - protein, 369 aa, unidentified
MARNGTLAKSQELQPSFHATTEQITIGIDLGDRFSHCCVLGPDGKILTEGRLRSTPETMARHFQDLPPSRIAIEVGTHSRWVSQLLEQWGHEVIVANPRNLRMIADNIRKSDRVDAHMLARLARVDPKLLSPIVHRKQESYPDLIQLKARDLLVKNRTRLMNAVRGVLKSAGLRVPASGTSCFPSKAAMCIPEELKVSLTPLLETISHLNKQIYLLDKAIESTAHNRYPETYRLRQISGVGSITALQFVLTIGDPGRFAHSRDVPAYLGLTPRRHQSGSIEQQLRISKAGNKQLRSLLVQCAQYLLGRFGPDSDLKRWGTRMCERGGKNSKKRAIVAVARKLAVLLHRLWVTGDTYHPLYSVGISSVAP

SEQ ID NO: 227058 - protein, 341 aa, unidentified
MRVTTVGIDLAKSVFQVHGVDANDMVVFNKPLRRLQVLPFLAELAPCLIGMEACASANYWARELKKLGHSVRMMPAKDVMAYVKRGKNDAIDAAACCEAVRRPTVRTVPVKTPEQQAQLMQHRVRELLIGQRTQAINALRSHLAELGIVAAQGYEGLKVLLAIVADSSDTRLPEHARASLSALVAQIASCQAEIGAIDKRLLAQHRKCEDSKRLETIPSIGVIGATAIVATVPDASIFKTGRDFASWIGIVPREDSTGGKRRLGPISKQGDRYLRRLLIVGAFAVLRQARAHPEKYPWVTQLLARKPAKVVAVAIANKTARIAWAVLTKKEIYRVQTNAAA

SEQ ID NO: 227059 - protein, 315 aa, unidentified
MVDVPCFMGIDVAKAQLDIAVRPSGERWAVPNNTDGVATLVEQVQALHPTLIVLEATGGLERAATAALATAGLPVVVVNPRQARDFARAIGQLAKTDALDARALAHFADVIRPTPRPLPDAQTQELRALLGRRQQLIVMRTAEQNRLAGTSGRLQTDIEAHITWLNERLATLDDDIETLLRASPLWRENDDLLQSAPGIGPVCARTLLLELPELGTLNRRQIAALVGVAPLNRDSGTLRGRRTIWGGRAHVRTVWYMGTLVATRYNPRIKAFYERLLAAGKVKKVALTACMHKFLTILNAMLKHRTPWQAQEVQG

SEQ ID NO: 227060 - protein, 336 aa, unidentified
MKKECNTVSFKNQVIYVGIDIHKNSWQVSIRHCRHQLANFSMNPDALKLAEHLRRNYPEAEYRSVYEAGFCGFEIHRSLCGLGILNIVINPADVPTSGKERANKNDGLDSRKLARELENGSLEGIYIPQEDNLVLRNLTRRETQLTGNITRVKNRIKSHLYFNGLKFRSWAGSSLKIMEADAVKRHDFALCSLLRELRFLRLEKLQVVRDEKECLKFLNREKTQVNLQSIPGIGFRTAVVLQSELWDLKRFPDKDHLKSYVGLAPRLVGSGEHEEVKSAGNRKKKQLHYLLIESAWRAVRFNLEYRARYGLQIAKGTNPQRAITIIAKKLLMSHLS

SEQ ID NO: 227061 - protein, 387 aa, unidentified
MEVRMVNTPSADSNNEPVACYVAIELSKSGWLVGFLTPLSDKTGRYQVKAGDAQALLDLIERVHTRVARQLNRPVEVMSCYEAGYDGFWLHRVLEAHGIHNHVLDPASLQVNRRARRAKTDRIDVDRMLRALIRYLRGEPEACSVAQVPRVEEEDAKRLHRERKRLVVERVQHVNRIKGLCAAQGIYNYAPLRPDRWSQLEKLRTGDGRSLPARLKSEIVRELKRLELVLEMIETVEAERDAIIKDPRSRHLNADKIKMLARLRAIGPEFATSLTGEVFYRKFANRRKLGRYVGLDGSPFRSGSVERDQGISKAGNPVARSMMVELAWTWLRYQPDSALSIWFRERVGNLKGRPRRIAIVAMARKLLVALWRYLETGVIPTGAVLKA

SEQ ID NO: 227062 - protein, 420 aa, unidentified
MQVCVPADRDGDCNRTFDVYTEDLHYIAEWLKACRIDTVAMESTGIYWLPVFRVLKDAGFDVILVNASDVKNYSGRKTDADDAEWLMMLHSYGLLKPCFQPENIARTMRNLIRHRDNLIRSASREVLHLQKAMEQMNLKLDNVFSDILGKSGQAIIKAIISGERDPKKLSALADPRCKTSKEEIEKSLQATWDEEHLFEMKQSDTLYQTYQQLIAECDDKISEIATKYAAMVDAPKAELLRSGKYNTKKNQIGFDVEKAAFELWGVNVMRIPGMSRASLLRLLGELGQNFTTKFADVSHFLSWANLVPNNKISGGALLSSKVPKKKNPVGIVFRQAANTLKAAKCPLGDYFRHIRAKGGHLQAMVATGKKLASIFFLMVQRKVEYDENIYANQRKAELQNKVLHLQKRLTRMQLELANCG

SEQ ID NO: 227063 - protein, 361 aa, unidentified
MSLSSWLVAGLIPGVSREPLKKIDPDPERLLRLLYRWRDEAVAAGSKINRIAVAYETGRDGFWLARWLRNRGIDAHVIHATSVAISREHRRAKTDRIDTAMLRRGFLGWLRGEPGHCSMAVVPSVAEEDAKRPHRERDTLIHERTSIVNRMKSILIQFGVRNFNPVLRKANEKLDAVRTPEGIPLPANAVAALRRLMDRLRVIKEQVKAIEQTRLQRMQRNPADRMNAMVFLLVRIIGMGVETAEQLVREMLFRNFHDRKAVARYAGLTGSPDESGSKRREKGLSRSGNGRVRNILIQLSWRMLQFQPDSGLVIWYKKRTESARGSRKPMIVALARKLIISLWRYVNTGVVPEGFELRSAA

SEQ ID NO: 227064 - protein, 342 aa, unidentified
MKEFIRIGVDLGKRYIQIHALESKDGRAVKRKLPRSKFLEFFADVAPCLIGMEACGSAHYWARQLRAMGHDVRLMPPAYVKAYVKRGKNDAVDAAACCEGVSRPDMRFVPVKSEEQQATLTLHRTRELLVRQRTMCVNALRGHLTEFGLVAAKGIGRAGELIDMAGNDAELPEIAKSVVKIFAEQLAAIQALIAALEKQIAGVHAQSPMSQLLAGIPGVGKIIASAIVASVPDPQVFESARDFAAWLGLVPRQNSTGGKTKLGPITKKGDRYLRKLLVLGATSALRVAGRRKDALRDWLAALLEKKKSARLASVALANKLARIIWAMMTSGETFRKDMFEPA

SEQ ID NO: 227065 - protein, 421 aa, unidentified
MIHECVAGLDVHKDSVVACFRCISGRAAKRECRTFDTSTEGLLALRDWLTEGGCQLVAMEATGVYWMPIYKILGDGDYCVVVANAAHIKAVPGRKTDMNDAMWIADLAAYGLIKASFVPDEEGHELRTLMRTRKQLVREQTRQVQRIQKTLTEANIRLDSVISDIMGLNGRRMIEAMIGGQRDPRKLAALADKRIKASAKELYDALHGRLTDHHRFLLKLHLGQWDALDLSVQTIDREVAARLVKLDEARKAGEARFSALIELLSTIPGVSRISALTILSEIGYDMSRFPTVGHLIAWAGLCPDQNESAGKRKRSRLRKGAPWLKTMLVQCAWAAKRATKSYYRAQFYRLQARRGPQKAICAVAASILTAIYHMLKTGTPHEDLGIDDFDRKTPETKAKRLAAQIAKPGYKVTLTPAAQAA

SEQ ID NO: 227066 - protein, 338 aa, unidentified
MALYCGIDLHSSNCQIVVLDQKLDTVAERRHRNEFGEIVKFLEPHREELVGIAVESTRNWYWLVDGLMEAGHRCHLANTSAIQQYEGLKYTDDRHDARWLARLLALGILPEGYIYPRQERPWRDLLRRRAFLVRSRTAQLLTIHSLFEQYTGRSVKANEMKRWTSKSVAEQTGDPQVALAATAMLRVVNVMTTQIRHLEKEVVGHVKLREEFELLRTARGIGEAIALTIMCEVGDIHRFPKVGNFASYCRCVKSERLSNGKRKGSGNKRNGNPYLSWAFTEAAHFAVRFEPRAKSFFDRKSRATNKIVAIRALANKMARACYYVLRDQVPFDPQKAFG

SEQ ID NO: 227067 - protein, 366 aa, unidentified
MKKISTVEIERVQIFKENRLTIGLDLGDRASHYCILNETGEVILEHKVPTTPKGIEEVFSRIPRSRVALETGTHSPWVSRQLTQLGHEVIVAHARNVRLIGESSRKDDQLDARMLARLARIDPGLLGPVRHRSAKAQIHLTVIRARAVLVSSRTALVNAARGLTKSYGQRLRKCGTEQMNRESTKGMSEELRDVLDPLLREIESLNERIAEYDGRIEKIAKEIYPQVAVLKQVKGVGPLIALTFVLTLDDPNRFRRSRDVGCFVGLRPERRNSGMSEPQLHISKEGDRYLRTLLVQGAHYILGPFGQDSDLRRWGLKLAERGGKNAKKRAVVAVARKLAVLLHKLWVSGEVYEPLRNNHKVVAAVA

SEQ ID NO: 227068 - protein, 344 aa, unidentified
MEHFAAMDVSVKETSVCIVEDTGKIVREVKVASEPDALLPVLTNPLYRFKRIGLEAGPLSQWLFSALAEAGLPVICVETRHMRAVLQAQINKTDRNDARGMAQMMRAGLYRPVHVKTLRSQKLRMLLTHRKLLQSKAIAIDNDLRGTLRNFGLKVGVVGASKFEARIRELVEDLPDLAELVEPLLVVRRTVREQIGILHARLLAIVRKDQVCRRLMTVPGVGPVVALTYRVTVDVPARFRNSKSVGAVFGLTPSKYQSGEIDRTGGISRCGDEMMRVMLYEAAHIMLVRSTKWSWLKAWAMKIARRRGMKKAVVALARRLAVILHRIWVDGSEFRWTREQAVAV

SEQ ID NO: 227069 - protein, 365 aa, unidentified
MKFLGIDLHSNRFTCCFIYDDGFKKISTFNIDPDSLKNFYSLLDENMYVMIEASTNTFKFVELIRDRVRDVFVANTHKLRLISMVNKKTDRIDAEKLAIFLKMQLVSGEELIKSVYIPEQRIQDLRSLFTSYKLIKKEIGAIKNRIHSILRQNLYPFTKEYIFGKKNREVIQNLDMDDVADFQLHFFFNQLEQLEKGVQEIEDRIYIIGLEYTKEIDILTSMKGISVMTAIAIIADIATIERFPNSKNFTSYLRSAPGIDSSNETTRVTKTTKFGRKLSVTLISQSLNHFRDSNTKFSRWYNNKTPSHSKGKLSLALCRRVFAEIYQMLNKEEYHYFRDEEFHNKKMDKYYNFLAKNGIVFKKIA

SEQ ID NO: 227070 - protein, 295 aa, unidentified
MPKYSTAFGMDVHLRSTTVCALDADTGEAVTRRFPGNPWGEIAGWMDRFPGPSLAAYESGYLGFAPQRELAGLGVECVVAAVSKIPRSAADSASKNDRNDAARMAKAILAHDISPVWVPSPEVEGIRDLAGAYDGATARLATAKQRLLAFLARRGFVYGGTTPAGNPRKYWTYDFLRWLDKVRPEDDGGVRALAALRNEVEAAAEARADLLSEYRAAVDASPIAAEVAALQSIKGCAFALAAAFSAEVGDFTRFRSGRQVTAYFGLAPSQRSSWRLRAARRHQRCGQRAREEAGR

SEQ ID NO: 227071 - protein, 398 aa, unidentified
MEEISKRTVLNTLYVGIDVDSKKNVIYMMDFNQICLASFSILNDINGVGVLKDKALEVLKKRDDLQFITFVLESTSVYAFHTATYLSNNEELLVYSPKVYCINPKVSSNYRKSFSDMNKDDAIDARLLADIARVGRCDKLNPWRGSQLVALQRLTRHRKHLSDMLAAEKNYVLNNIFLKFSGLLTANSQDAPFSNVFGTTSSFILTDFMSTEEIVDTPLEDLVSILNEKSNKHFSNTEETAKLLKQAAANSYRLDKVSSEPINLAIASSLNCIRSFEAEIKSVDKSIMQQIKGLNDTEYMSLTSIKGIGKVFAAGIIAEIGSIDQFRNDDALAKYAGITWRKTQSGSFEAEDTYMTKTGNSYLRYYIIEAAQHVGWHVQEYNNFYTQKLNVVSKHKEV

SEQ ID NO: 227072 - protein, 316 aa, unidentified
MPTVRSKVFVGADVSKSRLDIQCSDSRFLSIPNESRAIRRLIGRLQRAEPRLIVVEATGGYERKLVYGLLDAGLPVIRVNPLRVRRFAQSRGILAKTDRIDAGVLADFARLNADHLRPMQPIGDNARMLKELTARRRQLVEQCVANQSQMEQATLRSVRHSISRTIKHLRSEIATLEAEIQQLIEQDPQLKSRQEKLLRVPGIGPRVSRILVSELPELGELDRRKIAALVGVAPFNDDSGSHSGHRHIRGGRATVRAALYMATLVATRKDPVIHGYYGHLKSQGKPKKVALVACMRKRLNYLTSLLRPTPPGDGAK

SEQ ID NO: 227073 - protein, 412 aa, unidentified
MEVVYACCGGLDVHAKTVMACVIYKGRKEIRTFATMTDELLQLGDWLRSVGCTHVAIESTGVYWKPVFNILEGLLTVILVNARHIKAVPGRKTDVRDCEWLADLLRHGLLKASFIPPPEIRELRELIRYRQTVVTEHTAVANRIQKLIESANIKLGQVASEVLGLSGRLMLRALAVGETDTGKLAELAQGKLKSKKAELRRALAGCLTPLQRWVLTELLTRVEELEAALTRVETRIGEEVTACADPFVPDAVELLQSIPGVGVRTAQTIVAEIGVDMGRFPSAKHLASWAGVCPGNHESAGKRKSGQPTKGNQSVRTIWVEAAWAATHAKGTFLQAKYQRLVKRMPKQKALGAIAHRLLVISYHLLSRRVPYAELGTAPLDQQQVVRQRRRLVEQLIGLGVKVTIDEGEVVA

SEQ ID NO: 227074 - protein, 401 aa, unidentified
MTPHSIVLSLLLLGWKVTATSKGAWDVTMNGAEGPDTLVEVILGVDTHLDFHVAVAVDHLGRRLGESSVPTTVKGYERLLCWAKSFGPLRCAGVEGTSSYGAGLARHLKARGIEVLEVEHPKRRRPSPRRNVNSDPSDAERAARAVLAGETSGVPKSGEGRVEMIRALRAARCSAMKARTQAANQLQGLRLTAPEQLLKRLRGLSTKELVCVAARFRLGDDPRDVRTATKFALRSVARRYETLSAEIAELDAQLDRLVGQVAPELVSLAGIGTENAATLLIVAGDNPQRLRSEASFASLCGVAPIEASSGKVVRHRLNRGGNRDANRALYMICLARMRRERRTKEYVARRTTEGKSKREIIRCLKRYVAREVYRMLICCGVRSSTIGPKNEAHIAAGNSAA

SEQ ID NO: 227075 - protein, 355 aa, unidentified
MSGEKYIGLDVHQATISVAVVDSQGQVVMESILETKASTLLEFLAGLRGSLFVTFEEGTWAAWLYDLLKPQVTEVLVCNPGQIPLLKHGNKSDKIDARKLAERLRRKDLKPVYHGETGVGMLRELARSYLTVVQDLSRVMNRLKARYRSWGIPCAGRDVYYTRHRREWLEKIPEAGTRRRAEPLYQQWDMLQPLRLQARRELLAESRKHAITAKLRKIPSLGPIRSALAVALIQTPHRFRSKRQLWTYSGLGLETRDSGEYHFLKGQPRRRKKQATIRGLNKDYNHDLKGLFKGAATRASVKPGPFQEFYQRSLAKGIKPTMVRLTLARKIAAITLTRWKKGEDFDINKLNSQAA

SEQ ID NO: 227076 - protein, 370 aa, unidentified
MLDTTIFVGLDVHARSIKAVSLDVMTGEVRCATFGYDAGAVAEWVRSVDPKAKCVYESGVTGFDLQKRLSGLGVGCVVGAVSKMIKPSADRRRKNDRNDAEFLARMLSVGNVVEVWVPDDECEAARDLTRALEDARDDLSRSKQRLSKFLLRHGLVFDERTPTGRRKGNWTRAHWSWIESIRFAEGADNEALAYYVDAVRRAAEDKARLEGLVEAEARKPRWRKRVDSLRCLKGVDTATAADLVFEAGEFSRFRNARSFAAWVGLTPSEHSSGESDRRGAITKAGNKHLRKALVEAAWHYLTCSARPKEPARGQAPDPGARRHAAKGVRRLVERRGALLARGVHGNKANVATARELACWVWAVGLMAEEA

SEQ ID NO: 227077 - protein, 411 aa, unidentified
MIKENYIYVGIDLHKETHTAVMIDCYNQKLGEITFPNRPADFPKLVAKVKKCNTDGKTIVFGLENAYGYGRALAVWLIDKGYLVKDVNTAISHRQAKHRGAMYRKSDSDDAEAIALATLNMLDKLPDAYPNDAYWSLGQLVHRRDNIMKQRTRLVNQLHEQLCIAYPSYKQFFNDISRPTALYFWEHYPSRKYLKGKSVEDLRAELVPVSHNKCSTKTCEKILDAVASDKVKNNAYQDARDMVTLSIVSDLQHYDKQLAEVDKMLEQMYKMLGCTLTTIPGVNVITAVKILAEIGDIKRFSNANKLAQFAGIAPLHLSSSGKGKDVATKQGNRRLQATIYFLAIQMVQVSSKDTPRNSVVRAYYEKRKAEGKTSQQTLICISRRLISIIYGMLKNGTEYRMPVVENAGENR

SEQ ID NO: 227078 - protein, 375 aa, unidentified
MKDVQKFVGLDVSKDTIAVAIADSGRGEPRFHSTIQNKPETIRKLMKKLGNPEDLLVCYEAGSSGYGIYRLLLSMDIECMVVAPTLIPKRSGDRVKTDKRDSIRLAQLLRAGELTSVWVPDEDHEALRDLIRARHDAREDLQSSRQRLVHFLLRHDIRPPQGVRNWTVKHREWLNKLTFERASQRIVFQEYLHAIYEVEERMKRLETQIHEEAIQSEHAPVIQALQTLRGVAEITAVTLVAEIGQFSRFSNPRQLMSYAGLVPKEYSSGSNRWQGSITKTGNSQIRRSIVEVCWSYRHRPSLKGELLKRQEGQDPEAKRIAWKAQHRLHMKYHRISAKGKGGKVAVVAVARELLGFIWAIGCAIENKQVSDSNVA

SEQ ID NO: 227079 - protein, 489 aa, unidentified
MAKKPKKQRVAGGVDTHSGTHHAAVVLINGRRLADAEFPATAAGYAELLAWMRSFGRLHAVGVEGTGSYGAGLARHLRGQDVRVVEVNRPDRRQRRAKGKSDPLDAYAAAEAVLAGRATTVPKAGDGIVESIRALHLVRASAIKARTACTNEMKALIITAPAQLREHLRARAATSLAQACSRLQPHEDLADPAGGVTAALRRLAARYQALTTEIADADTQLAALVKQARPDLLAVRGVGVETAAQLLSTCGDNPDRLHSEAAFASLCGVSPVPASSGKTKRHRLNRGGDRQTNRALYMIVITRMGHDAHTRAYVARRTAEGLSTKEIIRCLKRYVARELYKILTCSHVNAQDPQQLDKHRSIHQLSSLLTTSGRTVRRKTSKGQMRRVLTRQPLPEPSCRNRADKNPLEADGASGRHLPRVMLPVSARTRTSPAGWPADRDRIEALGRSRLGRCQVDMATRAVRCDVTAWWAWIASRVSQVNPMVIVVR

SEQ ID NO: 227080 - protein, 393 aa, unidentified
MQRISVGIDIAKEIHWITAIDADGVVLIDRKLLNTPTDIAALADQLTSLSGAIRIGLDVMGGIAGLAEAMLAAAGFILVHVPGLAVNRARQGTVGGENKSDPRDARTIADQVRTRADLRRIEPTTEIDLEIRLLVGRRRDLVEAQTQRLARMHDLLVGIFPGLEACLDLKTKGPLHLLTRFVTPAELRDAGKKRLIRHLQAAGGLPNVEALADRALAAAAEQAIAVPAERMTARLIRELAAEALASRSRLIELDRELEALLDRHPDAALIRSLPGMGAVLSAELIAEAGNLSRFRSADALASAAGMAPILRQSGRSRFLRRPIGGNKGLKRVFYQSAFCSLGHDDSRAFYDRKRREGKRHHQAVIALARRRVNVLWAVVQNRTPFQTGFKTAA

SEQ ID NO: 227081 - protein, 370 aa, unidentified
MKKSVLYVGLDVHKMSIDVAIAESGAAGEVRYYGQIGGDLDSLDKVIRKLKAKGAQLRFAYEAGPCGYQVYRHLTAQGYYCLVAAPALIPRRPGDRLKNDRRDALNLARLLRAGELTPVKVPEPDDEAMRDLVRAREDAKSVERRAKQRTAAFLLRHGQRYPGKTTWGRGYWRWLRQISMPRAAQQIVLQEYLDAVQEATARVQRLTAQIRELLPEWRWAPVVRGLQALRGVSLIVAATVAAEVGDLSRFHNPRELMAYLGLVPSEHSSGATVRRGPITKTGNGHARRVLVEAAWAYRLKARVSRTLWQRLTGLPQEICDLAWKAQLRLCARYRRLLARGKNKNTVVTAIARELAAFMWAIAKVLEPGPA

SEQ ID NO: 227082 - protein, 422 aa, unidentified
MLAESQDEEQIIARVAALDIGKAELVCCVRVPAAAAGKKRLQEVSTHSTMTRAVTELANHLVELGVQRVVMEATSDYWKPVFYLLEAHGLDPWLVNARDVKHLPGRPKTDVLDAVWLCKVAERQMLRPSFVPPKPIRQLRDLTRYRIDLIGARTAEKNRVEKLLEDACIKLSVVASDIFGVSGRAMMAALIAGERDPRVLAQLARARMRAKISLLEEAFNGHFDDHHAFLLTTMLGRIDAIDADIAALDTQIEAQLAPFAAAAARLDDIPGIGPVAAAIILAEVGLDMSRFPTAGHLCSWAKFSPGISSSAGKTKGNGSSGHGNRYLARVLGEAAVVAGKTDSFLGERYRRISKRRGKKRAIVAVGRSILVIVWHLLSDEQAQFTDLGPDHFTRHVNSETKKRNHIRQLEALGYTVTLNPAA

SEQ ID NO: 227083 - protein, 309 aa, unidentified
MNYSHFVGLDVGKKTFDASLMSADEKELSHKSFDNTPTGIQSLLDWIAGYHLSLSKLLFCAENMGSYVTELSVSSVSMGFSLALVCPLTIKKSIGLQRGKKDRIDAKRIANYAVLHYRKLELYKLPDKDLVRLRGWIIIRDNLVKQKVSSIKLLETFSWMAKLADVTESISFLEEQLKSIKERILEVEEDMEQLIAASTSLYTNYLLLRSIKGIGIINAIVLLCVTDNFQRFDNPRKFACYCGVAPFEHTSGISIRGKTQTSSLALYEGQKKRNNPGILLSVFTINKRSAIAYYHLFSRLDMLDLDGVH

SEQ ID NO: 227084 - protein, 364 aa, unidentified
MTAVQAERQADSSAVEVVGGVDTHKDTHTAAAVDTAGRVLGSAQFPTDAAGYRALLRWLRGFGTLLLVGVEGTGVYGAGLARLLAAQGVAMVEVDRPDRKARRWQGKSDPVDAEAAARAALARVRTGLPKQRDGRVEALRALRVARRSAVGHRADVQRQIKALIVTAPESLRAQLRALPDRELIKVCADQRPDRAGAGDPGTATKIALRSLARRHRALSVEIADLDELLGPLVAQINPGLLALKGIGPDVAGQMLVTAGENADRLTNEAAFAMLCGVAPLPASSGRTTRHRLNRGGDRAANSALWRIVITRMGTDDRTKNYIARRTAQGLTKPEIIRCLKRYVAREVFLALTSASAEKRPAKAA

SEQ ID NO: 227085 - protein, 461 aa, unidentified
MILRMGIDIAIRAPHQASLANERGELIWSGYRFRTAAADLQQLWEQLPVGSEPAELTVVMDPTRNAWVPLAAWFRRKGANVVLVSAERSADLRAYYAKHTKSDRLDSVLLARLPMLHPEGQHPERGIGPGDPLRRATKLHSTLVKRRTTSLARLDALLEILGPDWHAAFSADLGNKTPLRFLAAGYADPHTVRRLGRARLTRFLYRHSRGAFGESLADAILAAARASLELWSEDLSFSDLAEDIAVEARLALALTEEIKEVDERIEVIVRDRDPHQIITSAPGVGAITGAVILGRLGDASRFQSLAAVRSFSGLVPSLNSFGVSGRHGGLTKRGDALLREALFISANQARRLDPTLAAKYHRLMVESGKHHISALCHIATALLTRVVACWKNQAPYQLRDVDGRPVSTDEARAIIAERYKIPDHIRRTRTTTTRTGRRSKESQRAPSTGPSNNHAKPAAVA

SEQ ID NO: 227086 - protein, 496 aa, unidentified
MDTTLRNVWSSRQLEGPAIGSQNQEGEVGETIRLGIDVACRAEHQASCADAAGEFLWSGWRFRTTTADLERLWAKLPEGAEVTVILEPTRNAWVPLAAWLRARGAKVVMVPPEQSADLRDYYNKHTKTDRLDSRILARLPLLHPDGLRSIDHLGPAEPLLRAVRMRSSLVRRRTATAQRLDGLLELLGPGWAEVLGTCDYTKSALAVLERYADPRALKKLGRKRLTTLLIRASRGQWREDKADELLDAAEESIELWAAGGLDFDELAGDIATEVRLLRNLTAEIAAMEDRIEALYDEADPKGIVASTPGIGVTLSAGILGRLGDPNRFANLAGVRSFTGIVPKIDQSGLANKHKGLTKAGDPGLREALFLAADLARKVDPTLAERYYRLVVDEGRHHTSAVCTLAAVMATRIAACWRRGEHYVLRDVDGTEITEAQGRAICAERYKVSAEVRAARKRAGAAQQLKKRAGRGSKESTKAAPASDPPAENAIPVAGAA

SEQ ID NO: 227087 - protein, 355 aa, unidentified
MSQEKYIGMDVHQATVSAAVMDVHGKLLMECLLETKASTIVEFIQGLQGSLSLTFEEGTSAAWLHDLLQSHVSRLVVCDPRKAALLQEGNKSDRIDARKLAELLRTNQLKSVYHGEHGIRSLKELGRSYLTITRDVTRVMNRIKALYRSWAIPCSGTTVYAPRHRGEWLAKIVQPGVRVRAEHLYQQLDSLQPIRLQARRELLRESHKHGAVKLLRQFPSIGPIRAALLVALLQTPHRFRTKRQLWAYSGFAVETHDSGEYRYVRGKVQRNRERITVRGLNDNHNTDLKNLFKSAAISASTHPGPLRDFYTARVENGMRPTMARLTLARKIASITLTMWKKGVSFDPRQMQQQAT

SEQ ID NO: 227088 - protein, 425 aa, unidentified
MQPHYQCVCGVDIHKEFLQVCILRRDEDPDIFRVFNNFSGVQNLKQRVEEEGCECIACESTGVYWYRLYLSFEGQTRVIVGNAYQIKSIPGRKTDVRDAQWIAELAMSGLINPSRVFPKKDRELRELTRTRESTVHSRTQIKNRIHRTLDSAGIALGKGVNDIFGKSGTHLLWGLLNRESVENIITTIPSARVKKKVDTLREILSGSLSDLQIMLIKNNLDLMAHINEHIRALDEQIIARIGEQERIRDVDIACSIPGVSVTAAVTALAEIGDYHDFVNPEKLASWAGLVPSVYQSAGKNCSGKITKHGSEHLRWILVQAAKSAGRTVNTTFRKFFNRITYRKGANTATVALARKILCILWHLLMKNELYVDPLKSAKLKPRAVQKFSKNSPSDIQKAIDFILDSGFKVIYPDATLDQNFRGVSR

SEQ ID NO: 227089 - protein, 414 aa, unidentified
MEQVHDRVAGLDVHRDVVAACVRMAGPRGGVATEKERFQTTTVALERLGGWLADRRVSLVAMEATGVYWKPVYYALESRFAVWLCNAHHVKNVPGRKTDMSDAEWLADVAAHGMIRPSFVPPPPIRELRELTRYRKTQTDARAAEIQRLEKVLQDAGVKLTSVASKVLTQSGRLMVEALIDGQRDPAELANLAKGKLRPKIPELTQALAGHFGAHHAVAARRILDHVDFLDATIAALTEQIDARTEPFQAAKQLLSSVPGFDRLVIDTVIAETGADMSRFPSPGHLAKWAGVCPGNHESAGKRRRVGITPGNSWLRRALIEAARAAARTRGSYFGAQYRQIAKRRGPNKAAVAVAHSLSDLIWHQLTTGECFHDLGDDYFQRRRDPERETRRLVAQLQQLGFHVALTPSRDPAA

SEQ ID NO: 227090 - protein, 370 aa, unidentified
MKKNTLYVGLDTDRKHIDVAVAEELPGGEVRYWGRLANTPAAVDRMAKKLGQGDRELVVCYEAGPCGYGLYRQLAGKRRTKCLVVAPSMTPRRPGERVKTNRRDALKLAKLLRAQELSEVWVPDAAHEAVRDVVRARSTAVSALTRCRQHISSFLLRQGIHYVGKPWTNKHRMWLGTLSFEHVAHQLLFGELLLALDQAQARRERLTDHIRELLAGWSLAWLVAALQALRGYDLINAAIMVAELGDPRRFTSPRQLMGFVGLNVSEASSGDTVRRGHLTKTGNTRARKALIEAAWTYSRPPAMPKRLAARLPAAVQKIADKARHRLSRRYRHLLMRGKLKQVAIAAVARESLGFIRAIAHAAAPAGSRPR

SEQ ID NO: 227091 - protein, 455 aa, unidentified
MAKSRVQKRKVVVNALDQINPNAAGIDIGAEEIYVAVPPDRDEESVRCFGVFTEDLERLADWLKACRVDTVAMEATGVYWVPLYEILEKCGIRVFLVNARHLKNVSGRKTDVLDCQWLQQLHTYGLLQASFRPPEQIVAIRSLVRHREMLVQYRSAHVQHMQKALILMNLRLSNVLSDITGVTGMAILRAILAGERDPHKLAEFRDKRCAKSEEEIVKSLQGHYRPEQLFVLKQAVELFDYYAAQIQACDGALETLYRQFDPPENPGTPPPAPRSTARRKNQAHFDLAPALYRMTGVDLTPIDGVDALTIQKVLSEIGTNMSPWPTVKHFTSWLHLCPNNRITGGKVKQTGVQPTKNRATTALRIAATSLKNSDSALGAFFRRIRSRHGTPVAVTATAHKLARVIYFMLKEHKPYQDVGALSYEQAYHQRMVRNLHRQATKLGYRLEPATVMASA

SEQ ID NO: 227092 - protein, 351 aa, unidentified
MTRYIGLDAHSESCTLAVLGPSGKRLRYEHFQTSAELLRNFIKEVPRPRHLCMEDGTLTEWLYEELAPVVDKLVVVMPDRNPGNKSDLIDACKLADDLRRGAIRRPVYKAPGQFRTLREAARTHYVLQRDKVRTKSRLHALCRGCGHADLGKSLYSSTTRAEALQRLPEHLRPRAALFGQQLDALLECSNQAEHNLREECSRVPIVQRLATAPGIGVVRAAYIVAVVMTPHRFRTTRQFWSYSGLAVVTRSSSDWVSEGAGKWRRSKTQQTRGLNHNRHPLLKNVFKGAALQITLMPEHPLGKAYQRLLTQTKPNLARLTIARRLAAAVLAMWKHGEDYEPTKHEIPTATT

SEQ ID NO: 227093 - protein, 323 aa, unidentified
MGSSSSKGKAASEPDDLVRWLAATGLTIARVGLEAGPLSPWLHAGMREAGLPAICIETRRMKGATAAMAVKTDRNDARAIAHAMRVGWFTAVHVKTVESQELRLLLNNRRTLLEKRVAIDNEIRGTLKAFGLKLGAVTVAAFEARVLELLAKRSRLLAMVRPMLTARAALRQQGEVLHRMVLKAVRASAVCRRLLSVPGVGPIVALTYATGVDDPSRFIHSRDLGPHFGLTPRKYASGEIDRSGSITKAGDGAVREVLVQAALTLLTRVHRWSELKAWGVAVAKRRGLRRAIIAVARKLAIIMHRMWADTTTFNWTRETVTLA

SEQ ID NO: 227094 - protein, 429 aa, unidentified
MSNLFISVGIDIGADFSYMSLALPNQTFVGKPFKIVHNNLNSLEKAVLTIREAEELNSMKARIVMESTGNYHYPLFCYLRDKGFFAVVINPIISKNSTNLNIRKVENDKFASKKLALIGLKPDLKTSVMTPNAVLDLRNLVREYYSLMDCRCAYVNKLRGILKVSFPGYSNIFSKVTVQTSLSLLEKYPSAADFLSARKSSVVKIIRKTSKFGKVYAETKYQAIVEAAKSAGIFGHFVPSNSIQVRLCVSFIRKYDEEIKDILASMHKLADIHADELFVRQIRLIESIPGAGFLSAVTVICEIGDFSVFKSPKQLFAYFGIDPAVKQSGNFTGTNVKMSKRGSAVARRAIFTIAVVGIGVSRKGIPHNPVLREYYLQKCKSKVKLVALGAVMHKVCNIIFALLRDNKIFTVISNHEHIRLYQEKRHSVT

SEQ ID NO: 227095 - protein, 371 aa, unidentified
MGESSKTLFVGLDVHKDTIAVAYAAEDRSTEVVSLGMIGTRQCDIDKLIRKLESKGATLVFAYEAGPCGYWLYRYLTRRGLSCIVVAPSLIPRKPGDRVKTDRRDAVTLARLLRSGDLSSIYVPTVDDEAIRYLSRAREDAVRDLKRSKVRLKAFLLRQDIRYEGRANWNAAHLRWLARVVCPTAAQQIVFQEYVHTVTEQTERVQRLEVELHTAVKTWRLHPIVEAVQALRGVDLTGAVTLIAEVGDLTRFDTPRKLMSYLGLTPSEYSSGERRRQGGITKAGNGHARRALVEGAWAYRYPAKVSRHLQLRLENVPTEVRAIAWKAQLRLCKRYRLLSARGKHVNQVVVAIAREMAAFAWAIARTVPMAS

SEQ ID NO: 227096 - protein, 363 aa, unidentified
MYYNTIYVGMDVHKNSFTLCAYTIESEMASHFQKTEADYKKVLKYLEFLRTIYGNDTKFLCGYEAGCLGYTLYHQLSARNVDCVILAPTTMLEQRSRKRIKTDRRDAEIIAKCLAQHNYSPVHIPTATDEETKEFIRMRDDHKLALKKVKQQILAFCLRRGYRYDGNSHWTASHMKWLKALNPEALYKEILEEYLLTYTILSDKLERLDQRIEELASREEYRESVKKLCCFIGVKTHTALSVLVETGDFNRFASAQTFASYLGLVAGEDSSGDDKTQLGITKAGNRHVRMLLTEAAQCYARGQIGYKSKALKSRQSGNSLQVIAYADKANERLRRRYYKMVLAKGKKHNVAKTAIARELACFM

SEQ ID NO: 227097 - protein, 337 aa, unidentified
MEYFAGLDVSMAETQICVMGRNGAVIHKAKVPSTPADIAAELAQLPTCRRIVFETGRMAPMLYHGLRQLGLPVICVESRQAYQALKLLATHKTDHNDARGLAHLARTGFFKPVHVKSLPAHAVRSLIIARKKLVGQRVTLENQIRGLAVVFGVRLPRALSSTFIRQALQASEGIPGLSAAMQGLVAARTAVLAAIVAIDGDIRRMVRASDACRRLMSIPGVGQLTALAFTAAVDDPKRFRRSRDIGAYLGLVPRRHQSGEIDYTGSISKCGDRRVRTLLYEAANVMLTRYKGALKLKEWAFAVAKRSTMRKARIALARRLAIIMHAMLRHGTEFKAA

SEQ ID NO: 227098 - protein, 355 aa, unidentified
MTIVAHAHPFVIGVDTHARNHALAVLAATGEVIDTAQFPTSSGGMARAISWAARRTGGDQSALWVIEGVASYGAGLAAACEQAGYEVVEAARMSTRANRGVGKSDPLDAHRIAAAVLPLECDQLRRPRMADGVRAALRVLVTARDHMTSERTATINALIALLRVVDLGIDARRALTGTQFLAVSRWRARDEDLGEATARLEAIRLAKRVVELDEQLVANSSRMTELVKASQAASLLEKTGIGPVTAAVCLTVWSHHGRVRSEAAFASLAGVNPIPASSGNTVRHRLNRGGDRRLNRALHMAVLTRMTHDPDTREYVERRRVEGRTTKEIRRCLKRYLARQIYRRLNAAEPALMPA

SEQ ID NO: 227099 - protein, 402 aa, unidentified
MNMNAVGIDVSKGKSMIAIIRPYGEIVSLPFEIRHTSNEISSLIARIQSIDGESRIVMEHTGRYYEPLARELSQANLFVSAINPKLIKDFGDTSLRKVKSDKADAIKIARYALDSWNDLKQYSLMDEIRNQLKTMNRQFGFYMKHKTAMKNNFIAILDQTYPGVNTYFNSPARDDGSQKWVDFAATYWHVDCVLKMSLHAFTDHYQKWCKRNKYNFSQLKAEEIYGAAKELVPVLPKDHLTKLIVKQAVDQLNITSKTVESLRTLMNETASKLPEYSIVMEMKGVGPSLGPQLIAEIGDVTRFTHKGALTAFAGVDPGVNQSGTYEQKSVHTSKRGSSNLRKTLFQVMDALIKTKPQDDAVYQFLDKKRAQGKPYYVYMTAGANKFLRIYYGRVKEYLLSLS

SEQ ID NO: 227100 - protein, 365 aa, unidentified
METESNAEGIPSGQLNFSGQNIYVGFDVHLKSWKVTIMTEKLTHKTFSQSPKPELLYNYLTKNFPGGTYHSAYEAGFCGYWIHNKLKSYGINSMVVNPADIPTTDKEKVQKEDARDSRKIAKSLRSGDLTPIHVPSLKTLDDRTLMRTRSALVKDLARNKNRTKSFLYFHGIEIPDSYSNQTVWSKLFIEWLSHVEMPEKSGKDALDAIVGASTDLRTSVLRVTKQIHALSQTKEYEDQVTLLRSIPGIGLLTSMTILTELETINRFKSFDKLCGFIGLIPSTHSSGENQVVGDITRRGHSVLRSAIIESAWTAARLDPALTKSYHDYCKRMEPNKAIVRIAKKLLNRIRYVLKNKKTYVCALVK

SEQ ID NO: 227101 - protein, 358 aa, unidentified
MKEVYCIGLDTAKNNFQAFTADSKGREISNKKLNRNAMTQYFAQLPPAIVGIEACGTAHHWARMLTAFGHTVKLINPQRVKAFLGSRNKTDAADAKAICEALMHPGTTFIRAKSLEEQDIDHLLARRELLVQNRTQLVNQTRAFLSERGIVIPQGRHCFMKHLPLIIAEKWDEFSGKFQGILTDNYSDYQDLDEKIAKLDKTIEAEAVHTEPCKRLMQINGIGPQTALALFAHVGNAQHFKNGRQMSAYLGLTPREHSSGGKQRLLGITKRGNVRLRTLLLLGARAAILGIGRRKRGEDGLPRGLSPLDKWILGMVERIGLFKAAVALANKMCRIAWALLARGEEFNAMKVCRLAKSA

SEQ ID NO: 227102 - protein, 433 aa, unidentified
MNTPHPHDLVIGLDRSDKKADLHFITPATGQRRSQTIDTAPEALWEWLLQLRQEQPQARVGLCLEQPAVHLIAFLEAYEWITLYPINPITLQKFREAFVTSRAKDDAKDAQYLAELLLTHHPKLKPWAPEDSATRAVQQLVFHRRAVVDERTALTNRLIALLKQYFPQALVLCGEDLWRPLATRFLLQWSSLQAVQKAKPATLKAFYYLNGSRSAKLMEQRLALVAKAVPVTDETALIESFALRVQLICRQLQLVQQTLRSYEQQIATAYAAHPDHEIFASLPGAGPVLGPRLLASMGSQRERFGAAADLQQYTGIAPVTKRSGGSCYIHRRYLCPKFHKQSFHEYAKESILWSRWAAAFYLQQRVKGSPHHTAVRALAFKWQRVIFRCWQNRTPYQEAIYEAALRKSGSPLVALFDKVELGKSPFKNPMKKS

SEQ ID NO: 227103 - protein, 394 aa, unidentified
MSSRALGWDIHRKFSQVSVMEKSADGEIRVLERRRLEHDDPQGMRQWLLQLDPEIPVALEATFGWPWVADLLQALGREVHLGHPPVIRALAKHEAKTDRCDSDRLARFQLRGILPESYLAPPEVRQQRERMRYRMALVGLRTGVKSRIQAILHRLGIQHGYSDLFGKGGRKFLETLHLPEASTVVLRGNLDLVDLLTVLIEDVEQWMTENLEVDESVRLLTTLPGIGLILAHVIRAEIGEIERFPRPGHLASYSGLAPLSNDTAGREGRRHCSAACNHILRWAFIEAAHGVQLTKGEKALRLRRLYARLCGNGRGKKGQKSSAAVAVAHELSKLTHVIWSKRTPYTDTPSPRPGSRGQQASPQEAQPAKTTLRPDQPRRPMVRRRPSAVGQARS

SEQ ID NO: 227104 - protein, 354 aa, unidentified
MGLYLGVDFHARTQTVCWCDTADGVIQQRMLDHRSEDVRAFYQQFPAPAVVGLEATGYARWFQRLVEETGHHLKVGDAMRIRQFAARRQKNDRRDAELLLDLLMRGDFPCVHVPSPASQEALRLLRYRHRLVGIRTMLRNGLRAVMLNNRVAHGSPMRTVRWRQQLEELQLTGVDAIQREHSLRLIDELKTRIAALETELERRGANDAQVALLQTHPGVGLLTALAVFHTLQPIDRFNRARCVAAYCGLDPLERSSGDTVRFGHISKQGNRFLRFLLVEAGRSAVRPNGDEDLRRFFYQLSFKKNGAVAAVAVARKLVLRLFCMLRNQIDYDEFRLRGRDARRARGKASPDSSG

SEQ ID NO: 227105 - protein, 389 aa, unidentified
MKIFVGIDIVKLNLFAAAISSDGEMLLEPFKFTNDADGFQLLVSKLESFDKNSIIIGLESTAHYGDNLVRYLVAEFYQVCVLNPIKTCQMRKNNVRKTKTDKVDTFVIAKTLMMQDDLRFITFFDLDMMDLKALGRFRQKTIKQRTRLKIQLTTYVDQAFPEIQYFFKSGLHQHAVYALLKEAPSPNEIASMHMTHLANLLKVNSHGHFTKEQAKELRVLAQKSVGANDSAISIQITQIIQQIELLDSQLEKIEAKMTDIMRFNDSVIMTIPGIGYINGGIILGEIGDIHRFSNPNKLLAFAGLDPSVYQSGNFQAKTTRISKRGSRVLRYALVNAAWNVVRNNTTFEAYYNAKRAEGRSHYNALGHCAGKLVRVIWKMFTDEVEFNLE

SEQ ID NO: 227106 - protein, 338 aa, unidentified
MKRENDFVGQPGRLGILQKNSNRWWSAVREDGSSNRKTEPMKNPATKPSPAYAGVDIGKASLDLSLAGQPPCRHSNDATGIAALLKALKKLPAPVQVICEPSGGYERALLEALWAAGLAVSLVHAARVRAFARAQGLLAKTDPIDAVVLREFGELLQPGTLAAPSPQRERLAALVQRREQLVNLLSTEVQRLAQTRAATVRKLGRNLLKALEPQVEQLAEMIEAQIEADATLKGQSERMQQVKSIGPVTASTLLAELPELGTLSRNESGALAGVAPYNRDSGEHRGRRTIRGGRVRVRRVLYMAAVVATRFNPILKAFYDRLITAGKPKKLALTAVMR

SEQ ID NO: 227107 - protein, 346 aa, unidentified
MDLYIGLDVSLASTAICVVSAQGKVVKETTASSEPEVLVKMLNALPGRIVGVALEAGPLSQWLYRHLTEADFATVLMETRQVKGALKAMPIKTDRRDAEGIARLLQMGWFRPVHCKSLSAQEMRALLSSRKAIQQAASSLELSIRGVLRNFGLKMGQIAKGRFEHRVLELAEGNPMLEAAANSILSARRALRQELAGVEKLLRDHAKSDPICCQLMTMPGVGVLVALTFKAAIDNPARFSSSRDVGPWVGLTPRREQSGERDIIGEISRAGDAGMRTALYQAATVMLNNTRPNWLSAWAWNVAKRRGKRRATVALARRIGVVLHRMWRDGTEFRFTRADAATTAAA

SEQ ID NO: 227108 - protein, 427 aa, unidentified
MSEIETGGQEPEFAAFVGIDWADRKHVWCLQSRDSTKRETGELEHTPEAVEAWVAQLCQRFGNRPIAVALEQSRGSLVFMLAKYEPLHLFPVPSTMSASMRKALYPSGSKDDPRDADVLLDLLLQHRNKLRRLSPDTEATRRIQNLVEERRKLVDEKTEHTNRLTSHLKIYFPQMLNWFEHLDTELVCALLERWPTLEELRKVPPAKLRTFFSKHHCRNQELIEQRLLAIHQSIPAIRDRAVIEAKSATVKVIVQLIRILLKGIADLDERIEESAAAHPDFFIFRSLPGAGPALAPRLLAAFGSQRERYRNAGEVQTYSGIAPVMEKSGKKQWIHFRWACPKFLRQSFHEWASHSIGYSVWARAYYRQQRSKGVDHHGAVRALAFKWIRVVFRCWKERVAYDESKYLAVLTRRGSPLVSAVAMSNAL

SEQ ID NO: 227109 - protein, 484 aa, unidentified
MPELSHNTTLKWPSTPPAGAQASKRRRSKGRKRTPDPTVGLQVANPNAAAIDIGCAEHWVCVPAGRSEKPTRSFGCCTADLNQLADWLADCAVDTVVMEATGNYWVVLYDILEERGLHPVLVNPRYAKNMSGRKGDIPDCQWMQKLHTYGLFANSFRPTQDIRVLRAYLRQREMLVAAASQQIQHMQKALTEMNIQLANVISDISGESGLAIIDAILAGQRDPRTLARLKNTRIVASLGTLARALEGHWKDEQLFGLEQARLTYAHFQEQLAQCQQRIELQLQAIQSSLPGDPAKECQPQSADSPDSKGLTQSRRFDVPGHLKRILGVDLTKIDGIGPVAAQVILSEVGNDMSPWPSEKHFASWLGLCPDHRISGGRILGRSTRPVVSRARNALRLCAYTLSNSKSWLGAKYRRLKHKLGAPKAIVAMAHHLARLIYRMIKSGEAYVDKGVAAYEEKYRLHRIKWLTKQAKDLNLQLVELQPVA

SEQ ID NO: 227110 - protein, 387 aa, unidentified
MGTTTAAGNEAGEAMLVLAMSLELSASEWKMAFSPGLGQQARHRVIAAGDLEGLVKEIAAAKARFKLPTNVRVASCYEAGRDGFWIHRALELLGVENHVVDSASIEVSRHSRRAKTDRLDAGKLLSQLLRYLAGEKRALKVVRVPTEDEEDRRHLHRELKTVKRERTAVTNRIKGLLATVGVRLTEINELPRQMEQLRLWNGKPLPRWLKARLERDWGEREQLAERIAALEKQRGELLRKGTDSGSECARKLHQLRGMGPNASWLYSLEFFAWRAFKNRRQIGALAGLTPTPHQSGIERREQGICKAGNRWMRSLAIEIAWGWLRYQPDSDLSRWYRERYGSGSPRMRKIGIVALARKLLIELWKYLQTGTPPAGAVLKRQAQPKAA

SEQ ID NO: 227111 - protein, 371 aa, unidentified
MKKDTTFVALDASKETLAVAIAEDGKRGEVRYFGTIANRTEAVRKLVEKLAGRHGRLKFCYEAGPTGYVLYRTIRSLGYACDVVAPSMVPVRPGGHIKTDRRDATTLAALFRAGELTPVWVPDAAHEAMRDLVRARHAAMEGVRRARQQLLSFLLRNGRVFETKRHWTRAHRRWLSEQRFDLAAQQIVFQELVDTVEQAVDRRGRLEAQMIALVPDWSLSPVVAALQAMRGFAIVGAITLVAEVGDFRRFANPRQLMAWLGLVPREHSSGASVSRGSITKAGNQRARRLLVESAWTYRLPARVATAVVNRSQGVSEEIKAVAWKAQVRLCARYRRLKATGKPANVVTVAIAREIASFAWAIALKVEPAAAK

SEQ ID NO: 227112 - protein, 353 aa, unidentified
MEYIGVDVGKRKCVACVMNQDGNISETYSYPNTTADASEFARCLVKKYGECKAVVESTGNMWMKTYEAFEEAGIEVKLANPSKTRVIAEARIKTDKIDCRILAHLLRADLVAGCYVPTKQLRDTRYTLTHRMNITRDRTRIQNRIHSLLHKYDLQCEYGDIFGTHGMDWLRTLRLPAIRDRQILDSLIRQVEFLNCEEETVNSEIASDAVNNRYVAIIMSMTGFDYYGASVLAAYIADISRFPSPSRLVSWVGICPSVHQTGDSLHMGKMKDGNTKVRWIMSQAANVAAKCDPRMKAYYERKLRRHHHNVAITHVANKMLRILWHMLRDDALYNERKEQLYHRKLIRMARTAS

SEQ ID NO: 227113 - protein, 412 aa, unidentified
MEVVYPCGCGLDVHKKSITACVLWAEVKGKSRKEKKRFGTFTHDLLQLADWLEQCGVTHVAMESTGVYWKPVWNILAEQFEVLLVNAQHIKAVPGRKTDQKDSEWIADLLQHGLLRGSFVPPQPIRELRDLTRYRVSLVQETNRIANRIQKVLEDANIKLASVATDALGVSGRAILAAMLAGEQDAGRLAEMSKGLLRNKIPELRLALEGRMTEHHQFLLRQLFEHLHFTESKLREIEQEIDKHMRPFEDKVTRLCTIPGVDRVTAWGMLAEMGMNMNQFPSSGHLASWACLCPGNFESAGKRLSGKMRKGNVSLRRCLAQAAWAISMMKNNYLSALYRRIAARRGAKRAVMAVAHALLEIAYHMLKRKEDYRELGADHFDRIDVNRIRRSLVRRLERLGHKVTLEPLALTA

SEQ ID NO: 227114 - protein, 339 aa, unidentified
MMYGAIDLHLRYSEIRVVEADGRVVRERRVVTSRATLTAAFAGLGVLRVLLETGTESEWVAQTLEAAGHAVVVADPNYAPMYGEVRRRVKTDRRDVAALAEANRHGWYRATHRRSRAQRTLQQILRSRRQLVAMRTGSISVVRALLRQEGYRLPSGSAAQVPARLARVPLPDELAATLAPLRQVIDTVTRELAAIDTRVRTTAAADPVVTRLQTVPGVGPVVALTFRATLDEVARFQAAGQVSAFLGLVPREDSSAERRHRGHITKAGSGELRSLLIQAAWACWKSRGSGTLRAWAERLAGRRGRRIAVVALARRLSRILYAVWRDGTTFDGARVAAGA

SEQ ID NO: 227115 - protein, 344 aa, unidentified
MNTIKVIGIDLAKNVFQVCVWMEDGSVASNRKISRQKLLDTVRTFSPGTLIAMEACATSHYWGRTLQAMGFIIRLVPTQHVKAFSHHQKNDANDALAICETACRPGIHFVPVKTVEQQDIKALRSARQLMVEQRTALANQIRAFLAEEGVIVPAGIQKLQQYLPEILEEESHELSSALRRLLHTLGADLRNLNIRIHEMDNEIAALSRQQSGYHYLLTIPGVGPLIAAAFVSEISAPQFANGRQLSAWCGRVPRQHSSGGKNRLSSLNKNGNRHLRTLIIHGARAVMRCVQNRDDCLGEWLRKLIARCGFMKATIALANKLTRIIWRVLRDEVDFNMEKAFTIN

SEQ ID NO: 227116 - protein, 334 aa, unidentified
MEQITTVGIDLAKNVFSLHGVNGAGKAVLRRTVRRDRLMETVASLSPCLIGMEACSGAHEWGRRFQAHGHTVRLMAPKFVAPYRKSDKNDGNDAEAVCEAVSRPSMRFVPVKSVEQQALLTLHRVRQGFVVERTALINRLRGLLSEFGAVLPLGSETVRRRAAGVAEGLPELARSAIRDLLEQLRALDARIDSYDAQIHAQARLSEPARRLMQIRGIGATTALAIVATVGNAREFKNGRQFAAWVGLVPGQYSTGGRSRLGHISKRGDAYLRNLFVQGARSVLQTAPMHQDRLSRWALELQARRGYYRTLVAIANKNARIAWALLAKDAPLKMN

SEQ ID NO: 227117 - protein, 373 aa, unidentified
MPMYSTAFGMDVHLRSTTVCALDADTGEAVTRRFPGNPWGEIAGWMDGFPGPSLAAYESGYLGFAPQRELAGLGVECVVAAVSKIPRSAADSASKNDRNDAARMAKAILAHDISPVWVPSPEVEGIRDLAGAYDGATARLATAKQRLLAFLARRGFVYGGTAPAGNPRKYWTYDFLRWLDKVRPEDDGGVRALAALRNEVEAAAEARADLLSEYRAAADASPIAAEVAALQSIKGCAFALAAAFSAEVGDFTRFRSGRQVTAYFGLAPSQRSSGDSVRLGGISGAGNALVRKLAVEGSWCYAAARHQPKLMPRDTGVPLEIRMHGRKGSERLLRRREEMLARGMPAAKANAATAAELVRWLWALGMMCREGAE

SEQ ID NO: 227118 - protein, 444 aa, unidentified
MACSGMILIREVADAPVIMGISKPAGLKSTCGEVKIVNPLFVGIDVSNRNNVAYLMNPDGSKYSSFSVQNNLGGAKLLSERIVSALSSMRLSDVVIGLEATSIYGDSLVYALREDGSLGRFQRKIHVLNPKQVRKFKEAYPDLPKNDFVDAFVIADHLRFGRIAKEVYMDDYRYQALRTLTRARFDVIQNLTREKQRFANYLFLKCSGMAQDKDIQNTSATTIALMERFETVDDLANEDLDELTAFIAKTSRGRFADPNAVAKVIQSAAKGSYRLPKTVNDTVNQAMSVSIASMRALKEQVKVLDKAIEQQFEIIPNTLTSIPGIGKVYSAGIIAEIGDIHRFDSQASVAKFAGLVWHKNQSGDFEAEHSQMIKSGNRYLCYYLLEAANSVRRCDSEFRRYYDLKFKEVNKYQHKRALALTARKLVRLVFRLLKDNRLYIPPEG

SEQ ID NO: 227119 - protein, 391 aa, unidentified
MLICGIDIGKFRHEACLIDETGRQLAKPLKFTNTTDGGDRLIEYFNQHNPNNQIIVIGMEATGHYHLSLYCFLFDKGYQVNVINPIQSDAIRNLFLRKTKNDAKDSFLIAETIRIGRFSSTPLADEDILSMRQLCRHRMDLVDYIAEQKQKIIGVMDRVFPEYQHIFSDMFGKTSTELLNKAVTPEELLAIPTPDLIDILKKNSRGRFGEAKAEQLREAAKSSFGITIATTAFSMQLRQLLEMISLLESQLIELEEEITQYLRKFNTYITTITGIGDVLGAIILSEIGDVSRFSEPKKLVAFVGVDPSVKQSGEFVGTQNKMSKRGSPHLRRAFFLAANIAAHRDPALSAYYQKKRAEGKHHYTALGAVSRKLICIVYAVLRDNKPYVPAY

SEQ ID NO: 227120 - protein, 369 aa, unidentified
MKNVTTYVGIDVHQKDLFIAMLVGTQATPVAWTVPNEPTAVRRVIRKLEREAPGPVQACYEAGPCGYALQRQLTTPRVACQVIAPALIPRKPGERVKTNRRDARKLAELLRAGLLTEVRPPTPEEEAVRDLCRARDDVREDLQRSRHRLGKLLLRRGLHYPGRNWTLAHRRWIERLSWTQAAERVVVDDYLLAIDHLEARRIELDARLAEIAETDPYRERVGWLRCFRGIDTLTAMLILAELHDFRRFQSPRALMAYLGLVPGEHSSGEKHRRGRITRAGNALVRRLLVEAAWHYRHRPGSGVVLARRRRGQPGRVIAIADKAQQRLCRRFRRLAEHKPAPTVVVAIARELAGFLWAALQPVPASVPAR

SEQ ID NO: 227121 - protein, 347 aa, unidentified
MVIIGCDFHPGFQQLAMVETDTGEVRELHLSHKQEAEQFYGSLRGREVLVGIEACGYRQWFEQMLDQMGHRFQIGDAAAIRASYVRKQKTDRRDAGHILRLLMEGRFPALWVPTAADRDVRQLIVHRHKRVELRTRVKNQLHALALNQGLRLRWKLWTRAGLEQLKALELQPYGSARRADLLRQLEEMDAEIARLDKTVGKEAAARPAAVRLMSHPGVGPVTALAFVLTIGDVERFSRSRQVASYLGLIPSERSSGGKQRLGHISKQGNPLLRFLLVEAGHIAVRGDAELRRVYTRLQHRHSTGVAKVAVARKLAVRLYWMLRKQIDYAQLRVGPYAGKPVSFCGRK

SEQ ID NO: 227122 - protein, 326 aa, unidentified
MMQKWIGIDVSKDELAVCVMDADKRTFNATFTNDKKGFRTLLNYLKKREAKGSAACLEATGMYGEDLAAYLHKHHYRVSVVNPVRIKRYAQSQLRRNKTDKLDAEIIADFCRTQDPPLWTPPDPAWFELRALVRHLDDLITMQVQEKQRLKASRSIAVRAQLQDHIAYLDEQIEQLMKQINDQIDQDPDLRHKRDLLNSIPGISDKTSSRLLAEVRDITAFATVEQLVAYAGLNPRIRQSGKYSGQIKISKLGNAALRAALYMPARSAKRNNPLVKTLVERMTREGHCPNAITVAVMRKLLHFVYGVLKTGLPFDPNYLTKPALAT

SEQ ID NO: 227123 - protein, 314 aa, unidentified
MNKAEEHFVGIDVSKAWLDVAVHDSPEVFRVSNADDGIASLIESMKKLEPNLIVLEPTGGFEMLVVAELSLAGLPVVVVNAKRIRDFAKATGQIAKTDKLDAKVLAHFAAAIRPVLRTLKSEEEEQLTALVTRRKQLLDMVTVEKNRRGTVRATLQADLDLHIQWLSRRLKELDQEIADFIKGSPAWKEKDDLLQSVPGVGPVTSATLLGMLPELGKLNRQQIAALVGVAPVNKDSGKKQGRRRVYGGRAEVRSVLFMAALAAKKFNPLIRKFYERLIKQGKEKKVALTACMRKLLVILNAMVRSNQHWLPQSA

SEQ ID NO: 227124 - protein, 392 aa, unidentified
MDSPPPRHHSATVAFKEANGSEGETMKKHSSKHDPLSSTDVELCTTLCVDLAKQVFQLAGEDATGRVIYEDRIKSRQNFHDFLIKLPVTVTVLMECGPGAQAWARLLQAKGNPVRILPAQRVAEHRSGAKNDRNDAHAILRAGRDTSIASIPIKSITALAIQALHRVRRGNIKRHTALGNQIRGLLLEHGVSMPQGDAAINTHVPLALEDASLPLPDLLRELLDELLTDWLSLGERIAALSRRLEATAQEDEVAQRLVTIRGVGPIIATAIVAKQTEPSRFASGRMYSAFFGIVPDQHSSGNKIRLGRMSKRGDGYIRSLMIQGAHAVLSQLRPDSDQPDDHRLLRWLSRLGRKEAAIRLANRNLRIIWALLQNDQVYQRKPNSNSEAAMSL

SEQ ID NO: 227125 - protein, 348 aa, unidentified
MNRYIGLDVHAQTTTLAVMSAKGKHLTEKVVETHGKLLVETIAAIAGEKHVCLEEGMHAEWIHELLLHRVTRIVVMIPPERSGPKSDARDAWWLADQLRLGVPQKKVFKSKLTGLREAVRAHQAFTKHSTRAKLQMRFLARGRGFTVDRSQLLEAEERRELIAQLPAERRLRAQLHGELVDRTEQLRQQALEQLTQQAHRCSDVRRLLDVPGLGVIRAAQIVAAVITPHRFRAREQFWSYCGLAIVTRSSSDWIPKGREMVRSARALPRGLAPGNSTLKCAFKGAARDVVRRHPAHPWAVAFQRAVDAGQRSNLALLTLARKIAETVLHIWKHEEVYDPTKHKIQAAA

SEQ ID NO: 227126 - protein, 416 aa, unidentified
MSSCPREAMGRAAEVVAPSSSIRTDGGCPVAQVNDLSRSLTAFDPLSTLVVVVEMSKASWLVSGAVPGVERQPLKKLEPDATALLRLIERWRNEAVRAGRPISRITLAYEAGRDGFWLARWLIARGIEAHVIHSASVAVSRERKRAKTDRLDAAMLMRVFLGWLRGERGHCGMVAIPTMEEEDARRPSRERESLVNERSRITNRMKSALARLGVRGFKPHLRKAPERLADLRTAEGTGLPANIIEEFRRDMARLALVREQISSIEKTRAERLERAPDTGPHAMVRLLARVIGIGIETADMLVREILSRRLRDRRAVARYAGLTGSPDESGLKRREKGLAKAGNARVRRGLIQLAWRFLVFQKDSALARWYRMRTEGPSGARKTTMIVALARKLLIALWRLVTTGEVPDGVELRPAA

SEQ ID NO: 227127 - protein, 419 aa, unidentified
MFKIFRKNCCGLDVHKTWIYACIGMTDANGRTDYKEARFSSFSKGLRDLVDWLARSGCVEVCMESAGKYWIPVFNILEKSCLVTLAHPKYTKPQKGNKTDRKDAKWICDLFMCDMIKPSFIPPPDIRHLRDLIRYRFKLTNILTGEKNRAQNCLTVSNLKLDDVFSDVFGKSAMSITKYILEHPGEQFDVAPFVDKRCKHPVEEIQAAVDGSISREQAAKLREILCHIDELEKHKHCIEAEINRLAEPYTEQLKLIRTVPGFSSDPMTAIALISEIGVDMSVFPTAKKLSSWAGCCPRNDKSGGKCKSTRISRAGVYLKPLLVQVANGVVTSDKYPECKGRYRRLKSRRGHKKAIIAICRMFLTAIWNILSKLEPYSTDGFLADRPTDQTMIISKSQALNLLRLKGYIIKDDAPALVPG

SEQ ID NO: 227128 - protein, 347 aa, unidentified
MTTLARQITGGVDTHLDVHVAAALDERGALLGVESFDTTPKGYDKLLTWLRGFGTVELLGVEGTGSYGAGLTRHLHSEGIRVVEVGRPNRQRRRRHGKSDPEDAISAARAAQGGDATGEAKTRDGNVEAMRVLRVARASARKGRTQALNQMRSLISTGPDCVRAELRGLNIYRMLERASSYRPGTKRDLVSINKLTLRMLARRAIQLEHEVREIDAILKPMVAETAPELFALSGVGTDIASALLVAAGDNPERLRNEAAFAHLCGTSPIDASSGKNQRHRLNRSGDRQANSALWHIVLTRMVSDPRTREYIARRMKEGQTKKEAIRCLKRYIAHEVYNNLPMDHLAP

SEQ ID NO: 227129 - protein, 396 aa, unidentified
MICVGIDASSEKHDVCITSDTGELFTEVFSIKNNRKDYEKLLSMINSAKEHFNDDKVRLGIESTGSYSAAITDFFANEDSLEVVLINPILTNMYQQLKKVHYAKTDSLDAIGIASFIANKLDVRIYTPPSYHNRALKEMFRELVTINKNLCECKNKLRSTLHRYFPEYLNVFSNISCSASLFILKEYDDLRKFLRNKPTTLLKKINAKSGGKITINKINLLQDSIKNSICDMNNYCAVVIKILAERILLLEKEKEELLIQIEPIVKQEGPELLSIPGISITLAAGIISEIISITNFQCADQLVAYAGLDPIVYESGTYKAKNTRISKKGSSYLREVLYYASFTVSQQNEYMNLYYEKKKAEGKKHRVILGHVAKKLCRLIFSLLSKHQNYISPLSN

SEQ ID NO: 227130 - protein, 397 aa, unidentified
MDAALFQPRRTDAVSRRVKQGDPLEPERHHCARVEMFGNHSRDRGSTMNITTYGLDLAKRVFQVHWVEPETGEVKRKVLRRGEIAAFFARRVPGVIAMESCGSAHHWGRVLSGLGHQVRLIAAQFVRPFVKTNKTDAADAEAIWEAVQRPGMRFVALKSEEQQAVLSLHRMRTQLVKIRTMQAFQVRSLLYEFGVVAPKGFRALKEKVGSALGSPISCPVPELVRVELLTQLEGLSSLSARIDELERRIGGWQRRETECERLAAIPGVGRLTATAVVATVADARSFRSGREFAAFLGLVPRQSGTGGRVKLLGISKRGDPYLRTLLIHGARAALLTQGRSDREMDPWLKAMLARRPKNVAVVALANKMARTIWALLAHGRTFDPSWGRTALAVTTAP

SEQ ID NO: 227131 - protein, 362 aa, unidentified
MIVVGIDPHKRTHTAVAVDRATGEHRGELTVNAREQGHEELLRWARGLDLERSFALEDCRHVSGPLERFLIARGERAVRVAPKLMGENRRSSRSYGKSDAIDALAVARAALREPGLPEADLAGAELEVKLLADHRDDLVGEANRTVNRLRWHLHDVDPTFEVPRRRVGSRAWMERLARRLARLEQTSRVRIARRQLRRLRSLAREIKEAEAELAALVRAHAPELLELPGCGTLSAAKLIAEVAGVERFASDAKLAMLAGAAPLDASSGRQQRHRLNRRGNRQLNLALHRIAVTQARLHPPARAYLERKRAEGKSRREALRCLKRHLARTIWRTLRASSSERMLPISPNLREMKMPAAALALT

SEQ ID NO: 227132 - protein, 401 aa, unidentified
MLRDHLKHPTAIRVQFGAIFVSLELSRKTWVITSLSPGKGEKMSKHCVTAGDIAALMARFAELRRKAAARTGKTFPIIAIQEAGLDGFWVHRVLQQERIESHVVDPASIATPRRRRRAKTDKIDGEALLRALLAYKRGEPRVCSMVVAPSPEEEDRRRLCRERDTLITERVRHVNRIKGLLFAQGIADYEPVSRNRRKRLDELCTGDGRPLPQYVKAQISRELDRLELVLEQIKVVEKERDRVLLSTASVGAVITGPACDNPTGASGVAMLTALRGIGANGATKLWSEGLSRHFSNRRQIAAYSGLAPTPWQSGGIAHEQGVSKAGNPRLRTTMVEIAWLWLQHQPQSALARWYFARVGVGATKARKKVAITALARKLLVALWKYITTGELIDGAIVKPVA

SEQ ID NO: 227133 - protein, 412 aa, unidentified
MRRVIGIDIHRTFGEVVIWDSGVLRHAGRIDVTRTGLEGLGKGLKPTDEVVIEATGNCMAVARVLSPFVARVVIANPLQVKAIAHAHVKTDKVDAGTLASLHAAGFLPEIWTPDEATERNRRLVARRYQVVRHRTRIKNEVHSILHAHLIPKCPHADLFNKRGRDWLSRQPLPDDERAAIDRHVRELDRLEEDLQGLDREIAQGSLESPEVHRLLTITGINLAVATGLMAAIGDIQRFKSPQKLVSYFGLNPRVRQSGLGAAHHGRISKAGRSHARAMLVEAAWAAAKAPGPLHAFFVRIRAKRGHQIAAVALARKLVVLCWHLLTKKEDYLWARPALIASKRRTMELQAGLPQKKGNRRGPAYAYNVRELRDQERAVAEQAERTYERFVESWKSRRPKDGVRERLNPTRLE

SEQ ID NO: 227134 - protein, 355 aa, unidentified
MNDIKYIGMDVHQTSTSIVVLNASGRVLVSAVVETQGQALVAFIQGLRGTLHLTFEEGIYATWLYGLLAPHVSRLVVCDPRRNALLQAGSKSDPIDAHKLADLLRLNALRPVYHGQNGLGPLKELSRSYLVLVQDSTRVMNRLKALYRSRAIPCAGTQVYLASHRASWVDQLKEAGVHKRAEFLYRHLDLLSLLRREAKLALLAESRKQTITRILRAVPGLGPVRIAVLLAMVQTPFRFRNKRLFWAYVGLGLVTRISAEFALVNGQLKRSGKVPALRGLNPNHQRELKEIFKSAASAAVQRPGPWQQFYQQRVQAGRKPELVRLTVARKLAALTLHLWKKGERYDIKPLKPTAV

SEQ ID NO: 227135 - protein, 442 aa, unidentified
MLKILNENAAGLDVGSEKLHVSIAGGSPRVFDTMTGSMYELRDWLKSLGVQTVAMEATGVYWLCVYEILEVAGLEPVVVNGKHVQNLPGRKTDMSDCQWLATLHAHGLLRGGFVPKADIRQLQDYMRLRADHITMAATHVQHMQKAMDRMNLKVHEVLSSLTGASGIAIIEAILRGEREPQRLLVLADKSVLKHKRERLLAALAAHWKEEHLFSLRQAYELWQVYQGKIGECDQRIQALLEEQTSRRPPPQTPENPALEAKPKSLGRNAPQIDNLHYMLRQLCGGEDPTRIPGLTDYSLLTLISETGTDLKRWSSAKAFTAWLGLAPGSHQSGKRRAKVSRQRNRAGRLFCTLARSLARSVDKALGGFYRRLRARRGGLIANQALARKLAELYWRCLTRGLEYVETGLAAYEQSLRLQQQRALSKLASKLGFELTPRPEVHG

SEQ ID NO: 227136 - protein, 596 aa, unidentified
MTTCDPTAPPAAGPPVRIGVGIDTARYGHYAAFLGEDLQPAAAELLFAESADGYAQLRARLAYLAGRHPTVTFAVRLDAAGHYADNLLHFLHRLRAAPESQTCVFPNGEISISCGDPQRNKNYRAALFGGKKSDPVEARAAARFALAERPAPAPAPSDPLRTLRLLATRLQAVVRQRTRLVNQLHQLLTLTFPELALLVKDISLGWVLELAHRYPTAARLAGATEADLAAIPDLPDRHAGRLLELARSSVASLGGPTAEELVRDQVRQLRDAGARQQRLEGLLVTAYRALPAANHLDSIPGLGAVTAAVLTAFIGDIERFATPGKLVAYFGVLPIEMSSGVDRDGQPRGPRRFVMSRRGNDLVRRYLWMAALSAVRCNPAVRAVCRLVAKHPQRKAIAIGHAMRKLLHLAFAIWQTGKPFDPAHHPWEGPAPGGGGPAAGAGEQPPDPEGERSQAAGHKPEAMPAEEVVTAACVPTVAAGGPAGEGTFVDFAHLKQQLPLARVLEHLGLSARLRGSGPQRRGACPIHRGDGRGRTFSVNLSDNVFPCFDARCGQQGDVIDLWAALHQLSLRDAALDLVRTFNLEPAPASRTEKRHG

SEQ ID NO: 227137 - protein, 320 aa, unidentified
MTAFTPVGIDIASKKFDAAIWIEGKKYKNKVFANTPTGFHAFLLWLAPYGPCHICMEATGAYSLPLATYLYDAGYPVSVENAARIHAFGQSELIRNKTDKGDAKMIARYCHLHKPPEWKPVPVNERKLQVLINRLNTLKEMKRMEENRALTSETIVQDSIQKVIAALDEEIKEIEQAIKRHIDNDPDLKKNQALLESIPGVGEILSITLLGYVGDMSRFSSNKALVAYAGLNPMLKESGCWKGSTKLSKKGNALLRKALYMPAITALKYNPVVAALCNRLKEKGKRGKCLVCAAMKKLLQLAYGVLKSGKPFAAEIPLAR

SEQ ID NO: 227138 - protein, 403 aa, unidentified
MNAVGIDVSKGKSMVTILRPFGEIVSSPFEIKHTSSDIHSLIKLIHSIEGESRVVMEHTGRYYEVLAHQLSKANLFVSAINPKLIKDFDNDSLRKVKSDKADAVKIARYALDKWQNLKPYSIVDELRTQLKAMNRQFHFYVKQKTAMKNNLIGLIDQTYPNANTYFNSPTRSDGSQKWVDFVSTYWHVDCIRKMSLNAFVEHYQNWCKRKKYAFNKSKAEEIYTKTKELVPVFPKNEITKHIIRQAVDQLNSTSVTVETIRTLMNETASKLPEYSIVMQFKGIGPSLGPQLMAEIGDVTRFTHKGALTAFAGVDPGVNESGSYAQKSVPTSKCGSSNLRKTLFQVMDVLIKTMPQDDPVYQFMDRKRTQGKPYYVYMTAGANKFLRIYYGRVKEYLSVLPDPS

SEQ ID NO: 227139 - protein, 328 aa, unidentified
MKIVGCDLRARQQSIAMVDTETGVLTEKVLKHEGNAVREFYAALEGPVVVGMEATGAMQWFLELLEELGIQCRVGHPAKIRAAETRKQKHDRRDAEVILELLLMKDHFPEIGMPSTEQRDLRTLLRDRHQWVKMRTRLQHTLQAIALNHALREGRALWTAAGRQSLQDLTLPKYTAQRRDELLSLYTQLDKRIQQLDKQVETEARQRPQARRLLTHPGVGPVTALATEVFLGDPHRFAGANQVASYIGMIPCEHSSGKRQRLGKLSKEGNSLLRYLWIEAILHAAVKDPELKRFYRRKLVQKGMGKARVATARKLGIRLWIMLRDEID

SEQ ID NO: 227140 - protein, 355 aa, unidentified
MEYVGIDWAYRRARWCAKDHGGRILGEDWIPADEDGLARLVAALGCDVNACVEMMSGAAWVRDRLTSAGWRVQIADARKAKAVASLAVKTDIIDARVLAELARRDLVPELWVPSLDDRALKERLLRRMHLVRLRTSAKNRAQGILTQWGVKLAFKRLAAPDASKLLERRGVPEVWRRSVAEAVAVVELLDGRLRPLERELRPLALADPRVELLRSIPGLGDLLGLTFAAEIGDVSRFPSARKLVGYSGLSPRVSQSGESSRTGRLSKAGPGLLRWAAVEAAQNAYRPTNPWHALYRDVKTRTGGKSNPAKAAVARKILIAAWHVLSLQEPFKASRPRDATVTANSRFVLAEVRPN

SEQ ID NO: 227141 - protein, 411 aa, unidentified
MRVHHTVCCGIDVHKKSVTACLMWGPADQEPQLEIRRFGTMTSQLKTLAEWLNQAHCEIAAMESTGAYWKPVWNVLEGQIRLILANAKHVRALPGEKTDSKDGKRLASFLRHGLIRPSFVPPRDIRELRDLTRYRKKLLGNGAAERNRIQKVLEDANIKLGSVLSDVFGVSGQRMLHALVDKPSVAIEEITSLAHWRLQPKIEELKKALEGRITAHHRFMIDLSLGHMRYIEQQILRLDEQIARYIAPYQKQIELLQTIPGIAENASASVLAEIGPDMSPFDDDGRLASWSGICPGNNESAGKKFRTNTRKGNPHLVSTLVESAWASTHTKNSHFKASYYRLKARRGSQRAIVALAHTLLRTVFVVLKTGQPYQEPLRRPLTETQRTRKANRLTRELRNLGFEVTLKTKPA

SEQ ID NO: 227142 - protein, 388 aa, unidentified
MGAVVIGMDPHKRSATIEVMAGDEAVLGGGRYGTDAAGYEVMLAHARRFPERTWAIEGCQGIGRHIANRLIADGEHVVDVPPKLSARVRVFATGQGRKTDATDAHSIALVGTRMRGLRPVVDDEKLTVLRILVDRRRSLGEDHTRMVSQLHRLLLELIPGGAKKDLSAAQAKQLLAKVRPRDVAGRARRRVAAELICDLERIHARKKAADKELTVLLDASGTTLTDLHGIGPSGAARLLVEVGDITRFPTKAHFASWNGTAPIDASSGEQVRHRLSRAGNRQINRVLHIMATVQLRNPTEGRAYYDRRKTDGKTSMEAMRCLKRRLSDVVYRQLLGDARRPSKTGPGGQPGATLQSSADDSHPAIDTSDQSLPGPADTKPRTGLSAAS

SEQ ID NO: 227143 - protein, 365 aa, unidentified
MSKDIKESAGEPRRYVGIDLGDKKSRVCSVGEQGEVMSQEWVVTTPEALFKRFHGKSEMRIAMEVGTHSRWASELLRRCGHDVRVADARQLALITNSNAKSDKRDARTLAQLLRADPRLLSPIEHRAEKLQMDLTVIRMRDNLMETRTRLVSSVRGVVKATGARLPDCETTRFPQQVVDVIAEPLRPALAPVLEVIDQLNEELYEYDCLLEHWARTRYEESSRMTQVKGVGTLTALTFMLTVGDKERFSRSRDVGSFLGLRPRLDQSGDSHPQLRITKAGDGLLRKTLVECAQYMLGPFGQDSDLRRWGLKMIEDGNRSKRARQRAVVGVARRLAVLLMSLWKSGQTYDPLRHSRAQESSKEVAA

SEQ ID NO: 227144 - protein, 362 aa, unidentified
MAAIRMTDQQSTVDTAQVTGGVDTHKDTHTAAALDHLGRVLGTRTFPATTAGYAALREWLAGFGTLGAVGVEGTGSYGAGLARYLTAESVTVVEVNQPDRHTRRRKGKTDTQDAVNAAHAVLSGRADTTPKAGTGPATAITALRTVLSGAVKSRTAALNQLDALIVTAPAALRESLTGLTGKALITTCARLRPGTDLTNPANAATTALRRLARRIQHLTDEITDTKTDLTTLTRKVLPATTAVFGVGPDTAAQLLTTAGDNPHRIDTEARFAHLCGTAPIPASSGRTDRHRLNRGGDRHANAALYRIVIVRMRHCPRTRAYVERRTTEGIPKRHIIRCLKRYAAREIHRTLITDINNLTNTP

SEQ ID NO: 227145 - protein, 405 aa, unidentified
MEIFVGIDWAEAHHDICVLNEMGMVLAKRRIAEGLDGVGQLHALLADHAAEPNQVVIGIETDRGLLVGALLAAGYQVFAINPLAASRYRDRHSTSGAKSDPGDAKMLADLVRTDRHNHRPVAGDSELAASLQVLARAHQNLIWSRQRLVNQLRSNLREYFPAALAAFGTDLAHPLALGVLDAAPTPAMGRTLSQSKLAAILRRAGRERGVEEKAAAIQAQLRAPQLAAPALIGEAYGKSVAATVRILRELNAQLASLAAELTQSFEGHPDAELYRSLPGLGVVLGARVLSEFGDDRTRFAHPKARKNYAGNSPITKASGTRRVVLARMARNRRLADACHLWAFCALSGSAGARHYYRTLRQRGKTHHQSLRARANRLVGILHGCLDHGQVYREDIAWPQSPTVAA

SEQ ID NO: 227146 - protein, 354 aa, unidentified
MVDKVTEAAVVGGVDTHKDLHVAAVVDQNNKVLGTQYFSTTRQGYRQMLAWMTSFGTLKRIGVECTGTYGSGLLRYFQNAGLEVLEVTAPDRMERRKRGKSDTIDAECAAHAAFSGIRTVTPKTRDGMIESLRVLKTCRKTAISARRVALQIIHSNIISAPDELREQLRNMTRMQLIRTLGSWRPDASEYRNVTNVYRISLKSLARRYLELHDEIADLDVMIAAIVDELAPELIKRNAIGYESASQLLITAGDNPQRLRSESGFAALCGVSQVPVSSGKTNRYRLNRGGDRALHIIAIGRLRTDAKTKEYVARRVAEGHTKMEAIRCLKRYISREVYTLLRNQNRRINSIPITA

SEQ ID NO: 227147 - protein, 344 aa, unidentified
MDHSAGLDVSVKETSICIVDDTGRIAREVKVASEPEELLAVLKNPAYHFKRIGLEAGPLSQWLYSALAEAGLPMICVETRHMRAVLKAQINKTDRKDARGIAQMMRVGLYRPVHVKTLRSQKLRMLLTHRKLLQSKAIAIDNDLRGTLRNFGLKVGVVGAVKFEARIKELVENLPDLAVLVEPLLVVRRVLREQFVIQHRRLLAIVRDDEVCRRLMTVPGVGPVVSLTYRATVDVAARFHKSKSVGAVFGLTCAKYQSGEVEWSGRISRCGDEMMRVMLYEAAQSMMRSKKWSWLKAWAMQIARRRGMKKAIVALARRLAVIMHRIWVDGTEFRWTREQAAAAA

SEQ ID NO: 227148 - protein, 429 aa, unidentified
MNYNTQNAKIASITEKTLIVGIDVGSETHYARAFNWRNYEYSKKPFAFSNDEAGFASFKVWMNDMAEKHGMETIIPGMEPTGHYWLNLGAYLQEQGMKPVHVNPHHVKKSKELDDNNPSKNDRKDPKTIAGLVNEGRFSYPYIPTGIYAEIRNLSNLRIQTQEEITRIKNRIARWFSIYFPEIKDVYRNPDAVSGLMVIKQAPLPCDIKELGVNGVNKIWRDARLKGAGIKRATTLVTAAEHSIGNTEAPRSARKEIRNLLNDYETYKNRMDELMQEIKETLSEIPYIDKLMEINGIGIKTVSCFIAEVGDIGRFDNPKQVQKLAGYAIVADSSGKHNGESRISHRGRKRLRYALYEAAISVIGKNKEFKEIHSYYRTREKNPLKKMQSVIAVACKLIRIFYTILTKGVDYDSQKMLNDIVRPEIQLAA

SEQ ID NO: 227149 - protein, 356 aa, unidentified
MATYYIGADVHSNSIEIAIRTRREVVNRYSIPPSIQAAVEVLSSLEGARHMAIEEGPMAGWLYRNLRQKVDSFVVADPRRNKLISSDGDHDDKIDSAKLALLLEGGYLREVYHSDDDRRVELKHWVGLYHDRVHDAVRHMNKIRARCRMHGIKIPRKVLRQPEHRADWLVKLKQPALAKQLLMLWIGYDATAKQARMAKQHMISLSRKYPVIRLWQQLPGIGTVRAVTVFAYLDTPWRFKRKNKLWKYCGVGLQRTASGTDKKGKPKPARLQMPWAANRTLKDAILGAALTAINQKHNVFKDDYERMVRNGVIPSNARHTVARKLLTVMWGIWKTSCQFDQSKGPLSKSTEQCHCV

SEQ ID NO: 227150 - protein, 322 aa, unidentified
MSPYLQGRDTNMEHFVGIDISKRHFDLHLTPEDQSHPFDNSTSGITHAVKLLIELRPQLIVMEATGGYETNLAVTLHKAALPVVVVNPRQIRHFAKAVGQLAKTDKIDAQIIARFAAQVRPPLRDFLDDKARKLKALVARKNQLVAMHVAERNRLEHAVDKAIVRSIKRSLKNLQRQIEQLQQHLVDAIAQDDELQHKADLLDSAPGIGPATAALLVAHMPELGQLNRRQIAALAGVAPMNRDSGAYKGKRMTGGGRSQVRAGLYMPVVSAVRWNPTIRTFYQRLVAKGKTKMTALVAAMRKLLTILNLMIAKNEPWNPNYA

SEQ ID NO: 227151 - protein, 341 aa, unidentified
MGEVITIGLDIAKSVFQVHGVDGVGAVVIRKRVSRAKVLEYFGELPRCLVGIEACPSAHHWGRELQALGHQVRLIPPSYVKAYLKRSKNDANDAAAICEAVTRPSMRFVPVKTKEQQTVLMLHRSRQLLVRQRTMLSNALRGHLAELGIVSAKGRNGTAELLRIIADGRVSPAVCDILEVLARQYDAIGTEIASIDKNIMALHRACEASRRLAEIPGISPISATALVAEIGDWNAFGSGRSLSAWIGLVPKQYSTGGKDRLGRITKQGNRYLRWLLVVGAMAVIRYRAQARNREATMAWPIDGAPTDEVAAVALADKIARMAWAIMVHNERYKEPKLLLAA

SEQ ID NO: 227152 - protein, 343 aa, unidentified
MGEISTIGLDIAKSVFQVHGVDGTGAVVMRKRISRSKLLEFFGGLSPCLVGIEACPSAHYWSRELQVLGHTVKLMPPSYVKAYLKRNKNDANDAAAICEAVTRPSMRFVPIKSERQQCGLMLHRTRQLLIRQRTMLSNAIRGHMAELGVIAAKGRNGTAELLQIIGDLTDDRIPPVARFCLDLLARQYLTLNAEVSSIDKRIHSWHRSCEESRRLEEIPGVGPIVATALVAEIGDWRAFRSGRSLAAWIGLVPKQHSSGGKERLGSITKQGNRYLRWLLVAGAMAVIRYARQHGTKRAWLTRIMDRRPVKVAAVAFANKIARMAWAIMVHGERYREPKLLLAA

SEQ ID NO: 227153 - protein, 257 aa, unidentified
MSCYYVGLDVHKATISVAVINAAGKPVMESVVETSAATILDFFKGLRGQVEVTFEERTYAAWLYDVLKKSKAQVIVCDPRKNRLLCDGNKSDEVDARKLARLLRARLLSPVYHGQHGTRDLKELVRRVQARVRRLFSELNHLADLRREARQALVVECRRHPASKLLLRVPTLGIVRIAQLIANVVTPHRFRGKRQFWSYCGSVVVTKSSADYRAAGAQVHRTRKAATRGLTQSHNRTLKYIFKSAALTASRCEPFKS

SEQ ID NO: 227154 - protein, 342 aa, unidentified
MNYYAGIDVSLKSSSIAVVNANGEIVRETKVPTDPIPLIEWLRGCGLPLERIGLEAGPWSQWLYAAMKEAGFAVELLETRHVRNAFRTMAVKSDRKDARGIAELVRVGWYRPVHCKSLDAQETRVMLSARRLVDQKLGDVEMTLRGLLRNFGLKVGKTTPTRFADRIKELVSANATLQIIAESLLAVHQVLLRELKALEKRVRRIARDSADARLLMTATGIGPIIALTYAAGVDDPARFKKSKSVGAYFGMAQKKYQSGETDITGRISKAGDATVRTALYQAAHIMLTRPVKPSKLRSWALRLAKRVGMKKAKVALARKLAVVLHRMLIDGKPFNPALGAAA

SEQ ID NO: 227155 - protein, 331 aa, unidentified
MKKTALVGIDVSARTLDLALDSGRGTPPLLTFANTAAGHRKLIARITRGGRQARVCLEATGVYHLSLCVALHGAKGIAVMVVNPRAAKDFARAQLQRSKTDQVDARSLLEFLRRMDFAPWSPPSRSILDLRALSRRIQSLIVSRAQEKNRRHADEVVTDTTPAIRESIERHLAAINEEIETLTQSALEIVRGDDRLSPKLDHLISVKGIAEPSAIAILAELAVLPPDMSARQWVAHAGLDPRHAESGSSVRGQVRISKVGNRHLRAALFLPAMVASQHEPRVKAYYQKLIAKGKRPMQALVAVMRKLLHAIYGMFRHGADFDGCRFLAENA

SEQ ID NO: 227156 - protein, 314 aa, unidentified
MGNKENKIEFDQIIERGCGIDVHKKIIVATVRGVGIKEETKSFNSFTESIENMSDWLKDLKITHVAMESTGVYWKPIFNILEEGFEILLVNARHIKNVPGKKTDKKDSKWIAKLLLSGLLKSSFIPPKQIRELRDLTRYKRKIIEQVSSEKNRIQKILEDANIKISSVVSSTSGATATKIISAMIGGEENIKELLKYRHGKIQSSIEDMASALKGKLTKHHKFMLQTINTSIEQKQELLNNLDKQIEYQLQASALELDAELLQTIPGVGKDGAAYMLAEIGANMEQFPDQKHLASWAGMSPGSYESAGKKKAVE

SEQ ID NO: 227157 - protein, 322 aa, unidentified
MEQVYYCGIDIAKSKFDCAIRLNNGKYKDKVFKNESEGFSTFINWLAHHGFSHVHICMEATGIYWEAFAEYLADKGLTVSVINPAQIKAFSISLLVRSKTDRGDARVISDFCFERKPAAWLAPSASEQSLRALVLRLESLQKMRTQENNRLHVARENVTKSLTDHIAWLNNEIEILQGDMLLLINGNAEMKQKKTLLESIPGLGVQTAAVLLSFGIHPGRFVNARQAAAYAGVDPRLNQSGSSVKGRPRLSKTGHAFLRKSLYMPAMTTLFRTAWGKHFYARLTAAGKAPKLIIGAMMRKLIHVAFGVLKTEKSFDQSLHGV

SEQ ID NO: 227158 - protein, 354 aa, unidentified
MIIIGCDFHTRYQQIAMAREETSELLGERRLDHESGEAQAFYRSLQSWQEPVRVGIEATGPIHWFERLLGELGHELWIGDSAKIRASEVRKQKTDERDARLILELLLAKRFPKIWVPTPAERDLRQLLWHRHKLVCLRTMLGNQLHFLAMSQGLCRKKKLFTKKGRAELTGLAMGPWTRRRREELLKLLDQVDAPIAELDRAVLEEAQRRDDAVLLMTHPGIGPVTSLAFVLAIGPVTRFCCSRKLVSYLGLNPSEDSSGQRRRLGAISKQGNTMVRWLLIEAVYPAVRQDLALRQDYQRLKFRRGHAVAKVAIARKLAVRMYWMLRSGTAYAQLVRRQGSPGATLVDASPSLG

SEQ ID NO: 227159 - protein, 392 aa, unidentified
MRAPVSLSRQDVTQEMELAIGIDVHKDKCAAHAVPAGTAALRPRQRDFLEAFNKDFRRFPSDADGMRGLSDRLRGHDVDILIENSTQAHDVYWTLRGHGLRVVVAHAADLYNITMSKTKNDDNDAMRLAGYMRRRLMGEAEFAESHIPSREVLLNRELCRSAIRDLAELSAARRRIRAHMAVKGLKLSADYQDVARRKPLAELKAAGDPVLLLDAMLAEDAKRRLAATEGMMRHAMRDDRTFQIVWSVTGFGLLSAAYVACMSDGMWRFRDGRAFAASIGITPRLDESADRPRSCGISRRGDPQLRRLICQATFVHIFHADSFITRKYHRLRAAGKHHNEALVACANSMARLLWTLVTNDTPYTEDPGTLAKARSRARSVGLEDEMEAAGAE

SEQ ID NO: 227160 - protein, 407 aa, unidentified
MDLLKTVFGIDVSSRKSNVCIMVNGQKVNDYAISNDMVGFNQLLGDLKQVAKPQIIFEATGVYSRRLQAFLDMHELRYVMMNPLEAKRKTKDDLHQNKTDKLDALYLAKLQSEHPQRLAYAQSEEYQELMANNRIYEQASHDLITNKNRLHKAVQLTFPEIENLMANPRGKNYWSIALRFPHPDIVLETKEADIIDFLKGLSGIGKKRANDITQSLIRLAKVACPAVKKNSAHVRGLKMAINNILSAEEECQTALQEMAKLAPKRDLEILTSIPGIGENTALRIISELGDIRRFNNPSQLNAFVGVDPQVYESGNLTAHLSISKRGTAIGRKVLYLAINQIQSAKKAGNPCHIADYYEKRKRSSETASHKKAAIASIHKLLRTIFALIKNDQLYSYDVAKHNQRLLS

SEQ ID NO: 227161 - protein, 325 aa, unidentified
MRYVGIDISKSSFVAAFPQEKGYNTETFANDAKGIRKFIGKLSADTHHCVMEATGNYGLLLLYLLDKAGITASLVNPKKIKNYSRMIMSVTKTDDMDARLIAEFGEKMTPAPYKLPSETLMLLKQKKTVIRQLQKQLTATRNLQSSLEPLPVKDKKCLTSLKQTIAFTEKQIRHLEEELVQTAESVFEKQLKALTSIKGIGVTLATALIIATGGFSSFDNAKQLSRYIGICPTIEQSGSSINIRGHINRNGDANLRSMLYIAAWSASQHNKACKECYQRLRQRGKSGKLAMIAVANKLVRQAFAVATSNTSYIDGFVSTKPDTAV

SEQ ID NO: 227162 - protein, 388 aa, unidentified
MSYTSDELSPHAAPDRPAVAELYMSLELSPSKWLVTSLLSGSGRMSKHILRGGDGDALLRLIAGLKAKAQRQAGTTVSVVAIQEAGLDGFSLHRLLEGEGIESWVVDPASVAVSRRMRRPKSDGIDGETLLRTLMAFRRGEPRVCSMVRPPSIEEEDRRRVTRERQRLLRERIEHTNRIKGLLMSQGTRGYNPLGKDRHACLETLSTPEGRPLPPRMKAEIRRELERLDLLARQIKQVEAERDALAVASPKAVETPAVLLMNLKGVGPETATRLWLEGLFRTFANRRQLAAYAGLAPTPWLSGRIQREQGISKSGNPRLRTAMVELAWLWLRNQPDAALSRWFIERVRAEGGRKRKITIVALARKLLVALWRYVTHGEVPKGAMLKTA

SEQ ID NO: 227163 - protein, 413 aa, unidentified
MEVLYRHCAGLDVHKETVVCCVRLVSQDKAVTEVRTFETTTAGLLSLSEWLSASNCTHMVMEATGIYWKPVWTILSDGEFELTLANPAHVKNVPGRKTDVNDATWLAELHAHGLIRASFVPEPATQALRTLLRTRKQLVREKVSHTQRLQKTLEDANIKLDVVISNVIGLSGRKMIEAMIAGESDPAKLAALADRRIKASQETLREALRGRVRKHHRFLLRLHLQQIDALDTAIAAIDQEVGASMSACFRTAVKLLTSIPGVSTLSAEIILSEIGTDMTRFPTAGHLIAWAGLCPRNDESAGKRRSNRLRKGAPWLKTILVQCGWAASRVKLGYLQAQFHRLRARRGAKKAVCAVAASILTAIYHMLTSGTFYHDLGSDHFDRRSKQKHTKNLVKRLEQLGFSVQLTSLPAAT

SEQ ID NO: 227164 - protein, 327 aa, unidentified
MKKKFLPVYVGMDVAKATLQVHLQNRQIQFGNHAAGHALLCKELGRFPTAQVVCEATGGYEYAVARAFAAANIPVSIVNPAQVRHSARAQGKRAKTDPLDAALLTDYGQRFQPLPTPPVLEVQRQLEELTLWLTQTIQARAIAKTQAEHQSNPFVRAQHQKLLEHYTQQIQTVEAEIQKLIEQDQMLAQRVQCLAQIVGVGQRTAWLVLANLPELGKLNRQQVAALAGLAPWPTDSGEVKGIRHIRGGRHEARRVLYMPALCAARANPVLKVFYEGLIQRNKPAKVALTAVMRKLLIHMNNEMKKATDKPGKIITAKCQKTKKSLAK

SEQ ID NO: 227165 - protein, 347 aa, unidentified
MNTTTIGLDIAKAVFQVHGIDARGQTTLRKRLRRAQLITFFANLPPCLVGIEACSSAHHWARELCKLGHEVKLMAPQFVKAYVKTNKNDARDAEAICEAVRRPNMRFVAIKTIAQQELLMLHRVRQRLVIERTAKANQLRGLLAEFGIVLPQSFGALERGVPEVLADAENGLSDRSRERFSQLFSQLRELSITVREWEQQILAWHRENPLSRRLDQIPGIGPLGASALVASIGDIRTFKNGRQLAAWLGLVPRQDSSGGKTRLLGISKRGDRYLRTLLILGARSVLRQMQRHPDRAQSWLGRLTARSHPHIAAVALANKSARIAWALLAHEREYRADYRGRMTLVPG

SEQ ID NO: 227166 - protein, 364 aa, unidentified
MSSVSQRSLVHLGMDVHKDSISIGILRPDDSMDVEKIFHDEESVRRFIARMGEPRHLVACYEAGPTGYELDRLLKRLQVRCDVVAPSLIPKAPGDRVKTDRRDCRRLARLHRAGELVVIRVPSPEEEAVRDLCRARGDVVIDLDRARRRLGAFLLRHGRVWRGGSNWTLKHEDWLLGLRFDDPALASTFAHYRSIVEERRLRLQALEADLLPYCEKDPYAEGVHRLCCYRGVDSIGALTLVSEVCDWRRFAKASSFMGFVGLVPSEYSSGERTQRRHITKAGNVHLRTQLVDSAWAYQSGPYVGTRIRRAQQQCPPATAERAWAAQVRLCGRFRRLAARKNVKTVVATAVARELAGFLWGEMTA

SEQ ID NO: 227167 - protein, 315 aa, unidentified
MRSTVAQSVGVDISKDTLDVAIHPGGESFRIANNPEGHRALIKRLKGFDIARIVFEATGAYHRLFQQAMVEAGLPWVKVNPCQARRFAQAIGKLAKTDRCDALVLARMGAVLDLETRVPASKTVEALRELVNARDALIKDRVAALNRQAIAVSPLIKRQLAQRLRQIDGQIEAIDRRLKTLRNADSDLCQRFDILTSIPGVGEVTANVLVVETPELGRLEHAQAASLVGLAPVPRDSGQTHGKRSIRGGRPRARQALYMPALNAIRLNPEFKAKYEAMVKAGKPAKVAIVAIMRKLLILANALIRDRRKWAPATP

SEQ ID NO: 227168 - protein, 428 aa, unidentified
MQAVVASERTQAVWEAVIERCCGLDVHQKTVTACILAGALAQQPSESIRTFSTTTKGLRELRDWLEEHGCTHVAIESTGIYWRPVFHILEDTVTVLLVNAYHMKQVPGRKTDLKDAQWIARLLRWGLLKPSLIPPKPIRDLRDLCRYRKKLTEQASAEKNRIQKVLEDANIKLASVVSNVFGVSGRAMLEALMQGEMSPEETADLARRKLRSKIPQLVEALEGHVNEHHRYLMQMQMEHMEYLEEAIARLHQRIDEKIKPYQHEVELICTTPGIDTISAQHIFAEIGGDISVFPSEGHLASWIGVCPGNNESAGKRKGGRTTKGNRWLKALLVQTAHASSRTKGTYLKAFYHRVAARRGKNRAAMAVAHKQTTIIYHELSENKPYQELGENFFDLRNQKALEHRLVRRLRNLGYQVDLHPEPVTSQCS

SEQ ID NO: 227169 - protein, 290 aa, unidentified
MITTGVDAHKRMHIAVAVDGAGRESARWRGANSIAGWHELTEWAAALGPGCRWGIEGAWNYGRALAQHLVAAGGEVYEVNPRWTAEGRRHARRRDKNDRLDARAVALYVQREVAALTAIVAEDDTTVLELLATERDALVAEATRLRNQLHQQLLHLDPEYAAHLPSPRTQGGLLALAGYTSPDPCPLRQQRAAGVRRLAQRLRLAVEQAKALAAQIQTLAAQRYARLTTICGISLLTAGALAGILGPGQRVAGDAQLAAFAGVAPLEASSAGRVRHRLNRGGNRRLNAIL

SEQ ID NO: 227170 - protein, 268 aa, unidentified
MTFRPHALHLKAELFVKSSRVHVRDDGFTRCNFHLKFFIMVYRGIDISKSSFVAAYPSTNGNRTKTFPNTTAGMRELIGTLAVAEHHCVMEATSNYGCCCTCYIRTVLPSVSPPPKQIKHFSRMMMPVTKTDEKDAYMIAMYGEKMNPPIYKMPSQATIRILTTEGFTYFDNAKQLSRFIGICPTYQQSRTSVNIREHINRNDDERLRSLLYIAFWTALRYNSRECYIRLKANEKPFKVALIAVTNKLVRPVLTITTINSIYRWICPG

SEQ ID NO: 227171 - protein, 344 aa, unidentified
MNITTIGIDLAKNVFQVHGVNERGKAVLKKALKRDQMANFFAQLPPCLIGMEACASAHYWARKLQGFGHTVRLMPPQFVKPYVKTNKNDAADAEAICEAVARPNMRFVPVKSVEQQAVLSLHRVRQGFVKARTAQANQIRGLLGEFGLVIPQGLHHIAKRAPELLEDAENELPGAFRLLIDRLLENLKELDRQVRELELQIRAWHRDNASSRKLERIPGIGPITASALVASVGNAKEFANGRQLAAWLGLVPRQHSSGGRSLLLGISKRGDTYLRTLLVHGARAVILASQRKLEQAGWLAELLRRRNPNVAAVALANKNARIVWALLAHDREFRSDYTREIPAT

SEQ ID NO: 227172 - protein, 424 aa, unidentified
MNLTQNDRLKQVTSDTLIVGVDVGSQTHFCRAFDWRGFELSRRVFKFSNTGMGFLTFLRWTEELMNKTEMKKVIVGCEPTGCYWLTFQKFLQDHDIQLVTVNPFTVNRSMELDDNSPEKSDLKDPKTIALLVKDGRFSTSYLPSGVYAEIREASVCRDQIMKQHVRLSNQIQGWIQKFFPEYLECYADWDSTSGLMLLREAPLPQDILKIGAGGINQIWRNAKVRAAGIKRAQTLVEAAQNSVGLEAGEAARLEIWVLVNDYILKAEQLKRLDEYLEEKVKEVPNVEKLLAIKGVGMSTVIGFIAEVGDIGRFTDPKQIQKLAGLEIVKKSSGKKKGQPRISKRGRRKLRRTMYESARALMIWNPVFQDVFLYYRNRTKNPLGGMQAKIAVACKAIRIFYVVLQTGCDFDEEKFRKDIIRPEAA

SEQ ID NO: 227173 - protein, 342 aa, unidentified
MTIVAGFDVHRRQITFDALDTDTGELMRGRIDATPSAVERWAGSFEGRELQVALEACTGWLFVSRALERAGAVAHLAEPVETSALRGRKRRAKTDREDARWLRTLLSEGRLPESWIPPEHVREWRSRARLRKTLIDERTQWLQRVQATLFHHGVAGVPAELRSAGGREFLEELELPADARERIAIALAMIDSLEGQLRPLESELRKLARRQTGCRALMAQFGMGELTSLMTLTELGDVQRLSASRKAVRMAGIDIGVHRSDRRSRVGKLNRQGSPHLRWALYEAALSACRPSSPDHQDYLALKARGLSHTRASLTIARKLARRSFHILRKLGPAALAPITTT

SEQ ID NO: 227174 - protein, 412 aa, unidentified
MPEEKPVELRVSVDVGYRRHSVAMGLSSGEVLEEFEIEHRLEGFQEFFSRIEKHNLQQGYSVAVAMEGYNGYARPLDSMVRQRGYRLYNINNLKLARFKEIFPGSAKSDRIDARKGLELFQLSDHLPLAKEVLQEVSGTPHENEVLKRLTRRRRRLVNERVRVVNNLQADLQAVCPGLLEITSEASNQWFLNFLLSADTLPQLARLRKATLLKIPAVGRKYASLIEGWQKRAHFGAEVEWVSEMIQEDAQRCLDLGDKIKALETKIKQVAKDSKIAKILLSIPGFGAVCTSELAGEIGTIERFSKEGSLALYLGMSTLDNSSGKYQGSKAPKHVNTRAKAAMMIALDRHRKHVPESQRYYEKKRSEGKKHNQTIRALGRHLCRIIYKLLKAEREYQIRPEKRNTKTKVRSRS

SEQ ID NO: 227175 - protein, 347 aa, unidentified
MDKLDFVGVEVSKLELVVSLQREGVRKPLKTFPNTPPGHQALIRHVSHPGRTVRVCLESTGMYGLDAALAMQRAGLEVMVANPRAVRNFAQALRQRSKNDRLDAGVLLEFAARMPFQPWVAPRPAALQLHALARRLEALTAMQTAEKGRLEAAQATDTLLPALRRDLERSLRSLRRALARLAGEAVKIIEQDPGLKLRFDLLISVHGSIAATSAIQILAELAVLPQDCDVRQCVAYAGLDPRECTSGTSVRKKARISKAGNAHLRRALYMPALVAIRHQPNLRAFYEHLRAQGKPKMVALVAVMRKLLHAIYGMFKHQKPFDGAKVYVLPTAKAPAQAEISTKEDAA

SEQ ID NO: 227176 - protein, 387 aa, unidentified
MPSAISPPKAVLGIDVGKSSHWACLVTREGEVALNRRVRNSEGDLDGLFSQVACDTIVVVDQCRNIGLLAISRARLAGLGVAYLPGLAAHQAARLFAGDAKTDERDALVIAKTALGIPDALLPVPEPDEALEAARSLAAQRSHMVTCATRDKNRLRSILLESCPAFEALADLGDRRWLNMLEKLGGPWGCIDAGKPAFGAVTKGANRARMDAAWNAAMASTRPSKRRVDAENPQVRMLARRIREALEEADGIDREITALLAGDGTYECLVTIPGIGPRTASELVIGINIEDFPDHDHLASYCGIAPRNRRSGTSISSVSASRQGNRRLKNLLIFSCNSLVRSENRFGERYRACRGRGMRHGEALKAVARKRLKVIYAIMRDKVPYSA

SEQ ID NO: 227177 - protein, 309 aa, unidentified
MNIHPGFVGIDISKHHLDIFGVLHGAEQVANAAPAIAKLARRCARAGDFVLFEATGIYDQLLRQALVRAGVSFARVNPSRAREFAKAAGFLAKTDRIDARMLAAMAQALQPACQAPADPQRERLARLAKRRDQLVAIRQQERTRRHECLDDEIARDLDHHIAWLGRSIVTLERQIKALLAENADLNRSQQLLRSVPGVGAITATTLLALLPELGARSPKKIAALAGLAPFNVDSGRFRGKRLIRGGRKRVRDALYMAAVTAARSQTRFTAFYQSLREAKKPAKLALIALARKLLITLNAILRDQAPFHA

SEQ ID NO: 227178 - protein, 376 aa, unidentified
MIEKLRFLGLDVHAETITVAVAEADGEVRSLGTIANREESIRKLIRKLGPVEHLRACYEAGPTGFVLYWQLTQLGIKCDVVAPSLVPKKPGDKVKTDRRDALKLARSHRSGDLTAVWVPDEASEALRDLVRQREAAKQDQLRAKHRLTKFLLRTGQRPPLGVKAWTERYVEWVQQVRYTHPAQEATLLDCLNEVQHMEERVKRLEQSIVEVIQLAPVPMQDVVRGLQALRGIAHISAVTIAVELGNITSRFERARDLMGYSGAFPSEDSSGERIRRGGITKSGNAHLRRIVVESAWSYRHRPAIGARLRKRQEGLPAEITEIAWKAQNRLHKRYMTLMARGKEQRKTMTAVARELLGFIWAIGIKAEASCKQQLAA

SEQ ID NO: 227179 - protein, 320 aa, unidentified
MEAVLGIDIAKAKFDVALQCSDGRVRRKSVPNTPAGFTALGAWLTQQRVTRVHACLEATGSYGEALATWLHDAGHRVSVVNPMTIHAFAASRLSRTKTDRTDAALIAQYCATQHPAPWQPAPREIRELQALIRRLEALQDMRIQETNRLSSGAVPPAVVRSLETVIATLSDEITAVQQQIRDHFTQHPGLRAQRDLLTSIPGIGDSTAAVLLAELFDKQYRSARQAAAFAGVVPRIAESGTLKRRGRLSKIGPSRLRKALYFPALAGLRFNPSLQALRTRLRAKGKVPMVIVGAAMRKLIHLAYGVLKSQRPYDLTIVRA

SEQ ID NO: 227180 - protein, 344 aa, unidentified
MGEVSTIGLDIAKSVFQVHGVDADGAVVIRKRISRAKVLEFFAAVSPCLVGIEACPSAHHWSRKLQALGHTVRLMPPSYVKAYLKRSKNDANDAAAICEAVTRPSMRFVPTKSEQQQSGLMLHRGRQLLVRQRTMLSNAIRGHMAELGIISAKGRNGTVELLEIITNADDDRVPTVARLSLDALARQYANTTAEIRVFEKHINAWHRSCEESRRLEEIPGVGPIVATALVAEVGDWKAFSSGRNLAAWIGLVPKQHSTGGKERLGGISKQGNRYLRWLLIAGAMAVIRYARQHGTKRLWLARIMERRPIKVAAVALANKIARMAWAMMVHGERFKEPRLLSQAA

SEQ ID NO: 227181 - protein, 317 aa, unidentified
MNNIENQTSVNIGVDVGKANLDIALHPSGQFYSIPNCEAHIREFIKILKGYAIERIVVEATGRYEHTLVQACDQAGLPIIVVNPTSVRRYAQAIGVLAKTDRIDAQVIAQYAATLKPEFKPIPDKTSQKIKDLLVRRSQLLEMSTMEKNRLQILPKALHRSIKSVLKMLQNQIETITRQIEQDVAKVDHWRIKTEIMTSVPGVGKVLAYTLLSELPELGSLNRKEIAALVGVAPINRDSGKLNGKRRIRGGRHRVRTVMFMAMLSSIQCNPVFKRFYEHLKAQGKLPKVALIACMRKMIVVLNTMVKNQEAWREKMA

SEQ ID NO: 227182 - protein, 343 aa, unidentified
MKLSRVGVDLAKNVYQLHGVDRHGKTVWKRRLRRGQWLQALLDKAESGCEIGMEACTGAHHWARELQSRGYTVRLIAPQFVKPYVKSNKNDANDAEAICEAMSRPNMRFVTVKSVEQQDIQATHRVRSEIKDQRNAKANQIRGLVAEYGLVAATTLLALRRAIPCWLEDADNGLTDYFRSLLHGLWGDLVALDDRMTELDKQIKTLADSNEVTQRLQQLRGVGPLVATALVATVGTGEQFKKGKQMAAALGLTPRQCSSGDKQRLLGISKRGDVYLRTILIHGARAVVSQAKHREDPLSRWVTSISKRSHPNVAAVALANKTARMAWAMLRNDANYDPDFAIH

SEQ ID NO: 227183 - protein, 432 aa, unidentified
MEQSTRFIGMDVHKATIVVAITATGEVGKATAYGTVPNTTAALEKLVARLRQAGSGPMKFCYEAGPCGYGIHRTLTRLGEDCMVVAPSMIPRKSGERQKNDKRDAASLAVLHRGGLLTAVWVPDAAHEAMRDLIRARQAAVRAVRAARQQLSAFLLRHERIYRDGRTAWTKAHRGWLADQSFAHPAQQIVLEESIEAVRLGEQRQSRVEGHLRAQIPTWSLFPLVQNLCALRGLDMIGGAGVAAAIGDPSRFASAPDFMAYLGLVPSEHSTGPKRRIGAITKAGDVHARTLLIEAAHAYRFPARVARHKLAAIDAVPEAVRAIAWKAQTRLCQRYRHMMAKGKPRQVVVTAIARELAGFVWSIACVTSDPPIKNSAVTTASDEVCPIAAVDRAPHRQPPKGTVRRVGRPPTSQCRAGRGQPDGMIAHHHSAD

SEQ ID NO: 227184 - protein, 426 aa, unidentified
MKGTQNEKISQIKFSTLVVGIDVAKETHYARAFDFRGIELSKLLKFSNTAEGYEKLEEWMQNICQQHNKTEIIVGLEPTGHYWFTLGDYLKSQGHKLAMVNPFHVKRTKELDDNSPSKNDRKDPKTIAMLVKDGRYREVYIPEDVYQELREAVTERERLVQRMNTISNQVTRWLDIHFPEFNTIFKDWRGQAAIQVLRNYPTPDKIVAAGAEKIEETWKSTMKRTAGLKRAQELVRAAGKSIGRRTGLIAAEASLQNLLNEYDLYSQQYQQLEQLMLELLQQVPHGEKLLEIKGVGLVTAATFVGEVGDIRRFQDPRQIQKLAGLNLVENSSGKHKGKSKISRRGRKRLRHSLFMAMITILATNPEFRQLHQRNLKRETNPLNKMQSIVALCGKLIRVFYALLRTGNDYSAEKMLGDIKQSMKTAA

SEQ ID NO: 227185 - protein, 323 aa, unidentified
MNTLDFLGIDIAKKTFDVALLRGDKFRHKKFPNNAEGFKQLDAWLLKQSVIRIHACLEATGTYSEALAVHLYQAGHTVSLVNPARIKAFGQSELQRNKTDRADATLIARFCEKHRPVAWVPPPTEIRELQALVRHLDDLIGTRTQLTNRVSDGPKVESVLESLRSVIKTVNAEIKLTRKKIRKHINSHPGLKEDCDLLETIPGIGERTATILLGEIQHLGHYKHARQAAAYAGLSPRLENSGNSSKRSRLSKTGNARVRKALFLPAITASRYNPVLRQFSQRLKRRGKTKMVVIGAVMRKLLHLAFGVLKTRKPFDANHAIAA

SEQ ID NO: 227186 - protein, 371 aa, unidentified
MSQSSRTLYVGLDVHKDSIAVAHAPEDRDAEVVSLGAIGTRQCDIDKLIRKLRSKGATLVFVYEAGPCGYWLYRYLTRKGLSCHVVAPSLIPRRPGDRVKTDRRDAVMLTRLMRSGDLTSIYVPGIEDEAMRDLSRAREDAMQDLKRSKRRLKSFLLRQDIRYVGRANWKPAHLRWLASVVCATAAQQIVFQEYVQAVTQQQERRERLERELHEAVKGWRLYPVVEALQALRGVELTGAVILATELGDITRFDTPRQLMSYLGLTPSEYSSGERRRQGGITKAGNSHARRALVEGAWAYRYPAKVSRHLQLRLEKVPAEVQAISWKAQVRLCKRYRQLSARGKHVNQVVVAIAREMAAFAWAIARLVPVAA

SEQ ID NO: 227187 - protein, 326 aa, unidentified
MMTIGIDVSKAKIDCLWLRDVVIGKVKTKIFENTAKGHSELLQWAIKNCRVELGEIHFILEATGIYHEALAHALYEAGTNVSVVNPAQISSYGKSFGVRSKTDKKDSLVIARFGATQQPLFWQPEPSEVRVLKALISRYEAVSQDIQRESNRLEKATISCVSDEIIRSIETMLAQLKAEKKRLEDLINKHIDQHPNLKQDRALLESIPGIGPIVSRLMISVIRSRTFTAAPQCAAFLGVVPVQYESGSSVRGKSRLSKAGNASIRAKLYMAAVVATRHNPDIKQQYERLLKNGKSKMSALGAAMRKLVQICFGVLKHQTPYQSRVS

SEQ ID NO: 227188 - protein, 373 aa, unidentified
MKIVGCDLHTRYQQIAMLDQETGELIERRLEHESGEARAFYAALSSPVRVGIEATGHTRWFERMLAELGHELWIGDAAQIRASVVRKQKTDARDAAHLLELLLSERFPRIWRPTMAERDLRQLVWHRQKLVWMRNAVGNQLHALAMGEGVCRKKKLFTKKGRAELESLGLGVWASYRRQELLTMLDRFDGSLGELDRAVAEQAEQNAAAVLLMTHPGVGPVTSLAFVLTLGPVERFERSKHVVSLSGTEPARALFGRTAAVRCDLETRQSDDALVVGRGRTHSGAVGWRVTARLSAPEAAPGQWRGQGCDRQKAGGTDVLDAARPGQLCATGSHARQPVGHPGDGVTHRWADWAPCLPEEVGESEQRIMVGSQ

SEQ ID NO: 227189 - protein, 382 aa, unidentified
MQASTVDTPTAGHCGTIFVAIELSQKTWLVTLHSPDRDRISRHKLEGGDHAGLLAQIEKVRGRAAQKLGSMPRVVSCYEAGYDGFWLHRLLEAAGITNFVFDAASIAVEQRSRRSKTDRIDGELLLRTLMAYLRGEPRVVRIVRVPSVEQEDARRASRERDRLVEEQTAHTNRLKALLRLAGMAVGNPRRRDWLAWLERQRDWRGELLPPHLLAEVKREHARLMLLREQLAALEQAQAAQDITVPAPMVERRNKLQRLKALGPAFSTTLVNEVFYKDFRNRREVASYNGLSPSPWKSGGIDREQGISKAGNHRARVKAIELAWLWLRHQGDSALSRWFRARTANAGKRARRIAIVALARKLIVALWRYLTTGLVPEGAAMKA

SEQ ID NO: 227190 - protein, 406 aa, unidentified
MADIIALDVSMGKSNVAWYHQKNCRGEFIFRHTQSGFNQLLSTVQAANHPIIFFEATGIYSNPVEHFCISHNLKYCRLNPLELHLKSENLRRVKTDRQDARKIALTVQDNLFRLTVPKSPRFAWLHELSRFYNQLNNDWDHHLVQLHIALEQTFPELKQLFKNKTSKLALNIVELFPHPDFVKPLSRTKLKNRLIKSTDKKLSNMKGFKYADQLLKLAQDAYPAASQDSVQVDEVRYYCRLLIELTKQKEKIVKQMITTAQEDETFQYYVSFPGIGPQTAAQLMAELGDISRFDNANQLNAYVGIDIQRYQSGQGGHQDHINKRGNPIARKLLYFAVGNMIRQQHHAPSHIVDYYYHLKQKRPYPKLNKVAMVACMNKTLKCLLSMIKHHTKYHYRYTDSRSLVKN

SEQ ID NO: 227191 - protein, 400 aa, unidentified
MLLFFEVITMIFVGIDVAKDTHYAAVSDDSGAVLVKPFAFQNNAGGFCLLLKKLSEFDRSKLLIGLESTGIYSENLICFLYESGFRLAVINPIQTATLRKTAIRKTKTDKVDTMLIIKSLMVNSYRLYSQRDADSLKLRTLCRFRQNLKKSKARLKIQIAGYVNLVFPEFGKFFKSGIHIAASYALLKKYSSPKEIAALRTSTLCTLLSKASHGRFGKDTAEALKSLALSSVGVKNPYISIQIAQTIAQIELLEQQIKDLNSAIEEAMESLNSVLMTVPGIGAVNAACILGEIGDIKRFSKPCKLLAYAGLDPTVRQSGQFTAKSTRMSKRGSALLRYALINSAWQLTLNDTTFKAYYDLKRSQGLNHYGALGHVAHKLTRVIFKLLTSDTPFNPAKLVA

SEQ ID NO: 227192 - protein, 453 aa, unidentified
MSQFQTLEAPSAAPEFAAFIGLDWADQKHSWKLVVAGSAECESGELKNTPEALHLWASDLYSRFDGRPVALAVEQRRGAIVSQLGNFPHLILYPIHPTTAARYRQAFFPSGTKNDPLDSALLLELLVQHRDRLRRLDPDTPVTRLLQVLVEHRRKLVDEKTRQSNRLTAALKSYYPQPLQWFDDIDGPLGCAFLQRWPTLAQAQRNHPGTLRKFFSQHNCLSADRIRQRIEAIHQAVPAVTDPALLEAGASVVSGIVRLSQALGDSIAEVDVKLQTAAAEHPKAHIFAGLPGVGKVLLPRLIAAFGTQLDRFPSADELQRYSGIAPVRSQTGNTEIVHMRRACPKFLRQTFIEFAIHSVAKSVWARAFLQYELASKKEYFVAIRALAFKWQRVLHACWRSNTPYNEQRYLQVLQKRNSPIVKLFPIANKALETPTSVEWKSIAGFNTLASKNT

SEQ ID NO: 227193 - protein, 327 aa, unidentified
MKLPHVIGADLSKASIDLFCHGFQSHLKIKNDMLGFKEMLQWLIQQKITLGNVLIVMEHTGLYSYHFESFLFEQRISFSKVPALAIKRSLGMIRGKNDRIDAQRIARYGCEKMDTLKLESPANADLARLQILHSTRERLVKQRSSLMCAVKEYRIILPKEDPVIADQLALIDTFTRQIKKIEQQINLMIKQQSLDNTYQLLTSVKGVGPVVAVATIIKTKNFTAFKNARKFSCYTGSAPFEHSSGTSIKKKNRISHLADKPMKTLLTQAAKTAIQHDKELKAFYERRLTMGKSKKSTINVVRNKIIYRMFAVIKRQTPFIIQYSKTA

SEQ ID NO: 227194 - protein, 327 aa, unidentified
MGGSPYLEQNDDAMTSKENQIEFEQIIDRGCGLDVHKAVLVATIRGTGIKEETRSFNAFTESIEQLRDWLQQNGITHVAMESTGVYWKPVFNILEEDFEILLVNARHIKNVPGQKTDKKDSRWIAKLLLSGLLKGSFIPPKHIRELRDLTRYKRKVIEQISSEKNRIHKLLEDANIKLSSVVSNLSGVTATKIIDAMIDGQEDVNELVKLRHGKMQSSIEELALALKGKLTLHHKFLLQTIKESIADKNKIIVKIDLQIDKQLLDYEMNQDAELLATIPGVGKEGASYILAELGNNMDQFPDEQHLASWAGMSPGNNESAGKKKAHA

SEQ ID NO: 227195 - protein, 352 aa, unidentified
MKQDSVKVVLPTIGVDLGDRFSHVCELGLDGEVLERAVVPTTRRGLERKFDKLTPHQIVIETGTHANWVHDLLVDAGHRVVMADTRKTRLISANHRKCDQVDAEMLARLGRSDLALLAPVEVRPEHLRQDLTLVRARAALVESRTALVNSVRGLAKSAGHRLPKCSAESLHKQAIDASLEQALRPLMVVLEQISGQIKSYDKQIDELCEARYPQTRLLRQVKGVGPLTALYFVLMVGDPMRFKSTRSAGAYFGLVPRRDQSGGRDPQLRISKTGDRMGRVLLVQCAHRVLGPFGVDSDLRRFGLRMAAQGGKAAKKRAAVATARKLAVLLLSLLRTGEVYEPLRKTKKSKSS

SEQ ID NO: 227196 - protein, 356 aa, unidentified
MVMVLGVDVHKDTHTVVAVDDVGRAHGERTIRATDDGHRQLLEWTRRQFPHDRVWAVEDCRHVSTRLERALLAAGETVVRVPPKLMAGARSSARTRGKSDPIDALAIARAALREPDLPVARHDDTSRTLKLLTDHRDDLVIERTKMANRLRWHLHELNPELDIPARGLNRLNQLDRLTTWLSEQTWTEQISQVLARLAAELLTDIRAATVRVNALEREITTLARAAAPRLMDLQGAGGLTTAKIVGETANVTRFRSEACFAMHAGVAPIPASSGRTQRHRLARGGNRQLNAALHRIAITQVRITGSPGQLYYQRRRARGDTAMEALRALKRRLARVVFNLLQPTATSTANDLSAAA

SEQ ID NO: 227197 - protein, 309 aa, unidentified
MEIVVGIDVSKERLDVAILPQEEVFAVGNDHAGIDELVARLKGIGVDAIALEATGGFEMLAVAGLSSAGLTVLVVNPAQVRAYAHAIGRRAKTDPIDAAVIAAFVLATKPEIRPLRDAETQALSELVARRRQIVQMIVAEENRLRMALAKQAQKSIKRLLKALRRELESLDADLDSHIRKSPVWRVREALLTSVPGVGATTARTLLAELPELGSLDRRQIASLAGLAPWTRQSGKWKGKSFIGGGRGKVRAVLFMAALVASRYNPDLKAFRDRLVAAGKPKIVATVATMRKLLTILNAIIRDGRPWQNA

SEQ ID NO: 227198 - protein, 327 aa, unidentified
MEREYIGIDLHKAFFQACAINASGDRQWEQRWPTNEAGIAALLTRCGPHSHLAVEASSPTWAFVDRVVDQVGGMHVVDTRKTRIKAGFAAKTDRLDARRLADALRRDSVVGIYYPPPALRDLRELGRYRGQLARLQASLKQRIHALLLRHGIATPKYLFTQRGLRWLDTVVLPGWAGAELHGLRQVLADIRRQLVPVLTAIRQVAARDPIAQRLDQHPGFGPILSVTLRAELGTIERFPDGAHLASYAGLVPRVEQSGRRTWRGRITKKGSPWLRWVLVEASLHQFRRQDDLGRWARRLAVKHGVLKARVAVARALCHEVFAIWPRA

SEQ ID NO: 227199 - protein, 342 aa, unidentified
MKEFAIVGVDLAKNVFQLHGADAEGRVMMKKRLARDRFLLFMSQIEPCKVAMEACATSHHWARELTALGHDVRLIPPIYVKPFVKRQKNDANDAEAIVEAAMRPSMRTVPVKSKDQQALAMLFRTRELLVTQRTQLVHALRAHLAEHGVAVRGGRRSLEPFIKALECPVNGLSDQVREIGSLYVDRIAQTAKEIEVLECRIDEESSEHELTQRLRTMPGVGPVTAMAVEAFAPAMETFARGRNFSAWLGLVPRQHSSGGKQRLGRTSKMGQRDIRRLLISGAMSIIHWKGRDGGKPGSWLARMLSRKSRMVVAIALANKLARIIWAVVTHKTVYRDPVGAIF

SEQ ID NO: 227200 - protein, 392 aa, unidentified
MRKVIMIGCDLHDAWMRLRIAVGAEKAVAKSFATADAAALIAWVKEFAALQGATRIVFAYEASGQGFGLYDTLTDAGIECYVLAPTHLPHTAHGRKRKTDDNDAQMILDEIRAHVLAGRKLPAVWVPDPQTRDDREAVRMRLEIGEQRTRIKNQIRNLAKRCKLTWPVWFTKSGNWSRRSLQWLRSVAAGEGQQVGRRIQVTLQTLLDLYQELSRQLGVLDQAVAKLACTPRYAREFARLRLLPGVGTLTAMVFLTELGDLARFANRRQLAAYLGLIPAAYESGQRDDRKGHITRQGPARVRHLLCQAAWAAQRVCARWKDRYEQLKRGSQKRAKIAIVALMRLLAIQMWHTARCQKLEELRDAAGPPETSARARQKGPPHPPYAIASACSG

SEQ ID NO: 227201 - protein, 330 aa, unidentified
MSAKVIIMSDPINNYTMIGVDVAKLKLDIAIDDKKVLTIDNKEESFKKLLKIIPDIDQVCFVMEATGGYERKLVSFLQSKGIAVAVVNAKRVRDYANSMGAYAKNDHIDAQMIRHYAHAAFAKNRLKLRESRTEIAQQLEDLLRRRNQLVGQRAVEKQHLEATINKESVRSITRMIKQFDKEIERIEVKIKAYIDADENLKKSMEQLIQVQGIGEVMVLTILTQLPELGKLSNKEIVALVGLAPYCKDSGKKTGRRAVFGGRMLIRSTLYMATLSAVRYNKPIREFYQRLIAHGKLKKVALVACMRKLLTILNSMAKTESEWNPDFAKTA

SEQ ID NO: 227202 - protein, 419 aa, unidentified
MDVVVERCAGLDVHKDTVVACVRVPAPGGGRRSETRTFGAFTVDLLALRDWLLAHGVTLVGMESTGVYWRPVFYVLEDVVECWLLNAAHMRNVPGRKTDVADAAWITQLIEHGLVRPSFVPPPPIRELRALTRYRKTQIEERTRETQRLDKVLQDAGVKLSSVASDILGKSGRDMLDALVTGTRDPDVLAELARGRLRAKIPMLGQALTGRFGPTHALVVGEILAHIDYLEEAIGRVSARIEEVIAPFTAERDLLTTIPGVDQRQAEALIAEIGVDMTRFGSASRLASWAGMCPGQHESAGKSRSGRARHGDSWLQRHLAVAAMAAGRSKDTYLAAQYARLVGRRGKARARKAVGHSILVAAFHMLAGGVPYEDLGGDYYLKRNSPERRARKSLSDLKAIGWTVTENPDSVTCRPPRAA

SEQ ID NO: 227203 - protein, 412 aa, unidentified
MEILYQSCCGLDVHKKMIVACLRRTDETGKVGKQVRTFGTTTSELMSLSDWLVEAGCTHVAMEATGVYWKPVYNILEGQIELLVVNAQHIKAVPGRKTDVKDAEWVAELLQHGLLKASFIPPQSQRDLRDLTRYRTRLVRERARIVNRLQKVLEDANLKLAGVATDVMGVSGRAMLEALLAGQTDTEQLAELAKGRLRKKIPQLKEALTGRVREHHRFMLSEQLSHIDYLDEAIERLAAEIGQRLRPFEEEIRLLDTIPGINRQTAEELIAEIGADMSRFPDGHHLASWAGMCPGHNESGGKRKSGKTRKGNRWLRSTLVEAAHGAAHTKDTYLASHYHRLVGRRGKKRALVAVGHSLLVISHYVLKRREAYYDLGSNYFEELHRQRLERNLVKRLENLGYKVTLEALSPAA

SEQ ID NO: 227204 - protein, 414 aa, unidentified
MEAAVITAVGIDVSKSKSTVAVRRPGGEIVLRPFDVRHTNSDLKKLTSTLKKLGGDIRIVMEHTSTYWRPIALTLKEAGFFVSVVNAMLIHDFSDNTIRKLKTDRADALKIANYALTFWDILPPFNNEEETRLLLKMQSRANERITATATALRNGLIALADQTFSGVNIAFAPNTKNANGHEKWVDFFLRYWHKDCVCQYSMEAFTESYRGWCKRKNYKFRTDTAHKIYLLAQESVATLPKCESTKMLITQACKSLNAVCEAKQSTQLEMQRLAAMLPEYEVVMQMEGAGPVTGPALMAEIGDVRRFKNKKALVDFAGIDAPPFQSGAFESKSRHVSKRGSPHLRRTIFIISNIILTRSNPENAVYCFMDKKRSEGKPYKVYMMASANKFLRIYYARVKECLETFDAHQKNTQG

SEQ ID NO: 227205 - protein, 388 aa, unidentified
MIQVDDLSRSLIAFEQISTLVIVVELSQSSWLAAGVVPGIERRPLKKLDPDPTALLHLVEGWRDRATKAGRAITRTVLAFESGRDGFWLARWLRVRGVETFVMHSTSVAVSREPRRAKTDRLDTEMLIRVFLGWLRGEPRHCKMVAIPTLEEEDARRPSREREILVGERTRIINRMKAALVRLGIRGFKPGLLTAPQKLDALRTPEETPIPPNMLDEMRRDMARLAWVREQINAIEQARLERLERAPATGRHAMVRMLARVIGVGVETADMLVQEVLSRNLRDRRAVARYAGLTGSPDESGSKRREQGLSKAGNARVRRGLIQLAWRFLRFQRDSALAQWYRGRTEDAAGKRKRTMIVALARKLLIALWRLVTIGEIPVGVALRSAVA

SEQ ID NO: 227206 - protein, 391 aa, unidentified
MICVGIDVAKDKHDCFIISSEGVVLADVFTIPNNREGFNCLLGRIQACAMPGNEIKVGLEATGHYSCNILGFLLDNGLDSFVINPLHTNLYRKSLSLRKTKTDRVDARTIAAMLMSDVGLKPYTDTAYHNEELKSLTRYRFDKVKERAQLKQSVARLVCILFPELEKLVPTLHMASVYALLDEFPGAQQIADAHLTHLKAVLHDASKGRYGRDRAIELREAAKASIGSRMPAKSLELRHTIRLIRELDAEIDEIESAIQQIMDDIHSPITTIPGIGTRMGAMILAEVGDFSRFDSPDKILAYAGLSPSTYQSGQLTNCYAHMEKRGSRYLRFAIFNATKYVCLWDPTFAAYLAKKRAQGKHYNVAISHAAKKLVRLIYALEKSREPYHQAA

SEQ ID NO: 227207 - protein, 344 aa, unidentified
MTTIQLKQIDPESKPDLFAGIDVGAEEVILVIRKNGKPFDPQKFANTPADRDRLVKKLVKLPGIIVCMEATGVYHFDLAIALHDAGVSIMVINPKASHNFAKVLMKNSKTDAVDANTLAEYAARMDFVAWTRPSNETIALRSFARRIDALTSQKAAAKNHLHALTATSETPKAVLKDVKLAIAQLQKRIDSLTAGALILIGKHPDLERILALLIGIKGIGNTSAIALMGELLLLPPDLSHREWVKFAGLDPRAFDSGKSVHKKTRIAKAGNRHIRSALYMPALSAKQHDPHVKAYFQHLVANGKKPLQAICAIMRKLLHAIHGMLKHNKPFFNTRFYAIPECNG

SEQ ID NO: 227208 - protein, 400 aa, unidentified
MASGHMPARIGRTWTYDCTASTGSNLHKHLACRANGMDPALGLGWDVEVSTAEQETSMNIVRIGLDLAKYVFHLHGVDERGKVVLRKTLRRPGVAPFFANLPRCVVGMEASNGAHYWAKTLSEFGHDVRLISPQFVTPYVKSNKNDRNDAEAICEAVGRPNMRFVPVKSAEQLAIQAVHRIRSRLVASRVRLVNQIRGLLGEHGVVVAQAIGNLRRALPRIIDDEANGLNSIVRALIGELREELSDLDGRITIYDRKIINLYRMSEACQRLGEVEGIGPITATALVAAAGDGKCFKNGRQFAAWIGLVPKQRSSGGRSRLLGISKRGDRYLRTLLIHGARAALGRTRGKQDPRSLWLLKMRERRHANVVAVALANKNARIAWGLLASGMNYDQHLTVSSA

SEQ ID NO: 227209 - protein, 319 aa, unidentified
MDSTKYIGMDVHKETISIAVLNSSGKLVMETIIETKASTVLEFVQGLRGSLQVTFEEGTWAAWLYDLLKPHVRKIVVCDPRRNALLKEGNKSDRIDARKLAELLYLNKLKPVYHGEHGVRALKELVRSYLTITKDLGRVMTRVKAIYRSWGIPCTGKQVYAPRHRGEWLGKISEPGVRRRAEFYYQQLDALRALRQQVRRDLLAESKKHQAWKRLCQIPSIGPIRAAVLIGILQTPHRFRTKRPLWKYSGFAIETRSSADHRLVDGQLQRSQKQISVRGLNPDCNHDLKNLFKGAAIVASSKPGPFQEFYAALLEHFHK

SEQ ID NO: 227210 - protein, 512 aa, unidentified
MIAGLTMESPLRYHGQDTDDKNAEFYLGVRACKLEQRRTSTWSSRPSFCESAWRAPKGVARQTAPVVRKTTGDCEEMLAVVPEKGHPSMEHVRVPERSIGLDVHPTTVYVTVLDPSAERFEQYEFPMEPRAFAAFLGSLRPGDRVALEATGNTWLLHRQIKEVVDDVVVAETTQLKRLLGQGRKTDRNDSMVISYLAYIGGLPTVWVPDPDTQQAREFLQYRTGLVKDQTRWMNRIRALFRKYGLTCPASDLQSKDGQLFLVKAQSQLPWYAQEQLATMMEQLDILGKSLERAAAIAEKMAEKRGTEAELLSTIPGVDSLLAVTILACIGDINRFPTPASLANYAGVVPSVHSSGKKRRHGSITKRGSRMLRWAVTQAIQSLRNVPGPFRNLYRRLSRGDKAGRAVVACARKLLVVIWHMLRNGEAFRGAEPEKLARKEARRQNRRLKADVTLAGSKARHHQALTGNLALLRELALRKESNATFPEQLRAHLRPGTESDQLLRMKTRKPAPR

SEQ ID NO: 227211 - protein, 340 aa, unidentified
MKHIGMDVHSTTTDACVRNGKGIIVLERRIRTTKSELIDFVESIRGQKRVVLEEDQMADWVTRVLQPHVDEVIRSQPQYNKLISGSEDKWDKMDAKSLSELLYLNRIKPVHHPEMIYRTLREAVRAYWTVSRDLTRAKNRLKGWYLFNGLHETGRSIYSLRNRSKHLKAIKQQGRNIELVKLLYEQMDACRQLKAKYVRMLRNAAQPVKDLVRLATTIPAIGPISGYTLVSLLEDGWRVPNKRKLWRYAGLSLRRYESRDTGFKGASKTGNRILKRVVMSAAITIVSRGEPNALLSLWERDIRKNVDPKRARRNLARKIVVIAQHLLRSRQEYINELIKV

SEQ ID NO: 227212 - protein, 360 aa, unidentified
MFLVAPRPQTPKAMDDYTHFVGIDVSKHTLDVMLWQFDQGTLDKTACQTSNDAPGHQQLTQWLNDHRAPIETTVLCLEHTGRYDDALLEHLTLGGWICALEKTTVLQKVKPEHHRKDDAFDADLLAEYAYRYRDKLSLYQAPHPVIEQIRLLYGERRRLVTHRATVKQLQSEQGYNRAGRPSQAEAFAHQLWREQRAFYDGQIDALEQKIDDLVASDQGIRHRYEQVKAIDGFGPKTSLKWLCLFYGQEHLDARRICSRFGFAPHGEGSGTSRRRPGRSTGHGASEVRKLLTLCARSAGTHHAKYRRYKERKLAEGKVSQLVTNNIINKLIRVACAVWNEDAVFDPNHVSRFAQNAIATP

SEQ ID NO: 227213 - protein, 387 aa, unidentified
MQKPDDDSKACRTAFVQDNTLVAVIEMSLSSWLVAGMIPGVSREPVKKIAPDAEDLLQLLYRWRDGAITAGKEIIRIAVAYETGRDSFWLARWLRERGIDAQVIHATSVAISREHRRAKTDRIDTAMLRRGFLGWLRGEPGHCSMAIVPTVTEEDAKRPCRDRESLVHERTSIVNRMKAMLIQFGVRNFNPVLRKASEKLDAVRTPEGIALPPNTVCALRRNMERLHLIKEQIKAIEQAQLQSLQRDPTEKMNAIIFLLVRIIGLGVETAQQLAHELLFRNLRDRKAVARYAGVTGSPDESGSKRREKGLSRSGNGRVRKILIQLSWRIVKFHPESDLVIWFKTRTQNARGSRKPMIVALARKLIIALWRYVNTGVVPEGFKLRPAS

SEQ ID NO: 227214 - protein, 387 aa, unidentified
MVNNSLIGKAGAGEASIASRASTRRRREFDRVQVFEAATKREPRRHRGTNPNSRLNRPRPTRTASSYLQERDTTMSEPIYVGIDVAKDSFHVATCPDFVKICLPNARDGHRRLCQILKEHSIALVVLEATGGYERPIAAELLNASLPVVVVNPRQVRDFAKGMGQWAKTDPIDAQVLATFAQIVKPAPKTHATAQTNELSELVRRRRQLNDLRTQESNRSLMIHHPKVKKSIRKMIKTLDFQIDEIDQLVREYIDADDDFKRKDRILQSTPGVGPQTSAMLIANLPELGKLNRQEIAALAGLAPWDRSSGKYDGKAHIFGGRKDVRSVLYMAAFTACRFNPVIREFAQRLKQQGKAYKVVITACMRKLLIILNIMVRNQSLWTPKIS

SEQ ID NO: 227215 - protein, 356 aa, unidentified
MLSKKRRTVKILKQNVGVDISKDEFKVSFWQLLDDQKTRIKGTRTFKNNLSGFKAFLNWIIKKTSADCSVQITMEATGVYHEQLTHFLYDQSYRVNVILPNMGKSYAKSLNLKTKTDKVDANMLGQLGIERDLFQWKPASENMRTIKQLCRSRVQILTEKTAIENKKHALSNSYQPNKAVVKRMQQRIKLLEKQIKAVELEIEQAIRQDEQLSQKVDNICKAKGLGIITVATVIAETNGFELFTSRGQVVSFVGYDVVQRESGSSIKGKTKISKKGNKYIRRALYFPAISVVTHEPQFKQMFERIVKKSGVKMVAYVAVQRKILLLIYTLFKSGNVYDTNYYKNNQSQEKPELTPA

SEQ ID NO: 227216 - protein, 444 aa, unidentified
MHFNKLLQMLDGSSYLSVGLDVGADFTWMSIALPNGSFPWKPFKIIHHDPYSRELAVAKIKEAQELYSLKSRCFLESTGIYHIPLLCFLRDKGLDCSVINPIITKNSTNINIRKLHNDKFDSKKAALVGLNASLKTSIIPDEDIADLRNLVRDYYYFKDLQSSVVLKLNAELKVSFPAYLKVFSKVTTQSSLKLLGAYPLARDMLAAPGEELVGIIRSTARFGETYALSRYEAIPEAAKDSAIFGRDLPSHAVRIRLYIESYQTYQKHLDTLLLALHEAVDRLHGTPVYDRICLLQSLRGVGFLSAVVLMAEMGDFDLFSSPKKLYAYFGLDPAVKQSGKLNGDKVHMSKRGSSLARRVLHMVALNNLKVDKGTKTPVNPVIYNYYTGKCANKKKNVAVGAVMHKICNIIFAMLRDNKPFEIIPPEVHCKQYVLNHTASVTNAA

SEQ ID NO: 227217 - protein, 438 aa, unidentified
MIKREKIELVKKQKMIAGIDIGEERHCVQFIDNYGEAKGKAKKISNDREGFKRIEEMINGFSGVDHNILFSMEPSGDYWKPLAYYLKDKGYKVVIVNPFHTKQMKELLDNTQSKNDIKDAYLIADLCKQSKFFQPTLSEGVYAELRELNLAWRRTNKSLMQSKNYVNNFLSKYFPEYKRCFSDIYGKSSIYCLEHFPLPEDIRRLGIKRLNRILKRVSRGKYKGEKIERLYQKAKESLGIKEGSKTAKGHLKEIIKDIKVLKERKERIKGEMGNYLEKTGYKEYLLSIPGVGVTIGSLFLGEVGEISKYRNSSQIEKLAGLNLVENSSGKRESGLEISRRGRDLLRYAGYMAATNGIAKNPEIKELYRYKMKWIKNPKENKMKVITSIAAKMLRIMFSVCKNKQYYKREEITKGWQRGEEYRGRVRPVNLHKAIYENR

SEQ ID NO: 227218 - protein, 394 aa, unidentified
MKRNDLSRSLVAFDQNSTLVSVVELSLKTWLVGGVVPGLERTPLKKQGPDAEALLALLHRWRDEAVKAGSKIDRIVVAFEAGRDGFWLARWLQARGIEVYVIHPTSIPVSREHRRAKTDRLDAGLLTRALLGWLRGEPKHCGMVAIPTLAEEDARRPNREHEHLVGERSRIINRLKAATIRHGIRNFNVKLSKAAECLEELRSAEGVPVPPNTLDEMRRDMARLRFIREQIKEIERMRLERLQRAPREGTHPMVLLLAKVMGIGIETADMLVHEVLSRSLRDQRAVARYGGMTGAPDESGGKRRDKGLARAGNARVRRGMIQLAWRWLMFQKNSALAHWYRARTANARRDTRKTMIVALARKLLIALWRYVTTGEVPAGAVLRPATGAVPRLAA

SEQ ID NO: 227219 - protein, 460 aa, unidentified
MNRKRSKSRVDRTMPMMHPNAAAIDVGATLHMAAVRADRATEPVRSFGTFTTDLHRLVDWFTECGVETVVMESTSVYWIPIFELLDARGFTVFLVNARDAKHVPGRKTDVSDAQWLQRLHSYGLLRASFRPKGQIAELRAYVRQRERLLEYAASHIQHMQKALTEMNLQLHHVVADITGSTGLRIIRAILAGERDPEVLACLRHYSCHSSAETIAKALTGSYRTEHLFALEQALALYDAYHEKASACDVRIEAVLKELSIHRGRDVGSVPPASRRQHRTDQANALAFDVRAALFALLGKDITRIDGLGPYLSLKLIAECGDDLSSWPSAKHFTSWLGLAPSNKISGGKMLLSRTRRSGGRAAALLRLAAVTVGRTDTALGAFYRRLSSRIGKAKAVTATARKVAVLFYNAVRHGMEYVDPGASSYETRYRTRVVNNLHRRAKAFGFVLQPLEPKAGAVVS

SEQ ID NO: 227220 - protein, 338 aa, unidentified
MEQEVVTVGLDLVKNVFQVHAIAADGAVLIRRKLRRTEVIRFFAELPPCLVGMEACASAHHWARELMAIGHEVRLMPPAYVKPYVKRGKTDAADAEAICEAVTRATMRFVAVKSVEQQAVLMLHKSRDLMVRQRTMLINALRGHLAEYGIVTGLGAGGVAASLKALHEEQDRLPAHARSALHGIAAQLRALASEIDRLEAQILDWHRNDETSRRLATIPGIGPITASAIAAAVPDASLFRSGRQFAAWLGLTPRSNSSGGKERLGGITKQGDGYLRRLLVVGSTAVMRMTRKNPARQPWMAGLLERKPTKIATVALANKTARIAWAVMTRKEVYTAAA

SEQ ID NO: 227221 - protein, 350 aa, unidentified
MTSLAEVVDIVIGVDTHKHSHTAAAINTATGAELATITAPTDPDGYADLIALADEHGGLRAWAIEGSGGYGAGLVRHLREAGEWVIELDRPDRPARRHGAKSDPIDAVRAGREALARTKLSEPRAPGERAALAACLAARRSAVDSACDAQRQLHVLITAAPESIRSRFRGESTTSMLKIAGQLRACSGWDVEAKATATTLRTLAKRIAALRAEADEHERAILAIVRSWRPDLLEVVGVGPIVAATVLCAWSHTGRVHSDSAFAMLGGVCPIPASSGQTTRYRLNRSGDRRLNQALHTVVLTRLRHDPDTKAYRDRRRAQGKSDRDIKRCLKRYVARQLFRQLEAGMPALA

SEQ ID NO: 227222 - protein, 433 aa, unidentified
MPTNHPYDLVIGLDRSDRKADLQLIDTRNTNTQKQTIATSPEELHDWLARLRQDHPQARVAICLEQPAANLILFLETYSWITLYPINPITLQKFREAFVTSRAKDDGKDAEYLAQLLLSHHDKLKAWQPDDSQTRQLQQLVSHRRAVVDERTGLTNRLKALLKQYFPQALDLCGEDLWRPLATAFLLKWPTLQSLKKAREESLKQFYYLQGSRSQKLIEQRLERIGKAVPLSDEIALLQSYTLRVQLICKELQLLLRTIQQFEEQIAKVFQQHPDRQIFEAFPGAGPILAPRLLASMGSERERFARRENLQCFSGVAPVTKQSGGKCHIHRRYLCPKFLRQSFHEYAKESILHSRWAASYYGQQRNKGCSHHTAVRALAYKWQRIIWKCWQSHSIYKEEIYEAALKKSRSPLIGLLDQIELGKFPVKTRVKKT

SEQ ID NO: 227223 - protein, 346 aa, unidentified
MKLSACGIDLAKAVFQVHGVDLHGKPCLRRQLRRTEMLTFFVKLEPCLIGMEACGSAHYWARKLSEMGHTVKLMAPQFVKPYVKTNKNDAADAEAICEAVTRPNMRFVAIKTEQQQALLAIHRARQGFVKARTAQANQIRGLLAEFGIVIPKGLCNLGPRLGLLSDESTGQLPGSFCTLLQRLAENLKQLDLQVRELEKEIGLWHAHNQTSRRLAEIPGIGPITATALVASIGDARCFKNGRQLAAWMGLVPRQHSSGGKQVLLGISKRGDGYLRALLIHGARAVLRHAEHKVETATSWLGHLLSRRNKNVATVALANKNARRVWALLMYDERRFRADYVPTAAGT

SEQ ID NO: 227224 - protein, 387 aa, unidentified
MAQVNDLSRSLTAFDAISTLVVVVEISKASWLVSGAVPGVERQPLKKLEPDATALLRLIERWRNEAVRAGRPISRIVLAYEAGRDGFWLARWLIARGIEAHVIHSASVAVSRERKRAKTDRLDAAMLMRVFLGWLRGERGHCGMVAIPTMEEEDARRPSRERESLVNDRSRITNRMKSALARLGVRGFKPHLRKAPERLAALRTAEGTGLPANIIEELRRDMARLALIREQISSIEKTRAERLERAPDTGPHAMVRLLARVIGIGIETADMLVREILSRRLRDRRAVARYAGLTGSPDESGLKRREKGLAKAGNARVRRGLIQLAWRFLVFQKDSALTRWYRTRTEGPSGARKTTMIVALARKLLIALWRLVTTGEVPDGVELRPAA

SEQ ID NO: 227225 - protein, 364 aa, unidentified
MDDVSTEQTKKMTVGLDLGDKYSYLCVLDTESGALVEEGRLRTTPDDLHRRFDSAEQMKIAIEVGTHSTWISRLLEECGHEVLIANPRKTRLIYGDKRKTDKLDAQKLARLARVDPELLYPIEHRGKDSQTHLALIHSRDALIRSRTQLINHIRATVKSFGARLPKCSAESFHKKVAGQLPHELAEALEDVVATIASLTEKIRGYDRRIEQLCKERYPQETKLLRQVPGVGALTSLTFVLTLEDPRRFEKSRSVGAYLGLVPGKDQSGESDPGKRISGEGDEMLRRLLVGSAHYILGPFAPDSDLRGHGQKIASRGGKNAKKRAVVAVARKLAVVLHRLWVTGECYEPLHNARLSGALGEEEAA

SEQ ID NO: 227226 - protein, 345 aa, unidentified
MDYYAGIDVALEYSSVCVVDGGGKIIGEGKVASEPRALVEYFASLGLSMARIGLEAGPLSQWLYAALRQADLAIELLETRHVRAAFKAMPVKSDRNDARGIAQLMRLGWFRPVHCKSMAAQEVRAVLTARKFVQSKLRDVENHVRGILRGFGLKVGPTTARSFAGRIRTLVAGQANLEMIAQALLGVHAVLLREFNGFETRVRVLARQHANARLLMTTPAVGPIVALSYASAIDDPARFSSSKQTGAHFGLTPKKYQSGETDRTGRISKIGDAAVREALYQAAHVMLTKPVKGCSHLKSWAMRIARRAGMRKAKVALARKLAVIMHRMLADARAFSDAAGVTAAI

SEQ ID NO: 227227 - protein, 354 aa, unidentified
MKTYYVGMDVHRASIWIVVLNGAGKLVMQSVIETGAERVRGYLKQLRGKVYVTFEEGTQANWLHDIVRPLVTEVVVCDPRHNKLLNSGNKNDRVDAQKLAELLRNGALKAVYHGDNGMRTLKELVRNYDCLVGDTTRVMLRLKAIFRGRAIPCAGHDIYRSDRRAQWLEQLREPGARQRASFLYAQLAALKPLRHEAKLVMVKEVRRQAAYPWLMSVPQLGSVSVAQLMAVVGTPHRFRTKRQFWPYVGLAVVTRSSADHEIVNGVLRRSRRPIATRGLNRNHNHLLKKVFKSAATSACHSGPFKAGYDARVAQGMDPSLARLTIARQLAAITLAVWKRGEKFNMQMMNQQLAA

SEQ ID NO: 227228 - protein, 410 aa, unidentified
MEVVHAHCAGLDVHKDTVVACVRHMADGKVTTTIKTFNTATQELLALSDWLSAENATHIAMEATGVYWKPVWNILSDGEFELVLGNAAHIKNVPGRKTDVKDAAWLADLMAYGLVSGSFVPDQTTQEMRDLLRTRKQLVRERTSHTQRIQKTLECANIKLDSVVSNVVGVSGRRMLEALIAGQTDPKELAAMAHGRLQATPAELEAALRGRVTAHHRFMLRLHLDQIDSFDEAIARIDKEVKDNDKNFRAAVELLKSVPGVGSLAAEVIVSEIGIEMNRFATAGNLVSWAGLCPKNDESAGKRRSNRLKAGAPWLKTTLVQCAWAAARSKGTYLHAQYVRIRARRGNQKAICAVAASILTTVYHMLKDGTFYEDPGPDYFDKRNKDQQANKLVNRLQNLGFNVTIQPVAA

SEQ ID NO: 227229 - protein, 343 aa, unidentified
MEKKWVKQVVGIDVAQNELVVCIGRMGEDLTPELYGSKTFENTSKGFVSLLSWVGKMTVAGVSVRYVMEATGVYHESFAYFLADKGCSVSIVLPNRISNYFRTLEVKTVTDKTSSEAITLFGLERKLEDWQRPKPVYKRLRQLTREREQLIAERTMVKNQLHAEKAEAEPGSDSIKRMEKRIQLFNQQEKEIKSEIAAMSAKDPEVKAAVKLITSIPGIGVLTAVAILAETNGFDLIRNKRQLTSYAGLDVREKQSGTSVKGKPRISKRGNKYLRKALHMPSLSTIQHDERFKAIYARIIARNGIKMKALVAVQRRLLEMTYTIFKTGTPYDKNYFASVVQKN

SEQ ID NO: 227230 - protein, 412 aa, unidentified
MQDILTCAMGLDVHRDIIVACLVKGAVDAEPEAETRTFSTLIPEMQKLRDWVIESECRNIAMESTGTYWQPIYEMLESCFDGEISILVVNARHMKNVPGRKTDMKDAQWIATLLRAGLLKGSFIPDKAFRELRHLTRYRKSVVHDITAQKNRIDKFLQSSGFRFTAFLSDTFGASGRNIIRHLIEHGSIDREALDKCLKTKTRNRIDEILVALNGSLSEHQCRFLNMVFRHLEDLEAHKHTVEDEITEEVLKHTDTLNLLCSIPGIDVTAAAAIIAEIGTDMSSFPDSQHICSWAGLSPGNNESAGKRKSVHINKGNPYLKSMLCEVAWIMASHRKLYLSGWYWKVKQRKGAKRATIALARKILSIIYTMLKTGTPYNEECFEQRRLRCERKRANRLVNELQKLGYVVVAPD

SEQ ID NO: 227231 - protein, 407 aa, unidentified
MDSLKTVFGIDVSSRKSNVCIMVNGQKVNDYAISNDMVGFNQLLDDLKQVTNPQIIFEATGVYSRRLQAFLDMHELRYVMMNPLEAKRKTKDDLHQNKTDKLDAMYLAKMQSEHPQRLAYVQSEEYQELMANNRIYEQASHDLITNKNRLHKAIQLTFPEIEHLMANPRGKNYWSIVLKFPHPNIVLETKEADIIDFLKSLSGIGEKRANDLAQRLIRLAKLACPAVKKSSAHIRGLEMAINNILSAEETCQTALKEMAKLAPKRDLEILKSIPGIAENTALRIISELGDIRRFNNPNQLNAFIGVDPQVYESGNLTAHLSISKRGTAIGRKVLYLAINQIQSAKKAGNPCHIADYYEKRKRSSETASHKKAAIASIHKLLRTIFALITNDQLYSYDIAKHNQRLLS

SEQ ID NO: 227232 - protein, 330 aa, unidentified
MLYLAIDQHRKQLTVNLRNEDGDVIFQRQVSTEWARVRKFMDEVRIRSTPEGGFVAIVEVCGFNDWFLKLLAEYDCKETVLVQPEKRIKNKTDRRDANALGELLWTNRQRLLASKKVQNVRRIVPPSQRDAEDRQLTALRQRMGRLRTRAINRVQHLLLKHNLQQECPTKGLQTQGAKKWLTQLRLGTIDRMELDQLLAQWQLFDQQLKQLEAKIGERQAASQTAATIATIPGAGAYGSLALAARIGSIERFPHARSLAHYFGLTPGCRNSGDATGRLGSITKEGSGIARFILAQIVLHVLRRDRRMKEWFSRIKKRRGAKIARVPVKRY

SEQ ID NO: 227233 - protein, 337 aa, unidentified
MSRARIYKEGNPTVQPNSNAKCWAGIDVSKDWVDVAVLVEEQKVEQIRCVRSLVELEQLAQKLLPYGPQGVVLEATGGLEGSVITALVAAGLKVMRMNPKRVRDFARAQGLLAKTDQLDAHILALFGARMQPPLRAWPEAERQQLGAWIARQQQLTLQRAAERTRLHQATEPQLSKSVERVIAFLGKELARLEKQMGKWMAQSEIWTEQESLLRTAPGVGPKTARLLLAQLPELGHINRREIASLVGLAPLACDSGHWRGKRRIHGGRGAVRAILYLASWSAVRPPGSLREFYRRLVAAGKPRQVALIAVARKLLLALNEMMRLNQPWRSPKESIPA

SEQ ID NO: 227234 - protein, 355 aa, unidentified
MDSKKYTGMDVHKESISIAVMNGAGKIVMECVIETKASMILQFIDGLRGDLQVTFEEGTSAAWLYDLLKPRVTKLVVCDPRKNASMREGHQSDKIDARRLAELLRLNHLHPVYHGEHGLRSLKELVRSYLTITKDLGRVMTRVKAIYRSWAIPCTGKQVYAPRHRAEWLGKINESGVRRRAEFYYQQLDSLRCLRQEVRRDLLAESKKHQAWKRLCQIPSIGPIRSAVLLGILQTPHRFRTKRPLWTYSGLGIETQSSADHRSVDGQLQRAKKQSSVRGLNRNCNHDLKNLFKGAAIVASSKPGPFQEFYTALLTKGIRPEMARLTLARKIATIVLIVWKRGVCFDAQYLKPQTA

SEQ ID NO: 227235 - protein, 343 aa, unidentified
MKDTTISVDIAKSVFEIAVSHQPGRVDECHRLPRLRFVNFFSTRQQATVVMEACGMAHYWGRELQRQGHRVVLLPPHAVRPYVTRNKTDRADAKGILEAFRNRAIHPVPVKSVAQQALAALHRLRSRWMETRTSRINTLRGALREFGIAIPVGSRQAVPAVWVALEDADSGLPDSLRPALAETCTEIRELERRIRSVERQLEDLAAQTSVVGRLRSIPGIGLLSSTALVALVGDVARFRSGRQLASFIGITPRESSTGLRRRLGAISKRGDSYLRMLLIHGARSVLCHAKKTDTHDRLRSWALDRERTRGHNKAAVALANKLARIVWAVWHHGTTYAEAPALS

SEQ ID NO: 227236 - protein, 362 aa, unidentified
MRIIGCDLHARQQAVAMLDTETGEVVSMTLKHEGNNVREFYSSLPRPVRVGIEATGSMQWFVNLMEELGIECLVGHPAEIRAAEPRKQKHDRRDADLILKLLAENRFPAIWLPSKELQDLRALLRHRHQWVRMRTRIQNALQSIALANGLRRGTALWSHDGQNTIASLPLAPHTAYRRNELQALYAKFEAEIEKLNQRVEEQACGRAGARLLMTHPGVGPVMALATDVFLGDPARFADSKALASYVGLIPREYSSGGRQRLGGLTKQGNPLLRFLWGEAGAHAVRRDPELQRFYRRKVIQKGFGKASVAVARKLGIRLWIMLRDQIEYNEFCRRGQKQQKSSEACAGMPETRYGANSHRPID

SEQ ID NO: 227237 - protein, 422 aa, unidentified
MLGIGIDWAEEFHDVALGTAEKGVIEQFRVEHTPAGVGALIERVLRLEPDPAEVRVVLETRHGLLVEALIDAGFTVLPVNPDLVARRRGPARKKDDAEDARICCLLAVDRHAGLKALIPHGELGGELRAIARDDDRAARDQRRLLNRLRADLQTTYPAALVLAGQDLGAPTVLRLLERWPTQPELAAASHAELVEFARAGRHGWPDRFAHQVAAALATPSLPTRDYLVRAKAAGIRLAAVQLLALHEARRGWEQRMAELLLGGRRTGRDHTVTDPDPGNAFPGGAIYLSMAGLGDRLAARVAGEIGEHIEQFTSPNGLQCYAGQAPVTRRSGKSDFVVARRLAHNRYLGDAVHQWAFCSLRQSGWVREFYDQKIAAGKSHHNALRALGNRWLEILWHCLTKGVLYDEAVHVANRNRALGRAA

SEQ ID NO: 227238 - protein, 371 aa, unidentified
MEHTRFVGLDIHKERISIAVAESGRSGAVEYLGEIANDPHAISKLCNRLGLPGKPLIFCYEAGPCGYGVHRQLTSLGHRCDVVAPSLIPVKSGDRVKTDRRDATMLARLHRAGELTSVWVPDTDHEAMRDLIRLRSVVRHIVTRARQHLQGFLLRHGRKHGGGTAWRMAYRRWLSTLAFEHPAQQIAFQDYVDAVTDAERRLQRVEEQILSLLPEWNLRAVVDALQAMRGIALINAVVLVAEVGDFTRFSNPRELMAYFGLVPGERSSGDTVRRGGITKTGNAHARRALVEGAWAYRMKPRIGRHKVDRIEALPKVVRDIGWKAQVRLCARYRRLSARGKTANVVNVAIAREMVGFIWSIACTIQSAPKPA

SEQ ID NO: 227239 - protein, 360 aa, unidentified
MQTKVNEKLFNGQSIYVGIDCHKLNWTVTIMGELYEHKTMSQNPDPDLLAAYLKRNFPGADYQAVYEAGFNGFYPCRRLRELGINCNVIHAADVPTANKEKIQKLDPVDSRKLARSLRGKAFEPIDVPEPILEADRALVRQRFRIMKDVTRTKSRIRSLLFQFNVNVPDRFTKGQTRNWSKVYLTWLKELHLELVSLRQTLDNYLHIGELQRKELLFVNKQVRILSQTDVYRNNYNLLISLPGIGFLTAMTFLVQIGDVRRFKQLDDLCDYIGLVPMMKGSGPKLYTGKMINRGRKELKIMIIEAAWDAVRMDPALMAKFNKLILRMNKNKAIIRIARSLISRMRYVLLSQEPYKIGITE

SEQ ID NO: 227240 - protein, 416 aa, unidentified
MDTMYERCCGLDIHKKTIEACFRSGKKKTHMSFGTTSAELRKLTIWLVENDCQSVAMESTGSYWKPIFNILELSGTDMKIIVVNARHMKNVPGRKTDVHDAEWIAELLQYGLLRPSFIPDREQRELRELSRYRKSLVGERAREINRLQKMLEGGNIKLTSVVSEVTGYSSRRLLDRLLRSDEPMTEEVISELVHTSLVGKSKELETALDGLLSELQKELLIKVLDHIDDMSRRIADLDDFCRKQMKKYEDALDKLDEIPGIARRTAETILIETGLDMSRFPTAKHFARWAGLAPGNNESAGKRSSGRTTKGNPTLKSTLIQSAKVAARKKDSFFKARYQKIAARRGANRASVAVAHSMLIAIYHILKSGERFKDLGEDYYNQFNKEKKKKYYLKKLTKLGVNLKEATLSISIQAAT

SEQ ID NO: 227241 - protein, 301 aa, unidentified
MHYLYYVGLDVSKETFDASLVAFEDANEMAHRKFANSRKGICSCLHWVEKRHGILLDDVIFCAEDMGSYISEMAVCASDRTLNFNFSLISPLVIKYSMGIARGKTDRVDARRIAEYAITHYRKIALYLPAEKELCQLRTWLILRAHLAKQRVAKLVLLEKLDYKEKFADVSIQRSMLQEEIAYAETHMKTIEREMKELIAADSNICRNYKLLTSIKGVGPITAIVMLCSTLNFTKITDHRKFACYCGLAPFEHSSGTSVRGGCHTSSMANRDIKVQLNRSALIAIRCDPQLKAYYERNSAS

SEQ ID NO: 227242 - protein, 408 aa, unidentified
MQVVHPVCCGIDVHKDTLTACLRRVEANGQVSKEGREFATTYTSLLALSDWLVEQHCPVVAMESTGVYWKPVYHVLAGTVEVYIGNAHELRGRPGKKTDKRDAAWIAELLAHGLIRPSFVPPPEICALRDVTRTRVALVQTRSQSKNRVHKLLEDTNLKLGSVVSDLFGVTGRRILAALVAGERDPHVLAALALGTLKHKRPQLELALTGQFTAHHGTLLAVLLELIEVLDRQIATLEREIGALVAPLQAQIAQLDSIPGIDIIAARDILAEIGTDMSRFGDAARLASWAGVCPGNHESAGKRYRGKTCKGNRYLRRVLVQCAWGARKTPTFLGRTFRRLEVRIGKKKAALAIAHKILVIVYHLLTEGTCYEEARYDQWNPSQEARERHRAIKALERLGYTVTVERAA

SEQ ID NO: 227243 - protein, 317 aa, unidentified
MKIWVGIDVSKRHLDAVWVVDGKRVHKKVRNSKKGFAELLAEVPESAHFVMEATGTYYFNLALFLHQANRFVSVVNPAQIKYHIRSDLKRTKSDKSDAASIAKFGDEKNPPPWKPHEREVYELRQLVTLDAKLQKMKVQLDNMVEAFVETDFHSKEAINRANMMAKVLEEQRAKTKKDMEKLASKLFPEIVEILESIPGVGTASAISVLAGVGDFRRFETSKQLVSYSGLSPTIKQSGTSIHSKGHISRMGGAQIRGTLYMCAMNGLRCNEQCKTMWNRLKSNGKHGKVAIVAIMSKLLRIMWTLVTKNEKYRPEMA

SEQ ID NO: 227244 - protein, 416 aa, unidentified
MSDRDRVASIDIHSKKLMVVVGSREGEAISPQCKLERQRFGTMASDRRRLLAWLQAQGVKEVVMESTGQYWKPIWWELEPYMRLHLAQAFSNRAPRGRKGDFRDAERLLRRLVAGELILSFVPDPEQRAWRTMTRTKVQLARERVRLYSQVDGLLQEMRIKLANVLSDLFGASGLRILHALAAGETDPKKLAALGDDRLKCTEGQLIDALTGNVQAMQQKLLELYLQRLQLIDEQIAKLDGMIAQALKAHQEVVARLAEVPGFGPDSAQQVVAEVGVQASAFPSAANLASWVGACPGKEETAEKNHSSRSAKGNKYMRRLLTEAAQAAVKAKGSHFQALFRRLLPRLGYKQALWAVAHRLCRLVWKILHDGVRYIEQGEYRDPKAKKQRAQALARALRKLGYDVQLTPAQPATANA

SEQ ID NO: 227245 - protein, 339 aa, unidentified
MKYTPVGVDIAKHLIQVHFINEHTGEVVNKQLRSQDFLMFFSNREPCLIGMEACGGSQHWARELAKLGHKVRLLQARFVKAFVMGNKNDVMDARAIWMAVQQPGKEIAVKTEEQQSVLVLHHSRRQLVKFRTAQINALHGTFLEFGETIHKGRAAMNRELPAALERMRVKLPPYLIALLEDQYNRLSELDSLIDDIEKQLISVARQSETCKRLMEIPGVGPLIATAAAATMGEASAFKSGREFAAYIGLVPKQTGSGGKVRLLGISKRGDTYLRTLFIHGARAAALLAKEPGPWITELKKRRPTSVAIVAMANKLARTVWAIAAHERKYDKNHVSIRPY

SEQ ID NO: 227246 - protein, 363 aa, unidentified
MEYIAFDAHKHYTLASVVRPDGQLVREERIEHDRGSLREFLERCERGSPVAVETIGNWYWIVDEIEAAGCVPKLVHARKAKLMMGEINKTDRLDVRGLNRLQQNGTLPTVWIPPGALRDQRDLPRTRMVLVRQRTQLKNRIHATLAKYALHDAEGSDIFGVRGRALLRQRLALLPPHTAYASQQLLEQVESLDRQVRAFEHRIQGAFKPTPAIQLLLTVPGVGLTLAVVIALEVGEVTRFATAEKLAAYAGTTPRVHASGGKTRFGPSRPDVNRYLKWAFVEAANAICITHGRAPQRHVSRLYVRIARRKGHAKAIGAVARHLAEATFWILSKHEPYREPKASAVSSTGDKRGWPLSSRRLDR

SEQ ID NO: 227247 - protein, 419 aa, unidentified
MFSDTTLIVGVDVHGRTNVTLVMDGLGDVLDKHQRFANNRIGTGQLTRYLAQLAQRGGFDSIHLAAEATNNFWLPFFHQLSQSSSLSDQPLTLYPFNPRLIRNFKKALGEEEKTDLRDAGVIAERLRFGKKLPRPFVMDELYLPLRSLTRYRYHLVRNLVRVKSYCLSLVYLKATGYADKATQPFSNPFGATSQAVLREFATLDEIAKMPFDELVEWLDVKGKRRFPNPEENARKLHQVATEAYHLPEEWAAVIHDIISLNLRHIALLENLIRRVETAVELQMENIPHTLNTIPGIGPVLAAGILAEIGDVARFEFNEAKVASYAGLRWPRSQSDEFEAEDRRLSRSGNHFLRYYLCEAAQLVRLHAPEYRDYYHKKYKEVRKHQHKRALVLTARKLVRLIVRLLTTHEPYRLRQVSHD

SEQ ID NO: 227248 - protein, 369 aa, unidentified
MKKHSKKANEKGRMSANQGQPEVTIGIDVGDRYSHFCWLDANGEIVKRGRVSSTQQALEKEFGKIPSGRIALETGTHCHWMSEVLSQLGHEVIVADARELKSISGSRRKNDPRDAEQLARLARVDVRLLHPVMMRKRKTQQDRSVLRARDLLVASRTQLICAIRGMVKADGSRLADCSAESFPEQVGQSIPEGMRRALAPLLETLDVLNEKIRYYDELVTHIAEEEYPETCLLKQVPGVGPVTALYFRLVIEEAQRFQHSRDVGSYLGLVPKQQDSGESTPELRISKAGDEGARRLLVNCAHYVLGPFGPDTDVRRWGLRLAARGGKNAKKRAIVAVARKLAVLLHRLLVTGEVYEPLRNSQAAERAAA

SEQ ID NO: 227249 - protein, 364 aa, unidentified
MDNITHIGLDVHKDTIAVATLRPGSTSCEERVIPNTPEAIRSLTCHLRDPASYAFCYEAGPTGYDTYRLLDSLGLRCDVIAPALIPRRPGVRQKTDRSDARNLARLHRAGELIPIGVPTPTQEALRELIRVREDLKNDRRISRQRIHSFLLRQGRHYPKGASRWGKGFEAWARAQTFDLPAVQATFSHLLGAEEVRRAQLEAVEGEITRAASDPEIAPLIALLRCFRGVDTLTAVTLVAEVGDFRRFRSAAAFMAFTGLVPSEHSSGLSVRHGSITKTGNAHIRRVLVEAAWAYRYRPGIGAGLAKRLEGQPPEAVAYAWRAQCRLSARFRLLSVKKGSNKAAVAVARELAGFVWGLMTENTAA

SEQ ID NO: 227250 - protein, 351 aa, unidentified
MNKVSTLAANGNVENIPTVIGIDLAKNVFALHAVNCHGKPVLVKPQIRRDQLLELLAQLPPCIIGMEACSGAHHWAREMIALGHTPKLMAPKFVIPYRIQGKRGKNDANDAAAICEAVTRPNMRFVPIKTVDAQSILTLHRVRQGFVEERTATINRIRGLMSEFGIVLPQRAEVVRKQAQLAAEKMPSWAASAMYDLLAHLVTLDMRVAEYDEHLKRMANRDERCKRLMALTGIAHITATALVASIGNGHDFKNGRQLAAWLGLVPGQYSSGGKVKLGHITKAGDRYLRTLLILGARAMLANAVRKSDRISRWAVALQARAGYGKALVAIAAKNARIAWALLAKGEAFEPA

SEQ ID NO: 227251 - protein, 386 aa, unidentified
MRVNDLSRAVVPFEQSTTMVVVVEMGAKSWLVAGTVPGVERQPLKKLDPDASAVLRLIERWRGEAIKAGKTISRVVLAYEAGRDGFWLARWLIARGIEVHVIHSASVAVSRERKRAKTDRLDAAMLMRVFLGWLRGERGHCGMVAIPTLEDEDARRPSRERESLVNEKSRITNRMKSTLARLGIRGFKAHLRKAPQRLEWLQTPEGTGLPPNITEELRRDMIRLALVREQIAAIEKARMERLQRAPNTGPHLMVRLLARVVGIAIETADMLVREILSRNWRDRRAVARYAGLTGSPDESGTKRREKGLAKAGNARVRRGLIQLAWRFLQFQKESALAKWFRLRTEGPSGVRRTTMIVALARKLLIALWRLVTTGEVPEGVVLRPVA

SEQ ID NO: 227252 - protein, 355 aa, unidentified
MTITKYVGMDVHKESISIAVMNAAGKLVMECVIETKASMLLQFMNGLRGDVHVTFEEGTWAAWLYDLLKPHVSEVLVCNPRKNALLKDGSKSDRIDARKLAELLRGNHLKPVYHGEQGLRTLKELAHSYLNISKDVTRIMNRLKALYRSWGIACAGTKVYARRHRSEWLGRISEAGVRRRAEHCYEQLDVLRLLRQQVRRDLLLESKKHQAWRLLGLIPGIGPIRAALLIALIQTPHRFRTKRQLWTYSGLGLETHDSAQYRVIEGQLQRSKKPVTLRGLNQDHNHDLKDIFKGAATRVSSSSGPLHDFYEHLLAQGRKPTMARLTLARKIAAITLIVWKKEVRFDASYLKSQAA

SEQ ID NO: 227253 - protein, 373 aa, unidentified
MAPSLHNGVVMRQTEMGDISQMKGGGEMNITRIGLDLAKNVFQVHGVDANERVVLRRQLKRSEVLRFFAKLDRIETCIVGMEACCGSDYWARELTKLGYDARLMNPSFVKPYVKSNKNDARDAEAICEAVGRPTMRFVPVKTLEQQDLLLLHRQREQWIKRRTALVNHVRGLLGNYGIVIANRIGNLRQALPRLLEDAENDLTELARTVFAECYRELQTLDNEIVALDMRLSHIAETRTDCRRLMSIPGIGPMTATAFVAQMGDGRQFNQARQCAAYLGLVPAQYSSGGKEQLGGISKRGNRYLRTLLIHGARADIRAAKQRREKQVVLARDEWSCALEARRHQNVAVVALANKNARIAWALLRDETEYRAVA

SEQ ID NO: 227254 - protein, 355 aa, unidentified
MKNQQVNEKLNFLGQEIYVGIDVHKKQWNVFIMSKLKEHKGFAQPPRAAVLADYLRSNFPGAIYYSVYEAGFCGFWPHRDLIKEGINNIVVNPADVPGMDKEKKNKSDKVDCRKLCRGLRNGDLKGIFVPDRVLLEDRELVRLRSKLVRDIRRCKCRIKGMLNFYGIHTPSSGWSNAFINWLKELEFNTPSGTFALRTLIRDLEHITDLKKQIARQLRSLIKQERYAGPIKLLFTIPGIGLVTAMTFLTEVGDTSRFNRLDQLCNYIGLVPSIHGSGDTIHVGSLTPRKNTHILTLLIESAWTAVGKDPALMHTCHKLCTRMKSQEAIIRIARKLVARMRFVLLNHTQYQLRLAA

SEQ ID NO: 227255 - protein, 408 aa, unidentified
MYNAVGIDVSKGKSTITIIRPQGVVICKPFNVSHSAKELRNLTDYIVSLEGETRAVCECTGRYHEPILKAFSEANIFISAVNPKLVKGMGENTLRTIKTDPADSRKIAKYALDNWAELRQYSSMDDTRTQLKALNSQYSFILKQRTAAKANLISLLDNTYPGVNKLFDSPARDDGSEKWVDYAYSFWHADCVRKIGLKAFSERYSAFCKKHHYCVRKNKAQELFEASKELVTVFPKDSTYKLLIQQQINQVNLLSGQLAAIRKEMNDLASTLPEYTTVMGMYGIGETYGPQLIAEIGDITRFSHREALTAYAGVDPGANQSGSRDQKSNRASKIGSSKLRKTLFQIMTTLLQNKPANEPVYEFLNKKRSEGKPYLVYMTAGANKFLRIYYGKVKAHLRELEQAQETAE

SEQ ID NO: 227256 - protein, 390 aa, unidentified
MTAQTVDTLPPVTADHDPVRCLLAIELSKKSWIVAITTALSDKISRYTLDGCDWKGLLELMERIRTRVAREVSRPVEMISCYEAGYDGFWLHRLLERHGVRSHVIDPASVQVDRRARRAKTDHIDAKRLLRSLMAYLRGEPKVWSVLRVPSVAEEDDRRLHRERDRLIAERGQHVNRIKGLCAIHGIYDYEPMRRDRMRRLEQLRTGDGRELPPRLKAEIARELRRLELILGMLKEIEVERDAIASAENVSVHTNAKKIQNLVKLKAIGAEIATVLTGEVFYRPFNNRHQVASYVGLTPSPFQSGPKCRDQGISKAGNPKARSTMIELAWLWLRHQPDSPLSLWFRERVGTLKGRIRRITIVAVARKLLIALWRYLETGVVPTGAILKSS

SEQ ID NO: 227257 - protein, 388 aa, unidentified
MYMIYVGIDISKYKHDCFICKDTGEVIVENLSFTNNKKGFQQFLDLLKPYDNSNVRIGLEATGHYGLNLKLFLEKNNYSFMEFNPLLVKEFYKSLSLRKTKTDKVDAVVITQKLMSVPYKPNSKLFYHKYSIKSLTRLRETLVKQRSKYKVQLTNILDIIFPEFKPFFSNSFGITSLYILNKYKTPDKIANMRDFETLNKLSRGNFTYAKFVKLKDLAKNTIGESNDIFEIQLSSILNLYKNIDDHIIELDKQISTIIKDLNPPTLSIPGIGVISCASIISEFGDISRFSNSAKMLSFAGLEPGIIESGTMSSKGKMVKRGSGYLRYSLMNVSLTVIRYNNIFYDYYYKKISEGKCHRVALSHVCKKLIRVIYILETKNIQFDPSILK

SEQ ID NO: 227258 - protein, 375 aa, unidentified
MKEKLRFLGLDVHAETIAVAVAEPEGEVRSLGTIPNRAESIRKLIKKLGPAEKLRACYEAGPTGYVVYWQLAELGVQCQVVAPTLVPVKAGDRVKTDRRDAEKLARCYRSGDLTAVWVPDEGSEALRDLVRAREAAKQDQMRARHRLSKFLLRSGQRPPSGVRPWTRPYLIWVAQLRFTQIAQEATRQDYLHEVEHMRERVARLEQAITEAVKLASPALKQVINDLQALRGIADISAVTIAAELGQVSRFDSARQLMGYCGTVPSEDSSGKRTRRGGITKTGNAHLRRIVVEAAWSYRRPPCIWYGLRKRQESISEEAKEIAWKAQHRLHKRYMKLAAAGKDQRKIVTAVARELLGFIWAIGTRAETISNQQVAA

SEQ ID NO: 227259 - protein, 400 aa, unidentified
MKVKELSGGIDIGSEFHHIVVIDEVGKVLYDKKVLHRFSEFHKAVKELKETERRTGGRIAFGLEGKNGYGAPFDRILGENGFSLYNIDNLKLKQFRNTFGAEWKTDRRDAKMLAKLMSLKAQLNGEGDKVFIPVGKVPLLHEKLKILSRHQQTLIDEKKRLCNRLRKKLLEICPGILDIFGKVEAKTLLRILIRYPNFSRYRKLTREKLLRMKHIGKVSARKIINHLQGLEYVRELVEVYATIIQSQAKRILELKEEIKLLDKKLDKLGEGSKEVQRLRSIPGVGTKLSSRLAGEIGDIRRFKYSNKLAIYFGVGCVNNDSGKRKMAKAVFKANKICKAAMIELAGCSIRCIDESRRYYSKKRSEGKKHNHALRCLARQMTKVIFKLLTEDRDYYVKDET

SEQ ID NO: 227260 - protein, 455 aa, unidentified
MSQRKRKPRKSKINVNSLPKHLRHINLNAAGIDIGSDRHLVAVPEGSDEVSVRQYGTFTSDLHEIADWLEKCGVTTVAMESTGVYWIPLFEVLEERGFEVKLVDARHVKNVSGRKSDVLDCQWLQQLHTYGLLQGAFRPPDEICVLRSYARQKEMLTQASSMHIQHMQKALQQMNLLLHNVVSDITGVTGMKIIKAILAGERDPNVLSLNRQEECRNSKETIAKSLVGNFRADHMFALKQAVELYETYQAKIAECEHALINHLGTQPDVTDDPPPDSGKRVRARERMRAGVDVREKLFKMTEVDLFAIPGLAADTLLTLASEVGFDMSPWKSVKNFTSWLGLCPGTKFSGGKALDRRTKRNANRATQAFRMAASSLARSQTALGAFYRRIRSRTDGRRAITATAHKIARIYYSMLTKGTAYVEAGQQVYEQMYRERRINALKKQAHSLGFQLYPA

SEQ ID NO: 227261 - protein, 429 aa, unidentified
MKFNRTYITNQRIERITTQTAVVGIDIAKDVHAAQITDFRKRALTSRHLSFSNDIHGFEKLLGWIQKVQSKHGLTSAIVGLEPTGHYWFNLANWLLERQIPVVLVNPVATHRTKENRDNSPSKNDPKDALVIADLVNDGNYTEYQPQAQEFERLKALMSHREFLVDRSVSVQNRITRWIDLYFPEFRKVFEKWTDPRPIATLKAFPLPSDLKGRSVEEVVQGWYDNGMQRAGGVKGRAKAAMLLRVAASSIGDTRTPEEAREQIADLTEDYERIQKKLKEFEQRIRALLRDIPLAQQLRTIPGLGPIIIAALLGCAGDLRLYKHGRQFLRRAGLNLAERKSGKYQGQIKISKRGDSMLRKYLYMGMLPLIKHNAEFRQLHEKHLQRGMKNNASIMKCIGKLARIIIGMVQRGETYRPERMMQPSLSLAA

SEQ ID NO: 227262 - protein, 338 aa, unidentified
MELYGGIDLHSNNSYIGIVNEENRVIYKDRRRNELPLVLSALAPYKGELKALAVESTFNWYWLVDGLMDAGYPVHLANPAAMKEYKGLKHKDDKKSALWLANLLRLNILPEGYIYPKEERPVRDLLRKRLHLVRHRTSHILSIKNIFARNLGITLKGDDIKTLTSRDIDRLISEECHRLAIMASVSTIHHLTGQVEQIEKTILGRVRLRDEFKGLLAIPGIGTILGLTIMLEVGHIGRFHEVGQYASYCRCVQSIRTSNDKKTGEGNRKNGNKYLSWAYVEAANIAKRYYPTIRRYYEKKAAASNTSVAVKAVSHKLARASYYVLRDHAVFDEKKLFG

SEQ ID NO: 227263 - protein, 348 aa, unidentified
MGMRMRISVLGVDLGKNVCSLVGFDASGAVVLRRRAKRETLIALAAKLPPCVVAMEACCGAHHLGRVFAAHGHDVRLMSPEYVRPYVKAQKNDDRDAEGVAEAATRPTMRFVELKSQEQLDMQTLHRSRDRLVGERTALINQLRAILLERGIVAPQGKRKLEQFLVGLMDEQGGAGLSPRMIMLVTDARIQWSELDRRITAFDAEFVRWTKENEDARRLATIPGVGATIASALIAAVGKAETFERGRDLAAWLGLVPRQFTTGGKTKLLGISKRGNKYLRKLLIHGARAALPYVAERDTPLGRWAKALLSRAHPNVVVVAFANKLARIAWAVLRRGEPFAAKGAPLAA

SEQ ID NO: 227264 - protein, 477 aa, unidentified
MVMTREPEEILDEPHEQIMERVCAIDVAKDSGKVCVRLPAESGSGRRVSKVWDVPARTKAVIELGDHLACQGIQKVTLESTSDYWRIWFYLLEARGLDVQLVNARDVKNVPGRPKTDKLDSVWLAKLTEKGLLRPSFVPPKQIRVLRDYTRLRVDLTAERTRYWQRLEKLLEDALIKITAVASRIDTLSVRDMVEALIAGQRNPRILAGLARGRLKLKHADLVEALTGQFDDHHAELARMILDQIDTLTARIDTLTARIDTELATMPGAADPGPDPDPDDPGPRPNGQAEPAPVTSVGHDTASTTVGQWTVPRSALDLVDILDEIPGVGRHNAQAIIAEIGLDMSRFPTAGHLVSWAKLCPRTIQSGAKSSAGKTGKGNRYLRAVLGDAAAGAAKTQTFLGDRYRRIIKRRGKLKALVAVARSILVIIWNLLAHPGLPYHDLGVDYHDKRIDTERRTHNHVRQLEALGYTVTLTAAA

SEQ ID NO: 227265 - protein, 344 aa, unidentified
MYHYAGIDVSLECSSVCLVDGTGKILRETKVASEPEALIAWFRSQGLVLDRIGLEAGPLSQWLYAALWDAGLAVELLETRHVRDAFKAMPVKSDRNDARGIAQLMRLGWFRPVHCKSIEAQETRAILTARKLLQSKLRDVENSLRGVLRGFGLKVGPTTERTFAERIRELVTGHPGLEVVARALLEAHAVLRREFNGLDKQVQKLARSHPQARLLMTTPSVGPIVALTYASAVDDPKRFRSSKATGAHFGLTPKKYQSGETDYTGRISKIGDASVREALYQAAHVMLTKPIKNCSALKSWAMRIARRAGMRKAKVALARKLAVILHRMLADAKPFNPAAKAAAT

SEQ ID NO: 227266 - protein, 335 aa, unidentified
MTKVMGPVFVGIDVSARTLVVALERDHQPGRQRREFLNTAVGHEGLIQWLSKSATAVQVCIEATGLYSLDLALALHRAEGIEVMVANPRAIADFAKALLQRSKTDQLDAEVMLEFARRMPFVAWQPPSSPQLDLRALMRRITGLKLVSQQEKNRLHSVSQSAEITPLVRKDIQSHLVQLERHVEKLEHQAETIVQADRELARQFCHLVSVRGIARVSALHLLAELVVLAPDMTARQWVAHAGLDPRHHESGTSVHKPTRISRAGNRYLRSALFMPALVATQHDPNIRAFYQKLVDHGKTKMQAIVAVMRKLLHALHGMLRTDSDFVGEKFFVIPS

SEQ ID NO: 227267 - protein, 364 aa, unidentified
MNKCQLNTELSSLEGTRSEFNRSTAAIKLGIDVHQDFYVVVKQEGGTNPKPAQRFQKEAFLHWVAKLTKEGAEMHAVYEACGFGFELQRQLTALGIHCYVVCPQKLDERNKRVKTDGVDAKALCLKLDRFVEGNRDALALVRVPTQAEEQKRAIHRQREQLVKARKRLEAQGRSLIVNHGIEPVNKWWKRRTFAALQVPAWMKELLQNTQPILLALEEKIRALTVQLQEAAISRQPRGLGLLSSVVIDREIGNWDRFKNRRRVSSYTGLCPGEYSSGNTRVQSCVTKHGNPRLRAALVETAWRLVRFQPEYRAVKKWRHLLAKGALATGAARKKAIVAVARQLAVDLWRIRTGRVAIETLGLIN

SEQ ID NO: 227268 - protein, 470 aa, unidentified
MKKHRKIKTKSEASNPLHESKPDAGGIDVGANEIWVAVPPDRTEEPVRRFGAFTRELKAIVEWLRDCGIRTVAMESTGVYWIPLYQLLADAGLKVCLVNARHVKNVPGRKSDVRDCQWLQYLHSVGLLRASYRPDQAICAARSIYRYRQNLLTHSAQHVQHMQAALDQMNIKLHHVIDDLTGTTGLAIVEAILDGERDPRQLAKQRDHRIKASQETIVKALEGDWRSEHLFVLRVAWENWKQTQHQIQKCDQQLLEYTRQLEACTTVAGPIKIVRLSSEVAGSQPVAGPSKPRRKKTSKNEPQGPWREELSRFFGVDLTAIPSISVLTGITLMTELGNDLGAFKTAHHFSSWLCLCPDNETSASKVLRRATRRSQNRVRQALRMAASSLHHDKSYLGDKYRRLRAKLGAPKAITAMAHQLARIIWHLIAHRVPFDLTIFAAYEKVNQTRRLKRLSSAARQMGYQLTPIAT

SEQ ID NO: 227269 - protein, 423 aa, unidentified
MAGVMIGIDPHKGSHTAFVIDGREKPLGQLRVRASCKQAEALLGWAGRWRQRTWAIEGARGLGQLLAQQLLAAGERVLDVPPKLTARVRLLESGQINKTDENDARAVAIAALRARELPQLTVEDQTIVMRVWARRYHDLGRLRTQAVCRLHTVLCELVPGGVRKQLRTSQAIAVVDSITAESPVAQAKLELAHDLVADLQRLDAQRREVKRRVSRAVAAAPTSITEVYGVGPIVAACVLGYVRDIRRFPSRDRFASYNGTAPIEVSSGDRKIYRLSRRGNRQLNHAIHIAAVSQISHRGSEGHAYYQRKRAKGMTGKCALRALKRKISDTLYERMLHDIRQRKDPGGHSGNDAVSSAAGSHPDGPALRTSHSRATANSKTATTNQRPLTSPPAPDKRRTSRSGTGVKLQPRPRPRRGRGQERA

SEQ ID NO: 227270 - protein, 322 aa, unidentified
MSVSVLGIDIAKQKFDAALLLDGKTKHKSCKNSVEGFETLIIWLEKQGIQKVHACLEATGNYGEDVAIYLHEAGHTVSIVNPARIKGFAQSELIRTKTDKIDAGIIARFCLAMKPEPWIPPAPEIRSLRALVRRVDSLIDMRSQEKNRISTAHESVMHLIKEHIAYLDKEIEKIRRQIADLIDQNPDLKQKKDLLDSIPGLGKATIPHLLAELNDLGKFRHVREVVAFIGLAPKETLSGSSIKGKPRLCKIGHARLRKALYMPALVSIQCNPMMIAFYNRLKEKGKNGKVIVCAIMRKLVHVIFGVLKSGKKYDPNYKPVLA

SEQ ID NO: 227271 - protein, 346 aa, unidentified
MEINRVGVDLAKNVFQLHGADHRGKPVWKRRLSRGKWLKVLCDTAEPGTEIGMEACAGAHHWARQLEQRGYVVKIVPPQFVKPFIKSNKNDANDAQAICEAMGRPNMHPVRVKTVEQQDMQALHRIRDEIKSHRIAKANQIRGLVTEYGLVAPQQLTALRRAIPDWLEDAENGLTFFFRQLLQGLWEDLRALDCRMTELDRQIAMIAEEDPMARRLQQLRGVGPLIATALVATIGDARQYRKGREMAAAIGLTPRQHSSGGKDKLLGISKRGDAYLRCLLVHGARSAMRTAKNKEDRLSRWIIDLQARRHANVVAVALANKMARMAWAMMTKDVDYDPELAAASVS

SEQ ID NO: 227272 - protein, 405 aa, unidentified
MDVIIERACGLDVHKDNITACILTSKGKEIQTFSTKTVFLLKLLDWIKENNCTHVAMESTSVYWKPIVNLLESEGIEFLVVNAQHMKALPGRKTDVKDAEWIAQLLRHGLLKASFIPDRNQRELRELVRYRRSIIEERARQHNRIQKVLEGANIKLGSVVSDIMGVSSKDMLRAIADGEDDPEKLANFARRTMKKKKEELELALQGYVNPHQRLMLKTILTHIDFLSEQIEMLDQEIAQRVSSYQEDIERLDSIPGIATRMAEQILAEIGTDVGNQFPTAAHLCSWAALVPGHNESAGKRKSSRSKKGNKYLRSALTEAAQSVRGSKNYLGALYRRTAGRKGKKKAAIVVAHAMLRIAYYLLTRKEMYVDLGEDYFDKQKQVSIVRHSVRRLENLGYTVTITEAS

SEQ ID NO: 227273 - protein, 418 aa, unidentified
MTEGTLPAAYAGVDWATQKHDACIVDPQGQVIGERQFPADATGLSALADWLIAKAGAAADRIAVAIEVPHGPVVESLLERGFAVHSINPKQLDRFRDRFTVAGAKDDRRDARALADSLRTDGRAYRLLQNDEPDVIELREWSRMADELSRENTVLCNRMREQLRRFFPQVLELTDDPGEKFILALLEAVPTPADTRNRRAASIEKILKEHRIRRWKADEVLAILRKPALVVAPGTAAAATGHLRQLARRIRLVREQLAECREKIDEILGRLGTAAEVEGRKNEPRDVEILLSLPGVGRIIAASLLAEASRPLRDKMYQALRTVSGAAPVTRRTGKGVWTIRMRRSCNQRLRNAVYHWAMIAAQCDPAWRERYAALRKRGCSHGRACRGVADGLLRVAVAMLKNRTLYDPARKQAKAAA

SEQ ID NO: 227274 - protein, 398 aa, unidentified
MVYGLDVHKEFIQVCALGADGRREREFRIGGTAAEIESFAETLGPEDAVALEATFHSWSIHRILKRHAGRVVVGNPLATKAIAHARIKTDKVDAHTLAQLLRADYLPAVEMPDEATWARRQLLSHRQLLVKHQRSLKNTIHAVFNRLLLPRPEGDPFSRKNRSWMRAEPLPETERLLVDNALELLEQTEARVAAVDERLLKLASVEASAKLLVTVPGVNVTVAMALLATIGDVRRFPTPGQLSAYFGLVPRVSQSAGRCHHGSITKAGSSTARSLAIEAAQVVARSGSPLSATYWRVRRKRGHNVAVTALARKLIVVVWHLLQHGEPYRYAPPTRTRFKLRRLERERRRVSQVPQSLDEVYREAQLPELASPRPAERRAAARNRAVITRLSRLAREGS

SEQ ID NO: 227275 - protein, 345 aa, unidentified
MKKVVAGMDLHSNNVVIGIMDMDGKRVASRKVACELSEVVKFLAPFKKRLEQVAVESTYNWYWLVDGLEALKYPVVLANPSGMEQYNGIKHADDTNDAFFVAELLRLKILPTGHIYDAQLRPVRDLLRRRLTLVHHRTALMLSFKSLYTRTTGQEMSLSQLKALEIKEAQQLYDHPANQLIAGMQIKQIEQLSQSIQKIEKGVLDSARELPFYAKLLSLPGVGKILGMTITMEVGEIKRFAGPGNFASYCRTVEAKRTSNQKKKGANNSKCGNRYLAWAFVEAANFAKRYDEQCRKWYDRKAAKTSNVIATKALACKLAKAAWYLMAEGTDYDPARMFGQPAKTK

SEQ ID NO: 227276 - protein, 388 aa, unidentified
MIYVGIDIAKLNHFASVIDSDGVVLIEPFEFLNDNDGFYLLLSKLSSFEKDSIIIGLESTAHYGNNLVYFLVSKGFSVCLINPIQTSSLRKNNIRKTKTDRVDTLVIAKAVGMMDDPRFVTLYDVALMQLKNLGRFRMKLVKQRTRTMIQLTSYLDQVFPELQYFFKSGIHQKAVYAILKEAPSATSIASMHLTHLKNLLVSNSHGHFKKEMALELRVLAQKSVGTADRALSVQITQSIAQIELLDSQIDAVESEIKDIVSSLDSVIMTVPGIGPSNGGMILGEIGDINRFSKSRKLLAFAGLDPSVCQSGNFSAKKTRMSKRGSSALRYALMNASHNVVKNNKTFREYYDSKRAEGRGHYNALGHCAGKLVRVIYKMLKDNVEFNLD

SEQ ID NO: 227277 - protein, 348 aa, unidentified
MQVAIVGLDIAKHVFQLHGTDAHGKVVLRRKLRRHEVVTFFANLPSCTVGLEACGGAHYWARRLTAVGHTVRLMAPQFVKPFVKSNKNDANDAEAICEAVARPSMRFVPPKSVEQQDIQLLHRVRSRLVGNRTQIANQARGLLMEYGIVLPQHIGQLRRRLPEVLEDESNELTAFSRRLIASLYEELAELDQRIEQLDAELKAVYAASEPCQRIAAVEGIGLLTATAAVAAMSDGKVFANGRQFAAWLGLVPRQHSSGGKARLLGISKRGDAYLRTLFIHGARSVVYRASRKTDPRSVWIADKQRRLGTTKACVAVANKNARIVWSLIARGEHYRRPGEVHGTVERTA

SEQ ID NO: 227278 - protein, 365 aa, unidentified
MSAEKAHERHVIGGVDTHKDLHVAAVVDDRDRVLATASFAATRQGYRQMLTWMRSFGPLRRVGVESTGSYGAGLLRFLQRSGIEVLEVTAPDTQDRRRRGSNDDFDAQSAAHVAFAGTRTVTPRTRDGMVESLRVLSACRKTAVAARRIALQTIHNTIVCAPDALRETLRRMTRMQLVRTLAAWRPDLSAYRDFEAAYRIGLKSLARRYLELHDEIADLDAMIGAIVDELAPDLVARNSIGSNGAAQLLLTAGDNPERLRSEAGFAALCGVSPVPASSGKTVRHRLNRGGDRAANSALHIIPIGRLRTDERTKAYVARRIAEGHSKLEAIRCLKRYIAREWSRSSPVGGRRSTRPESRLDTQKGV

SEQ ID NO: 227279 - protein, 342 aa, unidentified
MDHFGGLDVSVKETSVCIVDDTGKIVREVKVGSEPEALLAVLKNPGYHFKRIGLEAGPLSQWLFSVLAEAELPVVCVETRHMRAVLKAQINKTDRNDARGIAQMMRVGLYRPVHVKTLRSQKLRMLLTHRKLLQSKAIAIENDLRGTLRNFGLKVGMVGTVKFEARIRELVENLPDLADLVEPLLIVRRALREQTVVLHRRLLATVRDDEVCRRLMTTPGVGPVVALTYRATVDIPARFRKSKAVGAVFGLTCSRYQSGEIERTGRISRCGDEMMRVMLYEAAQSMLRSKKWSWLKAWAMQIARRRGVKKAIVALARRLAVIMHRIWVDGTEFRWTREAVAT

SEQ ID NO: 227280 - protein, 348 aa, unidentified
MESTLIAVDTAKLVFEVAEAGGSGKVSRRLRLNREQFSQYLATRSHASFVLEACGGAHHWARRMQACGHTVRLLPVPYVCAYRRRNKTDRADCLAMLEAAKNPEILPVPVKTTEQQAIQGLHRCRSAWMETRTARINTLRGLLREFGLILPVGAATALQRIPEMLTNEVLPPMLRPSLQALLDEIHELECRIDAVERQLDAIRRQNPVIDHLQNISGIGLLTATALYASAGDAQHFRNGRHLASWLGLTPREHSSGNIRKLGGISKRGDRYVRMLLTHGARAVLLRAGQLQRADKPLNALQRWALALKARSNHNKATCALANKIARIAWATWRHGTVFDPDQAAAIAA

SEQ ID NO: 227281 - protein, 356 aa, unidentified
MSHDIKYIGMDVHKEAIVIAVLNESGKLVMESVIETKASSILQFLHGLRGELHVTWEEGTWAAWLYDLLQPHVPHIVVCNPRRNALLKEGSKSDKVDAQKLADLLRTGMLRPVYHGENGLRTLRELGRSYQTIGKDLTRVMNRLKALYRGWGIPCGGTQVYAARSREEWLSKLPQAGVRRRAELLYQQLDGLQDLRREVRPEFLAESRKHKAAKLLRQIPCIGPIRAARLIGLMQTPQRFRSKRQLWTYSGLGIETHDSAQYRVVSGQVQRSKKPQQVRGLNRNHNHEMKEIFKSAATRASCGTGPFHDFYEALLAKGMKPEMARLTLARKIAAITLTLWKKEERFDVEQLKTQAA

SEQ ID NO: 227282 - protein, 349 aa, unidentified
MIIGVDYHPSFQEIAFLVEETGECDEGSLKHSNGEAEKFYRDLKARGISARVGMETTGYSRWFERLLAELGFEVWIGDAAEIKTRRAKKKKTDREDARLLLKLLLEDLFPRIWVPSPENRDLRQLLWHRHRLVQMRTRIMNQLQALAMNENRCWKGKLWSERGRAELERLPLALASHRRQGLLELLDRMNPAIDELTAAAEREAKKRPEAVRLMTHPGVGPLTALAFVLIIGTPERFGCAKQICNYVGLIPSEDSSGGRQRLGHISKQGSSLLRFLLVEAAQAAVRCNADWRRRYRHLAMRRQRNIAKVAMGRRLGARLYWMWRNGCEYSPSLEFGSHAGKLGTGNGGQ

SEQ ID NO: 227283 - protein, 444 aa, unidentified
MSDSLPSVTTEREWAAFAAIDWADQKHFWRLVPAGSQHAEQGELDNTPEAVEIWAVALQQRFDGRPIALCLEQSRGALVYMLAKYAHLVLFPVHPTTAARYRETFCTSGAKDDPGDTASLLDLLVRHRERLRPLQPDTTETRLLQFLVEQRRQVVDEKTAQNNRLTDCLKLYFPQILQWFDDVSGPLVGAFLERWPSLQDLHRTRPGAMREFFHEHNCRGEARIDERITAIYQTIPATRDEAVLEAGVITARGLVAVLATLRDNIAKLDRRIAQLVAGHPETPLFDSLPGAGAALIPRLIVAFGTRRERYDSAYQMQCYSGIAPVKVASGRTETIRFRRACPKFLRQTFHEYALHSLKKSEWAKAYYQLQRDRHKSHQAAVRSLAYKWIRIVFRCWKDRKPYDEAIFLQSQRRRSATLGASVASVTDVGWKKVAGFNKFSAISS

SEQ ID NO: 227284 - protein, 344 aa, unidentified
MNATTAGIDLAKNVFEIALADERGHILERQRLSRARFDRFFVNRPACRIVMEACGSAHHHARRLSSQGHSVVLLPAQYARAYVRRNKTDAADAAALIEASRCPDIRPVPIKSVDQQALQQLHRLRSQWMGARTSRINFLRSCLREFGVGIPVGAKRAIQAVRDAVASQGGPVPPLLHPSQLELLAEIDALGQRCKQIDRKLARLSEHDPVVERLLKIPGVGSLTATALRASVVDIQRFPTARHFASWLGLTSREHSSGERRRLGRISKQGDPYLRTLLIHGARSVLIAARAAQRRGSSVDRLRTWALDVQERRGHNKATVALANKLARIVWATWRHDRDFTSNP

SEQ ID NO: 227285 - protein, 410 aa, unidentified
MQGAAGGVIPFRCNPTTSFGEALMTVRTVSNLPAAMHIETARCLFAIELSKQSWVIGFITPLSAKISRRILSGGDWKGLLDLIEEVRARVSRETGRAVDVISCYEAGYDGFWLHRLLEAHGIRNYVIDPASLQVDRRARRVKTDRIDTERLLRSLMAYLRGEPKVWSVVRVPSVAEEDARRLHRERDRLVSERVQHVNRIKGLCALHGICDYQPLRPQAMARLEQLRTAQGISLPPRLKSEIKRELQRLELVVEMIATLEAERDAIVEDEASTHVNAKKIQNLHQLKAIGPEFAAVLVGEIFHRKFNNRRQLASYVGYAPSPFQSGNVAHDQGISKAGNRKGRTTGIELAWLWLRYQPDSDLSVWFRARVGTTKGRIRRIAIVALARKLLVALWRYLETGVVPRGAVLKG

SEQ ID NO: 227286 - protein, 343 aa, unidentified
MKASIIGLDIAKSVFQAHGADANGKCVFKRKLGRSEISAFFAKLDPCEVVLEACGSAHYWARVISRIGHDVRLVPPDRVKSFVKKGKKNDAVDAAAICMAATHPDTMCVPIKSEEQQGVLSLHSTRALLVKQQTMLSNALRALASEFGLIAPLGTRHLPELMAKIETSADLPAAMKQSAMLLFEHYEKVAQSIDALEVQIRARAKSDEDARRLMTIPGVGPITASLIVASVADIGSFASARHFAAWLGLVPRQHSTGGKTRLGRITKTGNRQIRTLLVLGATAMLHRAHKWDSAAGQWLCELMARRPRRLATVALANKMARIIWALLSRKEIYRPAGVSVSAG

SEQ ID NO: 227287 - protein, 443 aa, unidentified
MAMRVRNELTIQNPNAAGIDIGGSSHFVAVPQDRSDTPVREFGCYTRDLYELAAWLLFCGITIVALESTGVYWVPVYEVLEAHGIEVMLVNAHGIKNVSGRKSDVLDCQWLQQLLSFGLLSAAFRPSAEVCALRTISRQRDTLLQGQACCVQRMQKALTLMNIQLTNTITDITGTTGLAIIRAIVAGERNPQELAKLRNYRIHASEAEIAKSLEGTWKEEHLFCLAQALELYDTYRQLIAKADAKLESLIAPLRRQGADAAKAAKSKKRGGKNAPGFDVRDALREWAGVDLTQIGGIDVCTALKVLVELGTDLSKFKNAKCFCSWLGLCPGTRISGGKRLSGATKRIPNRVARALKLAAQGLHHSQCALGAYYRRMAARLGKGKAITATAHKLARLVYVMLTQGGEYVEQSQAQYEEKFQDRTLKYLQQKAKTLGFDLVPHAV

SEQ ID NO: 227288 - protein, 311 aa, unidentified
MYYIGIDVSKKDLSVFDGKDLNFINKEGLKSFKKYLKKKYRLPEIAIIFEPTGIYSQYLKEFCAENSIKAYIVNPKQSHNFARALGIRPKNDKIDARTLYKFHKLIDLKDIKVPKIDQQAKTLSSYLVSYEFALKQRVALSNHLESLRDKELIALMKKDLKRAKKLEDKLFHDILEYVRQNQNLKEDYQRLLTISGVGDKTAIALLTLFKTYQGTNRAQITALAGLDPVKRVSGTSVKHKVKISKNGKGIYRKIFYLPTICATVHNQKIRVFYQRLLANHKIKKLAIIASMRKMLLIAHAMYRDKTEYVSA

SEQ ID NO: 227289 - protein, 452 aa, unidentified
MSKLSRRTQSSSPQLQEEVRPFDGLERIQPHAAGVDIGAHEIMVCVPGPAGTQIVRAFGTYTADLEALAAWLQEHHIETAAMESTGVYWIPLFELLEQRGFHYCLINAASCKRFPGRKSDVLDCQWLQTLHSYELLADSFRPDADLISLRTLLRHRAQLVQHRSPHILHMQKALLQMNLQLPQVLSDVTGETGLRIIRAIVAGECDPHKLAALRNSRCHKDEREIALAFTSTWRAEHLFVLEQSLALFDFYSQQIALCDAEIERTYSVIRPTWDHPALELPVIARKPHSHSKNQPQGVQVRKHLYRITGVDLLAVPGISASIAQTIVAEVGSDLARFPSARHFCSWLGLAPHNDISGGKVLRSRTLNNHNRAGQAFIQAAAALTRSNTAFGSFYRRLKSRVGPSQALVATAHKLARVVQDVKGQGPLYSHHRPGGGCSLPRPRDRLSQAQSR

SEQ ID NO: 227290 - protein, 429 aa, unidentified
MPTKKGKRMKSWQQITHYAGFDWARDHHDVVILDQQAQIVADFQFEHTQAGWQLFREKTAPFPHPAVAIETSRGPAVDQLLQADYTVYPVNPVAAKSYRQRKAPSGTKTDQLDAWSLAEALRTEGQAWRALAPTDELSLQLRLLCQDEVVLIAQRTQLVNQLQQALVDYFPIALEAYQDWTSPACWDFIIEFPTPQALVGAGKRRWEKFLHTHRLWRPLTVAKRLELFARADQFQGSPAAIQAKSQLATSLCKLLRTLQQQLDEYRQKIEKLFADHPDHDLFGSLPGAKKVLAPRLLAAIGGDPDRYGGSVTVLQAFAGTAPISYQSGKRQCVRIRWACDKFMRHTIHLWADCFRRAVPWAKVYYQNKRQSGMNHACAIRCLGQRLLKILFRMLTDKKPYDANLHARNQQKHGSWVLKLVPEASAKAGE

SEQ ID NO: 227291 - protein, 382 aa, unidentified
MKKVSTVAAKPSKKISQQNLTVGLDLGDRNSWYCVLDESGQIQLEQGVRTNAKALQEVFGAMPHSRIALEIGTHSPWISRLLSELGHAVIVANARKVRLIGESRKKDDRLDAQTLARLARIDPELLYPVKHRSVQAQADLMMIRARAGLVRARTGLVNTARGLAKSYGERLRGCNVRNMNPEKAESLSPELQAALEPLLNAIESLSERIVEYNERIENLAQASYPQVALLKQIKGVGTLIALTFLLTLEDPHRFRKSRDVGCYLGLQPGRRNSGQSEPQMHISKEGDPYLRTLLVQGAQHILGPFGVDCDLRRWGLKLAERGGKSGKKRAIIATARKLAVLLGERRSIRTAAQQQPKDRGRGRLKTKPSQEEKRQKPKAEFR

SEQ ID NO: 227292 - protein, 436 aa, unidentified
MNTIENQEPVVSIGIDAAVVAAHQVAIRGPGIAEDFRVPPTLAGLEELTVRLADWAPAMVVAEPTAGTWLPLLHAITESGCRAGFVANRDSARLRKAIAGANKTDVIDADLLARSPEILGVEQAPIPPAGQIGLRRAMRRRHRAIVEAHRVDCRLWALAAWAFPDVWRACGGHRVAQPVLGRWSDIRALGRARTASIAEIVAASSRDKNPIRRAERIKAGAGGWSEYWIGRLDLDDLAWEVGQCLDDIAIADAKLATTTERALGRWQQLWPDDVLTTIPGIGPICAASIRAWWGEGTHLRSAKAAAAHVGLNPSNWESGQYRSPSRHITKQGPADLRLLLYQAANVARHHDPGLAAHYRRLMCDRGHTHISATSAIARKLAGRAWKILQTQQPYEIRDLAGNPIDPITARTICAELAVPADIRRRNRATQQGRRTP

SEQ ID NO: 227293 - protein, 347 aa, unidentified
MKKIAYLALDVHANNSVLGHMDSKGKFIGNRQFPTSEQNIINALQAIEAKEKLLTIEEATLTYWAAQVAMPYVSKVLACDPRENALIYRSPNKRDKVDTKKLCRLLRLGELKEVYHPENDDRAIFKAAVQQYMDFRDQQVTLKQKIKAMFRHWGIIDVAGEAVYTIKKRHDYINQVKHTEIRRQLNRLYSVMDKVEGIQEQTLRAVKRLGRKYPEIKEFMKIPGIGVVGAHIFNAYIQTPFRFADKSKLWRYCRMGITDRSSDGKLLGYKRLDPSGISELKALTYMAWMSAMRGDNEVKKFYSNSLHRTYDRVHARLNTQRKIIAVMYGIWKSGEKYNPQTFLDSST

SEQ ID NO: 227294 - protein, 402 aa, unidentified
MNCVGIDVSKGKSMIAVMRPFGEVVVSPFEVCHTASELSELARLLKSLDGETRVVMESTGNYHAPVAWLLHDAGLYVSVVNAMLVHDYGNNSLRRAKTDKKDAVKLANYGLDHWLTLPRYVPEEDTRLMLKTCYRQYQQYSKVQTMLKNNLISLLDTAFPDANRLFTSPPRADGSEKWVDFVAAFWHCECVCGLSEKAFTAKYQKWCKKHGYNFSKGKALDIYASSCGHFGVMPKTDTAKLLVEQAVSQLRATSAALAALKQEMQSLAASLPEYPVVMEMFGVGPTLGPQLMAEIGDVRRFHSKKALVAFAGIDAPPYQSGQMDVRSRSISKRGSASLRRTLFLVMGVILQHAPMNEPVYQFMNKKRSEGKPYRVYMIASANKFLRIYYASVKAYLDSLEHD

SEQ ID NO: 227295 - protein, 338 aa, unidentified
MQTGQTVPTYTLFVGVDIAAKTAMVATQRSGAKASRSLTIDQTPAGYTSLVHQLQATGSVPSQVLVVMEATGSYWISLATRLVHEGFAVSVINPAQAHHFAKALLKRAKTDAIDAQTLAQLAMILQPEPWTPPPQIYYALQQRLAQRDDLLNLRQQVRNQLHALVQHPEVIAEVHARMERLLATLEAQLTEVDSEIAAALSQDSTWAAAATRLQSIKGVGWVTAAWTLVTTLNLTSCDTVDALTAYAGLAPMPRQSGSSVWHRPSIGHTGNGRLRTAFYMATLSAAQHNPVIKAFYTRLREVGKPEKVARCAAARKLLHIAWAVVKKDQPFDPNYALG

SEQ ID NO: 227296 - protein, 326 aa, unidentified
MSDSSNIIEVIGADISLREIVLAWARSQRPCLSIANNRKAIVAWLKQLPAGCVIGMEATGRLHHLLADLAVKHGHSVYVLNPKHVASYAKGVGQRGKTDPMDAAVIARYVDRERDGLHAYTIPSALQRTLRDLITQRASVVRHGVALKQSIQATGTARNSALKRAHKAALKSLNALLTEINNELKRVIAANDALETKRKQLQSITGIGFVNSAALTHRFDRTPFANSDAVVAAYGLDPRPKDSGNHLGKRRLTKQGNSEDRRLIYLAAQSASKTKLFNPIYRSLLARGLSTTAAIVILARKLLRIAFAIWTYGKPFNPIKVGKRAC

SEQ ID NO: 227297 - protein, 402 aa, unidentified
MNAVGIDVSKGKSMVAIMRPFGEIVSAPFEIKHTASDIHSLVELINSVEGESRIVMEHTGRYYEVLAHQLSKANLFVSAINPKLIKDFDNDSLRKVKSDKADAVKIARYALDKWQNLKQYNVMDELRNQLKTMNRQFGFYMKHKTAMKNNLIGILDQTYPGVNTYFDSPARSDGSQKWVDFASTYWHVDCVRKMSLNAFIDHYQNWCKRKKYNFSQSKAEEIYGKAKELVPVLPKDDITKLIIKQAVDQLNSASITVESLRTLMNETASKLPEYPVVMAMKGVGTSLGPQLMAEIGDVSRFTHKGAITAFAGVDPGVNESGSYEQKSVPTSKRGSSDLRKTLFQVMDVLINTHPQDDPVYQFLDKKRAQGKPYYVYMTAGANKFLRIYYGRVKEYLSSLPES

SEQ ID NO: 227298 - protein, 351 aa, unidentified
MTTMTSTRPLVTGGVDTHRDEHVAAALDRVGGLLSTASFPTSTAGYAALLAWLRTYGEVSSVGVEGTGSYGAGLARHLTSNKIVVLEISLPNRQVRRRYGKSDVVDAIAAGRAVLSGEATGTPKTHDGPVEALRALKSLHRSANKARTQAINQIRATLVTAPDELRARLRDLSRRDLLATCAAFRIGADDDSLAGIIRLTLRELASRVAFLDAQIKSTLVWLKRITDELGPDLVAMHGVGPDTASTLLLTAGDNPDRLRSERSFASLTGSCPVPATSGLIQKRYRLNRGGDRQANAALWRIAMVRLSTDPATREYVARRQTEGKTKIEAMRCLKRYIARGVYNALPKTALC

SEQ ID NO: 227299 - protein, 410 aa, unidentified
MEVLHAHCAGLDVHKDTVVACVRHMVGGTVKREVKSFQTTTKEPMALSEWLSVEGCTRVAMEATGIYWKPVWHILADGEFELVLANAAHVKNVPGRKTDVNDATWLADLMAHGLIRGSFVPDEPTQDMRDFLRTRKQFVRQRSSSIQRIQKTLEDANIKLDSVISDIIGLSGRAMIEALIAGQSEPDKLAALAHRRIKASPAELEAALRGRVTDHHRFMLRLHLQQIDALNAAIAEIDRQVEANLEPFRIATTLLITIPGVSELMARTIGAEIGTDMSRFPTHGHLISWAGLCPRNDQSAGKRRSNRMRKGAPWLKTALVQAAWAAVRTKGSYLQAQFQRLRARRGAKKAIGAVAASILTAAYHMLKQGTFYNELGADFFDRSAKNSHAKRLLARLQNLGYDVQLTPINA

SEQ ID NO: 227300 - protein, 340 aa, unidentified
MQVIRFGIDLAKNVFQVHGVDATGRVVVQRQLRRAQVEKFFAAQPPALIGMEACGSAHHWGRTLRALGHEVKLMPPAYVKPYVPRNKNDARDAHGCCEAVSRPDMRFVPIKTVEQQWARALHRTRDLLVRQRTQLANAMRGMLYEMGQTSAQGAAGLEALLQRVEAADEAIPEALLICLTPLAGQWRALDGEIGKLDKQILAQVRQQKAALRLTTIPSVGPIIAHATIAAIGDGRQFTSGRDFAAWLGLTRKSHDTGGKHKLTGHISRAGDRDLRRLLILGASSWLRQVRAKPDRGSPWIRGLLARRPVKVAVVAQAAKTARIIWAMLNSGQEYRAPVAA

SEQ ID NO: 227301 - protein, 337 aa, unidentified
MTIIRIGLDTSKHVFQVHGVDESEQAVLRRQVRRSEMAKLFAKLAPCRIGLEACGASHHWARVLRGLGHEVVLMPPQYIKPYVKRGKNDAIDAAAICEAMSRPGMRFVPIKSAEQQAALMLLKVRDLLVKQRTMLINAMRGHAAEFGVVAAKGPVKVAELLQRSHAEAAGVPALAREMLSVLSGQLDALDIKLKALETRLMALHKADPLSQCLATQPGIGPIGALSFSLKVSDPKAFRSGRHFAAALGITPREHSTAGRQRLGRISRQGDEGLRRLLVLGATAVIRCAKAGQASPWLLNLLARKPRKLAAIALANKMARTLWAMMVSGEVYRRSQPA

SEQ ID NO: 227302 - protein, 460 aa, unidentified
MDTIVSRCAALDVHKDTVMGCVRVPDEFGGRVQEVREFRTFTAGLRALRAWLAGHGVTQVAMEATGVYWKPVWHVLEAEPGWALLLANAQHVKNVPGRKTDVADAIWLAQLLECGLLRGSFVPPRVIQRLRDLTRYRKKLIEERTREIQRIQKLLKDAGIKLDSVVSDVMGTSAREMLEALIGGQRDPGVLAELARTRMRPKIPELRLALEGGFDPHHALMLRLHLDHVDQLSVAIEGLDAEVDRVILPFSEQHRRLTTIPGVGKRTAEVIIAEIGVDMSRFPTASHLASWAGICPGNHESAGKRRSGKARKGDAALRAALCESAWSAAKTRGYLGSLYRHLLRRFGKKGQAKAAFAVGHAILVIAWHLLHDERDYQDLGADYLDKRKDNQARKRYLIRQLETLGHRVTIEPAAQPTNNRSGLRPEASPCTAKASFVSEGVRREGLEPPTRGLRVRCSAS

SEQ ID NO: 227303 - protein, 390 aa, unidentified
MHFVGIDIAAETHVFAILDEHGGILRKPTPFTEDREGYAKLLAVLDPIRPALVVMEATGHYWKNLFATLAAAGHNVALINPLRTHRFQGEDLERTKTDAIDALGLGRFGQQKRPTPTCLGETATEELRELVRHCDRIRQDFDDRLRQLHRLVDLGFPEFTRTVRTLDSMLATCILAEYPSAEAIARATPRRLAKLRYDGRHLVGTELAARLIEAAKRSVGAHHAAAYRIQVRDICQDLDLWRRRLAEREADIERLLKADKVGTLLTTIPGIGPQTAARLIAELGNPAHFDDADALAAYVGVVPGLKQSGKRRSVSASLNPIGNARLRAKLWMPTLTAVRLNPWLHAFYKGLRARGKPAKVALVAAMRKLLHAIYSVTKNRAPFELKVNPT

SEQ ID NO: 227304 - protein, 422 aa, unidentified
MQVMHERVAGLDVHKDSVVACVRLMSGSKATHECRTFETTTDGLLSLLEWLVACRCEVAAMEATGVYWMPVWKILSDGQFAMIVANAAHIKAVPGRKTDVNDATWIADLAAFGLLKASFVPDEDVHELRTLMRTRKQLVREQSSHIQRIQKTLTEANIRLDSVISDIMGLNGRRVIEAMMAGERNPRKLVALTDRRLKASPKELYDALHGRLTDHHRFLLELHLRQYDALDEALRIIDREAEARLSRLDQRIEPKPGFRDLIRLLVTIPGVSRLSALTILSEIGRDMSRFATAGHLVAWAGLCPGQNESAGKRRRSRLRKGAPWLKTMLVQCAWAAKRAKDSYYRAQFFRLQAKRGPQKAICAVAASILTAIYHMLKNGVVHADPGASYFDNRPREAKVKRLVRQLKNLGFDATLQPIGEAA

SEQ ID NO: 227305 - protein, 343 aa, unidentified
MTEVITIGVDLAKNVFQVHGVDASGKTAIRRQLGRGQVLPFFKKQPPCLVGMEACATAHHWGRELEALGHRVRLMPPRYVKPYVKRNKNDAADAEAICEAVTRPTMRFVAIKSAEQQSVLMLHRTRELLVRQRTMVVNAMRAHLAEFGVVARVGLPQVKRLLAVISDSGDDRIPPLARTCLQGLATQFMSLEGEIGAAEQRLHAWHRSNEVSRRLETIPGIGPITASALAASITDPHVFKSGREMAAWIGLVPRQTSTGGKQRLGRISKQGDHYLRWLLVAGAMTIIRHAKRRGTSNRPGLIGLIARRPTKVAAVALANKNARIAWAILRHGGTYERPTMRAA

SEQ ID NO: 227306 - protein, 316 aa, unidentified
MNEMIVEKFVGIDVSKSTLDVCIEPAVQTLHVAYDEAGIKQIAVRLKEANPTLIVMEATGGLEVRIATELASQGLPVAVINPRQARDFAKATGRLAKTDKVDAAMLAAFAQAIRPQVHPLKDAETRALDDMVSRRRQLIDMRVQETLRLGTAASKPLEKSLNKHIVWLDKRIAEIDTDLTKRLRQSDIWRTKDDLLHGIPGVGPVTTLTMLAKCPELGLLNRREIAALTGVAPLANDSGKHRGKRFIWGGRADVRAVLYMAAISAIQHNDAIKAFAERLKKAGKPPKVVIVACMRKLLTIMNSMLKNNTPWNPKNA

SEQ ID NO: 227307 - protein, 332 aa, unidentified
MYLGIDVHKRDAQVAVMDEAGEIVEEVRVANANLDDLAQRYAGAEAVIEATTNYYHIHDTLSEYLDVTVAHPGKLTLIANADKKTDRVDAKELARMGRLNSVPESYVPTDEIREARALVRGRQRLVENRTDYANKIHGLLSDHGITRDIKPLSVSGRESLRDLSLPTPWDELLASYLAMIETLTEEIERLEATIEERAGSLEETQLLMTIPGVSYYSALMIYSEVGEIARFDRDKEVVSYAGLNPVIRESGDSRIEGSISKRGSRQLRWILVQCARTAVHTCKDEYLKQFYDRLAGRKGSQKAIVATARKLLVSIFHMLDREEVYNPPGVSA

SEQ ID NO: 227308 - protein, 454 aa, unidentified
MSRKRVPKKKNAVVPILNPDAAGIDIGASEIYVAVPADRDPEPVRMFLTFTADLRSLADWLQQCRVRTVAMESTGVYWIPLMQLLEDRGLEVYLVNARHVKNVPGRRTDVSDCQWLQYLHSVGLLRASFRPAQEVCAVRSLLRHRDSLIEMATCHVQHMQKALDQMNLQIHHVISDITGTTGLAIIDAILSGERDPQKLAQLRDPRIRASSETIAKSLVGDYRREHLFTLRQAVALYREYQRKIVDCEAEMQELMKNLDSKADPSSLPAPKESVKKCKVMNPGRALALREEAYRILGVDLTTIPGISVLHVQTILAELGPDSSKFRSAAAFSSWMGLCPDNDISGGKVLWSGTRRVKNRIALTLRLAAQSLQHSQSALGEFYRRMRAKLGAPKAITAAAHKLARIVYHLLTTRQSYDDSIFTKAEERYRRRAESRLKAQAQALGFTLSPTTHLG

SEQ ID NO: 227309 - protein, 407 aa, unidentified
MVAVMIGVDPHKGSHTAVAIGAAEEPLGELRVRASAAQAERLMAWAAAWPERTWAVEGAGGLGHLLAQQLVAAGERVLDVQPKLGARVRLLAAGDTNKNDPNDARSVAVAALRSTARREVAADDHAVVLKVWSKRHRDLGRTRTQVACRLHAVLCELVPGGISKEITAAHAARVLESAKPSGAVELARCELAAEFLDDLRRTGTQMRDTKKKLTVAVRASGTTTTEIFGVGPVVAAIVIGCVVDVSRFASRDHFAAYNGTAPIEVSSGNRKIHRLSRRGNRRLNYAIHMAAITQIRYRHSGGRAYYDKKMAEGKTHKEALRSLKRPISDAIFARLHADARRVAAAARTAGPGGQPGNDSVASAAGSHPGHRLFGQATPGPESTLRPRPDPQTAKTHPRAKRKTARTP

SEQ ID NO: 227310 - protein, 337 aa, unidentified
MRSIGVDLHSNSLTACYLNEDGAEQFRTFPLRELAAFQDSLQGEDQVAVEATGNTRWFVRQIESRVSGVTVVNPNQFAVIRQSVKKTDKHDARALALFLSKGLLPEARLKSDACAALNSLCQTRQKLVELRTTLINKLHAIHRSHGIESKKSEFGSEKGLEQALAREWSVIERVEIEVITCQIRSLNESLKKLDKQLAESGAELEGHQSLVSIKGIGAKSAAILLSVIGDVKDFEDEDKLSSYFGIVPRVSDSNQTQQRGRITKRGSKLGRTTLVQCTLVAVRYSDYLKSYYTKKKSEKGAGKAIIATARKFLGVIYRTLKNKWVFADFPNFVLAEG

SEQ ID NO: 227311 - protein, 427 aa, unidentified
MRSIALDVHRDFCEVAIKDESGLRLAGRVKSSVCELELFAQSLAPDDEVALEATGGALQIARILEAHVARVLIANTRKLSAIAESKVKTDKLDAKTLCELLAAGFLPAVFSPDEFTRALRRRLQRRSKLVRSRTRAKNECHAVLARNLKGRPPMTDVFGKAGRRWLAALELPADESETVACCLREVDFLDGEVGLIERELARQAMSSQEIRRLMSVPGVSLVSAAAFVAAAGEIHRFSTPKKLVSYVGLDPRVRQSGEGPARHGHISKQGSSEARHMLCEAAWVAVRTPGPLHAFYERVRARRGAQIALVATARKLSVLFWHLLTREEDYAFGRPSLTRRKLRALELKTEQGWRRGRYSGPRVHEAKKEREQEREFSDQVETAYRRLVQDWQPKPAKSGAGATRGRASSKPTSGKQRGRASVPNSAL

SEQ ID NO: 227312 - protein, 351 aa, unidentified
MKEYIAFDSHKHYTLMEREDRQTARTVQLRVAHQPGAIRSCLRNCESGTDVAVEATGNWYWIVSEIEQAGLKPQLVHPRKAKLMMGLINKTDKLDVHGLNRLQRNGTLPTVWIPPAELRDQRELTRTRLVLVAQRTRLKNRLQSTLAKYGLAVRDCSDAFGTVARSQWPELLAKLPEQTQWVSQQLLKQLDLLEEQIGQCEKRLNPLLKITPQIERLKSLPGVGLILGASIALEIGGVSRFASAEHLASYAGTTPRVHSSGDKLRFGRLRPDINRYLRWAFVEAANVVALHHQQRPERHVSYLYWRLKQRKGHAKAIGAVARHLAEATFHILSRQEDYVDPALRKGRSKPV

SEQ ID NO: 227313 - protein, 343 aa, unidentified
MKLSRIGVDLAKNVFQLHGVDGDDNAVFRRRLKRAQWLRAVFDHADLDCVIGMEACGGAHHWARALQAAGYTVRLIPPQFVKPYVKSNKNDANDAEAICEAMSRPNMRFVAIKTVQQQDIQATHRVRAECIAHRTAKGNQIRGLVTEYGLVAPQQSAALRAAIPCWLEDAENGLTSRFRALLHGLWEDLIRLDERVATLDADIALIAREDPLAKRLQQLRGIGPLIATALIASVGSGQQYAKGRQMAAALGLTPRQHSSGNKDRLLGISKRGDAYLRSLLIHGARSTLWHARHKQDRLSRWMNDLSTRRHPNVAAVALANKTVRMAWAMMQNESDYNPEYVAA

SEQ ID NO: 227314 - protein, 385 aa, unidentified
MVYIGIDIAKFKHFASVVSSDGEVIVKPFPFENSRQGFMKLVEEIENFQGCLIGLESTGHYAENLIYFLYERGYKIGVINPIQTDALRDSNIRKTKTDKIDTKLIVQCLMLKKYSLVNSQDINIIKLRRLSRFKLETIQQQTRIKIQLTACLDIVFPELSRFFKGNLHLKVSYALLEKYPSAKAIAHCRIDGLTNLLYSNSRGRYTQDKALQLKNLAKQSIGLDNPAIELQIQCLIKQLRLYQKQIKDIDLAIMTLMKLLNSPILTIPGVGYTLGAMIISEIGDIKKFSNPSKLLAFAGLDPVVKQSGDFQSSSMKISKRGSTYLRYAIYRVAFIIIYNNETFHNYYISKRAEGKTHRVALGHVCNKLVRVIFKILTDEVPFNLS

SEQ ID NO: 227315 - protein, 314 aa, unidentified
MSFQHFIGIDVSKAKLDLAFDEQATTTVVPNDPKGIDELVDLLPEAKSCLIVIEATGNYERPLAVRLVEAGHVVSVVNPRQVRDFAKAIGKLAKTDKIDARIIALFGKLTRPRAVAKTKQLQGELDQLVTRRRQLIGTRTAEKNRQGQAVSGAVRKSIQRVLDAINKDIKMIDREIQKLVQSDDDWKHRAELLGTMPGIGDVTSATIIAELPELGDLNRQEIASLVGLAPFNRDSGQMRGKRSIFGGRGSVRSALYMAALSARRYNPAIAAFSKRLAEQGKPPKVVITACMRKILITLNTMVKTNTAWENPQNA

SEQ ID NO: 227316 - protein, 419 aa, unidentified
MSFKIFKFNCCGLDVHKTWIYACIGITDSNNRTEYKQARFSSFTKGLNELCDWLAKYNCKDVCMESTGKYWIPVFNILEQHSFWVTLSHPKYTKPMKGNKTDRKDAKWICDLYMCGMVKPSFIPPADIRELRDLVRYRFKLTCMITGEKNRAQNCLTVSNLKLDDVFSDVFGKSSRSITEHILQHPGEKFDIAPFVDSRCKTPITEIQAAVDGAISKEQVVKLRQCLDHIDELNKHISEVEQEILRLSDKYEAALNLIRTVPGFNKNPLTAIQVLSEIGGDMSVFPTAKHLVSWAGCCPRNDQSNQKIKSTRISRAGSYFKPVLVQVANALIKSKKHSEFTSRYKRIKARRGHKKAIIAICRMILTAIWHILSDLEPYTPEGFLESRPVKEEKVLSTSQALNLLKQRGYIIKDEPLAVS

SEQ ID NO: 227317 - protein, 350 aa, unidentified
MKVTTSGIDVAKSVFQVHGVDGRGNVVLRRQVRRSQVAPFFSRLEPCLIGMEACASSHYWARKLTALGHTVRLMAPQFVKPYRKNDKNDGNDAEAICEAVQRPSMRFVPVKSPEQQAELAVHRIRRRLMGKRTALINQLRGLLAEYGLVLAQGANHVRSKLPALLEECSESLPPLAVELFRDLYEELVQLEQRIGAYERRVERLYRGNSVCQRLGQLEGIGALTATAFVATVAHAAQFKNGRQCAAWLGLVPKQDSTGGKTRLLGISKRGDVYLRTLLVHGARSAMRHTPKRNDPKSRWVEQLRKRRGENIAAVALAAKHARILWALMVRGESSPQPATHSIDPLEQPAV

SEQ ID NO: 227318 - protein, 356 aa, unidentified
MSEKFNSEIAVIGIDIGKNSFHIVGQDRRGSIVLRQKWSRGQVEARLANLPPCLIGMEACTGAHHLSRKLQALGHDARLMPAKYVRPYSKGEKNDYRDAEAIAEAAQRPTMKFVATKSADQLDLQALHRVRERLVGQRTGIINQIRAFLLERSIAVRQGLHFLRAELPGILAKRTDVLSPRMLRVIEDLARDWRRLDERIDALSDEIMMLARQDKGCERLMTVPGIGPIISSAMVAAIGSGDTFSKGRDFGAWLGLVPKQMSTGDRTILGSISRRGNRYLRTLFVQAAWVVLVKIKPEGWERYGLKPWIEAAKQRLHRNVLAIALANKLARIAWAVLHKGRAFECVKTNATAPRPA

SEQ ID NO: 227319 - protein, 431 aa, unidentified
MRGGDAVQRSFGLDVHLDFCEVAVCEEGRVSQLGRIASTPEAIREFAAGLTGGDQVVLEASCGAMRIARLLQEGPVGRVVVCNAAETRAISHARVKSDRFDAAMLAKLLAAGMLNAVWIPDETTSALRRRVARRAGLVRARTRVKNEVHAVLARCLMGRPPVSDLFGKQGRVWLAERELPEEEAQTVTSCLRHIDFLDGEITELDQRIARQALALPGFHRLLTIPGVDVGTAAAVIGAVGDITRFSTPGQLVAYLGLDPRVRQSGSEPARYGHISKRGDPQARAMLVEAAWRAIRTPGPLHAFGERVRARRGAQIAAVAVARKLLVLCWHLLTKQQDYAFARPSLTRQKTRRLELLAGAPPLPRRHSGPPVSPTGSQREAEKALAQQAEHAYRRLIADWRTTAPRGGAGATPGRASNRPSKGKAARQATSP

SEQ ID NO: 227320 - protein, 404 aa, unidentified
MNAVGIDVSKGRSTVSVLQPGGVIVRNPFSVTHTSSGLKSLTDYIRTLDGETKAVMECTGRYHEPVLRALSDAGIFVSAVNPHLIRNFGNNTIRKVKSDPADSRKIARYTLDNWAELREYSHMDTTRAQLKTLNAQMTFFTNQKVAAKSNLISLLDMTYPGVNELFDTSPRDDGSEKWVDYAASFWHVDCVRKIGLSAFTERYQAFCKRHGYNYQPGKPEELFRATKDLIAIFPKEKEYKDMILMAIKQLNVISANVEHIRQEMNRLASVLPEYQTVMDMCGVGKTFGPQLIAEIGDINRFDNRESLTAFAGVDPGVNSSGGYSSRSNKASKCGSARLRKTLFLIMTALLQTKPENDPVYLFLDKKRSEGKPYLVYMTAGANKFLRIYYGKVKAYFKAQAETQD

SEQ ID NO: 227321 - protein, 302 aa, unidentified
MLYIGLDMHKKTSTIAVRDESGNVIETATVPSSIVFEYISGHHDKCVVCTDAYPGARPILRRLERKGVKVIVLGHVPGRVSGTRKKTDITDALLYSEIAWRGRASRAWIPPEAIEKLREYTRQREMYARLMAMARGAARQHRLAGHDEVARMLDEDVKYFKERTRMIESRIREHLTEHGLMPVVERLMEIPGIGYVSAAAILAEVGDIRRFESGDRLVSYAGLAPSTYQSGERRRHGKTGIGRLKRIMYLCAMAHVRARGKFYGFYSRLRKRGKAMSVALIAVARKLMLVVFNVLNGDRYRP

SEQ ID NO: 227322 - protein, 414 aa, unidentified
MGTTYEILVGIDWATETHQVCVLTPEGKPLLERTVEHKAPAIHAFIETLIARVGGRAASIAVAIEVPRGGLVETLLERGLHVYSLNPKQLDRFRDRHSVAGAKDDRLDAYVLADALRTDLHKFRQVALDHPLVIQIREISRADEDLRDEANRLTNRLREQLYRWVPHLLSLSPSTDEPWFWDLIERITRSDSMRLNRGQLEKLLRKHRIRRHTPDAVLAALGTERMNIAPGAAEAARSHIRLLLPRLRVVHEQRKQCAKQLTSLLDQYAAEDDDERGSSPSDVHLLRSLPGVGAGVTATLLAEAASLLRAADYPALRAFGGLAPVTKRSGKSRVVLMRYGCNTRLRNAFYHWARTSVQHDDAARNYYATLRARGHSHGRALRSVADRWLRILTAMLNSRTMYDPLHKRLVRVVA

SEQ ID NO: 227323 - protein, 411 aa, unidentified
MTNPLLVGVDVHRQTNTVCLMNGQGQELAPRFTVENNRPGTEAFIRKVAQQVIDGDFDAIHIAAEATGWYWWHFFQTLEQDSFLNQWPLELYPLNPRLTANFRKTYIDLDHHDLTDAFVIADRLRLGRDLPLPFHYDERYFPLRLLTRYRYHLAHQLAREKAYCLTFLYLKASEYARLRPFSDLFGAASRAVLQEFASIEDIAAIPFEELVEFIDRKGKRRFPDPEENARRLLQVARQSYSLPEALRQPVHLLLQWSLQHITFLEQQEQRLSQAIAHHLEAIPHTLDTIPGLGPVFCAGIIAEIGGVERFQYEEAKVARYAGFRWRRHQSGDFQGEESRLTRAANRYLRYYFCEGGNRVRMCDPEYAAYYERKYREVQRHQHKRAMVLTGRKLVRLVVRLLTTHQPYRPRR

SEQ ID NO: 227324 - protein, 341 aa, unidentified
MRIVGGLDVHRRQITFDYLDERSGQVRRGRIAPADRMLLRHWLKTTVDGAPAAFAVEACTGWRFVVEELRDAGIEAHLAEPADTAAARGPKRRAKTDRTDARHLRELLAAGRLPESWIPPEQVLEMRARLQLFKDLREQHTAWVQRIHAILLHQGAPAIAGDLLGADNRRRLEAGEQLSPAGRQAISTALRILDALDAELGPLRKQIAAFARRQPGCKALQAHYGVGEITAVALWAELGDTRRFSSSRKAVRHTGLDITVYSSDDKRPPGHLSRQGSPLLRWALFEAAKCAARPGSPDYGYYRQVADRLGGNRAALSVARKIARRAHHTLRALGEDALATV

SEQ ID NO: 227325 - protein, 425 aa, unidentified
MNDDVMIAVDPHKASNTAAVLDPVTKTVIEAARFANTFDGYAQLPAFAARWSQRRWAVEGCYGAGRSLAQRLAADGEAVLDVPAKLAARVRVYSRGHGRKTDKDDAVSVGLAALDGTGVFPVTPDDATVSLRLLCDRREELTAQRTQAVCRLHRLLAELTPGGMRRELSADKAQALLARIRPADDVAAVRVRIARDHLADIRALDARIKYLGGQIAGLVDASGTGLTGLFGVGPVIAGRILAEVGEVARFATKDAFASYNGTAPIDASSGEQVRHRLSRAGNRRINHALHMMAVVQIRYPDTPGRRYYERKRREGKTPKEALRCLKRRLSDLVYHQLLADRHGTIGTCGSPTTQRPTRSTSTSPASRSHQAAPPCRPPRRPAPADSSRWTGKTAASSASRSSTPAPASTPTSSTKPKSTAKTAAS

SEQ ID NO: 227326 - protein, 396 aa, unidentified
MKTNNTTASAPVGRVIGLDLHPDVFSAAALAGRDAATAQVAQSWDRRATGDWEAWARSLRPGDLVVVEASGNTFALVERLRACGVPVVVLESQRAGQIRKTYCANDRTDAVKLARIYLSGLAHTVWQPDAATRERREVLHAYRKAVTTATRTRNRLKSFLSDHGVRLKPGIRLTQSTGQQTVRQSQAWSARQHLLLDELLGELATAEERRHRLSALMAQEVAADPGLLRLMRLLGVRHIIAYAIGAVVGDITRFANPKKLVAYLGLAPRVDQSGNDARGAQGLVSFGRGDLRALLIQSAHNALVQRRSPLHTWGWKLCLRKAHKNVAVAAIARKLTVSIWYLLRGLFAPLAQIDETLQVKLGKLATAVGLKTIRQLGYQSKAAFIEEKCGYLLKPT

SEQ ID NO: 227327 - protein, 394 aa, unidentified
MPELFVGIDVAKDTSSAQGIDSKGKGQFFLTFSMDLEGFMQLWKAITEHSKGLAEVTAAVESTACYHINLYSFLTAKGISTVVINPLLIANFAKLSLRKTKTDKKDAMSIAQFLLAHRENINQLSLSQDMQDFRDIARERESVGNLLTAHKVEIKRLLQSTFPELERIGNLSTRVMREFIEAFPSARLVKIADPKVIQKILQRKGVEARLTYTAEDLIEAAKHSIATISPAKELILQGKVKTLQHLQERHEEMTKILVEYCKSSMLEDFEIITSIDGINKRTATSFLAEIGCISNYASYKNLIAFAGIDPTVYQSGKFEGESRISKRGNRHLRRVIWIMTTCVIQHNIIFKAYYMKKRSEGQAFKKAVFATAHKLIRVIFAMLTQRTMFKEVCA

SEQ ID NO: 227328 - protein, 345 aa, unidentified
MGPRYHIGQDVHKQKSHYGVKDVGGRIRVEGWIPATRFDLDRWMKTLPQPWSAALEATMFSGWIYDHLKPHAAELKVAHPLMLRAIAAAKKKNDRIDANKICDCLRCDFLPECYMAPTAIRERRRTLRYRNLLVRQMVQMKIKISTLLMEAGVSYNKQKLHKAGYFRELLASNPDIDESLRSLLRQCREMVVRLGKMETALIHSLQQDPLLVERVERLMSIPAIGPITALTWALEIGEVQRFSSIKKAISYCGLCGDEQRSANSVQRTPISKQRNKHLQTTLIEAAKMAPRYSPTLAQLYDREMQKGNANRATLAVARKLVAYLMAVDRGQTHFLVIDQETRTAA

SEQ ID NO: 227329 - protein, 409 aa, unidentified
MKRFNGPAERPVFVAIDIAKARHHVLIEFADGKRTALSIANTLADFNKLASQLKAASTRCEVALEPTGDYHRPIANFLLRRGHNVQFVSSIATHRTRETLFNSWDKNDPKDAQVILHLLKGGVTQRYADPLQAGYQDLQELLGTYSQVVGRKTRVYHSLMTHYLPLYFPEAEPFLGSSRSEWFLDVFLFAPCPAEILKHRKETYLRKTVKGDEGHPTVRRRLVAEFYETAKESVGIPIAAGSVSMQMFKTILAEYIALAKLRRKLEKQIHDHLDSNTDYQNLRTIPGIGPIVALTILSEAGDLRRFSHYRKFLKYCGFDLSTSQSGTQKGTPQLSKRGNARLRCAFWMAARAAVAMRRNGFRKKFDDYTKRDPLSADLRRKAYSAVAAKMARVSYGLIKSGGEYRHLTA

SEQ ID NO: 227330 - protein, 419 aa, unidentified
MSFKILKFNCCGLDVHKTWIYACVGITDSNNRTEYKQARFSSFTKGLNELCDWLAKYNCKDVCMESTGKYWIPVFNVLEQHEIWVTLSHPKYTKPMKGNKTDRKDAKWICDLYMCGMVKPSFIPPADIRELRDLVRYRFKLTCMITGEKNRAQNCLTVSNLKLDDVFSDVFGKSSRSITEQILQHPGETFDVAPFIHGRCKTPIEEIQAAVDGAISKEQAVKLRQCLDHIDELQKHISEVEQEILRLSDKYEAALNLIRTVPGFNKNPMTAIQVLSEIGGDMSVFPTAKHLVSWAGCCPRNDKSDRKIKSTRISRAGSYFKPVLVQVANALIKSKKHPEFTTRYKRIKARRGHKKAIIAICRMILTAIWHILTDLKPYTPDGFLESRPVNKEKVLTISQALNLLKQRGYLIKDDPLPAS

SEQ ID NO: 227331 - protein, 315 aa, unidentified
MKRESPSVGIDVSKATLDLCLYPSGKNWQVEHSPAGMSALAEELVALEPAVVVVEATGGLEVSLAVALGSVGLPVAVVNPRHVRDFARATGRLAKTDKLDAQVLAQFGAMVQPPVRPLPEAARRELRGLVTRRQQLLVMITAEKNRMRRTTPGIRHRIEVNVQWLQGQLKELDRDQEDFLRTSPLWQEEAKLLRSVPGVGPIVTATLIARLPELGSLNRKEVAALVGVAPFNRDSGTLRGKRTVWGGRGPLRTALYMATLVATRYNPVLRDFYHRLCAAGKPKKVALTACLRKLLVILNSMLKHRRSWNPAGQNS

SEQ ID NO: 227332 - protein, 405 aa, unidentified
MAVPFTSSGRSCLRPRYAPLRVLARARLPEGIAGVTRLHALIGQFAGPDAEPGEVAVGIETDRGLWVTALRAAGYTVYAINPRQVARYRERHGTSGAKSDKGDAHTLADMVRTDSHQLRPVAGDSAEAEALKVAARAHQTLIWERSRHLLRLRAALREYFPAALEAFDDLAAPDALELLARAPDPASAARLTSGQITAALTRARRRGIPAKAAAIAAALRGEQMRQPQPLAEAYAATVRSLTVIIAALGGEIGRMEGQVTACFRRHPDAAIYLSQPGIGEILGARQLGEFGDDPHRYATAKARKNYAATSPVTRQSGKKKIVMARFIRNDRLADALHRQAQSALISSPGARAYYDEQRDRGLDHDAALRALSNRLVGILHGCLKTGALYDEATAWSHRVKLAGAA

SEQ ID NO: 227333 - protein, 343 aa, unidentified
MTISVLGIDLAKNTYQLHGVDGVGKAVLKKRISRNELAAYIAGLPPCRIVMEACGGANYWARVFQRSGHQVKLISPQFVKPFVKTNKNDANDAEAIVEAASRPSMNFVPIKQVEQQDIQSIHRVRSRVVKNRTALINEIRGLLLEYGIAIPLGAAKVKRFLCEIIANNKNELTDLSRECMRGLYEELIEIEARQKKLDKQIRQISRQNETCNRILKIPGVGDLTATALVAAIPDAREFKNGRHMAAWLGLVPRQSSSGDKQTLLGISKRGDRYLRTLLIHGARSALSHYKKTDTLYGRWLFDKKASLSFNKAAVALANKNARIIWSLLSRGEEFNINTKPVAV

SEQ ID NO: 227334 - protein, 364 aa, unidentified
MTTIAQSAGERRVLGGVDTHKDVHVAAVIDDLGRILDTAAFASTREGYRRLLAWLGGFGELVAVDVEGCGSWGAGLSRYLAARGVPVLEVNRPNRQNRRRRGKSDTVDAEAAARAVLAGDATVTPKAGTGPVEALRQLRVARAGAMKARTAAANQLHSLIDTAPERVRAQLRDLTFKKKITLAARWRPTRTATPDGASRYALASVARRWQGLATEIAELGRRIKTILDDVAAPLVAVHGVGYDTAGQLLVTAGDNPDRLRHERSYAALGGSSPVQASSGKTDRHRLNRGGDRHANSALWRIVIVRMTSHQPTKDYIARRTAEGLSKQEIIRCLKRYVARELFPHIHSVIAPTILEPPINTQRAA

SEQ ID NO: 227335 - protein, 338 aa, unidentified
MKITTIGLDIAKTVFHFYAVNQMGRFVKKKQLKRKQVLTTMAKLEPCLIAMEACGGANYWAREFIALGHQVKLIAPQYVKPYVKGNKNDYNDAEAIAESVQRPNMRFVPIKSVEQQDVQNFHRQRDRIKKERTALVNQVRGLLAEYGVIINKGMAAVRKDLPDILEDAENGLTTLTRELFAESLEELRVLDKRFMHCERRIKSMNQDNAICQRLDEILGIGPITASATYAAAGDGKEFVNGRHFSAWLGLVPGQHSSGGKTVLLGISKRGNAYLRTLFIHGARAVLRHSANKTDRFSRWAQAVLARRGHNKACVAVANKIARMAWVVMAKGESYRVPV

SEQ ID NO: 227336 - protein, 317 aa, unidentified
MQTDPVFLGVDVSKVELVVASHGPSRSLARVCNDVVSIEAWLSTVPRPACIAMESTGRYHGLLARLASAAGFLVYVLNAADLYFYAQQQGTRAKTDRLDAQRIADYLAEHHRRLHPWQSTDSVHYRVQGVLQRRARVVKHQEAIRQCLRDAPELAGPAGQLHDEFERFLREVDRHLEQLVASDERLLQGCRRLRTIPGIGAQTSTLLAALLSRIPFANADALVAFCGLDPRAVDSGTKRGRRRLTKRGPALLRRQLWLAAFAGTRTAALKPLYEQLRQRGFASTEAVVILARKLLRVAFAVWRSDGGFKQELLAPRT

SEQ ID NO: 227337 - protein, 429 aa, unidentified
MNLIPVAGIDVGKRFSEMAVLSPSNEVFARIRINHDSFKNFEKAFELLKKAEKEFAAKPVVVMESTGHYHKILFHALNNVGYEVSVINPIQSDSIKNIGIRKVKNDKVDARKLALLYRFEQLKGTKIPNEDIDCLRSLCRHYYKLSDQLTAYKNKLLGIVDQLFLSFTDVFEDVTSVTALAILDKYPTPEDILNADRDELITLIKKSSRKNLKWATAKYELLCSKARDFKPLSINSIANTAMLKANLSMIKTLSQLLENALDAIHELIEQDSQKDMPLLSLTIDILCSIPGIGILTAVTIIAEIGDFSAFSKPDKLVAYFGIDPSVKQSGQFEGTKNKMSKRGSRLLRRVLFTTALANIRKKRNGKEHNPVLYEYYRKKCVSKPKKVALGAVMHKLVLIIYAVMRDRKPFVLRKPEEHAAMLKAKNSAA

SEQ ID NO: 227338 - protein, 358 aa, unidentified
MRNKNNELDFSNQIIFVGIDVHKKQWSVTINTGGQQIKTFSMNPEPEELNKYLRKNYPGGKYRSCYEAGFCGYWIDRQLQSVGIENIVVNPGDVPASNKEKTRKTDRIDSRKLARELSGDNLTGIYIPTKEQEATRTLSRLRIQLTKDQTRVKNRIKSLLNFIGIHLPENIELKHWSGKFIKYLHSLDFEQEELKQTLEQQLKQLTALREQLSDVVKLLRKMIYQDEEKQKTVVQLMTVPGIGFITAVSLYTEIMDINRFRSFDHLSSYVGLAPSTYSSGQKEMVIGLSQRQNTNLRNILIEASWIASRKDPVLTMTFGRLSRRMKKQEAIIRISKKLLRRIMHVWKQREDYIFSVAK

SEQ ID NO: 227339 - protein, 362 aa, unidentified
MAKTSRTVIGGVDTHADTHTAAALDSAGRLLGHRQFATTAGGCQALLAWLRRHGQLKAVGVEGTGSYGAGLARLLTASGVHVVEVDRPNRKARRSTGKSDPVDAEAAARAVLAGVATGTPKSRSGVVEAIRVLRVVRTGAVKARTAGLNTLVNLARTAPEPLGAHVHGHSARQLVRLANTWRPAGTLHDPVTATKSAMRRLARRIIELDQEIRAADLELRTLLQLVAPKLLDCRGVGPEVAGQLLITAGDNPTRLADDRAFALLTGVAPLLASSGRTDRHRLNRGGDRAGNNALHTVVLSRMRTDPATRAYVDRRTKQGLNKREIIRCLKRYIVRELFPLIVDALTPEPDDDQTDEPAPHAA

SEQ ID NO: 227340 - protein, 376 aa, unidentified
MKKNITVKNEKKTTAKTKGKRRTATQQRLTVGIDLGDRTSRYCILDEVGEIASEGAVATTASGWNSIFGKMPASRIALEVGTHSPWVSRHLTAQGHEVIVANPHKVKLITQSVRKNDRIDARQLARLARVDPKLLSPIRHRSAQAQADLGVIRARAELVEARTALINSVRGLVKPLGERLKACDADQVSEELGESLSETARSIVGGLLNSVEAISEQIRGYDRQIEAMAERYPVVKDLLKQVYGVGTLIGLTYVLTIEDPGRFQRSREVGPYLGLQPRQRESGERRPELGISKAGDRLLRSYLVQAAHCNLRKGAPDSDLRAWGIGKVGEGGSAKTKRRVVVAMARKLAVLLHRLWVSGEVYDPLYQRKAAAAKAA

SEQ ID NO: 227341 - protein, 374 aa, unidentified
MHVAVGQPTQEVKETPMNSVGLDVHKTRCVACVKTQEGRIVEEFAFQNNPHGHEELITHLKAYPDVQVAIESTGNLWIPIYNRLEDEQIHTILTNPKKTRLIAEAKIKTDKLDARILADLLRANLLSASYVPPPEIREQRSIIRERARLTQLRTIIKNRIHTLLDKHAYKSPYTDLFGKHGLEWLSKLELPAGDRILLEVNLEQLSSLNHSIHRLNETIATSAVENPEVKLLMGFTGIDYYSAMFLINEIGPIARFPSPKKLVSYAGLAPSTRQSGNHTTHGPITKEGNSHIRWILVEAAHQAARHDPRLSQFYMRVMKRRGHNRALVAVARKMLVTIYHVLNHHSQYRGLRPELFENKIRRLERITQPSLQTA

SEQ ID NO: 227342 - protein, 376 aa, unidentified
MRTIGAERQNTEVAVIVGVDTHLDFHVAVAVDHLGRRLGEASVPTTAKGYEKLLSWAEGFGPVRCAGVEGTSSYGAGLARQLRINGIEVLEVERPKRRRRGSPRNLQKSDPSDAEAAARVVLAGEASGVPKSADGRVEMIRTLRAARRSAIKARTQAANQLQGLRVTAPEQLLKRLRNLSTKELVWVAARFRLGDDPRDVPSATKFALRSVARRYEALSSEIAELEAHLDRLVAQAAPELLSLAGIGTENAATLLIVAGDNPRRLRNETSFANLCGVAPIEASSGKVVRHRLNRGGNREANRALYMICLSRIRRDQRTKEYVARRTQEGKSKREIIRCLKRYIAREVYRVLISCGTRSSPTAPKDVTHTVSSSSAA

SEQ ID NO: 227343 - protein, 340 aa, unidentified
MHFVGVDLHKKVIRLCVIRVVRGKREIARRARFACRDTAGIRAFFEELGRFRAVVEATAGYEWFFLLIEDLADRLVLAHPKKLRVIAESTRKTDKIDAEVLAVFLALDMIPEAYRPSPRIRQYRVLARHRRWLSSRMTAIKAKLRNKLAHYNADIAELFTRRGQAYLADLALNAADRFETVALQEQLMLFQRQLIDVDAELRTFALTAPLAEREARAILASIPLVGPVTIDVVLSELGDWRRFRGARAVVAFAGLAPGVRESAGKRHDLSITKEGSRLLRWALIQAAWRLKNQQPRWGRLYDQLFKKTGSKKKAIVAVARHLLCVMFSMLQSGRAYRLAA

SEQ ID NO: 227344 - protein, 342 aa, unidentified
MYYIGLDVHKKTISYCVKDASGQVHREGTIGAARNELDWWLKTLPQPRMMAMEATIFTGWIYDHLLPHAEQVKVAHPLMLRAIAASKKKNDRIDAGKIADCLRCDFLPECHMASTEIRDRRRTLRYRHLLVRQMVQMKNRISGLLLETGVSHNKQRLHKVGYFRDLLSSNEEVHENIRPLLRLSRETIVRCQKTEHALVSSLERDPLLAERIKRLRTVPGVGIITALTWALEIGDVARFRSVKQAISYCGLCGEEKSSADKVLRTPLSKQRNKHIQHVLVEAAKLAPRQNHELALIREREMQKGNRNRATLAVARKMVAYLLAVDRREREFVPAGDPSTAAA

SEQ ID NO: 227345 - protein, 441 aa, unidentified
MVKLELVYGTQLTLKMTRPFLSRQKGVRMNKRFFGFDLHKNFVVAAAVNASQEVIFKPHKINSADLEAWIIKHITNEDEVVIEAMSCAWMIYDILIQHASRVVVAHPYHIKLIASSFVKTDKRDAVAMARLLAANILPEVWIPPKPVRELRSLINHRNRLVQRRADAKCRLQGLYQQYRIVAPDGRAAFEPEYWTNLNLPQVEKLRARHTSEEIELLTQQIQEAEEVLLQLSAQPPWVEQVPYLIQLPGIGIIMAMTILAAVGEIGRFASSKKLVGYAGLGVRIHSSGETTKTGGITKQGRRELRYAMIEAAWNAIKNSPFWRKKHEQLTQRMDNQKAATAIARKLLVVVWNVLTKQEMDREANSEVVGRSLLCWGWKYRLATSLGMKPAEFAGWQLSKLGIQLEKINYCTRVYKIPKVEFVQPPARSKKVSGVPNGALMP

SEQ ID NO: 227346 - protein, 390 aa, unidentified
MQVTTIGLDIAKNVFQVHAIDTAEKVVVRKQLRRSQVVEFFKALPACLVGMEACATAHYWARELTKLGHLVRLMPAKDVKAYVKRNKNDAADAEAICEAVRRPTMRFVQVKSAEQQGRLMLHRTRDLLMRQRTQLINALRAHLAELGIVAAQGNAGLKELLKIIAGERDARLPVDAHASLVVLAAGLHAVQTMIGSIDKRIMIEHRSNEASKRLRSIPGIGIVGASAIVATVADPMAFRSGRDFAAWIGLVPRQDSTGGKQKLGPISKQGDRYVRRILVVGAHAVLRYAKQNPEKYPWLTQLLARRPFKVVAVALANKMARVAWALLAKGGTYYRAGRLPLWLRQRPNEKSGNGRMKLRLCVHELQGEDDIDAKRSRPSIGKTRDGPRDT

SEQ ID NO: 227347 - protein, 328 aa, unidentified
MKAFIGIDVGKEKLDISWLRDVVKSKKKTKIFKNNPQGYQELASWLIKNTNLKAQDIVITTEPTGVYSEPLMYFLYEQGFILLHVNPGKAKQYASSLGLVHKTDKSDATMLARYGHDQQHSLLSWQPEPVEARELKVMTRRLEALEQDLRREENRYEAVGFSGASTRVTQSIEDMIAVLKTEIGKLKNDIDEHIDRHPQLKKNRKLLQSIKGVGEVISRMMVSLLACKQFKNAKQLACYLGLIPKLNESGKRAGKTTLSKEGPGYVRAKLYMAAVVAVQHNPDIKAQNKRLVEQGKTKMQAIGAAMRKLTHICFGVVKNQTEYQPQAI

SEQ ID NO: 227348 - protein, 408 aa, unidentified
MASKIAGIDVHKKVLMVVVIDARTPDSKPERRRFTTMPSDLRRLSTWLDQLGVEEAVMESTAQYWRSVWLELEPHFRLHLAQAFSNRAPRGRKHDFKDAERLVRRLIAQELILSFVPDGEQRIWRNLTRMKLQLVRDRVRLQSQIECLLEEMRIKLSVVITDLLGTSGLRILHALANGETDAKNLALLGDHRLKCSEEQLVEALTGRPHSMHRQMLSLQLERLRLLDEQIGKLNSLIAVAMNPHQDTVIRLAEVPGLGIDSAQQIIAEVGVTASTFRSAAEFTSWVGTCPGSQESAEENSSSRSAKGNKYMRRVLNQAANAAARSKGTHFQAVFRRLLPRLGYQSAVWAIAHRLCRLVWKILHEGIRYIEQGIESEPKLLIYRARSLAKQLRKFGYNVQITPADGAPA

SEQ ID NO: 227349 - protein, 356 aa, unidentified
MSIVSRTYGFVVGVDTHAKNHVYAIINAATGEHLDTRDFPTTVAGINRAITWAGNRTGGDAETLWVIEGTASYGAVLAGTVSTAGYRVTEAPRMSAKARHGVGKSDPLDARRIATAALPLPADQLRTPRLNEGVRAALRVLLTARDSMTGERTSAVNGLTALLRITELGMDARKALAGEKIIAVSKWRERDEALAEATARAEAIRLAKRIIDLDDQLKANVTRITELVSVSEAAALLEETGFGPVTAAVCLTTWSHQGRVRSEAAYASLAGVNPIPASSGNTVRHRLNRGGDRQLNKALHIVAMVRMIHDEETRKYTDKRTQEGRTTKEIRRCIKRYLSRKVYRILNAGTPATSPA

SEQ ID NO: 227350 - protein, 371 aa, unidentified
MKSILFIGMDVHKNTFSLCCYCKESGEILREVKCVAEAKLIKKFIDGIKKDLNEDLEFKCGYEAGCLGFSLYKELKALNIECDILAPTTMQSSSKNKVVKTDKMDARNIAINLANNTYKAVHIPDDEDFKVKEYIRMMNNFKKELKKIKQQILAYILRLGFNYEGKSKWTLAHMKWLRNLEMEGIEKEILNEYLAQYDLLVDKIERFTNRIDEFYNTERYKENVSKLRCFKGIDTTSAITIQVETSDFNRFPNAKAYASFTGLTCGEQSSGDKRNVTCITKQGNSTLRTTFVECAQAIVKGSIYNPKSKRLKSRQKDQEVNVIAYADKATNRLMKKYNKLKERNVPHNKAIVAVARELACFVWGMETGNIN

SEQ ID NO: 227351 - protein, 471 aa, unidentified
MGKGSGGSGMTRGDLRRNARRERLRAVLPRSGAVIGVDLAEEKQAIAVIDHDVRVLARKTARVKAFRLGEALDWAVGQARAKGFAQVAVACEPTGPRWLQVQRLCAERGLPLVCIQPLVSHIAREQQDYTTHKTDEADCVLIARLAVELHCYLPERLDETWAHLRHLGRRRAQLITSATASAQRIQDFLSVAWPVVTETCARPLLSRTWLAAVQLVTDGCGGQPGTLATMGEPEFTAMVRAAVRGWGGQRAFGPIAGRVFAALTDTEGAVISSRRGLLRRCADELGDLQRARAQLRAVEADMVVVLAELGLSRLGDIPALTAVGAAAILAETGDPRRYDSSSSLVKHAGLSPSDNASGAFYGQAHISRRGRPGLRLTAWRAVWPMLQFNPVMAAKYQAMTKTADAQADAGSQPATADAAARARRAKARVACAASLLRWIYSMVVHDTSWDAAVASGAASSQHAARYQAEAA

SEQ ID NO: 227352 - protein, 453 aa, unidentified
MPRKKTKRTSKKAKQAMIKMPVLNQHAAGIDIGGRFHMVCVRQGQVKKFGVVTRQLHELAKYLKKEGIITVALESTGYHWKPLFVLLQDYGFEVVLVNARHIKNVRGRKTDVVDSQWIQLLHSLGLLNASFQLDNLGEELRSYSRHRSYLLEQRSKFINKMHAALIQMNIQLPTVIRDLTGKSGKAIIEAILKGERSAEKLADLTDVRVKATRQEMIEALTGTWRVELLFQLKQCFQMYETFTSQIEECDHSIEKLLETEIIRKELDEFQGDVKKKSAQKNDPTFDVATLFLQLTGINLSEIGGIGATTILTVFSEVGWDFSKFPSVAQFRSWLGSCPNPKVSGGKIISRRGAKKSNRAFNALKKAANAIGNSKKHELHGKFQKFNRRYGRPYAIKAVANTLATIIYHMATKKEPYNYRNSEEHEKRKRQKNLNTAKRIIQQNDLSLVELGFQ

SEQ ID NO: 227353 - protein, 255 aa, unidentified
MSDLATLGLDVGKHKISAALLRGGRKRDKTFSNTVSGHADVLAWLKEHGVERVHACLESTGGFSEALATVLHDAGHVVSIVNPTRIKSFGKTEMVRTKTDKVDAALIARFCQLHQPSAWTPLPRNIRQIQALSRRLDGLIDMRAQEQNRLEAPGNTEAVQISLREGIAWLDAEIIRIERQLQQLIKDDPDLRNKRDLLLSIDGIGERTADRILGEIPHLEEFRNAKAVAAYVGLSPREWQSGTLRGRTRISKRRT

SEQ ID NO: 227354 - protein, 355 aa, unidentified
MPSKADTAVARTIGIDTGKNTLHMIGLDERGAIVLREKISRARIAARFVNLPPCLVGIEAGMASHYVARELVALGHEVKQVPPAYSKPFRHGHKNDFRDAHAVAEAVERHSTRCVPIKTDGQLDLQALHRVRSRLIGNRTAVINQIRGFLLEHGIPVRQGHHFLRKQLPLILATRTDVLSPRMIRIIGDLMADWKYLDERIERVTDEIEALAHADEGCQQLITVPGIGPIISSAMVAAIGNGAAFCKGRDFAAWLGLVPKQMSTGDRTVLGRITKLGNRYLRMLFIQGARAVLLRPASWVKHSFGSWLTAATRRLHRNVLAVALANKLARIAWTVLAQGRRYEARVEPRVEPAAA

SEQ ID NO: 227355 - protein, 359 aa, unidentified
MTNGSREHSKMTAGLDLGDNYSHLCLLDAGSGEIVEESRLRTTPEAFRQRFDSVHQRLKIAIEVGTHSPWVSRLLEKCGHEVLVANARKVRLIYGKGRKTDKLDAESLARLARVDPKLLYPLKHRGEDSQAHLALIRSREALVGSRTQLINHVRGAVKSFGHRLPRCSARSFHKKMLEDLPKELVSALGPLLETIGELTERIREYERKLEEIATEHYPETKILRQVEGIGTLTAMTFVLVLEDPHRFSKSRSVGAYLGLVPGEDQSGESDPQQRISKEGDEMLRRLMVGSAHYILGPFAHDSDLRRHGLKIAERGGKNAKKRAVVAVARKLSVLLHHLWITGELYEPLYNVHKSGSQIA

SEQ ID NO: 227356 - protein, 356 aa, unidentified
MNVRRVQHFVVDGKEIFVGLEDSKKTWKLAVRSEGMLIHQASMEAKYSVLIQYLRNNFPNCTIHLIYEAGFKGFNLYDRLTDDGIDCVVIPPHIVTETKVNRVKTDKRDARRLALILENHDFRDACHVPDRERREDRQISRTLIAMQKDVIRTRNRIRKLLDFHGIEASFPDRWGRDEFRALKKLSLPEPLKISLDVLLTQLEELWNHQVTLRTALRKLCRKERYEKAYTIARSLPGIGWFTAIRLVLELGEDLSHFTSGKKIASFVGLTCSEYSSGQTEWKGHITGMGSRFIRSTLIENSWAAIRKDPVLLAKFSRIWRASGSKKKAIVAVARMLIVRLRACVILGTPYSLGVVR

SEQ ID NO: 227357 - protein, 337 aa, unidentified
MKRYLGVDLHRTQFVVCTRWENGEQEIRQWRIGELPKFVEQLRSEDQIAVEAMGTTARFYDAIVGRVARVVVVNPHQFKVISESVKKTDRKDAQALALYLEKDLLPEVRMKPKQNRELMHLAETRDLLVKQRSALKGKINNLLAMQGIELKREALSSKIALARVLALPVSGMVQLELRILVEQIRALSESIAELDERLEEEGQQLPGYENLTSIKGIGSLSATVLLTVIGKISDFADENKLASYLGLVPKIANSNESERSGRITKQGNKLARTALVQCGLSAKRYSPYLQGFYERIKQRRGGGKAKIALARKLVKIVYDTLKNQWVFEDFPSFTLAA

SEQ ID NO: 227358 - protein, 527 aa, unidentified
MGSPLFLLDLLTVHEPGRVWPRFDAGSSVAVIVLWCLVPGGKTGSGGGLLRILVRPEWVFPLGRFVFSRTPPGFRRWGQTMTTPSLPVLDPLAAFVDVGSEQMYVSIAGGPPEVFGTVTDQLHRLRDWLQERKVKSVAMEATGVYWLPLYGVLEAAGFKVVMVNGKQTRNLPGRKTDMKDCQWGATLHAHGLLQAGFVPPAQIRRLQDYLRLRADHLVSAAANVQHQQKALERMNVKLHDVISSLVGTSGSKVIAAILAGERNPDRLLALCDVQIQKKKAERVKESLRGTWAEEHLFALRQAVENWEHYQRQIAACDQRIEAVLREINGPDQPANPPPPIASSKRAGANAPEIDDLHSLLVKLCGGKDLTVLPAHTDYSLLQLIGEVGTDLTQWATEKHFTAWAGLAPGSHQSGKRKGSVRRKRNRAGRLFCVMARSLARSKHIALGGFYRRMAARRGGLVANIALARKLALLFWRVMVKGLSFAEAGLKAYEEQVLETKRRALCRLAKQLGRVVLPSLAEMQTKPA

SEQ ID NO: 227359 - protein, 358 aa, unidentified
MQTESKTISFKGQNIYVGIDAHLKSWTLTILTENTFYKTLSQDPCAMTLKNYLHRHFPQGTYYSAYEAGFCGFSVHRELIKCGILNIVVNPADIPTTDKEKRQKEDRRDSNKIARSLRSGDLTAIYVPDKSVEELRSLVRYRKVLVKEIGKNKNRIKSILYFNGITVPLELDSASKYWSGRFTKWLKTIRMDTEYGNFVLQEILENTEYLRGKLLKIDRKFRSLRENSPYAKTLNLLQSIPGIGPIVSITLLTELGDLKRFTNLDNLCSFVGLIPTTNSSGENEKTGSITPRAKKPLRNCLVESAWVSIKHDPALNLAFNELCKRMKSNEAIIRIAKKLLSRIRYVIKNETEYVHSIV

SEQ ID NO: 227360 - protein, 411 aa, unidentified
MDVYCGIDWAEDHHDIAVVDRDGKLLARRRISDDAGGLATLLALLAEHGDTAGDPVPVAIETPRGLLVACLRATGRAVYPVNPMAVARYRDRHSVSGKKSDHGDAVVLANVLRTDMGMHRPLPADSELAQAIAVLARAQQDAVWDRTAAHNKLRSCLREYFPGFLAAFADARGGITRPEARAILAAAPTPAAAAVLTVAQLRSLLAKAGRSRGIDTEAARLRDAFRIQQMRQLPLVEQAMGQQALALLRQLDAACASADDLEQAAVASFNQHPDAGIITSFPGLGPLTGARVLAETGDDRSRFQDAKGLKAYAGAAPITRASGKTKSVTRRKVKNNRLSAVGYTWAFSALTASPGARAHYDRRRDAGDKHAGGLRNLFSRLLGCLHHCLTTGQHYDEATAFPAPAKQPAAA

SEQ ID NO: 227361 - protein, 383 aa, unidentified
MSSNTIDLENVITIAIELSRSTWFVAARLPGVKKPRLHKIDAGDTTALLAHLSLLRARFADGSGAAPGLVCCFEAGRDGFWLHRLLTAHGIANHVLEPTSILVNRRARRAKTDRLDAEGMLRVLAAYLQGDRQVCSMVRVPTPDEEDAKRIHREREHLVQERLRIENRIQALLFTQGIHNRPSLRSWDRDLAAVRTDDGRDLPHHLQAELDRLRRRLVMTLELIREVEAERNEAADADPKDQACGKIANLCRIRGVGANFAAVLAREVFYRSFDNRRQLASYVGITPMPYQSDGTDRDRRISRAGNPRARTTMIQLAWLWLRYQPGSDLAKWFRDRVGKLTGRTRRIAIVAMARKLLIALWRYAENGVLPAGVDIRAEAAASA

SEQ ID NO: 227362 - protein, 474 aa, unidentified
MGNRTKSRSDLEALPMLPHESVYIGVDIGKFKQVAGFVSKTLLERHQHFEHCPAFLFEQSREGFRAFVERIRIYCPLEQCFIVMEQTGHYHRPLLQYLLELDISVYVMHVQSRQGGMLKTDKRDALGLANHLYNQLALGVQVENKLQVVRRAVPPSEAAAQLKGLMRHRYELANEATQRKNKLTAICDELFPEFTQVLKNPNLTIALDLREKFPTPHAVATASLIALREVRRGCRPSEGQLAKLQELAAQSIGTKDMARQRGLVLEQGLLIKELRLIQEHMERLDMEVAQIVEHSREGQILLSIPPLCPLYAAAILATIGHIANFEDAGHLKSYFGWAPKRAQTGVSFDRTSLTKGGSREMKKIMYLVAWNAIKAETQWASLYKRLIPRLCIYDERTQVYKGKGKAIGHVIGRLITLIYALLKQDDETLRHLAPGTKPPEPVLYDPELHKRHRTGHYQPLKKRLPENRIVLVEP

SEQ ID NO: 227363 - protein, 352 aa, unidentified
MKEYIGCDAHARYSVFVSVDERGQAAPPIRVGHAGRDLRDYLGRLEPGTPVAVEASGGWYWFMDELEAAGLDARLVNPLEAKRRMGGRNKTDPIDARGLAILLRNGTLPEVWVPPAQLRDLRGLMRTRLALRSHTTGLKNRIHAAIRRYGTLDGEPASDLFAKKCRVRLSVAMGRMPEETRRAATHEWELLDEMERHIGELEVRIRERIGCIGWVRLLKTLPGVGEILGATIHLEIGDVKRFASARHLASYAGLVPTVHASGGRCHYGPTSKQANHYLRWAFVEAANCVVMHGQRYRQQHVMQLYQRLKPKCHSKAAVAVARHLAEASWWILTKGEKYRQPHAAAMSSSKNG

SEQ ID NO: 227364 - protein, 322 aa, unidentified
MSVPTGFTGAGAGHFVGIDVAKHKLDVAVLPARESFTLDYTDEGLAALVARLAALGPALVVVEATGGYERRVAGELTGAGLPVAVVNPSRVRHLAKGTGTLAKNDRLDAFNHALFAQVVRPAPRRGGPQERDELVALVARRRQVVEMVVMEANRLKQLPAGRARDSVAKVKLALEQERALLDKAVFELLRSDDGWDGRLALLTGVPGVGVTTAATLVAELPELGRLNRRQVASLAGLAPFDRDSGTLRGRRFIQGGRKAVRVALHMAALTAARCNPAIKAQYHRLRAAGKSFRCAMVACARKLLTILNGLMKRNEHWNPLPA

SEQ ID NO: 227365 - protein, 343 aa, unidentified
MEHYAGIDVSLESASVCVVDATGRIVREAKVASEPEVLTAWFRGLGISLSRIGLEAGPLSQWLYAGMREAGLSVELLETRHVRDAFKAMPVKTDRKDARGIAQLMRLGWFRPVHCKSLPAQETRALLTARKLVQSKRHDLEMSVRGILRGFGLKVGATTPRTFEGRIRELVRGHPTLLTVMEALLTARAALGEQLQRLEKRVRSLARDDQRARLLMSAPGVGAIVALTYVAAIDDPGRFRSSKNVGAHFGLTPKKYQSGETDVSGRISKIGDAGVRTALYEAANVILTRPVRGSSLKSWAARLAVRAGMRKAKVALARKLAVVLHRMLADGTSFLATRAAAMA

SEQ ID NO: 227366 - protein, 393 aa, unidentified
MYLVGIDIGKLKHSFCLLEKETGEILVEPVFFENNRDGFNALLSSFKHLPQKDILIGMEDTGHYNLALLKFLLDRNYQVALINPVATNLTRKMQGGISKNDKLDTLTICDVLSSNQRVKSYRISKYSSFDLYEQKQLTREHHNLKEEENQLSNRLQKCIDVVFPEFNSLFKSKYGIVYMNILKEFGSADAIAHADIRTLRKCFDTGRGKHISLTAEELKEAARNSIGFPSSSEATQIKHLVARIELIKEQIAEIDKKIEEFSLQNNSPILSIPGISHFSGTSILAELGDIHNYSKPSQIIKFAGVAPLTYESSQFTAQHTAITKKGCKYLRKTLYQIITPVIQYNPVFRKFYLLKIAQGKGHRCAQGHCVRKLMRVIYHLLSTGTQFDPALLR

SEQ ID NO: 227367 - protein, 328 aa, unidentified
MRNLVLVLKTFSMNPSPKELSDFMKKRYPCGNYYSVYEAGFSGYGMHRELENLGFSNIIVSPSEIPTTGKEKLTKTDEVDSRKLARELEKGTISGIYIPGQLQQEMRSLSRLRHQQVKKLTRIKNQIKSYLDFYGHKLPKNCEMQHWSRKFIEHLRTLEFNYDIGKEQLEIYVAELLVIRNRILQILILLKKYFRQYEKYHIIELLRTVPGVGFTVATTLYSEIMDIERFSNNEKFASYIGLVPSTMSSGEKKKVLGLSFQFNRYLRSLLIESAWVAIRKDPALTLAYNNFLIRLSAQEAIVRIAKKLLNRIYYVLKNEKEYIYSVVK

SEQ ID NO: 227368 - protein, 356 aa, unidentified
MNQAEPARSGHVVIGVDTHKHIHVAAVMDTIGGILATLTIATDTAGFRQLLAWAESFGKIISFGIEGTGSYGAGLTSFLRRQGHKVVEVSRPDRRLRRLNGKSDTLDAENAARAVLAGFATATPKTMDGAVEMIRQLKVAHDTAVKQKAATMVTLKAMLVHAPEQLRAETARKTQRALARLCAAFRPRSLESPEDANRHAVRSLAKRWLLLDEEIKELNGMIEELVLGRAPHLLDEFGIGVDTAAEILIVAGDNPERIKSEAAFAKLAGISPVPTGSGMTSGKHRINHGGHRQLNAAIYRTVIVRMRFHQPTIEYVARRTAEGKSKRDIIRCLKRYVIRELYHLVKVNPRTGEIMS

SEQ ID NO: 227369 - protein, 370 aa, unidentified
MAQSTPLFVGLDVHKDSIAVAHATGGESTPPVFVGAIGTRQADLDRLIRCLRGKAGELRFVYEAGPSGYGLYRYRTGRGLACDVVAPSLIPRRPGDKVKTDRRDAVELARLLRSGDLTAVYVPTVEDEAVRDLCRARDAARITLKDATLRLKAFLLRLGLQYVGRADWNAAHKRYLAKVVGPTPAQQIVFQEGVRAVDEQVDRLQRIEAELQALAPGWSRYPVVQALQALRGVQWVVALTVVAELGDLARFDNPRQLAAFVGLVPSEYSSGSSRRQGGITKAGNGRARRALVEAAWAYRHPAKVSLHIQQRIDQLPKALQDLGWKAQVRRCKRFRRLVARGKHPNVVVTAIARELIAFMWAIARTMPARL

SEQ ID NO: 227370 - protein, 350 aa, unidentified
MENIAFDSHKRYTHCSVEDVFGRQLEEVRIEHERGAIREYLSKFTPGSPVAVETIGNWYWIIDEIEEAGMHPHLVHARKAKVMMGCINKTDRLDARGLNRLQRVGTLPTVWIPDGDLRDQRDIPRTRMYLVHLRTSLKNRIHATLAKYALSVRGVSDIFGKKGRARLNHQVMSLPPQTRFTALHQLADIDMFDTQIDAFDKRLSELFDETEEVRLLRTMPGIGFVFGILVSLEVGDVGRFGGPGKLASYAGTVPRVHSSGGKTRYGRLRGDVNRYLKWAFIEAASTISTNRKHWPDRHVVRLYNRLRHRRGHATAIGALARHLAESTYWILTKKEKYRDPYLHRVSSTVV

SEQ ID NO: 227371 - protein, 337 aa, unidentified
MNSIGIDAHSARFFLCAVNDRGNLIKSLDREMSPENLIEAVGSVPGPRQVTVEESHLAQFVKSVLEVHADRLIVCDPRHNRWIAEADFCDDRTAARKLALLLHRDELKEVVHPDNVQAELRSTFMHYHDLNAAIVRCKNKVKGVFRSVGIRAPGRRVYGSARREWLDKLRSWRHLLVEVRQHYEVLDVLLKQKVATCRLMVRLAAREPAFALLRTIPGVGPVLAAGYVALIGSAHRFSHKNKLWSYAGFGNVLHTSDARTYKSGCSSNGNRVLKWVVLQHFRHVVRIKKSNYLNRKYKQMLASGHSETASRRATCRLLLSVVRRMWIDSREYREEGL

SEQ ID NO: 227372 - protein, 459 aa, unidentified
MNRKKSKSKVDRTMPMVHPNAAAIDVGATMHMAAVGADRVLEPVRSFGTFTADLDQLVKWFVECGVETVVMESTSVYWIPIFELLDARGFAVFLVNARDAKHVPGRKTDVSDAQWLQRLHSFGLLRASFRPKGQIAELRAYVRQRERLLEYAASHIQHMQKALTEMNLQLHHVVADITGTTGLRIIRAILAGERDPEALACLRHYSCHSSVETIAKALTGSYRAEHLFALDQALALYDAYHEKASACDVRIEAVLKELIIHRGHDHGSAPPVSRRRNRTDQANALAFDVRASLFGLLGKDVTTIDGLGHYLSLKLIAECGDDLTSWPSAKHFTSWLGLAPSNKVSGGKMLSSRTRRSGGRAAALLRLAAVTVGRTDTALGAFYRRLSSRIGKAKAVTATARKIAVLFYNAVRHGMDYVDPGASSYETRYRTRVINNLHRRAKTFGFVLQPLEPGAGAVS

SEQ ID NO: 227373 - protein, 381 aa, unidentified
MKIVCGLDVHKDSVFACILNENGEKFECKFGVLTPELEELHQLLLTHDVKEVTMESTSIYWHPIWRVLDDIEDLKLLNPYFIKQLPGRKSDVRDAAWIAECTMKDLIRGSFVPSTLVQRMRQYNRRIFDLNKEIVYKLTKLDSVLQRCNIRISNYVSSVDSKSYKEVVRLVSEGVTDPNRLASVIHGRTINRVEKETITASLTGVISEVDIDLIRQYLEEIELAQRHKQESHEKLTRMCEDEFPKEFENLQTIPGVKERSATSILAETGADMKMFITASALVPWCGLKPRNEESAGKIKSRRITHGNKYIRKTMIECAWGASKTQNCFFSKYSYTQTVVRKKNAMKVKVAIARKMLIAIWHVLSEGKPYTDYKKPDTKGNS

SEQ ID NO: 227374 - protein, 351 aa, unidentified
MQYIAFDSHKHYTLASVESVNGPGVIHEQRIPHMRGAIQQFLSQYHPGSPVAVETIGNWYWIVDEIEAAGMVPQLAHARKAKVMLGSINKTDQLDVRGLNRLQRNGTLPVVWIPPAPLRDARDLPRTRMVLVRQKTQLKNRIQATLAKYALPVTGVSDVFGKRGLGLLWRQIPHLPEQTRFATERVLEQLEHLEHQIQAFEARIQQVIEPTPEVEWLRSLPGVGRTLATLIALEVGDVSRFAEAARLASYAGTTPRVKASGDKLRYGQLRPDVNRYLKWAFIEAANICGMLHRRYPARHVSRVYARLVHKKGHQKAIGAVARHLAEATYWMLTKRTSYREPQHHPVASTKA

SEQ ID NO: 227375 - protein, 351 aa, unidentified
MMLIGCDFHPSWQQICWVDTETGQTEEHKLVHAPGEAEKFYRRFAAPARIGMEATGNCQWFVEMLAGLGHEVWIGDAAKIRASEVRQQKHDRRDAALLLRLLMENRFPRIWTPSSAEKDLRQLLIHRHKLVRLRAQTKNGLQHLAMNQGLQKKRRLWSKAGQEALRELTLGPWANRRREDLFSVLAMLDRQIESLDLAVKQAAEQNKNARLLLTQPGVGPVTSLAFVLTMGDVSRFPRGKQVASYLGLIPREYSSGGKQRLGSISKQGNRFMRMLLVEAAQVAVRCDPQLRQEYLQRCHQDKPKGVAKVAAARKLAVRLYWMLRTQKPYPEIVHVESSSRVPLAAEARPKN

SEQ ID NO: 227376 - protein, 358 aa, unidentified
MAGKVTETAVVGGVDTHKDLHVAAVVDQNNKVLGTQFFSTTRQGYRQMLAWMTSFGALKRIGVECTGTYGSGLLRYLQNAGLDVLEVTAPDRMERRKRGKSDTIDAECAAHAAFSGIRTVTPKTRNGMIESLRVLKTCRKTAISARRVALQIIHSNIISAPDELREQLRNMTRMQLIRTLGSWRPDASEYRNVTNVYRISLKSLARRYLELHDEIADLDVMIAAIVDELAPELIKRNAIGYESASQLLITAGDNPQRLRSESGFAALCGVSPVPVSSGKTNRYRLNRGGDRAANSALHIIAIGRLRTDEKTKEYVARRVAEGHTKMEAIRCLKRYISREVYTLLRNQNRRINSIPITA

SEQ ID NO: 227377 - protein, 341 aa, unidentified
MEYCGIDLHAEQSQICILDEGGEVMETSTVRTSRKALERFFTRDQMRVVMEAGGSSPWVSRLIDSLGHEVVVCSPRRVRLIAESKLKNDRVDAEMLARLVRLDPEFLRPIQHRSEEAQLLRARLKVRTAMVEGRTKWINTIRGLLRNFGYKVSGRAPHTFVERVDKLELPADLRAVIEPLLEQLDLLTGEIERRNHHLEEMVKDLPEVAHLREIPGVGPVVATYFVLTIDDPHRFRNSRDVASFFGLRPSMRESASVSHFGRITKEGDPEMRRLLVQAAHACLLTKADSELKSWALALADRKGKGKAVVALARKLSVLMHHLWVTGEVYQAFPNKDRTQAA

SEQ ID NO: 227378 - protein, 413 aa, unidentified
MRVVYERCCGIDVHKQTVVACAIVAGAEGQSVKETRTFETMTADLEALAGWLTRLGVTHVAMESTGVYWKPVYNLLDDRFAILVVNAEHIKAIAGRKTDVQDAEWIADLLRHGLLKGSFIPSEVLRELRDLTRYRTKLGDERKSEVNRVQKVLEDANIKLASVASDVMGVSGRAILAEIVQGQTEATTLAELAKGRLRDKHDLLVKALSGRVRPHHRFMLAQHLSHIDYLDEAIGHLDQQIAEQMRPFAAALATWDSLPGINQRIAEIIVAEIGADLAPFEDADHLASWAGMCPGNNESAGKRKRGRTRKGSPWLRRALVEAAHGAARTKNKYFQALYRRLASRRGKQRAAVAVGHSLLVTGYHLITRKTTYQDLGGNYFDERDRETVKRRAVRRLEKLGYRVELAPLAAKAG

SEQ ID NO: 227379 - protein, 420 aa, unidentified
MSKRRYYSVEFKQVDWCGLVEGLGGSRAVLAVDVAKEDFVAAVMGPDAGVRVTFKWQHPAQTAEVLECLGRLAGAISLEAVLEPSGTYGDVLIGQLRRLRIPVYRISPKRVHDSAEVYDGVPSLHDAKAAELIGRLHLQGVSQLWDELGQERRQLHAWLTRLEVTKARRQAGLNRLEAHLSRHWPELLTCLDLSSATLAELVGVYGDPAAVAADPLEAAALMRRVGRAGLGEDSITAVLASARGSLGLPCVAGERGLLQWLAADSNATRGELRAIEQEIEQQVAASVVPARLSGIIGKVSAAVLVAALGEPQTYPDAASYTKAMGLNLKERSSGKHKGQLKITKRGPCVVRFYLYFAALRLIARDPEVRRWYDRQSARPGALKGKTIVALMRKLAQALWHVGRGATFETKRLFAPAPLGA

SEQ ID NO: 227380 - protein, 447 aa, unidentified
MSQINEKIKNKVTKIKIDTFTVIRPNSAGIDISSKDYVVAIPSDRDKESIRTFGCFTEDLDAIAKWLIKCGIDSVAMESTGVYWKQLFLVLQEHGLDVFLVNSRHVKNVTGKKTDEQDARWIQRLHACGLLSNSFQPDESIRTLRSFIRFRKKVNDNKSIYVSRMVKSLEEMNIKLSFILSDIKSVTGQNIIKAIVDGEREPENLIKLVHYKVQAKPEQILKALKGTWRDECIFELKQSFDTYNFLQKQTEECDNEIEKQLIKIIAVKNEGDITCVTNDVKKKSYRKNEYSFNVEKYLNQILGINLMTIYGVSEDTALVLFSETGSDLSSFKNADHFASWCGLTPNNKISGGNIISSRLPNKKHAIKNALLRAANSLYRSNNALGDFYRKKRSQKGAKGAKVAVARKIAIIYFHMMTKKEPFNSEFYQQQQNKNNQRRIEYLQKQIA

SEQ ID NO: 227381 - protein, 334 aa, unidentified
MKQLVIGMDIAKTVFQLHSVDTNGEVKRLKLQRNEVMPFFTQLAPAIVAMEACGGAHEWGRKLSALGHQVKLLAPKSVRPFVQRNKTDAADAKAIWTAAQQPEARSVVLKTEHQQVILALHRMREQLMKFRIMQTNALRGILYEFGIVLPAGYPALTKAWASALVEASERLPEVLVVSLREQWARVQSLDREMAVIERRLTDSLRRTEQCKRLIEIPGVGLFTATAAVATIGDASTFKSGREFASWLGLVPRQTGTGGRVRQHGISKRGNVYLRTLLMHGARAIVARRGHSPWLEALLKRRPYSVVVAALANKLARTIWAVLSHGTRFNAPAPA

SEQ ID NO: 227382 - protein, 405 aa, unidentified
MKHYCGIDWASDHHDISIVNESGKEVDRFRIDDDLKGYHTLSNTLKSFEVEIPIAIEAKDNLLINFLIAEGYEVYSINPKSAERYKDRYNVAGNKTDEIDSFALADMLRTDMHKYRSLEYSSEEIRKLKILCGEYSKLTKDKNMLESQLYDVLSKYYPITLTLFYKYNCKTLYKLVLKYATYEELRKVSFEDLEKFLKENRYRKTHYIKNVYDKIQGNDYHALPIFDETFSHTARALIKMLLILEDEIKNIQNKMTEITTNHPLGTIFYSLPGSGEILAPKLLSIMGDNKKVYSNSCEIQAYSGVAPVIKRSGKSSRVQFRIACNKEYRNILTYFAFCSLSWSPWARKYYDRAKLKGKRHYESLRLLAYKWTRIIFKLWQTCEVYSEEYHTKNLERFNKNILKVA

SEQ ID NO: 227383 - protein, 409 aa, unidentified
MQEATQHDAVDVFVGVDVDVDVGVDVGKGQHHAVALDRNGKRLYNKALPNDEVKLRALIAELKTHRRLLFVVDQPSTIGALPVAVARAEGVLVAYLPGLAMRRIADLHAGEAKTDARDAAIIAEAARSMPHTLRSLRLADEQLAELTMLRGFDDDLAAQLTQTSNRIRGLLTQIHPALERVLGPRLDHPAVLDLLERYPSPSALAAANEKTLANRLTKLAPRMGKNWAAEIVQALNEQAVIVPGTQAATIVMPRLAQQLAALRKQRDEIAAEVERLVLAHPFWPVLTSMPGVGVRTAARRLTEAAQKAFATAAHLAAYAGLAPVTRRSGSSIRGEHPSRRGNKVLKRALFLSAFAALRDPVSRAYYSRKIQQGKRHNQALIALARRRCDVLFAMLRDGTIYPPKSAPDA

SEQ ID NO: 227384 - protein, 414 aa, unidentified
MDVVHPRCAGVDVSKRDAKVCVRIAGTGRAKAKSTVTTWRSVTNQVLALRDHLIGEQVTLVVMEATSDYWKPFYYLLEDGPFEIMLVNARHVKNLPGRKTDVSDAAWLAQLGAHGLVRGSFVPPEPIRQLRDLTRTRTTVTGDRAREIQRLEKLLEDAGIKLSSVASDITGVSGRAMLAALIAGERDPAALADLAKRRMRSRIPELTEALTGRFGAHHAFLARLHLNLIDQHTTAIDELTTRIEVVIEPFRGARDLIVTIPGISTAVADVIIAETGVDMTRFPSAGHLASWAGTCPGSNESAGRIKSTHTRPGNPYLKGALGIAAMSAARSNGTYFSAKYRRIAARRGPVKAIVALEHAMLIAIWNMLTTGALYCDPGDDFYTRLNPDKAKNRALDQLRKMGYHVTLNPLAAAG

SEQ ID NO: 227385 - protein, 411 aa, unidentified
MDVKFERCCGLDVHKASVVACCIWPEPGGVEKEVRKFGAMTCDLESLAGWLTAHEVTHVAMESTGSYWKPVWNILEESFELILVNPQHIKAFNRDKTDPKDCEWIADLLRHGLLKSSFVPDRRQRDLRELTRYRSSQKQQRTAEINRLLKVLEGANIKLSSVASNVMGKSGRDMLAALLAGDKRPEEIAELARGRMREKIPQLRQALAGSFGPHQRYLIAKLLAHIDYLDETIADLDREVAAQLSPAEHEVVVKLDPIPGVGTGVGEAVVAELGTNVDRFATFEHLASWVALCPGNRRSAGKRGSGKTRKGNKALRTILVEAAEAASMKSGSYLQAQFSRLSRRIGRKKAIIALARRILEIIYHMLKTPDSVFQEKGAHFMHEEQKERAIRLHVRRLQELGHPVQPFPATG

SEQ ID NO: 227386 - protein, 342 aa, unidentified
MDIEFLRVDLGKTVCSLAGLDASGAVVFRKRLQRHRLLDFLGGLPTCVGAMEACGGAHHIGRYCLQLGHEPRLMSPLYVRPYVKLHKNDDRDAEAIAEAATRPTMSFVAIKSEEQLDLQALHRARERLVTERTRLINQGRGFLMEHGVRVGTGRHVFQKELMRLAAEGAADLSTRMLSMLSDMAIELGTINGRVDAIDTEIKSLAKADADMQRLMEIPGVGPTIASALVAAVGTGRSFAKGRDLAAWLGLVPRQITTGGKAKLIGISKHGNRYLRKLFIHGARTVLHLVRDRSSPIPRWADGPKERAHVNVAAVAMVNKIGRIAWAVLTKGERYRPTALVGA

SEQ ID NO: 227387 - protein, 344 aa, unidentified
MDHFAGLDVSVKETSICIVDDAGKIVREVKVASEPEALLAVLKNPAYHFKRIGLEAGPLSQWLVSALAEAGLPVICVETRHMQAVLKAQINKTDRNDARGIAQMMRAGLYRPVHVKTIRSQKLRMMLTHRKLLQSKAIAIENDLRGTLRNFGLKVGMVGKVKFEARISELVENLPDLAALVEPMLIVRRTLREQIVILHRRLLAIVRDDEVCRRLMTTPGVGPVVALTYRATVDVPARFRKSKAVGAVFGLTCAKYQSGEVDRNGRISRCGDEMMRVMLYEAAQSMLHSKKWSWLKAWAMQVARRRGMKKAIVALARRLAVIMHRIWVDGTEFRWTRERATAAA

SEQ ID NO: 227388 - protein, 391 aa, unidentified
MVCVGIDVAKDKHDCCILDSDGMVRADCFTIPNNMDGFKQLLQTIRNCTKKSDKIKVGLEATGHYSYNILGFLLDNDLAVYVMNPLHTNLYRKSLSLRKTKTDRVDARTIATMLLSDVDLKSYTDTAYHNEELKSLTRYRFDKVRERAKLKQSVSRLVTILFPELEKLVPSLHGVSVYALFSEYPGAKQISEAHLTKLTNLLSIASKGHYGKEKAIQIREAAKSSIGSVMPAKSLELKHTIKLIKELTSEIDEIEDSIQQIMDELHPPILSIPGVGIQSAAMILAEIGDFSNFESPDKILAYAGCSPSTYQSGKLTNCYAHMEKRGSRYLRYALYNATKYVCHWNPVFAKYLAKKRAEGKHYNVALSHATKKLVRLIYALQKSGKAYLTAA

SEQ ID NO: 227389 - protein, 331 aa, unidentified
MLNCIGIDVSKATINIHISKNNQDLVVDNSPKGFRSLYSKLKKIYKKEIENIVFIFEPTGSYSEALRKYCSEKQIKCFIINPKQFSNYAKALGVEVKNDIEDARVLSKALHLAKAEQVKVPVFNEDVEHIKELMSYYKFTKKQTTQQKNHLESLTSKDGDKFSIKELKKSIDESKKKELKIIEQVQTLIDSTDEYRVAYENITSLKGVGQIAGIVLLHLFLKYPEANQRQITSLTGLNPIYRQSGTSVQSGYRIAKSGASIYRSVLFMSVFTAVQHDKNFKSFYERLKLKGKHTTSAQIAVMRKIILTAHSLYKNNKKYDENFNSQEATSM

SEQ ID NO: 227390 - protein, 388 aa, unidentified
MPQIDDLSRSLTVFEQDRTLVVVIEVSLSSWLVGGVLPGVARQPMKKLGPDKDVLLALIWRWKDEATRSGRDIRRVCVAYEAGRDGFWLARSLLEHGIETYVIHSASVSVSREQRRAKTDRLDTELLKRAFLGWLRGERGHCSMVAIPTIQEEDARRPNREREKLVGDRTRVINRIKATLIRFGIRTFKPTLRKAEERLKALRTAEGVPLLENTRAELLRDIARLRMIQEQIKEIEQRRLRDLEASSAKPGPHAMVRLIARVVGIGIETADMLVHEILSRNLRDRQALARYAGLTGSPDESGSRRREKGLSRSGNARVRRGMIQLAWRFLQFQKDSALARWYRERTADQRSSTRKTMIVALARKLLIALWQLATTGQVPEGALLRPAI

SEQ ID NO: 227391 - protein, 314 aa, unidentified
MAEGVVYVGIDVSKPQLQVAIRPSGEHFAEANDTRAVRRLIKRLQALPCRRIVLEASGGYEALLAAALYAAGLPVVVVNPRWARDFARSIGQLAKTDTIDAQLLAQYAELPQLKVRELPDAQTRELKALCARREELIDMLVAEQHRLEHVPPRLRREINGHIDYLRKRLKHLDHDLDQAVRNSELFRQQSELLSSVPGVGCVLCVTLLARLPELGRLNRAEAAKLVGVAPLNHDSGRLRGVRMIAGGRAALRRVLYMAALSAIRANPVLRAYYRHLRELGKPGKVALVAVMRKLLLMLNAMLKTQTPWRPPCPA

SEQ ID NO: 227392 - protein, 417 aa, unidentified
MNDSEQWNKHRAFGAVDWASEKHSVVVVDQAGKVIEDFEIEHSALGWKKFREKLQSYGSIPFAIETSQGAAVEQLLEAGMVVYPLNPKSAQAYRERKAPSGVKDDRLDAWSFADALRVDGQGWKALRPEEPLIKELRLLCRDEVALIEQRTAFIQQLRHALAEYYPAALEAFEDWTSVSAWMFLQRFPSPEMLAQAGKRQWQKFLHSRRLWGSDQGPRRMEIFAHATEFGGSAPTAKAKSLLALSLVQMLFVIEKQLAVYRQRIEELFARHPDHDLFGSLPGAGPKIAPRLLSEIGDDRQRFDGDAQNLQCLGGTAPVTKRSGKYRYCHQRWACDKHLRHAIHLFAEQSLSRCPWAQIYYQHHRQKDRSHANALRRLGHRWLKIIYKMWIDRTLYNPELHHRNQLQHGSWIFQLKEC

SEQ ID NO: 227393 - protein, 344 aa, unidentified
MSMVGSVVGGVDTHADVHVAAAVDSNGGVLGIESFPADAAGYEALLGWLVGFGAVSLVGVEGTGSWGVGLSRFLHDQEVEVVEVDRPNRQNRRKRGKSDPIDAVAAARAVVSGAAAVTPKTRNGPVEQMRVLLVARRSARTQRIQTLNQLRHLVFTGPEPIRVRFKDRYKTGLVSEAAAMRPRKGSNPVTFTTNTVIRDLARRIQGLNAEMASIDAALIELVAATAPSLLELHGVGLDSAATLLVTAGDNPDRLQSEGSWAHLCGVAPLPAGSGKTSGRNRLNRGGDRQANAALYRIVLTRMSNHPETRRYVTRRRTEGLNTPEIMRSLKRYVSRQVFKHIQMA

SEQ ID NO: 227394 - protein, 441 aa, unidentified
MENNYILYVGMDSSKGKADAAILKVSDRRSVKPKFLRKKLSFKFVKSEVTSFLETVRSYSDDNCTSICFALEVTGIYSTNVYNFIKDNLNDNESIKFLNTDFVNQWRNAHNIAKSDPLDAQTISTIIGTDSDVQYVNDNVFKNKNGYQDLKALVHRHYQIKKIYSQEINRLIAQCDCLFPELQYVFEPKSAAFIAVLSSYPTTHDIINASRLEVFNVVYEATKHRCSMDKIDKLFDLCHDTLVPDNISSYGRSIILDLVENIKNIKGQLKMIERYIRDVASLNPAYKLLLTITGCGPLTAATVIAETGDIKRFKNADCFVSYSGTSPRNKRSGTSVETMGKISKRGSRYLRHAIYMIAEFARRHNPVLKQQFERIKNGNKKRHKLANIAIANKIARYIYSIMKNESGFVIFHEHIMRLPEETQMLNRKLYPSDDCKLYYPI

SEQ ID NO: 227395 - protein, 342 aa, unidentified
MTLYIGVDIHARQQTLSYLETADGTTGQVVLDHEVDDVAGFYRQFQGEVIIGIEACGYTNWFEELVERLGHQLLVGDAAEIRRLARRRQKNDRRDADLLLDLLVHDEFPALYRYCQESREVLRQLRYRHKLVKLRTMVANTLHALALNAGLSLRAKLLTKGGRQQLSALPLSAISQQQRNELLSLADELTRRIQLVEQWLAVQAARDGRVQRLQTHPGVGLLTSLCVVHTLGEVQRFSSTRKVAAYVGFDPMEDSSAERKAYGGISKAGSRLLRYLLIEAGQTAAKDDEQLKQFYRRLLPRRGKARAKVAVGRKLLLRCFIMWRAEIDYAEFLRRGQKEETE

SEQ ID NO: 227396 - protein, 377 aa, unidentified
MTGRLFEALVGMVAEWFGHHPKEKRMSAYAGLDVSLNETSICIVDSQGSLLLESRVASEPEAIAQSLNSHAENLRSVGIEASALGGWLQRELTALGFEAIVIEARHTHVSLSSMRNKTDRNDARGIAQLMRLGWYKVVHVKSPEAQRLRVLLGCRQLASRKWVGVESEIRGVLRAFGLRVGSVSRGRFAARVLSLAEQAGALIEEVVQRMLAIRGTLLIEYRRLHQLVVKATVLDPVCRRLRTVPGIGPVAALAFRCGVDDPHRFKRSRTVAAHFGMTPRRHQSGGVDYTGRISKCGDREVRQALYNAAGSLLRRSRKASPLRTWGLRIRKRSGMKKATVAVSRKMAVIMHRMWLDGTDFRCSNDPAAAALAPAASA

SEQ ID NO: 227397 - protein, 415 aa, unidentified
MYYVGIDIAKSFHVVSVIDDEETKVINKPFKINNDAKGFEKLLTILDSVILDKSEFTIGLEATGIYGENLQEFLKSKAYLVKLLNPFQTTRYREQITLKKVKNDEIDSLVIALLLKSGKFSSGYITDDEYQSLRTLYRNRATIQADMKDVKKRILTQITVTFPEFEGFIKPFNVTGLVLLDKYPTAHHYRHSSVDRIMKLFRHIQGNNFTQSKALQLLELSRESIYSGKAKDARAIAIRSTIRLLQMYLSELDIIESEIFSLLNSTSTKATVDEAGVEIQKADSLLSNLKSIPGVAEKTIAALISECGDITRFPSIPKFIGYLGLFPTENSSGNSKYIGHLSKRGSPLAKHALYMSAVSCLIHNTQLKQLYDTKRSQGKSKKEALIAVSRKIAVIIYSIVKYNVPYDPNRVFLKS

SEQ ID NO: 227398 - protein, 377 aa, unidentified
MSTLLFVGLDVHAETIAVAVAEAGGEVRSLGVIPNRLESVRKLVRKLGPVEHLRACYEAGPTGYVLYWQLTQLGVSCEVIAPSLVPTKAGDRVKTDRRDAAKLARCHRAGELTAVWVPDADHEALRDLVRAREAAKKDQLKARHRLGKFLLRHGRRPDGIKAWTKSYLEWIKSKVHFDQPALEATLADYLEEVDHVAARIVRLDGAIDEAVRQAPPRIRAVIEALQSLRGVAQTTAATIVSELGSLTRFERPRQLMGYSGLVPREHSSGNRVQRGGITKTGNGHLRRVLVEAAWAYQHRPNVSGVILQRQKNLALDEEVKKIAWKAQQRLYKRYTALAARGKNKNQIVTAVGRELIGFIWAIAVHTERQRKRLTQAA

SEQ ID NO: 227399 - protein, 388 aa, unidentified
MYRIIKIGMDVHSKNYTLCAMEPTIGAEDRIFGEVQVAPDYKEVICFIESLKMKLGFYDEYSIECGYEAGCLGYTLYHQLTGAGIKCVILAPTTMLTQQGKRIKTDKRDARLIAQCLSYGGYHPVYIPTGEDDAVKEYLRMRDDHKLALKKLKQQIHAFVLRHGYQYSGTKWTIKHVTWLKKLELDPMYRETLNEYLASYEEQEAKIERYDKRIEEIASERRYQENVKKLGCFLGIRTHTALSLIVETGDFKRFAKGNTYAAFLGLAPGERSSSDNVNRLGISKAGNTHLRCLLIEAAKGICKGAIGHKSKELRARQSGQPAEVIAYADKANTRLRSKYYKMIRHGKKTNVAVAAVARELACFVWGMMTGNISIRPTAGTSMPAVRQG

SEQ ID NO: 227400 - protein, 482 aa, unidentified
MSAIPRTVLWLAIVVIGTVSLGVVALHRGETLNAAWLVVAAVCIYFIAYRFYALFIAQKALGVNPARPTPAYVRNDGLDYVPTNRYVVYGHHFAAIAGAGPLVGPVLAAQFGYLPGTLWIVAGAVLAGCVQDFVILLFSVRRDGKSLTEMAKEETGELLLERRLDHQSGEAHAFYRSLQAPVRVGIEATGPIHWFERLLAELGHELWIGDSARIRASDVRKQKTDQRDAALILDLLLAKRFPKIWVPTPTERDFRQLLVHRHKLVCLRTTLGNQLHALAMSQGLCRKKKLFTRKGRVELAGLTLGLWASRRRAELLKLLDQLESQIAELDHAVLEEAERREDAVLLMTHPGVGSVTSLAFVLTIGSVTRFCCSRKLVSYLGLNPSEESSGGRRRTGAISKQGNTMLRWLLVEAAQKAAQCDPALRQDYQRLKFRRGHAVAKVAIARKLAVRMYWILRSGAGYAPLVRMQGSPRGTLVHASTP

SEQ ID NO: 227401 - protein, 344 aa, unidentified
MNTLYVGIDVSSKSNVVYLMLPNGDKHSNFSVANSHEGSTLLVKKIYSALTSHSLDTVLIGLEATSVYGDNLVYFLREDATLAPFNRKIHVLNPKQVKKFHDTYNDLPKNDYVDSFVIADCLRFGRINKEVYMGDYRYKALQNLTRARFFAVCNLTKEEQRFMNVLFKKYSTMTQEKVFSDTFSTTALAVYDEFESTEALAYMDLQELTAFIIKKGKNRFPDPDAVAKAIQKAARSSYRLPKTVNDSVNQVLSISITSMKALESQIKEFDKAIATQMELLPNVLISIPGIGPVYSAGIMAEIGDINRFNNQAALAKYAGLAWTQHQSGGFEAQNTRLIHSGNRF

SEQ ID NO: 227402 - protein, 350 aa, unidentified
MIYVGIDVAKDKHDCFITNSDGEVLFKAFTITNNLDGFNDLYQKIETVMKDITKVKVGLEATGHYSYNLLGYLIDKGLPTYVINPLHTNLYRKSLSLRQTKTDKVDARTIASILMSDVNLKSYSDISYHNEELKSLTRYRFDKVKERAKLKSSVSRLICILFPELEKLVPTLHMASVYALLSEFPGAKQVANAHLTRLTNLLSEASKGRYSKDTAITFRDAARTSIGSNMPAKSLELKHTIKLIKELDSEIDEIENEIKIIMDEINSPILSIPGINYRMGAMIIAEIGDFSRFDSPDKILAYAGFSPSTYQSGHLYGAYAHMEKRGSRYLRYALYNAAKYVCHWDPTFTA

SEQ ID NO: 227403 - protein, 365 aa, unidentified
MLYVGIDQHKRQLTVNVRSEDGSVILKRQVSTEWERVRAFFADLAEKARPEGGFLAILEVCGMNPWLLEMLKEYGCGEIVVIQPTERSKQKTDRRDAGQLSHLLWVHRQQFLEGKHPLGVRRVQPPTPQEAEDRQITALRARLTKKRTAVLNGIHKILRKHNLEQACPTKKFQTQKVRRWLATLELPAVDRLEMDLLLPQWQQLDEQMEVVEGKIAERAKADERVKLLESVPGMGHYSAVAIASRIGDIERFKGPGSLANYFGLTPGCRNSGEATQRLGSITKQGSKMVRYLLNQAVIKVLRFDGAMRTWFKRIKKRRGAKIGRVAVMRRLATILWHMLKRKQKYRYDWPIKKHQEFEAFGGATP

SEQ ID NO: 227404 - protein, 547 aa, unidentified
MIFKCICLVHSENQQAMRCPWYNSCRTAGSSSISPCRARRLLQKESVPLNRKLAANSLAVCRNVGRPVSSGGYRIGPTRNDSDTRGCGCSGDHGYLKACWPKNPQQGGETVEQLYVGIDVSSTKHAAYLMKPDGHKFSSFPMQNDRGGAKMISEEIVSALTKLGLDDVVIGMEATSVYGDNLVYALREDGSLGQFHRKIHVLNPKQVKNFKKSYPELPKNDPVDAFVIADQLRFGRIGKEVYMDDYRYKALQTLTRARFYAVQNLTREKERFANYLFLKCSGIAQSKDIPNTSATTLALMEHFETVDELANADLDELTAFVNKAGHGRFTDPEATAKAVQAAARGSYRLPKTVNDSVNQVMSASIAAMRALERQIETLEKAIEQQFEIIPNTLTSIPGIGKVYSAGIIAEIGDINRFTGQASVAKYAGLVWTQHQSNEFETEDTRLIKSGNRYLRYYLLEAANSVRRCDSEFRRYYDLKFKEVNKHQHKRALALTARKLVRLLFRLLKDNRLYKLPRVEPTLTTLTNKSCFKNSQGQGFVWCCLFIP

SEQ ID NO: 227405 - protein, 368 aa, unidentified
MKKNTSKKQVASKGKKEIKEGLAFYIGIDLGDKNSDVCVLDPRGEVGKEFRLRMKEEAFREYFASIPRSRVAVEAGGQSRWVAEVIEKCGHEVYVSNTRKVPYIHQSDAKDDPGDAYKLAELVHFKPRLLHPIQHRSREAQVDLSWIRAREVLVESRTQLINAVRGLSKAFAGRLEKCSTESFTAKLAGQVPEAIRSAAAPLLETIDHLNEQIRYYDQMEEQIARERYPKYRLLEQVNGVGVHTALSFMLTIGDPERFEKSREVGSFLGMRPRKQDSGETKPQLGITKAGDVYLRKTLVNCAHHILGPHGKDSDLRRFGLRLCQRGGKNAKKRAVIAVARKLSVLLHRLWITGEVYEPLRNNKQAVAA

SEQ ID NO: 227406 - protein, 373 aa, unidentified
MPKYSTAFGMDVHLRSTTVCALDADTGEAVTRRFPGNPWGEIAGWMDGFPGPSLAAYESGYLGFAPQRELAGLGVECVVAAVSKIPRSAAASASKNDRNDAARMAKAILAHGISPVWVPSPEVEGIRDLAGAYDGATARLATAKQRLLAFLAKRGFVYGGATPAGNPRKYWTYDFLRWLDKVRPEDDGGVRTLAALRNEVEAAAEARADLLSEYRAAVDASPIAAEVAALQSIKGCAFALAAAFSAEVGDFTRFRSGRQVTAYFGLAPSQRSSGDSVRLGGISGAGNALVRKLAVEGSWCYAAARHQPKLMPRDTGVPLEIRMHGRKGSERLLRRREEMLARGMPAAKANAATAAELVRWLWALGMMCREGAE

SEQ ID NO: 227407 - protein, 347 aa, unidentified
MNYVGVDLHKERSWFYVMDENGKRISSKSISNKIGILKEYFESIPKPFTLAVEATYNWYFFVDLAEKYADKVYLANSYELKAFAKRNKKTDKIDAKLIADVLRKGYLPSVHIADKKTRELKESLRYRMNLIKDRSKTIFRLKALLDKLGLQATGDFTTNKALGNIDFTVIPAGYHSLVKKYIEQLEWYRERIYGYYKDLEKRLSADQDIINLISIPGISFFSAALIKTEIADISRFKNFNSLCSYAGLAPRVHQSANTSRNGPLSRNRCKNLQWILIENAIHFIHAMPNIAKKHEQIKKRKGYNTAKVATARDMLKAVYHVLKEKRPFFINENSLIRTHAAPALCGV

SEQ ID NO: 227408 - protein, 416 aa, unidentified
MVNDVQWFVGIDWATQSHCVCLLDAEGRPAGQREFAHGGAGLTELRDWLLEKSKVAPGQIAVAIEMPHGPVVEMLLEHGFVVFAINPKQLDRFRDRFTVAGAKDDRRDAHVLGSSLRTDREAFRQLAADNPAVIELREWSRLAEELQQERTRLANRLRQQLWRYYPQAVKLTDDVADDWFLALWQKVPTPDSAAKASEKAIARVLGAYRIRRLDAAAVLKILRETPLFVAPGTTQAACAHIRSLAARLHLVNQQIKEAQQNLDRLCVQIEEEHASRQNSEQCDVTILRSWPGIGRINLATLLAEATEPLHRRDYHALRALAGVAPVTRQSGKQRFVIRRLACNRRLQSAVHHWSRVALQHDAATRRRYDALRQRGHGHARALRGVGDRLLFALCATLKNQTPYDADHKSAKTSTAG

SEQ ID NO: 227409 - protein, 412 aa, unidentified
MQDILTCAMGLDVHRDVIVACLAKGELGTDPEIEIRSFSTLIPEMRKLRDWVLEVDCHHVAMESTGIYWQPIYEMLEPCFDGQINILVVNARHMKNVPGRKTDMRDAQWIATLLRAGLLNGSFIPDKTFRELRHLTRYRKSIVHDITAQKNRIDKFLQSSGFRFTAFLSDAFGASGRNIIRHLMEYGDISREALDKCLKTQTRKRIDEILVALNGSLSEHQRSFLRMIFEHLESLERHRHTVEDAILEEIVKHEAALSLLCSIPGIDVTAAASIIAEIGTDMSAFPDSQHICSWAGLSPGNNESAGKRKSAHINKGNPYLKSMLCEVGWVISGKRTLYLSGWYWRIKQRKGAKRATIALARKLLALIYTMLKTGTPYNEECFEIRRKQSERKRATRMVNELQRLGYFVVAPD

SEQ ID NO: 227410 - protein, 394 aa, unidentified
MKLVGIDVGKNSHHFCVMDKETGEFNVTPSSFSNNKEGFDFLINSLKPYSKKSVLIGMEDTGHYHVALLKFLLNNGYTVALINPKTTDLTRKMEGGITKNDKLDTITICDVLDTPERKKQYRITKVDRFDLYEQRQLTRHHHNLKEELNLYCNRLQKSIDLVFPEFNTLFSSKYGIVYMNLLKTFGSAEAIASTDIRTIRKCFEIKGRGGRISLTAEKLKECAKNSIGISSEVETIQIKHLVSQITLIKEQIAEIDKKIEEFSITNNSPILSIPGISHFSGTSILAELGDIGNYSKPSQIIKFAGVAPYHYESSQYNAQHTAITKKGSKYLRKTLYQIILPVINNNPVFKKYYLLKISQGKGHRCAQGHCIRKLLRIIYHLLETGQSFDPALLR

SEQ ID NO: 227411 - protein, 331 aa, unidentified
MSDVVVGLDVHLKNTQVTIMKNDLIGEIVKKERVGTSKAELQRSLASVPKGSKVALESVGFCWPWIDFLEELGYQVLLANPVKVKLRAEDIKNDKVDSRTLAELVRVNWLPTCYIPPAELRWLRSLLRHRAYRTRLSTSVKNRSKSEFRKRDIQLDVNLGTIKGRKAASALDVFEVNQNIELLDLIVRQNKEVEKQLLKKYGKIRPVELLMSIPGIGFLSALTLYAEICDIKRFSSAEKLAHYAGLVPRVRQSGEHTSMGRESKGDKWIKVILIEASWAHVRCCPGGHLASVYRDVFRRKGNGSDAIKVVARKLVNVVWAVWTYEKEFTVK

SEQ ID NO: 227412 - protein, 400 aa, unidentified
MDRIEQGWVGIDAGKGHHHVVLIDRDGRQLLSRRVDNDELALTGLIETVRDRVMEPTWAIDLADGAAALVIGLLLHRDQPVFYLPGIAVNRASAGYRGEGKTDAKDAAIIADQARMRRDLRRLQVLDEDIAELRLMTAYRADLAADRTRCINRLRSLLLGVFPALERVLDFTCHGPLVLISGFQTPTAIRRLGATRLLRWLERRGVRRPGRLATAAAEAAGQQTIQLPGEAAAASLVARLAQTILELDRQLADVDRKVAASFHTQQDAAIITSLTGIGDVLGAQFLAAVGGSLSGFASADHLAGYAGLAPTPRDSGYRTGNLHRPQRYNRQLQRVFYTSAMISIQRSPASRAFYDGKRAQGKRHTQAVLALARRRVNVLWAMLRDHQPYQERRQPLILTA

SEQ ID NO: 227413 - protein, 340 aa, unidentified
MTIATIGIDLAKNVFAVHGVDHNGKTALVKSRVTRAALPELIAGLPPCVIGMEACSGAHYWARLFRQYGHEPRLMAAKFVSPYRMAGKSGKNDAADAQAICEAVRRPHMRFVPVKDESQQAMQCLHRTRQGFIEEKTAIYNRLRGLISEFGVIAPQSTDALRRIVSEQKSYLPFQVQQCVDDLLEHIDRIEDKVSEYDRTLSCMAKTDHRSQRLMELKGIGPTTACALVASIGNAHDFKNGRQLAAWLGLTLSQYSSGGKSKLGRITKAGDSYLRTLLVQGARSVLIGADKRTDSFSRWVCMLVERRGYWRAVVAIAAKNARLCWASLHYGDDFRLYSAS

SEQ ID NO: 227414 - protein, 304 aa, unidentified
MNGIGIDVSKRQLDIGTTDGETLQVGNNRSGFSELDVWLKKRPTSQIVLEATGGYEQPVLDFLHKAGHPVVRANALRARKLAQGLGQIAKTDRLDAYALAQMAALVKLRPYQPLQSWQQKMREFVRARRQAMDALTIARQQQEMVLDRELRRLLQGNITRLQTLVERLGKQIVEQVGQQPQLKMLKSMKGVGPVLQAVLASYLPELGRITGKRIASLVGVAPMSHDSGTMRGKRSIHGGRAEIRQVLYMAAMSAMRHEPRLRDFYQSLRARGKEGKVAIVAVMRKMLVILNARVRDAESGLVPA

SEQ ID NO: 227415 - protein, 338 aa, unidentified
MNYMGIDHHKQYSYITLLDEKGEKLNSGRVANLRSELENFLSGIEEVKAVVEAGRSSYTMVDVLDDMRIEVTVAHPKEVKAIAKAKIKTDKRDSWMLAHLLRTDLIPEVYKRSRENRSYQRILRQRAFYVGSITRVKNRIHALLSQQSEDVQEEISRVENLFGTKGMKVIRGLSLPGNQTESLEALVKTFSHLEERRKETNGLVEELYYEIPEARLIHTVPGFGVFLSVLTAVEIADIERFENERKLHSYAGVIPSTFSSGERTYHGKIIKQGNRWLRWAAVEAVWPAIRADFDVRCYYERLKRKKGANSAKVATARRLLTIIYRMLKENRSYIPYKR

SEQ ID NO: 227416 - protein, 347 aa, unidentified
MQTNKNIRQFVGLDVHKKTVYGYVMDRDGNKVFEKNFRTDPGEMDTFLLNVIKHDSIIAIESCSCWQFVYDYVSDAGYNVVLAHPVGIAAIKKVRKHTDKFDAMLLADLLRTNMLPQSYAAPWDIRVKRQVTRHRHSLTDIEVQIKNKVHAILLRHGINNLPYDDAFCKSGIAYLQSLDLPSCDRFELDQYLDLIKALQEKKEETTKAIQQLGDDGSSVRLAMTMPGIGHYAATTFVAEVGDIRRFDNGDKVASFAGLVPRVHQSGERTNYGHITKQGNNSLRMVMIQAANIAVMRDPTLKKMYSRLAKKKGHGKAIVAVARRMVTLLYVMLKNNLEYHALQIHKAP

SEQ ID NO: 227417 - protein, 425 aa, unidentified
MNHTTFCICIGADVHLDKIVIYAVDKADGHQVLDHFHVTNNLPGAQAAATAIAEIATRLGCTRIEIGWEATGMLWIPFHRYLRHCPQLQPFELELVCFNPQLVAKFQDGLVLRRPKNDKLSASTIAARLRFGELPLSYVPGDFWQGLRRLTRYRFQLSRNLSREKMRFQSYAFLKCSDWKRVKVFSDLFGATSIALITEFTIAELGEMTHDQLLDLVNRRGRGRFADPADTVRKIRQALRSSYPLDPQTDEMVTATLAAGWDHIRFIKRLMKRLDKHIACYIDPVPNPLITINGLGAVITAGILAEIADISRFPEHKHLAQYAGLTWAKRSSGNFVSQNTRLTKVGSKYLRYYLILGANTMRLFNLEYKAFYRRKYRETSKYQHKRALVLTARKLVRLVHALLTKNVSYVRPQSLTNAEEVDLLQ

SEQ ID NO: 227418 - protein, 489 aa, unidentified
MAKRKMSTFERLQRGTLKLSREQRKELAERLHAADPGLTIVHPDAAGIDVGNESHFVAVPAGRDAQPVREFGSWTADLQRMAAWLKACGIRTVAMQSTGVYWIAVQEVLEEAGLEVYLVNARGTKNLPGRKSDVQECQWLMKLHTYGLLRNSFRPAEEIRTVRTIWRQRDRLVKDAGRAIQQIQKALTTMNIRLANAISDVSGVTGLAIIRAILKGERDPRVLAKLRDRRIQASEEEVVHSLEGHWRDDVLFELQQVVEGYDFYQGQIGACDQELQKYLAVLPDRRREREVEVVDTGEAEGSKKRRKSKAERKGKTRRKNQPGFELGVELHRIFGVDLTRIDGIDIMTSQVILSEVGPDLTDFPDEDQFASWLELAPRRNITGRKVISQRSRESKNRVANALRMAAEALSRSDSYLGARYRQLRGRKDGKVAVKAMARHLACLVYRLVTKGQDYVDRGAAYFEKKRSQRELDGLRRKATELGMKVVPAT

SEQ ID NO: 227419 - protein, 464 aa, unidentified
MPLRLGIDIACRAAHQVSLADEQGRFLWTGRRFRTTPQDLDRLWAMLPDDTDPADLLVVMEPTRNAWVPLAAWFRRRGAGVVLVPPERSADLRRYYAKHTKSDRLDSQLLARLPILHPDGLHAEQGLGPGDALKRAAKLHSTLTHRRSQSLARLDALLEILGPAWHAAIGADLANRTPLKFLAAGYADPHVVKRLGRTRLARFCYRHSRGAWGEPHAEALLAAAQETLQLWSGGELDYPDLAEDIAIEARLALQLTEEIKDLDERTTLLLREADPTGILTSAPGVAAITAAAILGRLGDPNRFTSLAGARAFTGLVPILDASGLNGRHGGPTKRGDAVLREALFMAAGQARRIDPTLAAKYHRLMIDAGKHHNSALCHIATTLLTRIIACWRAGQPYVLRDVDGTPVTKEQARTIIAERYAIPKDLRGRRRTTDPAGTDRRSKESPSAPSTGPSRPNATTPTAA

SEQ ID NO: 227420 - protein, 437 aa, unidentified
MNHLRFQTNRQLLGGKIVIGIDPAKLSHQAAVVDASGTQQGHSFAFPASAVGYGETLWRHLARIVTVHRPEDVVFAIETSCNLWETLAFSLHSRSYTVVLVSPLSTHHARPVMNLEFSHTDPKDAFLVATIAQRGAFHRYESFSPHTNAMHQLAITYDKLRQDLAHNRARIRSLLDRVFPEFLHVLEPDTETAMHLLKNYLFPDEFLHLDLSAESLRIEQISRRQLGRSTLEALQQQARRSIGVARQSHERLADRLTLDAYLALVETLQAQLDHVLDELITRARELPQFARITSLCGVGNRLGALFLAEVRNLSRFTHYKHIEKLAGLNLRLHQSGRYTGSRRLSRIGNPRLRWIIYKMTEETARRVPEVRIKYLRRQLKRRRHVRNVVAASPQLLQLIVSMERHQHSYEVRQDNVKELQKLENQYALLKAARKSAA

SEQ ID NO: 227421 - protein, 372 aa, unidentified
MSFPWPPATGSRLLFVLIAKEMKGMWAIGADVHMKTTTFFAFDDEAKPVTDFNRMFKSVRSNKEGFLLVRMYLENIDYQILMENSSKTHDVQWIWEEIGMNYIVAPSHELKRITQSDSKTDKRDARELATYMMARFAGAKQFHPCYMCSKEDMMNRQLCRTAKTYMVEIGKCKRRIRSHALVYGIDLPKDVTTAKAKEIMRCMDDPIFNSIIGVMEDLENHRDELLEIIKIRFQGNPIYEKILGIPYFGEITAAYLTCFICDINRFEGSKQFVASLGLAPRVRNSAETVSHCGITKKGDPHARWLLIQATIGHVRNVKDSPVTLFFNKKNGGSIEMRKELDEDRLMDRSAIVAASAKMARIIYTLVVKDRVW

SEQ ID NO: 227422 - protein, 321 aa, unidentified
MNTTMPLGIDVSKAKLDCALWLGSKYRTKTFANTPEGFFRLSEWLHQHGADQVHACMEATGIYWEAAALYLADAGQRVSVINPALAKAHGQSLGLRSKTDAVDAKLLADFCREKQPPAWTPPSGAERRLRALVLRHQSLVEMQTQEKNRCESLREEVRTSVETHLAWLAAELERIEQAIAKLLDDDDHLRGQRELLASIPGLGERTIAVLLAYGVSGERFQSARQFVAFAGLSPRLHESGSSVRGKPRLSKIGHAFLRRALYMPAMVTLYKTAWGQRFRQRLATHGKPPKLIIGAMMRKLAQVAFGVIKSGRPFNPAFHGA

SEQ ID NO: 227423 - protein, 362 aa, unidentified
MEFFCGLDVAMDETAICVVDDKGAVHLEASVVTDPVAIRDVLKPFLGRLRRVGHEAGSLSPWLHPEMLKLGLPAVCLETQHVRAALSAQRNKTDKADALGIAHIMRTGWFRQAHIKSESCYRMRLLLTQRRNLKAKFLDLENTIRHSLKAFGIKLGGASRGSFDQAVRAAVANDALTSELMDAMLVARAMLWKQYCRLHDLVVRFVAGHELCRRFMQIPGVGPVTALSVMTAIDDPSRFRRSRDVAAYFGLTSRRWQSGTSIDVQGRISKAGDPDVRRALYEAASALLTRFKRRDKVKTWGMSIAKRSCHRKACVAVARKLAVIMHAMWIDGTFYIGDPAANEQDVAAFAALKDRKLLGAHR

SEQ ID NO: 227424 - protein, 435 aa, unidentified
MDEVTDEPLYRDRVCGIDIGKAQLVATIRVPSDRDRSRRAAETRTFGTTKREVLALADWLRCWQVPCVVMEATGDYWKGPFYRLEAEGFECVLADARQVKNLPGRPKRDPADSRWLAACFERGSVAACFVATPEFRIIRLHTRYRRDLTDERTRDKQRAEKLLESAAIKISSVLTDLHGVTGRDIMDHLIAGERNPKVLAQLARGTARRKIAQLEEALDGAEFFTAEHAALLQTMLARIDRVTAEITGLTEVIDQLLAPYEEQLQQAGSMPGWGRRAAQDAVAETGVDMTRFPTGSHLVSWGSRAPLDHQSGTRKGRARVKKGNRYLAGVLGETAVAAGRTQTREGARYRRIARRRGKNKAQVALGNTQLKVYHKLLSNPGMRYEDLGPDYYERRADTRRQIAHHVGKLGALGFEVTLARLPGPDPDTPDQTQAA

SEQ ID NO: 227425 - protein, 367 aa, unidentified
MKNTIVHHEGAASLKVAGNKIKLPGSIIKIGLDVHARLYVAVAQYDQLLPKPARRLTPSEFVPWVEQLLRAGHTVHVVYEACGFGFGLYRELKALGVHCYVIAPRKLDEQFTRVKTDPRDATTLCQRLSRYLEGNTRELAVIRVPSEAEEQARHVSRQREQLVRHRQKLEAQGRSLLINHALPAPAHWWKNQTWSRLTKLLPAWICLRLEVHRPALLILEQQISALSVELEAAAPALVPTGVGKLTTVVMTREICSWERFSNRRAISSYTGLCPGEYSSGTKRIPGSVTKHGNPRLRAALVECAWRMVRFQPQYPPVKKRLVILAKGSRATGGQRKKAIVAVARHLAVDLWRVHTGRNTAAQLGLTI

SEQ ID NO: 227426 - protein, 316 aa, unidentified
MAKHTTICAGIDTGKRKLDVAIEGRRELLQVDNTAEGHKVLLAWLRQRRVKRVGIEASGGYEQPVVAELRRKRFVVVVFQPVQVRAYAKFHLQRAKNDKIDAALIAACTAAVRKIHAAPDPRLLPFAEQLTMIDQINEDIARLKNRIESCRNARIKKLWQEDIARLEMREKAELKALVASIRKRPDLAKRLELINSVDGIGLPTAVAILVRLPEIGRITREQAVALAGLAPYDDDSGEQVGVRHIEGGRKRLRRALYTASLDRQLIQLYQRLTAAGKEHKRALVACARKMLIFANTVVARGTPWCDEPPVGSLSVS

SEQ ID NO: 227427 - protein, 428 aa, unidentified
MKKRTYRKISIKSVSVEDVLQKLGERRRLVLAVDVAKTDMVAALWDPGAEREHRALYTVCWKQPQEQEAVKQLVAGLQQRAVVVEAAMESSGTYGDALRAMLLGLGIDVYRVSTHRSHRAAEVYDGVPSLHDAKSAHIVGQLHQDGLSQRWSMPSEQERTLSCAVAMMDLYKGERQREINRLEAMLSRHWPELLRLMELGTATQLALLSEVGGAVQVAQKPEFALQVLERKSQGKLKPEVAQAVLTSARSTVGIAPIAAELEMLRLLAAKALTTLASLQRAVRKLRALSKRDAQACAMATTVGVATAAVLVHDIGSPEQFPSARAYLKAAGLNLREKSSGKYQGQLKLTKRGPSRARRYLWLAVLRLLQSDPIVRAYYAQKVARSGGRKSKAVVAVMRKLAKGLHACARSGTPFDSSKLFDVSRLALS

SEQ ID NO: 227428 - protein, 344 aa, unidentified
MSEVSIIGLDISKHVFHAHGVDGRGRAVFSKRIRRGRLLDFFAAQPSCTVALEACGGAHHWARQLAQLGHEVRLIPPAYVKPFVKRQKNDAIDAEAICEAAQRPSMRFVAVKSEEQQAAGLVFRTRDLLVRQRTQLINAIRGHLTEYGWVAPKGPSHVAMLADLIDEGEMADSLPGAARAMFRVMLDLLTGLSSKIADLDKEIARRAREDEVSRRLMTVPGIGPISATAIAALAPPAESFAKGRDFAAWLGLTPLQRSTGGKQKLGAISKMGERTLRRLLIIGSSAVVKQASKRGAPRGSWLEQMLARKPRMLVTVALANKMARIVWALLVKQETYRAPVAAGA

SEQ ID NO: 227429 - protein, 423 aa, unidentified
MAGVMIGIDPHKGSHTAFVIDGREKPLGQLRVRASCEQAEALLGWAGRWRQRTWAIEGARGLGQLLAQQLLAAGERVLDVPPKLTARVRLLDSGQINKTDENDARAVAIAALRARELPQLTVEDQTIVMRVWARRYHDLGRLRTQAVCRLHTVLCELVPGGVRKQLRTSQAIAVVDSITAESPVAQAKLELAHDLVADLQRLDAQRREVKRRVSRAVAAAPTSITEVYGVGPIVAACVLGYVRDIRRFPSRDRFASYNGTAPIEVSSGDRKVYRLSRRGNRQLNHAIHIAAVSQISHRGSEGHAYYQRKRAKGMTGKCALRALKRKISDTLYERMLHDIRQRKDPGGHSGNDAVSSAAGSHPDGPALRTSHSRATANSKTATTNQRPLTSPPAPDKRRTSRSGTGVKLQPRPRPRRGRGQERA

SEQ ID NO: 227430 - protein, 350 aa, unidentified
MDTNTSALASIGIDIGKEVFHIVGFGTNGKIAFRRKIKRLALVDTFKGLPSCVVGMEACLSAHFVSRALRQLGHQPRIIPSIYVKPFVKGQKNDYNDAEAIAEAALRPNLRTVREKTQDQLDLQALHRVRSRLVSRRTATINQIRAFLIEQGIAVRTGARALRNSLMAILENRQDEISPRMRGLIADLYEDWVGLDERIETIAREIETIGEKEANCQRLMSVPGIGPLISTAVVAAIGTGEAFERGRDFGAWLGLVPRQYSTGGRSILGRISKRGSKYLRTLFIQAAKVILMRPHNWERFSFGAWLLNATPRLHRNKLATALANKLARIAWSILRNEKVFDVPRREAMAI

SEQ ID NO: 227431 - protein, 410 aa, unidentified
MSRTNDFSVLIGLDWASSKHDVCIQYADGTRELAVVKHSAEAIEQWITELHQQHPGQIAIALELSKGPIVYALQKYSFVTLFPINPTMLCRYRRALSPSGAKDDPTDASIALELLVRYPDKITPLKMADDKIRKLAFLVEERRRLVDEKKRYVNRLINALKQYYPQPLEWFTHRDSQLFVEFITRWPSLDRIKRAKPDTISRFLTSRGSFAKLVSPRLEAIKSATPLTYDSVVIESNKLLAITLANQILPIITAIKTFDQEIEAIYHEMPDAALYESLPGVGKCLGPRLLVAFGEDRNRFGSAQEVQKYAGIAPVTERSGKTAWVHWRWGCSKFIRQTFTEWSAKSVLYSYWAQLYYEQQKKKGNSHHQAVRSLAFKWIRILYRCWKTNTPYNETQYLKVLKERNSPLLG

SEQ ID NO: 227432 - protein, 335 aa, unidentified
MRSVGVDLHKNMFYVCYLSDSGSSYRRYELFELDRFKASLLKTDRVAVEATGNTRYFVGEISRFVSGVTIVNPKQFRIISDSVQKTDRADAEMLALFLSKDLLPEIKLRDELSNQVKSLCQTRDRLVKLRTSLINKIHNILNSYGIVSKRNSFNTKKGLEKVLWYSIPDLSRLELEIIVSQITHLNEGISRLDQKIKDQGQQLKGFKNITSIKGIGPKSAAILLSVIGDINNFASEKKLQSYFGIIPRIHQSNNTLRTGRITKEGSKLGRTTLVQCTLVAIRYSPYLNSFYLRLKEKKGSGKAIIATAKKLLGIIYLTLKNEWIFEDFPNFVMAK

SEQ ID NO: 227433 - protein, 345 aa, unidentified
MNVTAVGIDLAKNVVQVHGVDTRGKVLLRRQLRRDQVRKFFAQLPPCLIGMEACASAHHWGRTLERFGHTVRLMAPQFVKPYVKTNKNDVADAEAICEAVSRPNMRFVPIKSIEQQAVLSLHRVRQGFVKARTAQANQIRGLLGEFGVIIPKGIWHIAQRVPGLLEDGGNELPLALRQLIDRLTHHLKELDRQVRELEREILAWHRNSDLSRKLEQIPGIGPLAATALVASIADARSFENGRQVSAWLGLVPRQNSSGGKPTLLGISKRGDAYLRTLLIHGARSAILAARRRNDSKNGWLANLLNRRHPNIAAVALANKNVRTVWALLAHGRAFRPDYVPVRTAA

SEQ ID NO: 227434 - protein, 349 aa, unidentified
MQHYAGIDVSLGLLSVCIVDAKGKIVKEAKVGSDPDTLVAFLRGLDLAIERIGLEAGPLSQWLHAGLTSAGFEAVLLETRHVKAALSAMTVKTDRKDARGIAQLIRMGWFRAVHCKSAGSQEVRALLVARKLLLSKLLDVEFSIRGILRGFGLKMGMVTRKRFEARVRELYADHAMLEQICSAMLTARSALQTEYAKLHKALLVIVRKDEVCRRLMTTPGVGPLVAITFKTGVDDPSRIHKSKAVGALFGLTPKKYQSGETDVTGGITRAGDEMVRTALYEAASVLLSRVTRFSALKRWGMDVAKRRGTKRAKVALARKIGVILHRMWVDMTSFRWTKGAPTTMRLARV

SEQ ID NO: 227435 - protein, 415 aa, unidentified
MALKIVYKICCGIDVHKTFVVACIASTNSKGVTTYESHRFSTYTKGLKDLLQWLLHRNCRDVCMESTGKYWIPVYNILENDCTIVLAHPKYVKAIRGKKTDKKDAKWIADLFKHDLVAGSFMPPADIRQLRDLMRYRFKLTCFKSSEKNRLQNCLTVSNIQLGNVVSDTFGKSAQAILDKLLENPADTSFDLEPLVYKSLKKKLPELRDAIDGFITPEQAGKLKVIKGHFEDLESRKAELEELILALAAPYQQELAILQTAPGISSIFTAIGIISEIGTNMEAFPSAKHLCSWAGLTPTNNESAGKKKSVRVSKAGCYIKPLLVQCANAVVTSKKHPEIRNRYLRLKKRRGHKKAIIAIARMLLTALYHMLKNGENYNAELYRKSNLPPVDREITVEQAIIIARNQGYKIKSATA

SEQ ID NO: 227436 - protein, 374 aa, unidentified
MNRGREIQKNLESIAKEARSRGYERLCVICESSGGFEKRLLRTARVLRNASWYVSGEAVSKMKSVESNDNEKSDEKDPRVIHVLGMMGKVFKDRQMEPDYRKLRILGGQYEDESVAAARLRTEISSIVDRIFPDLEFSRKFLYGNSGHALVSLFGLNPWKITAVGHKGFVKKMRSMSGTGKTVLAKIWESAESSTFQVIDGWEVEIYEKRLGELYAEWELHEGRKNRLRNEMLEVYRRLPESEKLSRVGKGLEFQFTRILAETGKPGDFKSARQIIRYAGLNIRRRSSGKYEGHNKISKKGRSLLRKVLYQCVFSSLICKGGVYHDYYQRKKKELASGMKAIVAVMRKALKMIYGIAVSKNEFSMERVFICKAA

SEQ ID NO: 227437 - protein, 363 aa, unidentified
MAMKATCLVGLDVHARQTHAAILDPLTGEVRVCKLRMAPVEVVGFLEGLGAGVRAVYEAGPTGFGLARAARERGIEVWVAAPGAIPKGSGDRVKTDRRDAIRLARLLAAGELAFAFVPCVADEAFRDLVRAIEDVRGDLMRARHRLSKLLLRRGERFPGPAGAWTLAHLKWLRALQFDDPCSRAAFADSLAAVELLGGRRASLVAALEQQIPDSSHAPVIARLRCFRGLDTLSAAGLCAELGDWRRFPAPARISGFVGIVPCEHTSDTKRRQGSITKAGSSHARRLLVEAAHHYRHPPRIGDTLARRQAGQDPRVIAIAWRAQRRLHARWQHLHEHRRKPSGVVAIAVARELAAFCWEAARLD

SEQ ID NO: 227438 - protein, 390 aa, unidentified
MTKRKTETVNDLSRCLDPLDMDATLIAVIEMSQSSWLVAGIVPGVERQPLKKIAIDEHALLKLLSSWRKEAEKKGHKITRVTVAFEAGHDGFWLARRLAAFGIEVHVIHASSVAVTREHRRAKTDRLDTELLKRGFLGWLRGERGHCKMVLVPTLAEEDAKRPSREREALVGEASRIITRIKAAFVRLGIRSFNPKLKAATARLGTLRTPEGEPIPPNTLAALRRDLERHNIIKRQIREIEQTRLDRLAQAPAKGPHPMVLLLARVVGIGVETADMLVHEVLSRNMRDRRAVARYAGLTGSPDESGAKRREKGLARSGNARVRRGMIQLAWRFLWLQKDSALAEWYRQRTQAAPATRKTLIVALARKLLIALWRLAHDGIVPEGVQMRPA

SEQ ID NO: 227439 - protein, 420 aa, unidentified
MTRIQTKKTQAVNQKSLIVTVDIGKKTNMGYYRFSNNRGAKPFPFGNHAHGFGLFWDRIAQVQRQNQMEEIVVGFESTGAYGEPLMHFLKRKGVKLVQVNPMHTKRLKELTGNSPNKTDRKDPKVIADIMELGHALTVIVPEGSAAELRRLTQARERNVVRRTGLLNQLQDLVFLVFPEFLTIMKGVKSKTARYLLNRYSTPGDFVACGDLDLLCSRVKKISRGRIGRERIEPLYRAACSSVGIQEGRDSLVLEIRQILSWIELVDGFIARLEEAMIPHLRQISYSDSILSIKGVGPVTTAGLIGEVGDFGSFRTIPEMEKLAGLDLFEISSGLHKGRRKISKRGRPLLRKLLYFGAINVVRRGGILHGWYHRALDRGMPKTKALVAVARKLLRIVFAVVRDHREFTYDYMNQPKLRMTA

SEQ ID NO: 227440 - protein, 413 aa, unidentified
MATVDFTQVVSHGCGMDIHKEVVVATVRRPGFPQETRECNTFTSSLTELRDWLMSLGITHVAMESTGVYWKPIYNVFEGHLPHIWIVNARHMKNVPGRKTDKKDSEWICQLLMAGLLKPSFIPPREQRELRDLTRYRRKLIQIVSANKNRIIRTLEDGNVKLSSVLSDTSGTTGTKLIEMLCDGKELTLQDIEDVRHKRCRHTAEEMLEACTGYMNDHKRYMLQRIRGCNRKLNEEIAELDLRIKAILAPFAEVIERLGEIPGLDGRTIEDLIAEIGLDMTQFPTAASLCKWAGMCPGNNESAGKKKSGKTPKGDKHVRATLVEAAWAASRTKGTFFSERFARLAPRRGGKKALVAVGHSILTAVHYVLSTGGRFKDLGDRYVPERTEKKRREYLKSELKKLGYEVTLTKKKD

SEQ ID NO: 227441 - protein, 390 aa, unidentified
MELPMQKLNDLSRSLIALEPAGTLIAVIEMSLSSWLVAGIVPGVERQPLKKLAVDESALLKLLHRWREEAEKAGRRIERIVVAFEAGRDGFWLARWLKAHSIEAHVIHAASVAVSREHRRAKTDRLDTELLKRAFLGWLRGERDHCKVVAIPTLKDEDAKRPNRERESLVGEQSRIVNRMKAALIRLGIRGFNPKLKRAAGRLDSLRTPEGEPIPPNTLAELRRDMERRRLVSNQIRQIEEARLERFEQAPNDGPHAMVRLLARVVGVGIETADMLVHEVVSRNMRDRRAIARYAGLTGSPDESGRKRREKGLARSGNGRVRRGMVQLAWRFLTYQKESALAQWFRARTENALRARKPMIVALARKLLIALWRLVWQGVVPDGVVLRPAQ

SEQ ID NO: 227442 - protein, 343 aa, unidentified
MAQYAALDVSQETAICLVDEQGAVRREGKVATCPETIAQWLAKNAAGLVRVGMETGPLAVWLWNELHAKGVPVVCIDARHANAALKMRANKTDRNDAAGLAQIVRTGWFKQVRIKTRSSYEIRSLLAAREVLVRIRVQLENEIRGLLRTFGVLFGKAAGGFARRAREIVAGELDASPSMRLVVESLMQARLAILDRIKVLDRQVLTTARTEATARLFMSAPGVGAITALSVASAFDDAARFKRSSSAGAYLGLTPRRYESGEVSRNGRISKHGNKLTRKHLYEAATTLLTRTTRFSRLKAWGLRLAKACGFKKARVAVARKLAVILHAMWKTKTTFRWSEAAA

SEQ ID NO: 227443 - protein, 339 aa, unidentified
MQVTTIGLDLAKNIFQIHGIDDHGEVAFNRALRRAQVLAFFERLEPCLVGIEACGTSHYWARELIKLGHNVKLIPPAYVKPYVKRGKSDAVDAAAICEAVTRPTMRFVEVKTPEQQAILAVHRTRDLIVKQRTQTINMLRAQLAEFGIILPQGVYHALKFAKNSVDGEPLNLPQDAQEVVFDLCEQLLFLHAKILRHTRHMTQIAKREKRVALLRTIPGVGPITASAIVATVGSGKQFKNCREFAAWLGLTPLNRSSGGKERLGHISKMGDQYIRRLLVLGMTSRIRSIRAEPERFDPWFADILSRKPSRVAAVAMANKTARMIWAVLTRNEPYKVRII

SEQ ID NO: 227444 - protein, 319 aa, unidentified
MSTTIAPCIGIDVAKATLEIGIDMTGEIYSVANDPQALPALVARLETLAPERIVVEATGGYETLLVAACIAANLPIVVVTPRQARNFAKAIGKLAKTDRVDALVLAHFARAVRPEQRLHKSEAAQAVSALVARRRQLTEMLVAEENRRQSPLFAEMADEFKEHIEWLQKRIAELDRDLQNQIHRTQHWREQDDLLQSAKGVGPILSVTLLTQLPELGRLNRREIALLVGVAPISHDSGKRRGERHIAGGRAAVRSALYMGTLAALRFNPVIKEFYQRLLAKGKLKKVAITACMRKLLTILNAMVRDNEAWHSPAKRLSA

SEQ ID NO: 227445 - protein, 412 aa, unidentified
MKDLLEISCGLDIHKEKIVACILTGPLGKPTHSEIREFTTLIPDMLALRDWIISENCHHIAMESTGIYWIPIYEILEDAFSGDITLLVVNARHMKNVPGKKTDIRDSEWISTLLRAGLLNASFIPEKRIREFRDLNRYRKSIIRDITSQKNRVEKFLQSSGFRLSSFISDIFGASGRNIILHLMEHGQIDKMSLDSYLKTKTRKRIDEILMSVNGTLSEHQKSFLKILMYHYDSMKEHLIEIETHLQEDMLPFALQIEQLNTIYGISTTASCAIIAEIGTDMKPFKTAEHICSWAGLCPGNNESAGKRKSTSITKGNPYIKSMLCEIAWVIAGKRNTYLSAWYWRIKQKKGARKAIVALARKLLVIIYTMLKQGTNFDENCFEVRRKNCEQKQLSRYIRELEKHGYTVEAQV

SEQ ID NO: 227446 - protein, 411 aa, unidentified
MRRVIGMDIHRTFAEVVFWEDGRLRHFGRVDMTRSGLEAFGRGLEKTDEIVVEATGNAMSVVRILEPCVARAIVANPMQVKAIAHARIKTDKIDAGVLAQFQASGFLPEVWVPDAATERLRRLVARRNQIVRHRTRVKNEVHAILQVHLVPQCPHADLFNQRGRKWLTRQVLPEDERLAITRHIREIDRLGDDLAELDADIAKDTIDSADVARLLTITGVNVTVASGIVAAIGDISRFSEPQKLVSYVGLNPRVRQSCLGLAQYGRISKSGRSHVRAMLVEAAWAAAKAPGPLRAFFLRIRGKRGHQIAAVAVARKLAVLVWHMLTKKQDYHWLRPALVAAKKRQIALKSGAPSERGGGRRGSAYAYNVKELRDREMAAAQIAERTYDQMTRRWQPRRPRSGTDAANGERP

SEQ ID NO: 227447 - protein, 422 aa, unidentified
MLEETQDEQEIIERVAALDIGKAELVCCVRVPDPNGGSRRVQEVKSYSTMTRSLQVMADRLLDLGVTRVVMEATSDYWKPPFYLLEAHGFEVWLVNARDVKNLPGRPKTDRLDAVWLCKVAEHQMLRPSFIPPIPIRRLRDLTRYRIGLVSDQTREKNRVEKLLEDSQIKLSVVASDIFGVSGRDMMAALIAGERNPQVLAQMARTVMRTKIPQLEEAFVGHFSDHHSFLLTKMLARIDALDADIADLDTQIEAHLAPFADAVARLDEIPGIGVTAAAVIIAEVGVDMTRFPTPAHLSSWARFAPGVRESAGRKKGTGSTGHGDRYLARVLGEAAVGASKTNTFLGERYRRIARRRGKKKAIVAVGRSILVIVWHLLSEDTTRFHDLGPGYYDSRINPERKKRNHIRELEALGYKVTLEPAA

SEQ ID NO: 227448 - protein, 339 aa, unidentified
MKYYSGLDVSLKETFISIVDEKGKIVKEEVVASESSAIAKFLFSQSKEYESIGIESGQLSISMCKGLRNFGLPVICVDARHMAAALSARINKNDKNDARGIAQMMRAGLFKEVLVKSDEACQIKIALGSRRQLTCSKYQIIGTIRGLLKIHGIKFGQGSRVESFSLKVQKAISSLDKISRNSIEELISSLEAIEESIGKLNKILSEQGKKDEDCKLLTTVPGVGIIVAMTYKAAIDNPYRFETSYAVGAYIGLSPRQYASGEINRHGSISKMGPSECRAMLYEAAQSLLTRCKRTFKLKSWGLKLAKKKGIKKAIVAVARKLAVIMHRMLVNKTEFCYQ

SEQ ID NO: 227449 - protein, 353 aa, unidentified
MEQFIGCDAHKKFSLFIAMNEEGEYGRPIRVGHERERMRAFLEALPVGSQIALETSGSYYWLVEEMERAGHRPQLAHALTAKRRMEGRHKTDERDARGLAMLLRNGTLPRVWIPPAALRDQREMLRLRMILVESRSQVKNRIHGVLLRYNVELKGKDIYTQGGREELDGHLTELPEWTRESVHKQLGMVDHLDQQIEACEQSLETMLEPNAERDLLKTLPGVGKILSAVIALEIGDIARFGNAERLVSYAGLVPAARESAGRKRPGQCPSACNTYLKWAFVEAGNVIATHHHKWPERHVAQLYVRVKHNTKMHGKATVAVGRHLAEAAYWILSKQELYREPKSNRQALSSTHG

SEQ ID NO: 227450 - protein, 415 aa, unidentified
MDVLEERCAGADLSKADVKVCVRVPGTGKRARYEVRTFSTMSDGLLELRDWLLQNGISRIGMEATASYWKPLFYLLEATEGIEPWLLNAQHIKTVPGRKTDVKDCEWICRLVEYGLVRPSFVPPRDIRQLRDLTRYRTETTRDRTRDVNRLSMFLEDTGIKLSSVVSDITGRSARAMLDALVAGERDPLVLANLALGSLQGKVPLLTRALTGNFSEHHAFMVASMLRAIDEANDRIARLSEEINRQLQPLRQQVDLLITIPGISLTLAQVLIAEIGVDMGRFATAGHLASWAGVCPGNKESAGKRLSGRTRHGDTWLKTALFVAGSTAGRSKGTYLGAQFHRLIPHRGSKRATLAVGHSILVAAWHILHDLVPYRDPTGSARNARHADCSPSSPPSGWTSPSHSGKRSLDLNRCS

SEQ ID NO: 227451 - protein, 352 aa, unidentified
MAQSTGREVVLGVDTHLDAHMGVVIDGVGKVLGTLIAPAGIHGYQQLLQWSRSFGACTRAGVEGTGTYGAGLARVLRDAGIEVLEVNRADRSKRRLKGKSDPTDAENAARAVLSEEATAIPKLQSGVVEAMRAITVARRSAVKAKTQAINQLRSLLVTAPDPIRSKLMKSKPEHCVQACMRMRALGTTPLLEALSRTLRILAKRWTVLAAELRELDAMLEALARRAAHRMLERFGVGPYTAATLMVVAGDNPERLRNDAALAALCGASPLPASSGKTQRHRLNRGGSREANNALWTIAMVRMRSDARTRAYVARRTAEGRSPKEIQRCLKRYIVRELYPLILADLRDSAATS

SEQ ID NO: 227452 - protein, 383 aa, unidentified
MTKPYDLSKPLVALDHDSTLVCVIEMSGSSWLVAATVPGVDRLQKLPVNPTRLLEQVERWRKEATRAGRTITRTVVAYESGRDGFWLARLLQGHGIEAHVIHASSVAVSREQRRAKTDRLDTEMLMRALLGWLRREPGHCRMVAIPTVAAEDARRPGRERDGLVAERTRLTNTIKAELALWGIQGFKPGLRKAAEHLEALRTVEGESLPPNTLARLHRLLKRRSLLSEQITAIERSAAQAVERDPTGSNALILLLAQIKGVGLETAQMLVHEVLSRNLRDRRAVARYAGLTGTPDESGSKRREKGISKAGNPRVRRGLIQLAWRFLLFQPDAALVRWYRERTAGGTGAIRKTMIVALARKLLIALWSYASARVMPEGVVLKEA

SEQ ID NO: 227453 - protein, 349 aa, unidentified
MNESKTIAVDLAKDVFELAAADAKWRIVERQRLTRAQLSRYFQNRTPVEVVMESCGTAHYWARTFEGMGHRVRLLPPQYVRPYRRRNKTDRSDAAAILEAARSPEIKPVAVKNVEQQTIQGLHRVRSQWMTTRTARINVIRGLLRELGYPLPVGSHIVRRKAPEVLEQLPAPLRAAIDALLDEVRSLERRIQGIEDELEQFARRNAEIEKLREVPGIGLLTATALWAAAGSAAVFKSGRHLASWLGLTPREYSSGEQRYLGRISKRGDVYIRMLITHGARSVLARAKQLMRANRPLTRVQRWAVELEQRSGHNKATCALANKLARIAWALWRHNSNYDGAHVSQRAVTL

SEQ ID NO: 227454 - protein, 425 aa, unidentified
MEEKELEKPIRAWIGIDWADEKHDVSLYEVTTGKSEAATIRQSPEALQEWLGQLRSRYGDGNVAVVVEQGRGGLLNALMGCEFLVLYIINPKSLSSFREAFYGSGATSDPVDAELMREMVRQNPSRFRAWRPDNALTRSLRLLTEGRRDLVNQSTAVTNQLTALLKGYYPQALQWIGSLNTVWACDFLERWPTLQSLQSGSRRQVVRFYDKHPRPNVDLEAQLQEIQQARRLTDDEGVLEYSSLMVQALVSQLRTLLSSIADFDRKIAKLFQKHPDRPIFESFPGAGAVLAPRLMAAFGTDRDRFQAATEVQQLYGIAPVTEMSGKKRFVHWRFACPKFMRQTFQEFAEHSRRWCEWAKAYYQLQINRGKSHNAAVRALAYKWIRILFRCWQKRQPYQDDVYRTSLLQHGSPLASALQTCGKTTG

SEQ ID NO: 227455 - protein, 312 aa, unidentified
MQKIFIGIDIAKDTIDISVLPSGDKWSVGTTPAELSKTVDRLVALNPTNIVMEATGGYETRLAALLVTTGLPVAVVNPRQVRDFGRALGILAKTDAIDAHLIALFAEKVQPECRPISTDDERALKELLIRRRQLVDMRTAELNRQQQTNSQQVYNSITQLIDFINHELDTIEHEIDKRIKASPVWRAKEKLLQSVPGIGKVTASMLIITLPELGQLNRRQIASLVGLAPMNRDSGTFRGRRMITGGRASIRSGLYMPILSAVRYNPKIKQFYDRLIDAGKLEKVALTASMRKLLTMLNAIIRENQPWRSIPA

SEQ ID NO: 227456 - protein, 358 aa, unidentified
MSEITRVGVDLAKNVIQVHAVDAAEKVVTNKALQRDKFMLWCALLPVGCLIAMEASSSAHHWARKLVASGLDARIIAAHLVQPYRLQGKSGKNDANDAAAICEAASRPTMRFVAIKTVAQQGMLSVHRLREGLKEERTACTNRIRGILAEFGLVFAQSSQVLRENLSAVIEDASNELAGIARLVIERAKSQWDELDAHIEWCDQRIAAHIKQDEHARQAIQLLGVGPVTASAVVATVGDFRQFKNGAQFGAWLGLVPKQNSSGGKNNLGSITKRGDMYVRMLLIQGAKAAVQTAHRRDDPISKWAHHLREKSGWQKAVVALANKNARILWAMFARSKPFNAHHVSVKPVVPHAAMFAA

SEQ ID NO: 227457 - protein, 347 aa, unidentified
MKFYTNQHKYYCGIDLHTRKMYVCILDEKGEIKEHRNMKTDRDAFLKAIAPFREDIVVAVECIFTWYWVADLCHNEGIPFVLGHALYMKAIHGGKAKNDKIDSQKIAVLLRGGMMPMAYVYPEKMRATRDLMRRRNHLMRKRSELFAHIQNTNSQYNLPDSFGCMSRPKNRDGIIEQFEQPSVQQNIAVDMEMINTYDSVLSQLEKSIIKLANHHDPVSYALLQTIHGVGKIIALIILYEIENIRRFESVQDFASYSRLVKCAKESNGKKSGSGGSKIGNAHLKWAFSEAAVFFINGNDPAKKYLDRLTKKHGKSKALSILAHKLGRAVYFMLKNKEAFDQKKFLAV

SEQ ID NO: 227458 - protein, 278 aa, unidentified
MIKYIGLDAHSSTCTFNVTNEMGSEIDNITIETNGRLLVNYIRGIEGIKKLTFEECELSSWLYEILSPEVEELIVCNPVANGDYKKVKTDKMDARKLSKLLRGGFLVSVYHDGSERERFRSLMSGYQDLIEEGVRLKNRYKSLFRKSGKKVKGESVYNDKSFLEGLNRSDFKFIGSQIYELLEKMEESRQEYTKEIIRYGKRFKEIKYLKSIPGIGWIQAAKIVSQVIDPERFASKYKYFSYCGLVRHKRISDGKGYGSAKIWGNRILRGRGRNMIVL

SEQ ID NO: 227459 - protein, 367 aa, unidentified
MAEITRALIARVGVDLAKNVIQVHAVDAAGRKVVSRAIKRDAFLAWCAQLPPGCLVAMEACSGAHHWARRLRSMGLDARLIAAHFVSPYRKEGKAGKNDMTDAAAVCEAASRPSMRFVPIKTAEQQGVMTLHRVREGLKEERTACINRIRGVLAEFDLVFGKSPKVLRAVLADVLEDGSNELTGLARLVVQRAFEHWRELDEHLRWCDQQIGAHVRANDAARQAARITGIGEIGASALTASVGDFKQFRSGAQFSAWIGLVPRQNSSGGKTRLGRITKRGDDYLRTLLIQGAKSAVMSAAKRDDPTSRWLQALVERVGWQKACVAMANKNARILWAVMTREARFDPHHVSEKPPAKCARPPAEPCPA

SEQ ID NO: 227460 - protein, 329 aa, unidentified
MSIDPSAAAPRVTAGVDWAKDDHAVCVAGDQGEVLERFTVRHDAAGLKQLAARLLRAGALEIGIERSDGPVAGTLLAAGLAVLVIPPGQVKNLRSRYGSAGNKDDRFDACVLADVVRTDVRRLRPMERDSEQTAALRATVRARRDLVGHRVAAASQLRAHLQIVFPAAAALFAAIDSEITLAFLARFTTREQADWLSPRRLAAWLKSVACSGRTDPAVLHARLLAAPRGQAGEHARACAGTTLALVAVLRVLNAQIQALADSIAAQLDAHPDAVIFTSLPRSGTIRAARLLAEIGDARGRFPARDSLTCLAGVAPSTRQSGKVKAVTFR

SEQ ID NO: 227461 - protein, 328 aa, unidentified
MSDEVAGVFAGIDVSKARLDCAMLVGEAVTQSKAFDNDSAGHQQLLRWLQDNECRPCLIVVEATGGYESAMVATLATANLPIAVVNPRQARDFAKATGVLAKTDAVDARVLAQFGRAIRPQVRAPKCEELSLLEAVLTRRRQLVEMITAETHRRSVAPTRHIARQIDRHLRWLERQLQAADDDLNGMIGKSSLMQRKLEILTSVPGVGRVTAVALLAQLPELGRLNERQLSALVGVCPFSRDSGTMRGRRVIWGGRARVRAALYMAALVASRHNPILCAFYQRLLSNGKAKKVALVACMHKLLLILNAMIKRDQMWQPAYLHPGAQTA

SEQ ID NO: 227462 - protein, 379 aa, unidentified
MYIKSKSQDYNELGVILSIGLIDRNRRHLSTLLALKNGVRTVGGSKRSNHNPVQHLHYYLIIFIGTKMARTVFIGIDVSKETLDISINNKHQRIENVETAISEFIKSKMANVFVKLCVVESTGGYKKLVIKLLREHNIAVHRAHPNRVYAFAKACNHFAKTDKLDAKLLEKYAEFITKNDEVVEYIVSQKQEELKELRAVERNLNDEVHANKCRLHKVTGKAREYIEKQIEFAKKQLEQIRQDIEDIINSDPDLKEKSKLLTSYKGVGRKTASILLIEVPELGRLDNKEIACLVGVAPKTSESGRKVSKAQIIGGRFYARKALYMSAVVAMRHNKKMKVFYQRLVDSGKAAKVALVAVMRKIIICLNAMIKNNNFYLDV

SEQ ID NO: 227463 - protein, 331 aa, unidentified
MKYYGMDIHKKYSVFTAMDEKGNILEQGRIPNERETLAKVMSHTTGEAKVVIEATSNWYYLYDLLESMGNDVCLANPLQTKAIASARVKTDKVDATTLAHLLRTNLIPTSYIPSQGIREIRELLRYRASLIKMRTTVKNKIHALLIKNGLQHPFTDLFGRAGRAWLAELEIRPVYGNSLKGYLRILNSLEEEILPISREIKKMAPADPRASLLTTIPGIGNYSALLILSEIGDIERFPSPKKLVSYAGLNPSVHSSGDATRYGRISKQGSHWLRWILTESASVASRHPGKLQDFHRKIARRHGVKTANIALARKMLTICYYLLKNGEEYRE

SEQ ID NO: 227464 - protein, 340 aa, unidentified
MSLYGGIDLHANNSVIVLLNEQDKVIYRKRLSNDLPTILEQLVPYNAEIKGLVVESTYNWYWLVDGLMEAEYRAHLANPAAIQQYSGLKYTDDDSDARWLAHLLRLGVLPAGYIYPKAERAVRDLLRKRAHLVRQHTANVLSVQNILARNTGVRFSGKRIHELTKRELTTLLAEETQVLAVTSSLVVLDCLRHQIKMLEQSVHKRLHHTPSYEQVLTVPGIGPILAQTITLETGAISRFPTVGNYASYCRCVDSTKLSNGKRKGTGNVKNGNPYLAWAYMEAAQFAMRFQPEAQRFYQRKLAKSRHNTVLARKAVAHKLARACYYLMRDLVPFEATKAFG

SEQ ID NO: 227465 - protein, 390 aa, unidentified
MQPTQVQEFTRDDAVLAVSLELASKSWKVGLDDGRRKAPAVHGVDHAEPEGRLEEAIAVIEKVKKKWGLAPGVRVVVVYEAGQDGFWIQRALSERGYEALVVDPASIPVERKARRAKTDRLDAIRLVLALRAWLRGERDRMKVVRVPAVEAEGQRHLVRDRGTLQKEIGQHRDRMRKLLRTVGCWESMEGDLRGGLERGEVQGYGGSALPAALQERLVRECVRLKLVEEQLAKLEKTLPAQLPEAVRQRMVQLMQLKAVGPVGAQRLLLELFWRQFANRREVGACVGLVPQPYDSGESRVDQGISKAGNRRVRALLIEMAWMWLRWQPHSELAHWFAQRTRGSGSNKRSKRIAIVAVARRLAILLWRYLKHGVLPEGVQLKPAKVTLKAA

SEQ ID NO: 227466 - protein, 412 aa, unidentified
MKHPKMQYTYVGVDSHKDSHTAVFIDCFFEKLGEITFENLPSGFGDFFIAAEQFLMDGTVFLFGLEDTSVYGRTLLTFLRRNGQQVKHVNSLLVARERKNKNITLKTDAVDAECAARVLLSKFGELPDANPEEMHWLLRSLVARRAALVRQNVAAKNMLHSLLTQHYPNYRSFFENIDCHTSLAFYAKYPSPQLLEGTTVEELTAFLEIHSLKYFGLNKAKEILDTLQDTAVPFQEIRDGIVQSNVTQVKRNMEEIAQLDERLESFLEHFDCPLLSMAGIDTVSAAQILSCIGDIRKFPTPAKLARYAGIAPVTYASGKTDLQFANQRGNRELNSLFFNLALRLTMTAGPKRKVMNSFFYDYYHRKRAEGKTKRQAMKCVQRRLVNIIWTMLYNNEEYVNPPKYNVPSQDKV

SEQ ID NO: 227467 - protein, 433 aa, unidentified
MQDVEDEPLFCERVAGLDIAKAGVEVTIRVPSDTTAGRRQQETRGFGTTRAELESLGDWLACWGVTRAGMEATSGYWKPVCFALESRGFDCQLYNAAQVKALPGRPKTDRADSVWLARITERGSACSSFVPPEPIRRLRTHTRYRRHLTQARTAEKQRVEKLLEDGHLKLSSVISDIHGVSGRDMLSAIAAGPRDPKALAQLARGTMRGKIRRLEEALDCSFFTDQHAAALAMMLATIDHYTTQIQALTEKIEVLTEPWLSQAEQLDAVDGIGMVCAQDIIAEVGVDMTVFPTASHLVSWAKWSPQVKQAAGKRKGSNSTGRGNPCLSAALGEAAIGASRTHSFLGARYRRMARRMPKKKALVATGNSMLTIVHALLSDPAAHYTDLGADYYEQRMHTRRQARNHVKSRERLGYKVTIQAINPDTGELQAATA

SEQ ID NO: 227468 - protein, 365 aa, unidentified
MVVQHRQWDVSGQDVFVSLDVHKRSWQVAIMVNDMMHKTFRQMPDVTLLVTYMRRNFPGARYHCVYEAGYCGFWIHDQLRAHGIHCMVINPADVPTTDKEKRGKTNPVDARKLVRGLRNGDLKPIYVPAQVAREDRSFLRTRKLVVAKQTRCKNQIKAMLSFYGIAVPDDIAERHWPRRYIAYLEALKFQSDSGTIALQVLLKELAHHRETLLSLTRMIRQLATTEPYALHVRNLVGIPGISTLTAMILLTELVEMARFHSLDRLASYVGLVPGENSSGDDRTITGITARKNPYLRWILIECAWVAVHKEPVLMQAFAELTKRMTKTRAIIRIARKILNRVRFVLKNEKPYVSSCVSIEDLAIGA

SEQ ID NO: 227469 - protein, 381 aa, unidentified
MEKNIRFVGLDVHAETIAAAVVDPGSLVKSLGTIVHRPESVRKLMRRLGHPDQLRVCYEAGPTGYGLYWTLTGMGIHCDVIAPTLIPTKSGDRVKTDRRDAEKLAKYYQHGELTPVWVPDAEHEALRDLVRAREAAKTDQTRARHRLSKFLLRQDRRAPKGVRRWTIKYMTWVRREVKFDLFAQQATLEDYVAEVLHAGDRIQRLEQRIDDAIEEVPESTRAVIAGLQALRGIAKISAVTIVSEVGRLSRFARPKQLMGYSGTVSSEHSTGQRVRRGAITKMGNAHLRRVLGEAAWSYRYRPYVGPGLRKRQEGLPAEVVEIAWKAQQRLHRKYQRLLGRGKIKQQVVTAVARELTGFIWAIGVHLEQGLGVEVMPREANR

SEQ ID NO: 227470 - protein, 342 aa, unidentified
MPTPTPSERLFVGVDIAATSFAAAWSVNGAPPQRARTFAQTPDGFAAFQAALATTGVETAQILIVLEATGSYWITLAVTLHQAGYVVSIVNPAQVHAFARSLPRRAKTDLLDAQLLTQFAAERQPPGWTPPAQVYHELRQRLLVRDGLLTMRQQARNQRHALHQWPVQIAGALDQLDAVIADLDRRIATLDAELTIVLRDGAWAQSAALLRSITGIGLVTTAWLLVATLNFAACASAERAAAYAGLVPLAHESGTSVRGRAQIGHSGHARLRTALYMATLSAARRNPVIRAQYERLRAAGKPPKVARCAAARKLLHLAYAVATKGEPFNPHYGTARGAAAGG

SEQ ID NO: 227471 - protein, 373 aa, unidentified
MKKSTRFVGLDDSKDFIQVAVADGGPGGEVRDWGVIDSGPDALAKLVRRLGSPEILDFAYEAGPCGYGTYRQLLGLGARCVVAAPSRTPRKPGERIKNDRRDAIALARLHRAGELKPVWVPDTETEAMRDLTRAREDAKYAETRARQRLQSFLLRHARRYPGRSSWTKQHHRWITEQRFDHPSQQICLEEYLATVEEAGRRVARLEGQIRALVPKWSMAPVITAMTAHRGVNLLVASTIAAELGDLTRFDRARPVMGFVGLVPSLSASGQGRHTGSITKTGNAHVRRCLVEAAWAFRHPARRTAHLKRRLDGQPAAVQDLAWKAQVRLCGRYRRLTARGKQHNKVICAIARELIAFLWATARLVDAPMTATAF

SEQ ID NO: 227472 - protein, 353 aa, unidentified
MTSEKYVGLDVHKATIVAAVQDGSGKCLMTSVIETKAETIRAFIKGLTGTVHVTFEEGTHATWLFDLIKPLVAEVVVCNPRHNALLQSGNKSDKIDANKLADLLRTGMLKPVYHDAHGAQSLKQLAQCYETLVSDNIRVKNRIKALYRGRGIDCSGNGVYCESQRKEWVAKLEEPGARSRAQLLYTQLESVKKLRRQARTEMIKESRRQGACKLLTGVPGLGPVRVGLILATVVTPFRFRTKRQLWTYVGLAVVTKTSAEYEFVGGQLRKRNKPTSTRGLNRNHNRRLKKVFKSAALDAIRTEPFASYYRDLIEKGTSPEIARVNIARKLAAIVLSLWKRGEEYDRQRMKKSA

SEQ ID NO: 227473 - protein, 385 aa, unidentified
MEDCSSETKQCEYFTESREVTTDRFLCFIGVDLHKTTVTLRAVDPDEEIISSLRTHTQCVNKIEKWINELPEPKWMAVEAVSFTEWFIDRYRDCVDRIDIADATELARRRGKRRKTDRNDALDVAVRLVRGNCPLGYIADESLMYLRKLGRHWRQLSKILTRSKQCMRSILDAANIHGPKISGATAQAWILGHGDLLKDVQRESLANFIDVISMLERQQETLRRKIIFANRSEEFSARITMLKSIPGINDVWACIIAAEVGPFDRFPNADTIEFWAGLTPDNKESAGRTQSGRITKAGSQTLRWALCQAAVALCRSDVRQDAVKQRLVKRAGKVKANVAMGRRLLRIIYAMMRDGTLYERNEPTDRLKRNIKKTRYVKRKKREVA

SEQ ID NO: 227474 - protein, 343 aa, unidentified
MRHYAGLDVSVKETSVCIIDESGKVCRETKVPSHPEDLARALHDRAWCLERVGLEAGPLSQWLFSGLAATGLPVVCIETRHTKAFLQAQVNKSDRNDARGIAQMMRVNLFRPVHVKTLTSQKRRALLTARKLLQEKALAIDNDIRGLLRNFGLKVGPIGASKFETRIRELVEGMPELAEIIDPLLEARRKLRELFAVLHRKLLVIVRDDTVCRRLMTVPGVGPVVSMAFTATIDVPARFKSSKAVGAALGLTPVLNQSGESKRIGRVSLCGDGMTRTLLYEAAQVMLTRTTKWSWLKAWAMKVAARRGLQKAIVALARRLAVILHRIWVSGTEFRWTRDAQST

SEQ ID NO: 227475 - protein, 425 aa, unidentified
MSDDVMIAVDPHKASNTAAVLDPVTKTVIEVARFANSVDGYSRLAGFAARWEHRRWAVEGCHGAGRFLAQRLVADGELVLDVPAKLAARVRVYSRGHGRKTDRHDAVSVGLAALDGTGITMVTGDDALVSLRLLCDRREELAAQRTQAVCRLHRLLAELTPGGMRRELSANKAQALLARIRPANDVGRVRVHIARDHLADIRALDARLKFIAAQIAALVTASGTGLTGLYGIGPVIAGRILAEVGDVARFATKDAFASYNGTAPIDVSSGDQIRHRLSRAGNRRINHALHMMAVTQIRNPDTPGRLYYERKRLEGKTGKEALRCLKRRLSDLVYYQLIADRHGTIGTCGSPTTPPPTRSTSISPATRSREAGPPSRPPHRPAPKGSSRSTGKTTASSESRSSTPAPASTTTSSKRPKSIVKTATS

SEQ ID NO: 227476 - protein, 309 aa, unidentified
MATSSYVGIDVSKDRLDIAVLGEKQAWQVENTCKGIDGLVQWMQELQPELVVVEATGGYQRSVVDALFQAGLSVTVVNPARVRQFARACGLLAKTDKLDAQVLAVFGQRVQPKRYEGKSEAEKQLSALLVRRKQLEEMLKAEQNRLRTVAPNLRGSVERIIAILKEEKKRLEEQIEQFLNEQKAWQEQREILSSAPGVGKVTTATLLADLPELGKMDRMKIAARVGVAPMNYDSGKKRGYRKTKGGRGDVRSVLYMSTLVATRHNPLIRAQYQQLLKRGKLKKVALTACMRKFLTILNAMVRDQQPFRM

SEQ ID NO: 227477 - protein, 382 aa, unidentified
MRTVSGLDVHKDSIFMCILDEQGKKTEEKFGVTTREIKRMGLVMRSFYVSDVCMESTSVYWMPIWRLLEHDFQLHLVNPLFLKQLPGRKSDVRDAEWIATVLLKDLVKDSFVPDGNIQHLRQYGRRINELDRDIVRSEQRVDMILQRCNIRLSNHVSRTKNKSYRKVVDALIKGETSADALVKLIHGRTVNRHGKSLVHDSLEGCVAQSDRDLLKQYTQMTDMYETQKQQCIEAMVEMCQELYNDAFLFLLSIPGVKRLSAAIIISEIGDNMELFATAAALVSWAGLRPRNDESAGKIKSRQITHGNKYLRKALMECAWGAARTKDSVFYCRFWHLKGMKKHHNAVIVAIARQMLTIVWTLLSRKEYFDKSYQLTKKASLER

SEQ ID NO: 227478 - protein, 401 aa, unidentified
MFCGWDWGSTHHGVCVIDDDGAVVKRWLIAHTDNELGRLFGELVEFGETDALPIAIERGEGLIVGLIAGAGHPVMMVEPSAFKAARPRWGSAGAKSDLGDAFMLADYARTDGHRLRRVEPVEQATRELGALVRARTSLVEARTAASNQLWAVLAEHWPGAGVVFQKLISPIALAFLTDYPTPESAARIGEGRMGQFCRRHAYRGGKSPAELLGHLRAAPVSANPIASTVLATIIRASVAQIRLLNAEIARIERGGLAAALAAHPKTALLETLPRVANVSLAQLIAEVGPLLERCDNPEQVAAMCGAAPVTRASGKSHTVGFRYAANKPARVAITGFADNSRHSSAWARDSYRRARARGARHPHAVRIVARGWIRVIWACWNTDTVYNPSRHAGEQRLAAST

SEQ ID NO: 227479 - protein, 411 aa, unidentified
MIKPDQLIYVGVDLHKEHHTAVIIDCWNRKLGEIKFDNKPKAFPLLVKEVKRHTKNNLSVVYGLEDVGGYGRALAVYLTEEKHWVKKVNPKLSNARRKSHVTVQKYDSWDTECEARVLKDELHSLPDAKPIDLYWAISQLVMQRRWQSRDLSATVKRLHQQLGYHYPSYKKFFSEVDGKTALAFWESYPSPHWLKDVSVDDLAQFLRSHSNNGLSTKKANQIISLIKADGDTYRDYQDSRDSIVLAYVRTIAFLKKELVRVEGEIAGLMKQLGFQLETMTGIDVITAADLIAEIGDIHRFSSPNKLARFAGIAPVTVGSGNKHRNHKSKQGNRVLHDIIKSLAVRQIAVTRGKREPRNPYFYAYYEQKLSAGKTKQQAIVCIMRKLVNVIYKLLKTKSAYIIPDVSIKEAG

SEQ ID NO: 227480 - protein, 343 aa, unidentified
MTVVTVGIDLAKNVFAVHGVNAAGKAVLVKPLVRRAKLLELIATLPACLIGIEACTGAHYWAREFQKMGHTVRIMAPQLVSPYRMSGRHGKNDAADAAAICEAVTRPNVRFVPIKSVEQQGQLFVHRAHQGYVSERTALINRIRGLLSELGIVLPQAFKAFLSGVAQVLEDMPGYCNQVIGDLLNELYHIEEKIKNSEKLIQQLARDNSAAQLLMQFRGIGPMTATAIVASIGNGHDFKNGRQFSAWLGLTPRQQSSGGKARLGRITKAGDSYLRTLLVLGARSVLLGAAKNDDPVSRWALQLKERRGYGRALVAIAAKNARMCWAMLHLRDEFRFPAWFTDY

SEQ ID NO: 227481 - protein, 325 aa, unidentified
MAIVVGVDIAKKTFDIAVLQSNGKYRTKGNLSNDQSGFSVFDQWLQKHAEPGAWVVMEATNIYHEALGDYLLARGYRVCVMNPARIASYAQSQLQRVKTDKVDAKLIALYGARHAEDLQLWQPDPVSVRQLRALVRRYEELKELFQMEINRLETAKSDVVKESILSVSAHLEQQIEQTLEAIRQHIDNDPDLRGKRDLLTSIEGISDKTAALLLAELGSISRFESARAVVAFAGLNPRLRESGQHKGQVRISKIGSRLLRAGLFMPAICAMSHNQAIRALRLRLEEKGKAGKQIICAAMRKLLQIAYGVLKSGQPYNVELALARG

SEQ ID NO: 227482 - protein, 457 aa, unidentified
MSRTKRPRKLGDFSTVNPAAAAIDIGATIHVAAVGPIRDQEPVRTFRTFTDDLYRLADWFAECGIRTVAMESTGVYWIPVFEILQQRGFEVIVVNARDAKHVPGRKTDVSDAQWLQRLHEYGLLRASFRPQAEIAGLRAYLRQRERLLDYTAAHIQHMQKAMMQMNLQLHHVVTDVKGLTGMSIIRAIVAGERDPNVLATHRDRRCHASVETVCQALVGNYRDEHVFALTQALELYDVYQTKVTACDEQIEAILKRLKKNAPPPAGKLLPVRKRTRQPNAPAFDARAALHAILGVDLTQITGLGPSLALKLAGECGTNLAAWPSAKHFTSWLALAPHNKISGGKVLSSKTRRTSNRAASLLRLAAGTVGRTDTALGAFYRRLLARIRKAKAITATARKIAVLFYNTLRHGMSYADPGATYYEERYRQRVLHNLQRRAKSLGFALTAAPSDPIPVVVS

SEQ ID NO: 227483 - protein, 431 aa, unidentified
MRSRAYGSVAVNGVDAQRLCEGRENQELVVGVDIGKYRTMAVGRWPDGKFERPWKVKNPEELPQLAELLGRLARGRRLVVALEPSGTYGDALRQTLDDAGLAVQRVSPKAAHDYAEIFDGAPSQHDGKDAAVVAELAATGKGKSWPYEAPTAWEQELNYWVERMGWHHRIQVMGLGMIEGMLGRHWPEATRVLKVSSGTLLRVLARYGGPAGLVTDAEAAARVKRWGGRYLSSDKADELLACAQSTMGVRQGEWDRRRLQEQAEQTRQARLEVGRCKRQLQRLARGHGVLEPQGRVVGVATACVLWVCTGDPRHYHCAEAYRKAMGLNLVERSSGVYQGKLKISKRGHPQSRQWLYLATLRLVQQAGVQHWYQAKKARDAQEARRALVAVMRKLALALYHIGIEGGRFDARRLFKRVDPKAVSKPVSLPQA

SEQ ID NO: 227484 - protein, 364 aa, unidentified
MINVVWVGGSHKHQLEKRSMKHYAGLDVSVKETSVCIMDEAGTVCREVKVPSHPQDLVRVLKHPAWRIERIGLEAGPLSQWLFSGLAEAGLPAICIETRHTKAVLKAQVNKSDRNDARGIAQMMRVNLFRPVHVKTLASQKRRALLTARKLLQEKAIAIENDIRGLLRNFGLKVGAAGVIKFEERVRELVEGMPDLAEIMASLLDARQKLREQVRKLHRKLLSIVREDKVCRRLMTVPGVGPVVSLAFTAAIDDPARFKSSKAVGPALGLTPVLNQSGESCRVGRISQCGDGMMRTLLYEAAQVMLTRTIKWSWLKAWAMNVAKRRGRQKAIVALARRLAVIMHRIWCDGTEFHWTKENAPALP

SEQ ID NO: 227485 - protein, 429 aa, unidentified
MNNNRKKRINQVDKDTLIVGIDIAKNKHAARAQDFRGIEHGKVRYFLNREHDFERIKRWILKLAKKASKEDIVIGLEPTGHYWLPLFKYFTASGFKVVTVNPYHVEKSKELDDNNPTKCDKKDALVIAQLVKDGRYSTPNLPEEKYAELRVAINHRERLMKNLNGVQNRVIRWLDIYFPEFSNAFKDWEGKAALSTLKNLPLPEKINQKEVKEIVNIWREAGIKRGVGKKRAKKLKKCAQRSIGLQTGKKMAELEIRNLLKQYEQLSKQLEDLEEKIEKILKEIPGAEEMVSIPGVSLMTVAGFLSECGNLDDYNHPKQIIKLAGLNLMEHSSGEHKGETRITKRGRPQLRSLLYRVSMPLVRHNDEFSQIHEYYKNRSQNPLEKKQSLIVICCKLIKILYTLGTREIEYDGEKMLNDIKRPKGYKKAV

SEQ ID NO: 227486 - protein, 463 aa, unidentified
MARNNKGKKHKKSIRSLETIQPDAAGIDLGSREHWVAGPPHKDNTPNVQRFGTTTPELLRLADWLKEQKVKTVAMESTGVYWIPLFEILDSRDFEVILANARQVSHVPGRKTDMLDCQWLQLLHACGLLRGSFRPSDDICHLRALLRERNTMVDQRSDWVRRMQKSLDQMNVCVHHAVSDITGVTGMAIIRAIVDGERDPRTLAKMRDRRCKKTEEQIAEELTGNWRAEHLFNLRQALKMYDQFCQVVSEYDAEILAYIKSLPFSVDDDQSAPPPVSKSKAREIAKKGQEPMRQALFQLTGFDLTTIDGIGVDTAAVITSELGFDFSAFPDEGHFVSYLRLAPNLSISAGKKVPSKIKGTTTSRVAGALRMAALAVRNSKTALGAYYRRISRRKGASVAVFATARKLAQIIYRLVCYGQAYIDIGAKAYEAQFNNRRLKYYTKALNDMGYKVKPLAAEEAQAA

SEQ ID NO: 227487 - protein, 403 aa, unidentified
MNMNAVGIDVSKGKSMVAILRPYGEIVSSPFEIKHTSSNIQSLIERIKSIEGNSRIVMEHTGRYYEPLARQLSLAGLFVTAVNPKLIKDFGNNSLRKVKSDKADAVKIARYTLDNWIDLKQYSLMDELRNQLKTMNRQFGFYMKHKTAMKNNLIGILDQTYPCVNTFFDSPAREDGSQKWVDFATTYWHVDCVRKLSLNAFVGHYQKWCKRRMYNFSKDKAEEIYGAAKELVPVLPKDDLTKLIVKQAIEQLNTASKTVEELRTLMNETASKLPEYPVVMEMKGVGPSLGPQLMAEIGDVTRFTHKGAITAFAGVDPGVNESGTYEQKSVPISKRGSSSLRKTLFQVMDCLVKTKPQDDPVYAFIDKKRAQGKPYYVYMTAGANKFLRIYYGRVKEYLMSLPE

SEQ ID NO: 227488 - protein, 335 aa, unidentified
MEITTIGLDLAKHWFQVHGVDGNGHVVVRRRLWRSGVIPYFRSLEPCLVGMEACATAHYWARELTALGHRVKLMPPAYVKAYVKRNKNDAADAEAICEAVTRPSMRFVPVKDAEQQSVLMLHRARSLLVRQRTMLVNALRADMAAFGIIAPQGLRHIEILTKTIAHQQKRLPELARSILQTIVDQLNGTIARVQEIEVHLAKWRQHSRISCLLATVPGVGIMGASAIAATVSDPSLFRSGREFAAWLGMTPRQNSSGGKERLGRTSKRGDKSIRSLLTHRRGCGAAPCPQSINPRRRVGPRSAGAQTDQTCCGCTGPTRPLASPGRDDARAWLPT

SEQ ID NO: 227489 - protein, 313 aa, unidentified
MAQAGVYVGIDVSRDRLDVSIGAGGEVWQVGNDGTGIRALRERLAVLAPERIVVEATGGLERAVVRGLDKTGLPVVVVNPRQVRDFARATGRLAKTDVIDAGVLAWFGEALQPAVRLLPDAQAEALREVVTRRRQVVEMLTVERNRVGQTTSLVRRQVKGHIAGLQRQLVALDRELAQLLQANPVWRARDTLLRSVPGIDPVTASMLVAALPELGRLNRKQIAALVGVAPHNRDSGSYRGKRSVWGGRAAVRTCLYMATLVATRRNSVIQSFYARLCAAGKPKKVALIACMRKLLTILNRMLHTNSPWQPVTT

SEQ ID NO: 227490 - protein, 321 aa, unidentified
MKPSLGLDMAAASFAACLWFGATSHARADFPNTRTGFRRLSAWIKSHGLGSLRVGIECTNTYGQAVAQWLFAQGHQIYLLNPERTSHYARARGQQNKTDPSDALNIAAFVALHELTAWQPPSPEQAALCALTRTRADLVSLSQQLANQLRTAAPASQPFLKSSLQHLKLQICAIEKTIRQHLKEYPSLNDKVQLLRSIKGVGWLTAVIAIAELPNIDQHSDARAICAWAGLIPKRWQSGKTELPSGLSKRGNKHLRQALFMPALVAKKYNPLLHAFAEKLRSKGKRPGAIVGAVAHKMLRIIVGLLKSNSTFDPNWVLNKN

SEQ ID NO: 227491 - protein, 331 aa, unidentified
MAKRVFQIHAASKDGRPVLRKKVSRARLLGFLAKQPPAIVAMEACATAHEWGRAISGLGHEVRLVPPIYVKPFVRRQKNDAADAEAIAEAASRPTMRFVALKTEEQQARSMIFRTRDLLVRQRTQLVNALRGHLAEHGIVAAHGLAKVKMLATALLDTGSLHPLVCELGQRYLDHIARLDVEIAELDKRLRRSSKDDETAKRLQSMPGMGPITAAAIEAFAPPMATFKRGRDFAAWLGLVPRQHTTGGKPRLGRTSKMGQRDIRRLPIIGAMTVVRWAVRKGAARGSWLARMLAEKPRLVVAIALANKMARSVWAMLSKGEDYRGSALAPA

SEQ ID NO: 227492 - protein, 411 aa, unidentified
MSQMLVGIDVSMRSNHVQFMDESGKSLASFAISNDRIGADTLVQKVISTANKTNCATVRIGMEATSNLGWHLAHYLKCRLNDSPTNAQIYVLNARKVARFKKGYDCLPKTDRLDAWVIADHLRFGRLPQEMKDSVQYEALQRLTRTRFHLMQNISREKTYFLNQVFLKFSGIRQDNPFSDTFGTTSLAVIQELEPEQIATMPLEELINFLQDKGKNHFENPEETAAYLKKLARSSYRLDKTMADPVNLSLSITLSVIQHMESQLKKLDKEIAKLMRDIPQTLTSVKGLGPVLSAGIIAEIGEIKRFDNHNALAKYAGLAWNKYQSGEFEAEDTKRMKTGNKYLRYYLIQATDSVRKNDPEYRAFYQKKYAEVPKHQHKRALVLTARKLVRLVYSLLNTRQLYTPSDRRDLD

SEQ ID NO: 227493 - protein, 316 aa, unidentified
MSLYNNFIGMDIGKCSFVVAVNGQKETKEYNNTTQGIKEFIKDYKNIFGQSLCILENTGGYELELLYTLCGHKIAVHRADTRKVKNFIRSYGNSAKTDKLDAKALAKYGAERKSLLELFTPQSKQALNLFELVRRRQDLKKILVAEKNRLQTPSVSIIKSSCKKIIKAITGQIEAITKKIKELIDSDPILKQKQEILKTIPGIGDIIAFELLILLPELGSLDRRKIASLSGLAPMSNDSGKHQGYRKTYHGRNEVKPILFLAAMAARCSKSELRGFYENLIARGKKKMVALTALMSKIVVIANARLRDFYNEKRMI

SEQ ID NO: 227494 - protein, 392 aa, unidentified
MTKEDFIYVGIDLHKETHTAVMIDCYNNKLGEITFPNRPADFPKLVTKVKKCNTDAKEVVYGLENAYGYGRALAVWLIDKGYFVKDVNTAISHRQAKHRGAMYRKSDSDDAEAIALATLNMLDKLPDACPNDAYWSLGQLVHRRDNIMKQRTRLVNQLHEQLCIAYPSYKSFFNDISRPTALYFWEHYPSKKYLKGKSVEDLRAELVPVSHNKCSTKTCEKILDAVASDKVKNNAYQDARDMVTLSIVSDLQHYDSQLTEVDKMLEQMYKMLGCTLTTIPGVNVITAVKILAEIGDIKRFANANKLAQFAGIAPLHLSSSGKGKDVATKQGNRRLQATIYFLAIQMVQLSSKGTPRNPVVRAYYEKRKAEGKTSQQALICISRRLISIIYGM

SEQ ID NO: 227495 - protein, 367 aa, unidentified
MKKISTAGVKLTQNVSEQKLTIGLDLGDRSSWYCVLDEAGEVLLEQRLGTTRQAMKEAFGGMPRSRIALETGMHSPWVSRGLSELGHEVIVAHARNVRLIGESRKKDDRLDARTLARLARIDPQLLSPVKHRSAKAQADLTVIRARAGLVRSRTALINTARGLSKSYGERLRGCNPRNMNPEKAESLSPELQAALEPLLAAIESLSERIHEYNQQIEKIARESYPQVARLEQVKGVGTLIALTYLLTLEDPHRFRKSRDVGCYVGLQPGRRNSGKSEPQLHISKEGDPYLRTLLVQGAHHILGPFGADSDLRRWGLKLAERGGKNGKKRAVIATARKLAVLLHRLWVSGEAYEPLRNNHPSEMPTAA

SEQ ID NO: 227496 - protein, 409 aa, unidentified
MLFVGNDWAEAHHDIEIENGDGQVLARRRLPEGIDGFAALHALVGDHLAEDEEPEQVLVGIETDRGPWVQALVAAGYTVFAINPVQVARYRERHGVSGAKSDPGDAHVLAEIVRLDRAHHRPVAGDTVTAQQVRLAARAHQSMIWMRQRSANTLRSLLRECYPAALTAFGGDLAGRDALAVLAAAPDPAAGRRLTQARVVGLLRRAGRQRNLESRAGEIVTALRSEQLPVPAELAVVNAASVSALVAVITTMVAQTEVLEEQVRLGFGQHPDSEVYLSQPGLGTILAARVLAEMGDDPNRYADARARKNYAGMAPITRASGTKRVVLARYARNRRLADALSQQALSALSASPGARAYYDRHRARGATHHQALRALGNRLVGILHGCLRHRTNYNEDTAWPAPTAEAAAA

SEQ ID NO: 227497 - protein, 380 aa, unidentified
MTTTQTVLRGKDTADGGDLYMSFELGDKHWQMSIGDSRRRVSRYTVGAGDTAAVADCIVKAGARLRTGAQARVHSCYEAGRDGWWLHRWLSELGVDNIVVDAASIEVNRRARRAKTDRLDADKLLAMLIRHHAGEHVWSVLREPSSEDEDARRVHRELQRLTHERIAHTNRIGSLLVLHNLRPRIVIGGRDWAAWWDRHRDQVPPMLRAEIEREGARLKLVKEQVRAVEAARCKDLAEGKQPLVAHLARLRAIGPKGAWVLVKEVFGWRHFANRRELAGSLGLVPTPYASGDSEIEQGISKAGNRRVRGLLVELAWSWVRLQPGSALTQWFNRRFAGTGKRMRRVGIVALARRLVITLWRYLQDGEIPVGAHLKPAVAHA

SEQ ID NO: 227498 - protein, 391 aa, unidentified
MIFVGIDVAKDKHDCFILNSEGTVLADVFTIANNRIGFETLLSRIQSCSRGESKIKVGLEATGHYSYNLLGFLLDSGLTTYVINPLHTNLYRKSLSLRRTKTDRIDARTIAMMLMSDVDLKSYSNTAYHNEELKSLTRYRFDKVKERAKLKSSVARLVNILFPELEKLVSSLHIAVVYALLSNYPGASYIANANTEELAETLCTASKGRYTKSKTAEIQVAAGVSIGSKMPAKSMELKHTIALIRELDKEISEVESAIDKITSQMDSPIFTIPGIGRHMGAMILAEVGDFSNFASADKLLAYAGLSPSTYQSGQLQNCYAHMEKRGSRYLRYALFNAAKYVCLWCPTFSAYLEKKRSEGKHYNVAISHASKKLVRLIFAMQRSGKAFLADY

SEQ ID NO: 227499 - protein, 361 aa, unidentified
MRIIGCDLHARQQTLAMLETTTGEVVNVTLMHEGNEVRDFYSQLPRPVLVGIEATGSMQWFLNLMEELGIECRVGHPATIRAAEPRKQKLDRRDAELILRLLAENRFPAIWLPRKELLDLRALLLHRHQWVRIRTRIQNALQAIALANGLRRGPGLWSYDGQAKIAFLPLPPHASYRRSALQALYRQMAEEIENLTKQVAEQAEQRSGARRLMTHPGVGPVTALATDVFLGDPGRFVDGKALASYVGIIPREYSSGGTQRFGGVTKQGSPLLRFLWCEAGAHAVRRDPALQRFYRRKLVQKGLGKARVAVARKLGIRLWIMLRDEIDYEEFCRRGQKPQSGAACAGMLEVGNGANRHRPID

SEQ ID NO: 227500 - protein, 383 aa, unidentified
MHKGGAACRSSPIIRSAVTRTLAQPARAGKHYSLFAVLDHRGRPVEQTRVNHEPGAIRAFVSRFPPGTPVALETVGNWYWIVDEIEQAGCVPLLAHAQMAKKMMGHVHKTDKLDAQGLAILQHLGSLPTVWIAPAEIRDERELPRTRMALSKVRTMLKNRMHSTLAKYALSLDTQSDIFARKWRPQLLDLLQRLPSQTERCMHQELELLDQVQTHIGQLEARILEQVKLTPSMQLIQSVPGPAEILSIVIDREVGSIDRFPSPHHFASYSGLVPKVKASGGKTHYGKMIKAANNYLKCAFIEAANVVVRQQHHPSWRQKYVVALFERTRQRKGHAVAVGTVARYLAEATYWVLKKGEPYREPVPQHPVGRKSAVSPKQGQVPT

SEQ ID NO: 227501 - protein, 411 aa, unidentified
MEKVYDKCCGIDVHKKLIVACFKKGNTQEIREFGATTRELLEMADWLKDGGCEMVAMESTASYWKPLYNIFESSDLNAIVVNARHIMAVPGRKTDVKDAEWIADLLTHGLLQASYIPDKDQRELRELVRYRKSLVGERNRELNRLQKMLEGANIKISGTITDINGKSARNILEHILSGKQIDSVEYDILYEKKVIAHNLKASKEQIIDDLNGVMSDIQRKMMRLLLKHLDELNAIIKELDDDIDSFIKPQEKQAAKVIQDIPGIANTSAQAIISVLGTDMERFPSDRHLASWAGLCPGDNESAKKRKSGKTRKGNALLRETLVVCAHSAVRNKKSYFYAQFMRISAHRRKKRAYVAIAHTILIAIYHILKEGVTFKDLGADYYNQFNKERKINAYLKKLKALGWEAPVVAA

SEQ ID NO: 227502 - protein, 366 aa, unidentified
MLYLAIDLHRKQMTINLRGEDGEPILRRQVSTWGEESRTFLTDVQQRAAQEGFVAILEVCGFHDWLTELLPQFGCREVVLIQAEKKSSRKTDRRDANQLGELLWLNRGRLLAGRKVQGLRRIVPPRPTEREDRRLTQLRYNLTRDLTRTINRVKYILRRRNIEQHCPTKGIQTQAAKAWLKTLSLPPLDRLEMDQLLARWTALTQQRDQLDRRIVERAALDPRVQWLRTVPGASHYTALALACRIGDIGRFPTPRSLANYWGLTPRCGSSGETERLGSITKEGSALARYLLAQMVLHVLKRDARMREWFRRIKQRRGAKIARVAVMRRLTVIFWHMLKKQQPYKIAAAATRRAKSPRVAKSAPGNS

SEQ ID NO: 227503 - protein, 347 aa, unidentified
MRFYNTQHPFYCGIDLHARAMYVCILNQAGETLLHRNMKTTPEAFLKAIAPYRPDIVVAVECMFTWYWLADLCADEEIPFVLGHALSMKAIHGGKAKNDKIDSQKIAVLLRGGMLPQAYVYPAEMRATRDLLRRRMHLAHKRGELLAHVQNTNSQYNLPAIGTNIADKANRDGVAERFADPAVQKSIEVDLARISYYDELLRDVELTIVKTAKQHDANTLYLLQTVPGIGKILSLVLLYEIHHIDRFPRVQEFASSCRLVKCAKESNGKRSGTSGAKIGNAHLKWAFSEAAVLFLRDNPAGQKFLARLEKKHDKGKALTILAHKLARAVYYMLKRKVAFDMKRFLND

SEQ ID NO: 227504 - protein, 446 aa, unidentified
MLEIEDEGHEQILERVAAVDVAKAPGMVCTRVPHPARPGRRRTLVWPVDATTNAILELAGHLVAERIQKVTLESASDYWRIWYYLLEAAGLDVQLVRARDVRAAPGRPKSDKLDCVWQAKCTERGLLRPSFVPPAEIRALRDYTRLRIDLTRQRTRHYSRLEKLLEDALIKVSAVASSIDTRSVRDMVEALIAGERDPQILAGLARGPMKARHDKLVQALTGRFDAHHGELARMLLDQTDALTAQITRLTTRIQELIAAIPEARGVDPDGTTGPLAGRVPGSPVLPAIDRPGEITGIGREATWVIIAEIGLRMEAFPTPGHLVSWARLSPVTMQSGSRSRSAPAGKGNPYLKGVPGSAVAAAGRTDTFLGQRYRRLARRRGKLKALVAVARSILVIVWHLLSDRGARYYDLGGDYYTSTIDKHRKTRSHVRQLEAPGYTVTLAPAA

SEQ ID NO: 227505 - protein, 465 aa, unidentified
MSGKRKSSTKQRTVKAMSLPAVRPKVAGIDVGSREHWVCGPASDDGEARVRAFGTTTSELEALVEWLLAQGVESAAMESTSVYWIPLYELLEARGIEPVLVNARQLRNVPGRKSDVRDCQWVQTLHSHGLLRGSFRPDEAIVRLRALQRQQANFVEQRTRCVQWMQKALDQMNVQVHHAVSDITGETGMAIVRAIVAGERDPHRLAAHRDKRCRKSQEEIAEHLRGNWREEHIFNLQSALRLYDAIQQTIASYDQRLLKEIEALQPPERQDEPVPPHPNPVKEKAIRSRREQPLRTTLWRFSGADLCRIDGLSGGAARVILTEVGPNLAAFPTEDDFVSWLRLCPRTPITGGKPIKKRRQGLGANRIAGILRMAALSLQRSKSALGATFRRYARHKGGAVAVFATARKLAQLVYRTLRYGHVYTDIGEAAYELQFQTRRLAALKQTAKSLGYELVPTPQLDPAPG

SEQ ID NO: 227506 - protein, 388 aa, unidentified
MKKRTTRASGTESTATNSDGAERAAAHRLVKASPGVGPNRTVGVDLGDRTSHFCVLDEGGMVVERGKVQTTREGFRKRFEGVTPMRIALEVGTHSPWVSRLLKELGHEVLVANPRKTRLIYENRGKQDSVDAEALARIARLDPKLLYPVEHRPESVAQDLAVLRARDALVRTRTLLVNHVRGAVKATGYRVKKCSTRTFSDQAVDQIPPEVHEALSSVLTTIEVVSTQILALDRRIGELGKKKYPETALLRQVGGVGPIVALAYVLTLEHPSRFQKSRAVGPYLGLVPARSQSGDSDPQLRITKEGDSFLRRLLVQSAQYILGPFGEDCDLRRFGQALSVRGERNAKKRAVVAVARKLAVLLHRLWRTGEVYDPLRKAGTPQEAAVAA

SEQ ID NO: 227507 - protein, 315 aa, unidentified
MSDQRKVVGIDVSKAMLDCAVMPGKLHFQVANDVAGIAQLIERLHPLKPDLVVLEASGGYETAAAAALAGALFRVAVVNPRQVRDFAKATGKLAKTDRIDAQVLADFGVAIDPQVTPLADEDTKALQGLLARRSQLVAMRTQELNRLAQAASAVRLQIKDHITWLNEAIRKCDIDLTAKLRSSPVWKAKENLLRSMPGIGAINSRMFMAGLPELGQLNRQKIAALVGVAPFNRDSGKFKGHRSIWGGRAHIRQALYMAALTAKRCNPVIRTLYERLSARGKPHKVVMVACMRKMLTILNTMAKNNTDWNPNIKTA

SEQ ID NO: 227508 - protein, 421 aa, unidentified
MEETQERENIIERVAALDIGKAELVCCVRVPGRAGATRRVQEVKTYKTMTRALLIMVDRLTELGVTRVVMEATSDYWKPPFYLLEAAGFETWLVNAKDVKHLPGRPKTDRLDAVWLCKVAERQMLRPSFVPPPPIRLLRDLTRYRWDQVAVRTAEKQRVEKLLEDAQIKLSAVVSDIFGMSGRDMLAALIAGQRDPKVLARFARGRMRAKLTVLEDAFTGRFSEHHGFLLAKMLARIDTISADLVEIDARIDAEMAAFADAAACLDEIPGVGHVAACVIVAEIGVDMSRFPTSGHLCSWARFSPGVKESAGRKKGAGATGHGNRYLARVLGEAAVSAGKTDTFLGERYRRIARRRGKKKAIVAVGRSILVIIWHLLGEPGARFHDLGKHFYDDRRDTNTQKRNHIRQLEALGYTVTLQPAA

SEQ ID NO: 227509 - protein, 373 aa, unidentified
MPKYSTAFGMDVHLRSTTVCALDADTGEAVTRRFPGNPWGEIAGWMDGFPGPSLAAYESGYLGFAPQRELAGLGVECVVAAISKIPRSAADSASKNDRNDAARMAKAILAHDISPVWVPSPEVEGIRDLAGAYDGATARLATAKQRLLAFLARRGFVYGGTTPAGNPRKYWTYDFLRWLDKVRPEDDGGARALAALRNEVEAAAEARADLLSEYRAAVDASPIAAEVAALQSIKGCAFALAAAFSAEVGDFTRFRSGRQVTAYFGLAPSQRSSGDSVRLGGISGAGNALVRKLAVEGSWCYAAARHQPKLMPRDTGVPLEIRVHGRKGSERLLRRREEMLERGMPQAKANAATAAELVRWLWALGTMCREGAE

SEQ ID NO: 227510 - protein, 423 aa, unidentified
MNTSQDNPCLPSSPAAWIGLDWGDKEHAFAIEEADGKSEAGTLPHSAETLHEWLENLGQRYGGRPVALAIEASRGAVIHALLQYSWLTIYPINPITSARFRSAFQPSGAKDDLPDAKVLLELVRDHAAKLRVLESQDSTTVKLTGLVEARRKLVDRRTQVILQIESLLKTYYPQALEVAGDLKNEAAVAFLNRWPDLLSLKAARPATVKGFYYQHQIRSQKLIEERLALIAKAKALTTDEARVEVSVLHLRALLGQLQVFQQHIPCFDEHIRQAFAQHADRNLFKDLPGAGPQLAPRLCVAFGTLRSLYPDPASLQKYAGLAPVREKSGSQLWTHWRWQAPTFLRQTFVEWAGQTVRHSAWAKVYYQRMLKKGKKHAVILRALAFKWIRVLWKCWQDRQPYDEARYLKQLLHRKSPNTAPTPA

SEQ ID NO: 227511 - protein, 398 aa, unidentified
MHYLGIDVGKKESYVAHYENNEIVNEFVLHYDYNSLTRFSYYVNGLKTKLIVFEATGVYSTLIKDFCQKNNFDYARLNPLEAKMHIKTLRRLKNDRVDAHHLALIGPDLKDEKINNALSGLEQERQTYSRMITHLDEDINQLKTRLREKVFYVSPQFEELYQHDLEIPQIKLTFLFPHPECILEHDKSTIKDLIKQHIKYNENTLNKITERLIRIAQSTYILNSKDDPIVEEIKDICDSLITLIERKKKYSTKLKELCEGDKLYEVILSVPGTGEQLAALLTGELGNLDRFKTNKKLNAFVGIDVAHYQSGNNEKKDFINRRGNRHCRKILYEIVSLFLLNQHRHENHICDYYYKQKNPPYKKHHKVAIGACMNQFLEVIHFLYKHNLRYDYNLATAQ

SEQ ID NO: 227512 - protein, 313 aa, unidentified
MEISNIFIGIDISKSNLDIAIRPTGENLSIANSSKEIIPLVNRLKQMKPELIVVEATEGLETQIVNELAGEKIPVSVVNPRQIRNFAKAIGRLAKTDSIDAAVIAHFAEAIKPAPRPIPDAKAQELKAQLNRRRQIVEMLTEEKNRLVSAPEWIKEDIQNHIKWLNERLKNIDKALSENVKSRQVWKEKDEIYQSVPGIGPVVSHTLIVCLPELGHVNNKEIAAIAGTAPFNCDSGNQKGKRRIWGGRAYVRSVLYMAVISGIRFNAVIKSFYERLIKAGKPVKVALTACMRKLLTILNSMSKNNTKWQLACS

SEQ ID NO: 227513 - protein, 345 aa, unidentified
MLIIGCDFHPGFQQVAIFDNQTGEIRRKRLQHPEQARAFYASLSEPALVGMEGCGYTQWFEGMLAEQGHELWLGDAAHIRAAVVRRQKTDERDAEHILKLLLEERFPRLWVPSAEQRDLRQLLWHRHHLVRGRTQVKNQLQAMALNQGVQKKRKLWTEAGRAELQKLKLPAYTAARRDECLQRLDYLDEQIRQLSRQVAGEAERDERARLLMTHPGVGPQTALAFVLTIGEVGRFENAKKVASYVGLIPAEYSSGGKQRLGRISKQGSPLLRFLLVEAAQTAARLDPTLKRMYVRLGMRRSRGQAKVAVARRLASRLYWMLRSGKNYAQLTASGAGEPVSSRGAA

SEQ ID NO: 227514 - protein, 397 aa, unidentified
MIAVGIDVSKSKSTVAILNGDGSIRAKPFDVHHVADELQALVDYIKRTSEPPTILMEPTSHYHYPLLKAFTEAELPVCLFNPYQMKKYGDTELRKAKTDKRDSLRIAQYALEKSYSLIPYTPQDQKYEDLRFLSRQYSQRISTLTVAKVQLLSLLDETMPGITTILPLKSRDPDNCVLLRFIKRFKSFDVIRKMGKTRFLDSYQVLVKKTKDRFAGSKGLAIYELVLNSVTTRGENPLSAMTQDQCVDLVSTSQKAADEINLQMRIIAETMPEYKVLRSMAGVGDRLGPIILGEIGDIRRFHSGKALNAYAGNDAPPYQSGQFESRNRHISKRGNPALRKACFEVMQALKLTKPQDDPVYLFLLKKEQEGKPYNVAKMAAVNKFLRIYYARAMELYK

SEQ ID NO: 227515 - protein, 329 aa, unidentified
MKNYQNFVGIDVSKATLDIGFFNEKTPNEIKYLQIKNTDKSISELLKKLPANSLICFEHTGNYGLKLCYIFSKKKIDYWVVNPLEIKRSKGLVRGKSDKADSKDIANYAFTHKHKVKLHIMPDEQLLKIRLLLAQRDKFVKCIGMLTNTNETLSNHPNKVKKAVLQTTANSVKYLKKQLAIIANKIKAILMENETLNKKVELAKSVPGVGDQTALNLLIKTQGFTSFKNSRQFACYAGIAPFQYTSGSSIKGKTKVSNIADKKMKALLSIAALSAKRYDPQLNAYFNRKVAEGKNKMLVMNNIRNKMIARVFATVKRGTPYVNTAKYNA

SEQ ID NO: 227516 - protein, 421 aa, unidentified
MARTVEIVYPVCCGIDVHKSFIVACIAVTNEHSKTEHHIKRFSTFTGDLGRLVAWLATYNCRDVCMESSGKYWIPVFNALENADINVCLTHPKYVKAIKGKKTDKKDAKWIAELFKCDLVRSSFIPPPDIRQLRDLCRYYVKLTGFAIGEKNRAQNCLTMCNFKLDDVFSDVFGMSATRVIDALLEHGNGDFELDGLIDSRCKSSHDEIRAALDGELNPVQAEKLNLIRRHMKDIDSLKSSLENMIHELAAKYQPQIDLLMTVPGISTPLTAIRILAEIGSDMSVFETAKQLTSWAGLAPQNQESAGKKKTTRIGRAGAYLKPLLVQIVLAVSKSDKHPELKNKYLSLKKRRGGKKAVIAIARKLLTAIWHILSKNEAYNAELYKKADKPPAVCEFTADQAVAFLRNKGFLILDENTGEVV

SEQ ID NO: 227517 - protein, 319 aa, unidentified
MTTQYFVGIDVSKARLDIAVRPSGEQWSEARDDDGIAALIKRMQEIKPELVVLEATGGLELIVVARLVAAGVPARVVNPRQVRDFARSTGRLAKTDALDAKALAHFADSVRPAVRPLPDAETQALDALMTRRRQLVEMRTMEKNRMASVPTKVHENIQKNLESLANLLKELDKQLEDEIRNSTIWREKDALLRSTPGVGRVTSFSLIASLPELGKLDRKKIAALVGVAPLNKDSGSSRGKRTTWGGRGDVRAILYMATLSATRYNAIIKNFYDRLVAAGKLRKVALVACMHKLLTILNAIIRTNKPWREPEADPGSCNA

SEQ ID NO: 227518 - protein, 368 aa, unidentified
MSETITSFVGLDVHKDSTAIGEAEAGRENPRFIGTVGPDLGQLLKALKSLGKPETMLVVYEAGPCGYGLARQLRSRGYSCEVVGAGKIARRPGERIKTDRRDALTLARLARSGDLVKVIVPDEGDEAMRDLSRAREDGVRARLKARQQLKALLLRHGHRYGGKSSWTLAHERYLAAVSFAHPAQDIAFAEYRQAVREGHERVERLTEALRTQAEHWRLKPLVAGLATLRGIDFVAAVTLTAEIGDFGRFAHPTELMGFLGLVPSEYSTGDTRRQGDITKTGNSHARRVLVEAAWNYRFPARISRVLQIRQEGQPKAVREIAWRAQLRLAHRYRRLSSRKLHPNKICVAIARELAGFLWDIARQVKLAT

SEQ ID NO: 227519 - protein, 474 aa, unidentified
MKKHKKTKPKEAKPLHEPVANAAGIDLGATEIWAAVPPDRCQLSIRRFGAFTQDLKALVAWLVECGIRTVAMEATGVYWIPLHQLLSDANVEVYLVNARHVKNVPGRKSDVRDCQWLQYLHSVGLLRASYRPDQAVCETRTIFRYRQNLIKQGAENLQQMQAALDQMNIKLHYVIDDLSGQTGQAIIEAILNGEREPLRLAKYRHKRIKASEETIAKSLEGDWRREHLFVLRMAWQNGKHVQEQIKKCDQELMEYARQLEASTVVAKPMRPVRIVCLKAEPGVPELHPAAAVRPAKPRKKTSKNEPDGPWREELHRFFGVDLTLIPSIGVISAITLMTELGNDLSAFKKSHHFGSWLCLCPDNETSSSKVLRRSTRRSQNRVRQVLRMAASSLHHDKSYLGDKYRRLRAKLGAPKAITAMAHQLARIIWHLLTYRVPFDIGIFAAQEKANQTRRLKHLNSNARQMGYQLTPLPA

SEQ ID NO: 227520 - protein, 409 aa, unidentified
MDVIVERPAALDVHKEQVTACVRIPGLGGARSEEVAQFRTTVQGLLTLHDWLAAHGVTQVAMEATGVFWKPVWAILEDDFELLLVNARHVKQVPGRKTDVSDAAWLCQLLEAGLLRPSFVPPKPIRALRNFTRYRKAQIAERQREANRLHKALEDTGIKLDCVASDILGVSGRAMLDALCRGTTDPELLAELARGRLRQKLPALREALEGRFDALHAVLIGAILAHLDFLDEQIERLSEAIEEQLRPFQPAVELLRSIPGVETRTAQVIIAEIGVDMSVFPSERQLASWAGQCPGNNQSAGKRRSGRTRKGSKWLDQALKDAAMAAIRTNDSYLQAQYRRLRPRVGHGRAIGAVKHTIICACWHMLTTGELYRDLGGDYFRRRDPERQTRRLIKQLQALGHTVTLQEAA

SEQ ID NO: 227521 - protein, 457 aa, unidentified
MVQTKRSRKSRDFSTVHPAAAAIDIGATIHVAAVGPDRDMEPVRTFRTFTDDLHRLADWFAGCGVKTVVMESTGVYWIPVFEILEQRGFEVMVVNARDAKHVPGRKTDVSDAQWLQRLHEYGLLRASFRPRAEIAGLRAYLRQRERLLDYAAAHIQHMQKALTQMNLQLHHVVSDITGVTGMAIIRAIVAGERDPTVLASHRERGCHASIETMCQALVGNYREEHVFALTQALELYDVYQTKVAACDKQLQAILTRLKQNATPPANKLLPARRRTSQPNAPAFDARAALHAILGVDLTQIDGLGPYLALKLVGECGTDLTAWPSAKHFTSWLALAPHNKISGGKVLSSKTRRTSNRAASLLRLAAGTVGRTDTALGAFYRRLSARVGKAKAITATARKIAVLFYNTLRHGMTYADPGAAYYEDRYKQRVLRNLQRRAKSLGFVLQEVGPDAARVGVS

SEQ ID NO: 227522 - protein, 267 aa, unidentified
MTVYVGMDVHRKRSQVAVVDDAGVQQRNRNLANDPAKLVPVLGGLPPGTPVAFEAAYGWGWLVDLLEELELEPHLVHPSRCKAIASARLKNDKVDAATLAQLLRADLLPEAWIAPQATRDLRALLRHRASLVRRSTACKNRIHAVLADRGIPDHFSLWAGPGRAWLADLELPATPRGIIEDCCGLLDALATPIGRLEREIATLAKPDPRVQALMALPGVGKLTAMTLVAEIGDITRFPTARKLCAWAGLTPQVRNSDRKVRHGHITK

SEQ ID NO: 227523 - protein, 353 aa, unidentified
MGIVVALDVHRSQITFKVLERETGELRRGRIAPATRAELRAWLGQFTGCEAEFVLEGTTGWRFVVEEIERAGHRALLADPAETATRRGRKRRAKTDNADCDLQLRLLLGGELPESWIPPAHMLELRTLVRLRKTLIDQRSAWQQRIHAQLFHQGVPAGLRPRTQAGREALRRAELSPAGRELVALGLRMLDVFDLELVPIDRQLRAFARRQPGCRALIERLYGVGPVSATAILAELGDCRRFSASDDAVRHAGLDITVYQSDDKRAPGHLSHEGPELLRWALYEAAVSAARAGSPDHAYYLQVAERLGHTRACLSVARKLCRRAYHTLRELGDEALAPVECDPHAEEAIAAAA

SEQ ID NO: 227524 - protein, 315 aa, unidentified
MNNKEQVAGIDVSKATLDVAVLPAGEVVQFANDASGIDELGKKLKSAMVDLVVMEATGGYETAVATALAGAGLRVAVVNPRQIRDFAKATGRLAKNDRIDAQVIAAFGQAIEPEIVRLPDDDAREMEALLVRRRQLVAMRVQEVNRLGLMQGAMRKRIKAHIDWLEQEIDKLDVDLTAKLRSSPAWRAKDELLRSLKGIGPITSRTLLVALPELGELDRRAIAALVGLAPFNRDSGVMRGRRSIYGGRSQVRTLLYMAATTAVRSNPVIRAFYQRLKSRGKPHKVAMVACMRKMLTILNAMVRQSTPWTPETNPL

SEQ ID NO: 227525 - protein, 377 aa, unidentified
MSKVLFVGLDVHAETIAVAVAEQGGEVRSIGTIPNRLESIRKMVHKLGPVKDLRVCYEAGPTGYVLYWQLTQLGVACEVIAPSLVPTKAGDRVKTDRRDALKLARCYRAGELTAVWVPNAAQEALRDLVRAREAAKRDQLKARHRLGKFLLRHGRQRPEGVKAWTKKHREWIKSHVRFEEAALEATLADYVDEVDHVGARIVKLEKAIDEAIQQAPAEIREVIEALQALRGVAQTTAASIVSELGCLSRFPTAPQLMGYSGLVASEHTTGNRVQRGGLTKTGNSHLRRVVVEAAWAYQHRPNVIGHLLRRQKDLAISDEVKDIAWKAQQRLHKRYKAMDARGKNKNQIVAALGRELLGFIWAIGVKTEQQRKLAKAA

SEQ ID NO: 227526 - protein, 289 aa, unidentified
MKIIGCDLHARQQTVAMLDTKTGEVVNMTLKHEGNNVREFYATLPRPVRVGIEATGSMQWFVNLMEELGIECLVGHPAEIRAAEPRKQKHDRRDADLILKLLVENRFPAIWLPSKELQDLRSLLRHRHQWVRMRTRIQNALQSIALANGLRRGSSLWSQAGQHTIASLPLAPHTAYRRSELQALYEKFETEIEKLNQRVEEQASERPGARRLMTHPGVGPVTALATEVFLGDPARFADSKALASYVGMIPREYSSGGRQRLGGLSKQGNPLLRFLWGEAGRTPYAGIRS

SEQ ID NO: 227527 - protein, 363 aa, unidentified
MIRVRKVAHRPVKDKGTVAGATGAGIHGLSERYDHYVAVDWAEHVMAIGHTKDPRRRPEVFERASDVKELRSYLRSLTGRVILTFEETTSAQWLYLELCDCVAKIIICDPYHNRLLCHGPKTDKIDAGKLCTLLCAGLLKEVFHMAGELYELRRLVSGYEDLVRLGVCALNQQDALHRAAGPSKQGAGRYAPFVHEHLEAALRLYAQQKPAYETKFASLCRRHPLLRAQMELPGIGTISAVKILATVVDAHRFPSVGHYLSYCGLVKHQKFSGGRSYGNRKARYTRTLKCVYKTAVHAALKGDNPLRAYYDALLQQGVAEHNARNACARYLARVSFGMLKTGEHYDPERWRHGHEPGTQDSVD

SEQ ID NO: 227528 - protein, 399 aa, unidentified
MVSCLMGDSTALASAIVRCCPKFKHDCAIIDELCDTVMPSWSFSNDREGFSHFKALLDSLEGEKKIGLESTGHYGQNLKQFLESNGFTFMEFNPLLVSRFVRSKSLRNTKTDSIDALSIAQYVMTVEYKPYPSSFYHLDKLKSLTRFRNSLVRQRSRQLVELTNVLDKLFPEFKPFFKDKFSVTALYILAHYQTPERIANMNARSYEALRKLSRGRFTLSNFIQLKALAKNTVGTQSDYLLDQMNILLELYSQLDSKVDELDAQIKECVRGIDPPCLSIPGVGELSAAMILSEFGDFSKFQNPSKMLAFAGLEPGYFQSGQSEYTGHMVKHGSSRLRYALMNCCLPLISNEPVFAAYYTKKRSEGKPHRVALTHVAKKLLRVIYTLQTKNIRYDPTMIH

SEQ ID NO: 227529 - protein, 338 aa, unidentified
MENVPVFVGLDYHSKSVQVCVVDSEGKVLVNRRCGNSVLEIGEAIGPGRAVVRAAVESCCGAADLADGLIEHLCWTVSLAHPGYVARMKHNPDKTDFADARMLAELSRAGLIPPVWLAPRSIRELRVLVRLRADLVGHLRSTRVRILALLRLQRIAEPGCTRWCKRFVAWLKSSECVLSDQARFAVEMYLEEIAVLQARIKAVEARLRAATQSDAVVAALMAIKGVGEVTAWTMRALIGRFDRFASGKHLSRFCAVTPRNASSGERMADSGMIKAGDPQLKTVVIEAAHRLRRYEPRWRALSESMHARGKPGSVIVGAIANRWLRGLYHQMKGLPMAA

SEQ ID NO: 227530 - protein, 345 aa, unidentified
MEHVAIDLGARKCQICVRASDGTILEERRHDTAQLKEYLEGRPKSRVVVETCAEAFGVADAALALGHEARVVSATLVRTLGVGARRNKTDRRDARVLSEVSCRIDLPSVHIPSKTARERKTVCGMRDALVGARTKVINTVRGWLRGQGKRLPPGATSTFTNRVRALCGDTPSYVERQLRVVDALSQEIAEADQAVEAEAKDDQTCRNLMTVPGVGAVTAVRFVAAVDELGRFESAHQLESYLGLVPGESSSSERQQRLSITKAGPTRLRWVLVQAAWSLRTRCRAREALPLQMWAHQVEQRRGKRTATVALARKLAGILYAIWRDGTVYQGTRAATVIDATATTA

SEQ ID NO: 227531 - protein, 453 aa, unidentified
MGKTTCGGHPELKMVNPGAAAIDIGSTMHMAAVNPDSTDMPVRAFGTFTRDLHDLAAWFRSCGVTSVAMESTGVYWIPAFEILEQHGFYVILVNARYAKNVPGRKTDVSDAGWLRQLHAYGLLRGSFRPEAEIATLRAYMRQRERLVEYAAAHIQHMQKALMEMNLQLHHVVSDITGVTGMRIIRAIVAGERDPDVLASFRDVRCHSSVETIRAALVGNDRDEHIFALTQSLELYDTYQAKMVACDGKLEVAIAALTVKSSGTPTPLPKARMKRKQVNAPSFDVRAALHGVVGIDLTQIHGLGPSLALKLVAECGTDLKAWPSAKHFTSWLCLAPGNKISGGKLLSSRTRRSSSRAAALLRLAAVTIGRSDTALGAFYRRLSSRVGKQKAVTATARKIAVLFYNTLRFGMTYQDLGAAAYDERHRTRVIANLHRRARSLGYMLAPKPDAEAVS

SEQ ID NO: 227532 - protein, 407 aa, unidentified
MIFVGDDWAEAHHDVHVLNEAGDRLASRRLSEGLDGIRGFHELAAAHVDDPGEVVVGIETDRGLWVQALVAADYQVYAINPLAVSRYRDRHNVGGAKSDAGDAKVLADLVRTDRHNHRPIAGDSPQAEAIKVLARGHQHLIWARTRHTNQLRNALREYYPAALEAFSDLADRDTLAVLGRAPTPELGARSSINQIRSSLQRGGRQRNLDQRATEIQIALRTEQLAAPTLVAQAFAATTKAAVGIIAELNRQITELETTLAGHFEQHPNADIYLSLPGLGDVLGARVLGEFGDDPDRYATTKSRRNYAGTSPLTVASGKKRAVLARHVRNRRLYDAIDKWAFSSLRPSPGCRSYYDQRRAAGDLHHQALRALGNRLVGILHGCLRHHTTYNEDTAWAHRHKANNPIAA

SEQ ID NO: 227533 - protein, 493 aa, unidentified
MDPSFSSTLKRENDMSKSTPKEGLLSIKSNIKKTKATPVPKHLEHINLWAAGIDIGATSHFVAVPEGCDETTVREFKSFTTGLNELADWLQQCGITTVAMESTGVYWIPIYELLEEKGFDVKLVDARQVKNVSGRKTDVLDCQWIQQLHTYGLLNGAFRPTDEICELRAYVRQRSMLVKSASRYIQQMQKALTQMNLQLHHVISDITGDTGMKIVRAIVQGERDPSALAQYRDPRCMSSLDDIRGALTGNYRAEHLFSLKQSLELYDYFQEKIEACDNEIKKKMAVFATSVNVVGVPKEKLNPHKKKVNKGAPAFNLGSELHRLTGVDLLAVPGVNTLTALQLIGEIGLDMTRWNNAKQFASWLGLCPGNKVSGGKRLSGKTKKSNNRGAATLRMAASTLYRSQTSLGAYLRRLKSYKGPMKAITATAHKLAKIIYNMLRHGIEYNEAGQGYYEEQYRERSIKNLKRKAAEFGLNIVEMGENMKTQNIKKSVC

SEQ ID NO: 227534 - protein, 361 aa, unidentified
MLKHIFVGIDLGDKNSVGRIAVDREKTERFGFVNNRRGRARLFSEAKRRAQEAGGAKIVMAYEASSCGFVLHEEAEAMGICCWVLAPTKMEKSVEQRQHKNDDRDADDVVEKLRGHVLAGNRLPTVWVPDQQTRDDRELVRGRVELGEKQTQVKSQIQMLLKRHGVEKASGLGAGWTVRYRRWLEALTESEPLGRGGRQTLGSLLRQLSFIEGEIERMQQPVERLADEPRHKPIVDELRQECGVGLLTAMVYRTEIGYAGRFRRGRQTGKYVGLTPTSYESGEQNDRKGHISRQGPPRLRKMLCQASWSQVCHDASAKRIYQQLVSRNPKKKKIAIVAVMRRLAVRLWHRMRKVEVEMGLA

SEQ ID NO: 227535 - protein, 459 aa, unidentified
MTRKKKMELDIINPNAAGIDVGSRSHYAAVGQSLEDVKEFGVYAEDLTALCLWLLSYGITTVAMESTGDYWQNLYAELMKHGIDVILCNGKFTKHPKGKKTDVKDCRHIQKLHALGLLTSSFLPDETTEKLRTYCRQRSNLLSSAAGASRKMQKYLKFLNFRLDVVVKDVCGLTGMAIIEDICKGNLHPESLSKHRHYNCRKSKEEIAKALHGNNREDFLFGLKQEYQAYRFFQKQIDACDKQIDKFIKEELRKSPEKSKLKTTDKPYKRQNKNAISIKNFNQVAYQYFGGVDLMAIEGLSHATVLSIMSEIGPDGFIKFDTSKQFVSWARLAPNNKISGGKVLSSKIPKGSNRLKIALRQAANAIGNLKDTHLSDFFKRVAFRKGRQAAVSATARKLGVIIWTMVTKQVPYNPPEQYLFLDQRRKMGIAKRIKKQMAKFDIKPEEIGIGNSLIPNYNF

SEQ ID NO: 227536 - protein, 273 aa, unidentified
MSNYVGLDVSLKEVSICVMDGDGCVLASGSTPTDPSAIMAFIDKHTPQVVRIVHESGQLSTWLTRELLARGAPVICIDARMAHKALSARLNKSDRVDAEGLAHLARTGWYRAVHIKDESSDQLRILIGARERLLRIRKDIEGHIRGMLKTYGIRLAPVMAARQRANFRKQLRTVAKDHPALELIAASFIVAHEAACKECAVIEKELVRRARGNELATRLMTVPGVGPIVALSFIATVDDASRLAKSTQVGAYLGLTPRRYQSGEVDYSCHFSP

SEQ ID NO: 227537 - protein, 306 aa, unidentified
MCSYVGVDVSKDELVVHVMPSEQRHTFANSPTGLAELLQCLSPLQCKRIVFEASGGYERDLLDALHQANLPGTRISPARPRALANAMGIKAKTDPIDARVLAVTAQLLPLENTQPLSEQTEQLREWLQLRTALVCERDGFRRRLKQTRHPLVRAQMQTWILSYRAQIEQVDQQIKALMAEQPAPLHKAPGLGPVLSATLAARLPELGTLDRRKITALVGLAPYNRDSGKKAGLRRIGGGRADVRRVLYMATWAAIRAKTPLAQTYQRLVELGKPKKLAVTACMRKYLIMLNAMKRDNAPWNPKQMV

SEQ ID NO: 227538 - protein, 456 aa, unidentified
MKKRGRKRKSRIVKLDSLKQINLNAAGLDIGAAEIWACVPEGRDEQPVRMFNTFTVDLYALADWLQTCGVETVAMESTGIYWIPTYEILEARGFEVLLVNARQLKNVPGRKTDVLDCQWIQQLHTYGLLRGSFRPEEEMCALRSYTRHRDNLIRYRSAHIQHMQKALHLMNVQLTNVISDVTGVTGMRIIRDILRGERDPQKLAAYRNAHCARSEDEIAKSLEGNYREEHVFALKQAVELYDFYNQQIKDCDAEVESKFAAFKPRVDIQQKPLKPLKRQRNKPEGNAPDFDLRSYLYQMAGVDLTQIDGIKALTALNILSEIGLDMNKWPTVKHFTSWLGLSPYQDISGGKTLRTGTRKNKGRANKAFRMAALTLTRSDSALGGYYRRMRARHGSPKAIVATAHKLARIFYRMLKYQEEYLDPGAAYYEEKYRQRAIRNLKRRAHQLGLEVMPAAG

SEQ ID NO: 227539 - protein, 365 aa, unidentified
MSTITIGVDLAKSTFSSCEVDGAGHVLRRQDLGREAFALWLAQLPAGTVVAMEACSGAHHWAQRCQDYGLQPRLMAAQFVTPFRKNRTAKNDRNDAEAIATAARQGNMRFVPVKDVDQQARPAWHRVREGYKAESLAIGNRLRGLLAEFGVVVAKSDVALRRVLADLEQHKALPGEFKELLRDLGAHWVQLHAAIDACGARIDAHARQDARCVRIGAIVGVGPITVDAMVASVGNAREFRNGRQLAAWLGIVPTQHSSGGHTRLGTISCRGDAYLRTLLIQGARSSLQRAQAVRVDKATPEQIWIRQLACRMPFGKVLVAIANKHARQLWAMLAHEETYDPDAWLKHPMVQRPAGKHALAVTAMG

SEQ ID NO: 227540 - protein, 352 aa, unidentified
MEMIALDCHKHYSVASVETPGGDCLAERRIEHRRGSIEAFLGPYSAGCPVAIETIGNWYWIVDEIERAGKVPRLVHARKAKLMLGSINKTDKLDVRGLNRLQRSGTLPLVWIPPGGIRDQRELPRTRMVLATMRTRLKNRIHSVLDKYGLQEEVPQVRDLFVPGVRSSLQECLAQLPAQAAYTTGLLLRQLDRVQATIGTLEKRMARVFRPTPEVQWLQTLPGVGRILSVVIASEIGDIGRFACAERLASYAGTVPRVHSSGGKTQYGRTRSDVNHYLKWAYTEAANVVAVHHRQRPDLHVSQLYSRIRHRRGHASAVGAVARHLAEATYSMLSKKEPYRERGVPEVSSQQG

SEQ ID NO: 227541 - protein, 387 aa, unidentified
MQKPHDNSKVCRAAFVQDSTLVIVIEMSLTGWLVAGMIPGVDREPLKKIAPDPEELLRLLYRWRDEAVKAGKEITRIAVAYETGRDSFWLARWLRARGIDAHVIHATSVAISREHRRAKTDRIDTAMLRRGFLGWLRGEPGHCSLAIVPTVAEEDAKRPHRERESLVQERTSTVNRMKSILIQFGVRNFNPVLRKASEKLDAVRTPEGIPLPPNAAAALRRHMERFRVIKEQIKAIEQTRLQRLQRDPADKMNAMVFLLAGIIGIGVETAEQLAHEILFRDLRDRKAVARYAGLTGSPDESGSRRREKGLSRSGNARVRTILIQLSWRLLKFQPGSELALWYKKRTADAKGSRKPMIVAFARKLIIALWRYVNTGLLPQGFELKPAA

SEQ ID NO: 227542 - protein, 425 aa, unidentified
MEITGLPTPVFCGVDWAEDHHDVALVDAGGKQLAKLRISDDAAGFAQLTALLVEHGDCADEPVPVAIETSRGLLVACLRATGRPVFAINPLAVARYRDRHSVARKKSDAVDAAVLANILRTDMAAHRPLPADSEFVQAIAVLARAQQNAVWDRGQAHNRLRSQLREFYPAILEAFAQHKHGLCSREARTILAAAPTPAKAARLTVRRLQALLKQAGRVRGIQAEADRIHEVFQRDYLHQPPQVEAALGRQTTALLRQLNTACQNADELEEATAQTFEEHPDAQVIRSFPGLGSLTGARVLAEIGADRTRFANAGALKAYAGSAPVTQASGKSCVAMSRKIKNQRLAAVGYVWAFVSLTKSPGARTHYDRRREVGDRHVAAQRNLFNRFMGMLFHCLQHGQLYDETKAFPIQPLEDPLEDPSSIAA

SEQ ID NO: 227543 - protein, 314 aa, unidentified
MTNKIEKCYIGVDVSKNTLDFFISASRSHLQFANTASDFKKIIRKINTFGDVLVVMEATGGYEKSFAQALAKANLQVAVINPRQVRDYAKSLGILAKTDRIDAKVISKFAQMIKPKPNVVYNENQNNLAELNARRRQLVDMITAEKNRLDKVGKETKKSIKKILGALEKELKDVSSKIANLVAEDAEYQRKDVLLQTIKGVGQVTSNGLIADLPELGTLTAKQITALVGIAPLNRDSGKMRGKRTIWGGRANVRNALYMATLIATRYNPRIKSFYQRLCASGKAKKTALIACMHKLLIIMNAMIKYDQPWRFES

SEQ ID NO: 227544 - protein, 383 aa, unidentified
MCTQEMQANVNDVVLAVSLELAAAKWKVALHDGHRESPSIHTLAQTDPAGRLQAALALIATQKQAWALPDNTRVVVSYEAGQDAFWIFRALQARGIECYVVDPASIPVQRQKRRAKTDRLDVTKRVINLRAWLGGERDRMHAVHVPSAQDEASRHLMRERGQLQKEVLQHRDRMRKLLATVGCREDVNSRKFATRLARREVCCHDGAPLPEELHERLLRECERLALVEKQAAALEKAYPLRLPEPARERIDHLTHLRGIGPVSGSRLALELFWRHFANRRQVGACTGLVPQPYDSGQTRIDQGISKQGNRRVRALLIETAWTWIRYQPGSRLTRWFNERTKPTGPNRRARRIAIVAVARRLVIALWRYLKDGVIPEGAELKMR

SEQ ID NO: 227545 - protein, 391 aa, unidentified
MKRYEKVASAGLDVHYKFSTVTMREAQGKVAVRERLDHVNRAALRRVLAQWPRNVPFVLEASFGWAWLAEEMQQAGLSVALSNCYKVEQMRKARGLPKTNRKDADLLSLLAFESSDWWRVWMPPPAVRDRREWTRHRSDLVGIGTMTKNRIHAIFHRHGIFHNFSDLFGGKGRRFLGQLCRDGRSGEVSLAAGALAQLRGNVRLLDQVRRQLAELERELRRQLERTPLIQRLKGIPGLGLILANTLAAEIGQIDRFGSARSLRAYSLLAPICQDTGQADPSRSPLGRHLGRRGNRTLKWAFIEAAHAAVRSGGKWRQLFDRYTDGGRRNRNQGYIRVAGELVKIVYVVWRKEVQYTDTPPARPGRRERAEKFLAIPRSGTGQPSRPMAAVQ

SEQ ID NO: 227546 - protein, 385 aa, unidentified
MKKFTNQCIGIDISKSSFTACLCKRQLSGIESNSDVVEFENNKRGFNQFVKWSRKYSDSSIPLVYAMEATGIYYEGLAYHLARLKQNVSVILPNKVKHFSKSLNIKTKTDIVDARIIAKMGTERSMDAWQPPDPIFRQLRSLTRLYSDLKKEKTTFGNRLDAYQCGEDPISFIINSNRILIKGIDLQLVKCEKEITTLIYSQEWLASKVDKLLSIKGVGLITIAIILAETQGFKLIRNGKQLVSYAGFDVIQRESGTSIKGKTRISKKGNSRIRAALFFPALVSSRFNENFKNIYERINAGKPSKMVGVTALQRKILLLIYALWKNDQFFIEDNPSKNKNQESETASSTEKISTEIKVGRSNDLPTQDEHSNDGSSEVLLRVLQI

SEQ ID NO: 227547 - protein, 355 aa, unidentified
MTSTKYIGMDVHKESISSAVMNASGKIVMECVIETKASMILQFMNGLRGDLHVTFEEGTWASWLYDLLKPHVTKLVVCDPRRNALLKDGNKSDRIDARKLAELLYLNKLNPVYHGEHGTRALKELVRSYLTITKDLVRVMTRVKAIYRSWGIPCTGKQVYAPRHRGEWLAKISELGVRRRAEFYYQQLDALRSLRQEVRRDLLAESKKHQAWKRLCQIPAIGPIRAAVLLGILQTPHRFRTKRPLWKYSGFAIETRSSADHRSVHGQLQRSKKQISVRGLNQNCNHDLKNLFKGAAIVASSKPGPFQEFYAALLAKGMRPEMARLTLARKIATIALIVWKKGVCFDARYLKPQTA

SEQ ID NO: 227548 - protein, 322 aa, unidentified
MSGSAVVVGIDGASTHVDVAALGAELTASLRQVSNDADGHSALAEGLARLKPHLVLMEATGGYEAALACALQAAGLRVAVVNPRMARDFARAMQRLAKTDRIDAATLAEFAGVLARRPDAERFIRPLTDPEQQDLAALVTRRRQLVSMQLSERQRLRLARPVARPSIEALLEAIGRQLDDVEAEMAQHVEQHHAQMARLLQSVAGIGRVAAATLIAELPELGRLNRRQICALVGVAPYANDSGASKGRRRIVGGRFEVRRALYMATLTATRHNDAIRAFYERLVAAGKLKKVALIACMRKLITHLNAIVRDHLNAQHHPSTA

SEQ ID NO: 227549 - protein, 370 aa, unidentified
MSVRRILAKTINTDLEYEAIGIDLAKNCVSVALLTTDGEVVCIDRLDYSELEKSAQVLCPTTFAMEPCTEMNYLVQKLEAWGHRCLVIGGKNVQNYVENHYSGQKTDLNDAQALAFLAQDTQLRTIKAKDVEQQKYASLTTLREQYIKQYRQTIVSLKGICQAWGLNISKGISGKARLKDLIENHAAFPEELKESLVDMVTHAQTAQKALNKITKTLELLAKNDKVCQLIQTIPGLGPICSCRLRATIGDIRRFKNPKDFPAYYGLVPRSIATGHNEKKGKITHRGDKTMRSLMVQGAGSVINMATKGKLKSKQLTKWILKKQKEKMPWGKLVCAVAAKLLRIVRAVLISRKAYDPKLAGVAKCSLPKAT

SEQ ID NO: 227550 - protein, 394 aa, unidentified
MVIGGIDTHADTIHVAVIDEQGRPIGDREFVTTPAGYRAALAFLVDHGRLGVVGIEGTSSYGIGMTRAAQAAGIEVREVTRPDRSVRRRQGKSDPLDAYEAARAVLAGRAQAAAKTELIDPLRALFTARRSAAKARQSAQVQIRQQLITAPAQLREKYRSLSIVRLVKTLTGCRPAVCDDPAARAVLVALKALAHRHRYLTDQINALEHELALLIHDIAPHLLQTRGVGVSVAAQLLITAGGNPDRLRSEASFAALCGTAPVPASSGKTTRHRLSRGGDRGANYALHVIATVRMSCDPKTKEFAARQRDRGRSNAEIIRILKRAIAREMFTHLTRPAPALDIADLRDLRRAKNITQDAAARALAVPQITISRTERGLYIDTDLATRYRNWLNVA

SEQ ID NO: 227551 - protein, 401 aa, unidentified
MNTMQENVQRVKRFRELKDTLRTKRDRLLVGLDIAQAEHVAQLRHAHTRIVVPTLTIPNTTRGFTQLWARIQQAQRATGCREVVCGLEPTGTYHQAIAAFLERQGADVLLLSSSVAYWNRRTQDGTWDKNDRKDAANCADLLEQGKVLFYSQPDGPLAELRRLVKCLRRARGELAACKARWRTSLRPALGPMGEPLPNRLRVELPAVLQAWERAAPGHPAVAQGRLPLGLATACADLGAQVTAVQARIAALEQALTPLAERLPPYALLRTIPGIGPTVAAVLLAEIGDVAWFTKFSQLRKLAGLDIVRVQTGKFAGQWRISKCGRGLLRWALYQAAMGVSRTAGGRARLAALKAKRQGDRYAGFKAIVELAAKVLRVVWGVWRSGTPYDPRRAGGLQRQSR

SEQ ID NO: 227552 - protein, 352 aa, unidentified
MEFSTNPKKSGVSQMKITTIGLDIAKSIFHLFAVNRVGRLVKKKQLKRKQLLNYLATLEPCLIVMEACGGSNYWAREIIALGHEVKLIAPQYVKPYVKGNKNDYNDAEAIAEAAQRPTMRFVPIKSIEQQDVQNFHCQRELIKKERNALVNQTRGLLAEYGIVINQGVSSVLRDLPLIIEDAEKGLTVLSRELFTELLDELRLIDKRFKQCERRIKIMNKSNDVCQRLDEILGIGTITASATYAAAGDGKEFKNGRHFSAWMGLVPGQHSTGGKPVLLGISKRGNAYLRTLYIHGARAVLRHSAKKQDRFSRWAQAVLARRGHNKACVAVANKMARMAWVIMAKGESYRVPV

SEQ ID NO: 227553 - protein, 361 aa, unidentified
MAQAKTWAAFDVHVSGVVAATLDRESGELRVNRLGGRSDDVVAFVAGLSGPVMATYEAGPSGFVLARKLRAIGVDCLVCAPGLIPRGSSDRVKTDRRDAQRLVRLLAAGELHRVMVPSVEEEGLRDLVRAREDLRGDLMRARHRLAKLLLRHEVRFDGPQANWTQAHLGWLASVQLEQPASQRALEDYRGAVSVLMIRREQLESEIAKALPASPWAQTARRLMCLRGIDSLTAAGLCAEIGDFHRFGHPAQVMSYLGVVPSEHSSGQRCRRGPITKSGSQHARRLLVEAAWHYRRPPRVAGSLARRQRDGEPEVLALSWKAQRRLHHVWQRMQERHKRRTIIAVAAGRELAGFCWAVATVD

SEQ ID NO: 227554 - protein, 328 aa, unidentified
MVCETVCKEGITKMESIIQIAGIDVSKDKLDVHILASNLDFTVSRDRRGLGELRRRLRKAGVSDVALEASGDYERIVMEALEAAGFVVHQLNPARVRHFGKAMGILAKTDPIDARLTALYCRHFPEAGLARRPEQARKIGEFLSVRAMVLSAIGEARNRLEHLREASLRALVEEDLAMAKARLKTVDAGIAKVIAEDEAMQRKADLVRSMIGAGPVLAANLLARVPELGSVDRQQAARLCGVAPADRRSGKSRRQARIDGGRDQLRPILYMVALTAIRGNPTIAAFAKRLTANGKSKRLVIAACSRKIITILNAMLRDQTPWQNPKLA

SEQ ID NO: 227555 - protein, 452 aa, unidentified
MRYSKGLRREHKNNQRKKEVVAGRTLICSFDLARHKHAYHVVDAERNVLARGHVPHSLEGLEQLLKELEALREKENYDRLVFFMEGASYFWMPIASLLVRRGYTYRLVQNRAVKHQRQLAGQSGHKNDPRDAAHIATLAGTLHFTFTQLPLQHEWIALRACALEYQELVDLVTAEKNRIHAFLGTVFPGYYGIFVEPFSESSLAILQALPHVMQLESEAFVEQVRQCFQGQNLQVKRCRAVWEYARSKDPWGYVEARAALSERIATAAARIQLLLRQQDTMREQLLAAHRQTPYHENADSIHGSSPVANAVLLGVLGDPKDFDDARTLVRIAGLDPGEQASGEYQGQSRITKAGRIHLRRAAVSATMAVLKSGKNPDFVRRYFRLQQRTDHPMKELQALCACAGKYLRTLWWLCVTGSHYEPKVAHHGFTKETGTGDNKTTHTAMEPALTIE

SEQ ID NO: 227556 - protein, 366 aa, unidentified
MKKISTVQTFSNEILKEQKLTVGLDLGDRWSFYCVLDEAGKIILEQKVATTPEAMQQTFGKIPRSLIALETGTHSPWVSRLLTELGHEVIVAHAQKVELITKSNRKDDRHDARTLARLARIDPELLGPVRHRSAKAQIHLTVIRARAELVSARTALVNAARGLAKSFGERLPKCGTYQVNEKLAEGVSAELRDVLVPLLREVESLNERIREYDERMEKIAQEVYPEVFLLKQVKGVGTQIALTYILTIEDPYRFPKSRQVGCFLGLRPGRRNSGESEPQKKISKEGDRYLRTMMVQGAHYILGPFGEDSDLRRWGLKLAERGGKNAKKRAIVAVARKLAVLLHRLWVSGEVYEPLRNSQKAMRAAA

SEQ ID NO: 227557 - protein, 354 aa, unidentified
MPRKTARLEVVATLGIDIGKNTFHLIGLDKKGAIVLRQKLSRGRVEADLANMPPCLIGMEACVGAHHLSRQLKALGHDARLMPARYVRPYSKGQKNDFRDAEAIAEAVLRPTMKFVATKTVEQLDLQGLHRVRERLVCQRTSVINQIRAFLLERGIAVRQGLRALRTEMPIVLAMTDKLSPRMIRMIEDLCTDWRHLDERIETVSDEIATLSEQDDGAKRLMTVPGIGPIISTATVAAIGSGDVFSKGRDFGAWLGLVPRQMSTGGRTILGPISKRGNRYLRMLFVQAARAVLLRPQSWQKHGLKSWIEAAARRLNRFKLAIALANKIARIAWGVLHGGRNFEVRSIKPVSQTA

SEQ ID NO: 227558 - protein, 342 aa, unidentified
MYYAGIDWADQKHDALMLDEAGQQLGTIRVAHTPEGLAKLDAWLSQFLGDQSRDQMACIIETTHGLLITFLLEQGWPVYPVNPRTVDRRRSASGAKTDAIDAYLLAKTGRADFADLHRLLPDSETVAELKALTRDQASLIQMQTRLVNQLTACLKAYYPVARSLFSKLQQRSSLIFLQSYPTPQAAQTASIEQIAQLLQSAGHTTAGKVAPKIFERLHQPQLVATTVTTRTKSRLALALIAQLLPLVEQIATYEKEIEQLFLSHEDNEVFRSLPGAGKRLAPRLLAEIGDDPARYETAASLQALGGTSPVLFQSGTYSKPHRRLGCIKPLRSALHQFAWQST

SEQ ID NO: 227559 - protein, 316 aa, unidentified
MTKAEVFVGIDVSKARLDVALGFAGELFGVDNDARGVAKLVSQLRKLGPELIVLEASGGLETVLVGELAAAQLPVAVVNPRQVRDFARANGQLAKTDKLDAKMLALFAERMRPPLRALPDEQTRQLQALVTRRRELVEMLTAERNRLSSVPRELHREIRAHIRWLEARLKERDRDLDRALRNSPLWREREDLLRSVPGVGPVLCVTLLAGLPELGRLNRREIAALVGVAPLNHDSGTMRGRRTVWGGRAHLRAALYMGTLVGVRHNPVLRSLYRRLLERGKAKKVALVACMRKLITILNAMLKHRTSWSALWPSPA

SEQ ID NO: 227560 - protein, 342 aa, unidentified
MSIVGAFDVHRRQITYDYLDTETGRLLRGRITPACRAVLRRWLAERFAGRTDVEFAVEACTGWRFVVEELERAGIEASLAETADTSTARGPKQRAKTDAADTALMRELLAAGRLPTSWIPPEQVREMRAVLELYKDLRDGHTAWVQRIHAILFHQGVPQLGADVTSTAGRARLDAGECLSPAGRQAVTVALRVMDCLQTELDALHRQIRLFANHQPGCKALQAQYGVGPITSTAIWAMMGDTRRFSASRQAVRHTGLDVTVYSSDGKRSRGHLAKQGPPLLRWALYEAACLASRTRAPDHDFYTTVKDRIDHKRATISVARKIARRSHHILRELGDKAYAAA

SEQ ID NO: 227561 - protein, 338 aa, unidentified
MQTYAGIDLHSSNNYIGVIDAKDRRLYSKRHDNNLKQVIKALGPFKKNLQGIAIESTFNWYWLVDGLKEHGFKVHLANPAAIQAYSGLKHTDDKWDSFWLAHMLRLGILPEGYIYPKQHRAVRDLLRRRLMFVRQRTAQILSLQSMITRNRALNYTGADIKRLRDPFIDVLFSDPHLNFTAKRNIETIRFLDRIVGEIETEVNSQIKLKKEFQMLLTTPGIGNILAMSIMLEVGDIGRFGKAGRYSSYCRCVESKKISNGKKKGENNKKNGNRYLAWAYVEAANHAIRTCPEAQRFFQRKMSKSKRVLAIKALANKLTKATYFMMRDQVDFDSAKLFG

SEQ ID NO: 227562 - protein, 340 aa, unidentified
MKITRIGLDLAKNVFQVHGVDEHGKAVLRRQVPRGKVLVFFASLEPCRIGMEACSGAHHWARALSKQGHDVRLIAAQFVRPYRKNDKDKNDQNDAEAICEAVGRPNMRFVPIKSVEQQAVLGLHRVRQLRVTERTALVNQIRGLLAEYGIVVAQGIARIRRELPGILEDAENGLPDLARELFAELQTKLSDLDQQVSEHDRRIDRLASQSEAAQRLMQLDGIGAMTATAIVASVGNGHCFKNGRQFAAWLGLTPRQHSSGGKTRLGGISKRGDVYLRTLLIHGSRSSLLRTANRHDAKSRWVETIKARRHHNVAACALAAKHARIIWAMLARDQEYRRPA

SEQ ID NO: 227563 - protein, 405 aa, unidentified
MPYILALDVSMGHSYSVLYKDDTCLFEDEIEHTQRGFHALLEEIQHLPERPLIVFEATGIYSRPVEKFFQDHHFSYCLLNPLEAKKQMEESTLRSWKTDKSDAHRLAQTHLKNQRQPKEVQSNFYLEMRDLARFYQEIEKKITRLRMDLHNCLQLTFPELEQFFSNRLTPYALTLIRLFPHPDFILASTRTKIKNKLINETRKKISANRAEQKADQIIHYAQCAYPAVEKDSIHCQKTIYYAELLQDLLEQKEALATQMIKKAEGSPCFLLYQTFPGIGALTAALLLGELGDITRFKTHKQLNAFVGIDIRRYHSGKYTGQDRINKRGNPKARKIIFFTIRNMIRQQRAAPNHIVDYYYKLKKQPIPKKDKVATVACMNKLLKCMHAMVRAHTEYDYAYAVSVDH

SEQ ID NO: 227564 - protein, 438 aa, unidentified
MPTTRMEEVIMEVLYPNCAALDVHKDTVVACSRRVVGSKVEREVRTFATTTSGLLALSEWLSSRGATHIAMEATGVYWRPVWNILSDGEFQLILANAKHVRNVPGRKTDVNDATWLADLLAHGLIRASFVPDMATQEQRGLLRTRKQLSRERTSHVQRLQRTLEEANIKLDSAISDVVGTSGRAMIEAMIAGEIDPAKLASLAHPRMKVAPAKLAEALRGRVTKHHRFLLRLHLKQIDALDNAIAEIDKEVEANLDPFRPFIPILTSMPGIAELSARVILAEIGTDMGRFATARHLISWSGLCPKNDESAGKRRSTRMRKGAPWLKTTLIQCAWAATRRKGSYLQAQFHRLRARRGAKKAIGAVAASILTAAYHMLKTGTLYQDLGPDHFQRRSKPDQVQRLLQKLSNFGYQVTVKPLAPPFGDRPLTDGGGALQVSF

SEQ ID NO: 227565 - protein, 428 aa, unidentified
MNTPTSNPPVVAWVGLDWADQRHEIRLQAAGSPRLESFSVEQKPEAFQAWVAELRARFPQGRIALALEQSRGAVIYALMNYDFFLLYPIPPKTLARYREAFASSGAKSDRSDADLLLELVRTHGDRLRAWQPDDAMTRQLRLLVEYRRKTVADRTRLTNRLTDLLKTYFPQALDWLGDLRSLAACEFLGAWPTLQAVQGANRPALRRFFHDHRRLSAEEREKLLDQIRHARPLTQDRAVLEASELMTQTLVEQLRAVITALARLDQALEELFGQHPDQQLFDRLPGAGEALGPRLAAAFGTDRDRYQSAEEIQQFSGIAPVTAASGKMRWVHWRWACPKFLRQTFHEFADASRKKSLWARAYYQQQRQHGVSHHAAVRALAYKWIRILYRCWKTRTPYDEALYLRALQRRHSPLWLAAASLSTQEAHP

SEQ ID NO: 227566 - protein, 415 aa, unidentified
MEVVHVRCAGLDISKRDAKVCVRVAGKGRRGTQQTVTTWGATTNQVLALREHLIAEQVTLAVMEATSDYWKPFYYLLEDAGFEVLLVNARHVKNLPGRKTDVSDAAWLAQLGAHGLVRGSFVPPEPIRQLRDLTRTRTAITRERGREIQRLEKLLEDAGIKLSSVASEITGVSGRAMLEALIDGQRDPAVLADMAKRRLRAKIPALTEALTGRFSEHHAFLARVHLDLIDRHTQAITQVTGRIEQVIEPFRAFRELICTIPGISTGVADVICAETGADMSRFPTAGHLASWAGTCPGSNESAGRVKSTKTRPGNPYLKGALGAAAMSAARTKHTYLGVKYRRIASRRGPMKAIVAVEHAMLVAIWNMAATGALYDDPGPDFYTRLHPDRAKRRALDQLRTMGYHVTLNPLEAASG

SEQ ID NO: 227567 - protein, 445 aa, unidentified
MKSHPDIFFLEAAPMKLKPVPVAGVDVSKEFSDMCILTPDNAVFERVKIYHDKASMTQSVKALARAGAAFGQRPVVVMESTSHYHRTLQQFLTRHKYQVITINPLQSSAFKNVTVRKIKSDPTDAYRLALAYRTQALRPNLVPSDKIENLRLLTRQHFDLKRDITSYVQRLQCVLDQVFPGFRKQFERLHCETSLIILEQYPTPEALKRARTSSIAKIFQCAARRSPEYCRKRAEALKAEALKALEIRVSRESADLLIKAYVSVLRALEQTIRQVDDEIHRVIQSDPKLLADVELLCSIPGVAEFGAAVIIAEIGDFSNFRKAKQLVAFFGLEPSVHQSGKYVGKNNQLSKRGSRFMRKMLHLIVQTNIAHLPGKPDVYRNPVISDYYKKKCESKAKLAACCAVMHKLVNIIFAVLRDRKPYEIRTPEEHIKLMQARCVAAVTAA

SEQ ID NO: 227568 - protein, 399 aa, unidentified
MIEDHGQVDVFIGVDVGKTNHHAVAVDRDGKKLLDKPLPQDEDKLRAIIDKLAKHGTILLVVDQPATIGALPVAVAQDAGIMVGYLPGLAMRRIADLHPGEAKTDARDAFIIAEAARTLPHTLRSITVADEQTAELSMLCGFDDDLAKQSTAASNRIRGLLTQIHPALERVIGPHLDHPAMAELLRKYPTPAALRRAGQTRIATYLRRWAPRAGKRWAADVITALSEQTVVVAGTDAAGIVLPQLAAQLTQLRASRAEVHARVEAIVEAHPLHPVLTSIPAVGVRTEARILTEVVGKDFKNAGHLASYAGLAPVTWRSGTSIRGDHPSRKGNKVLKRALFLSAFAALKDPVSRDYYDRKRGEGKRHNQALIALARRRCDVLYAMLRDGTFYETPTAKAA

SEQ ID NO: 227569 - protein, 368 aa, unidentified
MGRKSSKLFVGMDVHKESIDIALAEEGGEVRHYGGIGGEQSALIRTVRKLESLGKSLVFVYEAGPCGFWIYRLLQERGHPCWVVAPSNTPRRVRDRIKTDRRDSLKLAGLARAGELTPIYVPDAADEAMRDLVRAREDAVATQRQARHRLAALLLRNDIRYGGKTAWTEAHRRWIARLHLPGAAQRIAFEEYVLTVDEATASVQRLTRSMEQELGHWRWQPVVHALQACRGIQLIHAVRIVAEVGDLSRFTHPRQLMAYLGLIPSEDSSGERRRQGPITKAGNRSARRALVEAAWAYRHHAAVSPLIVRRQTGLAKPVLDIAWKAQLRLCARFRRLTARGINRNKIVVAVARELAGFVWAIGQRVKLN

SEQ ID NO: 227570 - protein, 390 aa, unidentified
MTKGRKEIRTFATMTEDLLQLADWLSSVGCTHVAIESTGVYWKPVFNILEGLVTVILVNARHIKAVPGRKTDVRDCEWLADLLRHGLLKASFIPPPEIRELRELVRYRQTLVAEHTAVANRIPKLIESANIKLGQVAREVLGLSGRLMLRALAAGETNVETLAELAQGKLKSKKAELRRALTGCLTPVQRWVLTELLTREEELEAARTRVETRIGEEGAACAEPFVPEAVKLLETIPGVGPWTAQTIVAEIGVEMSRFPSAKHLASWAGVCPGNHESAGKRKSGQPTKGNKSVRTILTEAAWAATHAKGTFLQAKYQRLVKRMPKQKALGAIAHRLLVISYHLLKRRVPYAELGAAPLEEQQVARQRRRLVEQLIGLGVKVTIAEGGAVA

SEQ ID NO: 227571 - protein, 419 aa, unidentified
MSKSMFCGCDVSLENNTVWLMLDDGSQPTKLFNVDNSQLGAEVLVERIYSIAKEHCVSDILIGTEATSMYDWHLLEYLSESKLSLEFNLKLYRFNAKWIKNFKKSLAPRGKTDPIDSFAIAERLRIGRLPKEYVPDSKYQPLRKLTRFRFHLMQQIAREKDFFLANLFLKASAYSRVAPFGSTFSATSLAVINDFFSVDELAAMPIEELTEFILEKGKSHFSKPSEIVDNIKRVARESYRLKPELTPTVNLILASTYNNIRCYKEQVKLVDSAITENLKAFKHTLDSISGIGPVYAAGILAEIGNVNRFSNDSALAQFAGLTWPKHQSGKFQAEETRMSHTGNQYLRYYLVEAANSVKRYDATYKAFYEKKYAEATKHHHKRALVLTARKLVRLVWTLLVRGVLYQPGFCSFEDLPKIG

SEQ ID NO: 227572 - protein, 315 aa, unidentified
MAMPVPVSKPIIGVDVAKNELVIYHAELDLLEVIPNNKTAIKKWLKALPGAVSVAIEATNIYHLEFADLAYEAGCVIYMVGGYELSHYRKGVNIRAKTDAQDAKLLARYLKNEADELRPWTPPSPLYRQLLSLFRRRAALVQARVSLTQSWANEPLLKASFAEQMKSMQKLESLIEKMIADRLKEAGLSDQLKRCLKVEGIGFLTGARLVTSFQRGDFRNADAFIAFLGMDLRVSKSGQKDNRRSLSKRGDSEARRLLHNAAMAASRTAAWKEFYQAQRARGYSTTQVLVMLARKLARVVFALLKGQSEYQPKVG

SEQ ID NO: 227573 - protein, 422 aa, unidentified
MNAQEADVYSIYVGIDWADKKHDVCICPKDSDTREFDVIPHRAEVIEAWVKDLHQQYGGRIAIAVELSKGPIVSALQKYDFIDLFPVNPSTLAKYREAFQPSKAKDDPTDAELAVDMLLRHPEHFKVLKPQSPEMRALATMVEQRRRLVNEQGRITNRLRSALKQYYPQVLEWFEHIDTPLFCAFVKRWPTLTQARRARANTLKQFFHEHHMYREDVVKRRRKAINAASPLTLDEAVIVPYRMQVLVLVEQLELMFKAIDQFDGAIAKLSSQHSDYALFQALPGAGPSLTPRLMVAFGEQRERFSSAADVQKLSGIAPVTERSGQKHWVHWRLQCPTFMRQTFVEWAAQTINKSYWAGAYYRQQRDKGSTYQAAVRSLAFKWIRILYRCWQSGVAYDESRYLKALERRGSPLVKKQEVLETA

SEQ ID NO: 227574 - protein, 341 aa, unidentified
MQSVSLIGIDLGKHTFHLHGQDKSGNAVFRKKVNRQQLVSFFATLNVCVVVMEACAGAHYMARKLATFGHQVKLISPQFVRPFVKSNKNDFVDAEAICEAASRPAMRFVTPKTEAQQTLSALHRVRESLIRDRTKSSNQMHGFLLEFGVSLPVGPAVIARLPTILADHELPPRMIAILERLYDHYKYLSGQISEIDKEMRRQLADDDLGQRLLTIPGVGPVTASVLAAEMGDGKQYGCSRDFAASIGLVPRQYSTGGRANLLGISKRGDKNIRRLLVQCARAYMQRVSRQTGRLADWVRTLMIRRHSCVVACALANKLARIAWALATHDSRFDAEIAIKRV

SEQ ID NO: 227575 - protein, 345 aa, unidentified
MEYFAAIDVSLELSSVCVVDGTGKIVREKKVASEPEALAEFFRGTGLTFTRIGLEAGPLSQWLHAGLTAAGLPAMLIETRHVKAALKAMTVKTDRNDARGMAQLMRMGWFRPVHVKTLPAQEVRALLTGRKLLLGKLRDIELGIRGLLRGFGLKVGKISKGNYEKRIRELVTGHPMLEPIAAAMLQARASLRAEFGKLHRMLLAIVRDDPVCRRFMSAPGVGPVVAVTYKTTIDDPGRFRKSRDVGPYFGLTPSKYQSGEVDWTGRISKVGDAMVRTALFEAANVMLSRVTRFSALKAWALRVAKLRGLKRAKVALARKLGVVLHRMWIDGSQFRWNKAPAAVAA

SEQ ID NO: 227576 - protein, 354 aa, unidentified
MIIIGRDYHPGFQQIAFVDTETGDCGEQRLEHSEAAEKFYRDLATQGKKVRVGMEASGHGRWFERLLAELNFELWIGDATEIARKRERKQKTDRQDAQHILRLLLKDDFPRIWVPNCENRDLRQLLWHRHRMVQARTRIMNQLQAVALNEGLRCKKRLWREHGREQLESFRLAPWASRRRQDLLELLDRLNPTIVELTQAIEREVEKCPEAQRLRTHPGVGPLTALAFVLIIGRADRFQCGKQIASYLGLVPLEDSSGNRRRLGHITKQGSSMLRFLLVEVAQVTARSIPEWRSKYFHLMMRRGRKIAKVAMARRLAIRLYWMWRKEWNYQQVKKFSSHTGQLGTGDGVQSNTE

SEQ ID NO: 227577 - protein, 406 aa, unidentified
MRFYIGGDWADAEHAVWVEDENTTKIASRIVPQTAEGLSEWGRWLDERRAEGIELWAALENPEGRIVDFLLDHGVLVFPVNPKALDRARDRFRMSGAKSDPFDAYVLATFLRTDHGHLAPLRPSSEAAQELKGLTRDHARQVRQQTRLLNQLTATLKAYYPRALEGCEDLKSQWARAFLREDSTPAAVAALTARQWQRWARAPRLSAERIAELWAILQRPQLPVPAHVVRVNARLVGALLAQLETTITAVEAYREAIPDFFASMPAAEWATSLPGGRSGTTVPQLYAELGDAPGRWQTFRHLPGHAGSVPVTDRSGKQVTVQFRFACNLHLRQAVHQFAFQSLGKSEWARAYYDRCRKRGHSHHHAVRALAAKWLKIIFVLWTRQVAYDETYHLATMARQHLRQTA

SEQ ID NO: 227578 - protein, 348 aa, unidentified
MAMTIVEAGRTVVGGVDTHLDVHVAAALDPIGGVLGVESFVAKPKGYEALLEWLAGFGTVTKVGVEGTGAYGAGLGRFLRQAGIEVIEVDRPNRQVRRSQGKSDTTDAVEAARAVLSGRATGAPKSRDGNVEAIRALLVAKRSAREGRLRAVHQMRQLSYTAPDQLRCRLKGLSITDFVAEAAALRVRTGTDPVVAATKAALASLGRRVQALEEETALLDERLSELVIMTAPSLLELFGVGVDTAAVLLVAAGDNPERLRSEGAWALLCGVAPLEASSGKVTRHRLNRGGDRHANQALWRIVMTRIATDPRTRAYLERRTKEGRSKREVIRVLKRYVAREVFKHLPRA

SEQ ID NO: 227579 - protein, 440 aa, unidentified
MTEFGKLNPKAGGIDLGTEQIFISIDGETVKSFGSFTPDIDAIKVYLLENEIPTVIMEATGVLWVPLYDALESAGIKVCLVNASHAKNVPAQKSDPADCRWLYKLHVYGLVRASFIPREAIRELRSYIRLREDHKGIAASHIQHIQKAFELINIKLRNVISDTMGVSGINIIEAILKGERDAEKLTNLCDRQILKHKKERVVKSLVGNYKREYVFMLQQAYEAWKFYQKQIANCDVQISELLKEMTLNLPELPGENIGKPKPSRHDKPNIDDLHSKLVNLNNGKDATCLPGFTDTTVLKLIAELGTDFSKWPTSKHFVSWLGLSPRKHQSGKMNKTRRTRKKNTKAGQIFKDSVMSKAESKYLALKGFYNRIKSKNGAKAANKATARKLAVLFYDYMTKGFQYVETGLKEYEKRFKEIMFKNLTKKAISFGYQLVEAGVH

SEQ ID NO: 227580 - protein, 406 aa, unidentified
MSMNAVGIDVSKRKSTVAILRPGGKIVVKPFDVPHLSSDFQSLEKLIRELDGETRIVMECTGRYYEPIARELSQAGFFVSAVNPQIIRNFQGQDNPLRKVKTDKADSVKIARYTLDSWANLKQYSLMDELRSQLKTMNRQFDFYMKHKTAMKNNLIGLIDQTYPGANTYFDSPTREDGSQKWVDFIDTYWHVDCVRKMSLSAFTDHYQKWCSRRKYNFSKSKAEEIYEKAKELIPVLPKDNFTKRIIKQAIEQLNAASQTVEQLRSLMNETASRLPEYPIVMAMKGVGPSLGPQLMAEIGDVTRFTHKGAITAFAGVDPGVNDSGDYSQKSVHASKHGSPVLRKTLFQIMDVLIKTKPDDAVYLFMDKKRSEGKPYYVYMTAGANKFLRIYYGRVKEYLSSLPESE

SEQ ID NO: 227581 - protein, 426 aa, unidentified
MLPDAAGEYGKGEGLLFIGDDWAEGHHDVVVQDEAGKTLARRRLPEGVDGLARFHEVVASCLGEDGEPDAAQVMVVIETDRGPWVKALAAAGYRVFPVNPKQAARHKETVAVSGKKDDFFDAAGLADMGRTRRHQIRELAADSDIAEAVKIAARAHQKLVWERTRHLLRMRSALREYFPAALEAYADLTLTGADALELLGKAPEPASAARLTVTQITAALRRARRRGDLAQRARDIQAALRVPHLAQPVVIAEAYGASVQASAAMITALNEQVKIMEARVSGLFHRHPDAGIYLSQPGIGDITGARMLGEFGDAPGRYASAKARKNYAGTSPLTIQSGKKKTVHARYIRNRHLIDALHAQAFAALTASPGARAYYDELRARQIGHEAALRRVAGRLTGVLHGCVTTGREYDEATAWSHRRTPAQAA

SEQ ID NO: 227582 - protein, 345 aa, unidentified
MKITTVGLDLAKSVFQVHGVDVRGKAVLRKQLKRSEMATFFANLPSCLIGMEACSSAHHWARKLVALGHEVRLMAPQFVKPYVKSNKNDRNDAEAICEAVARPNMRFVPVKSCEQQTVLALHRARAGFVKARTAQANQMRGLLGEFGLIIPQGVRQLCHRLPEILEDADNGLPGRMRALLHRLLAQFKVLDEQVSELEREIVLWHRQNDDSRRVERIVGIGPLTASAYVASVGNAKAFSNGRQVAAWLGIVPRQDSSGGKPKLLGISKHGDVYLRTLLIHGARAVLRHLERRPAATNSWLARLVARRNRNVAAVALANKNARIAWALLAHQRDFVSDYVSTAPAH

SEQ ID NO: 227583 - protein, 438 aa, unidentified
MLDPRAAFVDVGSEKMHVSIAGGPPAVFGTVTSQLHALRDYLAEHQVRSVAMEATGVYWLPLYGVLEASGMEVIMVDGRQARNLPGRKTDMKDCQWGATLHAHGLLRAGFVPPAHVRRLQDYLRLRGDHIVAAAGHVQHMQKALERMNIKLHDVISSLTGASGLAVIRAILAGERDPQALLGLCHRQIRTVKAERVVESLRGDWAEEHLFALAQAVQSWDHYQGLIAACDRQIADILRQMPDANTPPPAASTKKATPRRQPGVNAPDIADLRDMLEQICGGKDLTILPAHTEYSVLQIIGEVGTDLTKWRTEKHFTSWVGLAPGSAQSGKRNGRVKRRRNRAGRIFCVMARSLARSKYIAFGGFYRRMAARRGGLVANKALARKLAALFWRAMVKGLDFVEMGVAQYEAKVLETKHSLLRKLARQLGQQVVPKPIAVA

SEQ ID NO: 227584 - protein, 354 aa, unidentified
MSNDKFVGFDVHAATTTYVVLNDRGKVVAQGVVETTADGLLSLVKGISGKVHLTFEESTQAAWLYESLEGHVAKLLVCNPRKNRRRQENKNDRVDALQLARWLRSGDLSPVYHRDHGTKSLKELVRGYENVVDDGTRVKNRLKAIYRSRGLLTPGRDVYNPDERDDWLSKLDSVGLRTRAEWLHTQNDSMDVLVKAARKAVTCEARRHTGCKLLRSVPGIAWIRAATIVAHVKYPFRFRTKRQFWCYCGFAVVMFSSDDWVIAGDGFVRKSRPQTTRGLNKKYNRHLKAVFKGAARTACGTRGILRPHFEYLVASGMRESMATLTVARKIAATSLAIWKKGEKYDLDKAVIRKE

SEQ ID NO: 227585 - protein, 461 aa, unidentified
MTTGQPVAGTLIQQTTDAMKALPVLDPRAAAIDVGSEKLHVSIAGDPPKVFGTFTGELESLCAWFKQAGVHSVAMEATGVYWLYLYEVLEAGGLELVVVNGRYVQNVPGRKTDMADCQWLATLHAHGLLRGGFVPPTDIRQLQDYQRLRGDHLIGAASQVQKMQQALERMNIKFHDVISDLTGVSGLKVVRAIVAGERRPGELLALCDVQIQKKKADRVKESLRGTWRKEHLFALRQALELWETYQEKITACDRELEALLRQMADGRPPSTGGGQGEVKLAPLKDAGKNAPVIERFQELLARICGGRDAAQIPGLSPYSVMQLISEVGIDMTRWPTEKHFCSWLGLAGGRKQSGKRKGSVKAHRNRAGRMFCRAAATLGQTVDKALGGFYRRLRGRIGGLAANVALARKLALLFYRLLRYGTAYVEKGLKMYETKVLETETRLLRKLAKKQGFTLVATMPN

SEQ ID NO: 227586 - protein, 377 aa, unidentified
MKKISVGIDISMDDFYACIKIRTQTGSTKIKGTHSFKNTENGFKEFLIWALKAKEDDCSVIFVMEATGVYYENLAYFLYANKQSVAVILANKVKNYIKSLNIKTKTDKTDSKSIAGFGIERELDKWQPMSPVYKNLRDLCRELLSIKKDLQRSKSQLHAMNKSHEKLESIVALKLEQIKFYEKAIVIIKKEIKNSVNKDETLKEKIRKAQTIPGLGFETVVILVCETNGFALFDNIRQLVSYAGLDVTFNESGTYKGKTRISKRGNSRVRQALFMPSMSATRANEPIKKLYERICVRNPDIKRKGIVAGMRKLLILTYTLWKKDEEYDIKYEWNKGPSSNDTTKPSFGPVTIKKKAEQNCSALDRPKFNELTEAFFC

SEQ ID NO: 227587 - protein, 361 aa, unidentified
MVRHIFVGIDLGDKNSVARIAVDREKSVRFGFVNSRRGRARLFCEVKRWAEQVGGARAVMAYEASSCGFILRDEAEQEQIQCWVLSPTKMEKSAEQRKHKNDDRDADDVLEKLRGHILAGNRLPTVWVPDVEIRDDRELVRTRLELGEKQTQVKAQIQMLLKRQGLEKPERLGSSWTQKYRAWLMALSESSQHGQGMRYALGSLLRQLKALESEIEQIDELVESLAEQERNKPIVEELRKERGVGLLTALVYKTEIGYAGRFRRSRQVGKFHGLVPTSHESGQQNDRKGHISRQGPPRLRKVLCQASWIHIRYDKSSRQFYDRLVRRNPKKKKIALVAVMRRLAIRLWHRMRKAELQLTPA

SEQ ID NO: 227588 - protein, 359 aa, unidentified
MEAQRKALSFKGQNIYIGIDVHLKSWSVTLMSEATQLKRFSQSPDPDALYAHLVRNYPEAEYHSVYEAGFCGFWIHYRLVGLGIHNIVVNPADVPTTTSEKLRKTDAVDSAKLARSLRAGELKGIYVPGSESLETRSLIRLRDSITKDQTRLKNRIKSHLRYLGIEIPEEFSGPGRCWNRRFVVWLKGAETGTAYGRQTLDFLVRQYEALRGQRLEMLRAVRALSRTERFEKPLENLMTVPGIGQLTGMSLLSEIDDIRRFKSADQLAAFIGMIPMCHSSGEREGVGDITVRRSARLRSVLVEASWVAVRQDPALSMAYGGYCKRMAPGKAIIKIARKLVNRIYFVMKRNQPYVKCVVA

SEQ ID NO: 227589 - protein, 415 aa, unidentified
MSLKIVYKICCGIDVHKTFVVACIASTNDIGVTSYESHRFSTYTSGLKTLLQWLLNRNCKDVCMESTGKYWIPVYNILENDCSIVLAHPKYVKAIRGKKTDKKDAKWIADLFKHDLVAGSFMPPADIRQLRDLMRYRFKLTCFQSSEKNRLQNCLTVSNIQLGNVVSDTFGKSAQAILDKLLENPADTSFDLEPLVYKSLKKKLPQLRDAIDGYITPEQAGKLKVIKSHYENLESRKAELEELILALAAPYQQELAILQTAPGIRSDFTAIGIISEIGTNMEAFPSAKHLCSWAGLTPTNNESAGKKKSVRVSKAGCYIKPLLVQCANAVVTSKKHPEIRNRYLRLKKRRGHKKAIIAIARMLLTALYHMLKNGENYNAELYRKSYLPPVDREITVEQAIIIARNQGYKIKSATA

SEQ ID NO: 227590 - protein, 425 aa, unidentified
MEQSTRFVGMDVHKDTIVVAVTATGEVGKAIPYGTLSNTAAALEKLVKRLHQAGCGPLKFCYEAGPCGYGVHRTLAKMGEDCMVVAPSMIPRKAGDRQKNDKRDAASLAVLHRGGLLTAVWVPDAAHEAIRDLIRTRQAAVRAVRTARQQLSAFLLRHEHIYPKGRQPWSKAHRGWLADQRFVQPAQQIVLEENIEAVRLGELRRDRIDGHLRAQIPTWSLFPLVQSLCALRGLDTIASAGLAAAIGDPSRFASAPDFMAYLGLVPSEHSTGPKRRIGAITKAGDVHARTLLIEAAHNYRFPARVGRHKLAAVDGVSEAVRAIAWKAQTRLCHRYRRMMAAGKLKQIVVVAIARELAGFVWSIACITSDPPARTSVATPASEDSGLTNRGMTTIASHNDSQRHNEIDRPTTGRDHKGHSQPQGLD

SEQ ID NO: 227591 - protein, 345 aa, unidentified
MKITTVGIDLAKNVFQVHGIDAGGKAVLRKRLRRAQVAVFFGNLPPCAIGMEACASAHHWARTLQGFGHTVGLIAPQFVKPYVKTNKNDVADAAAICEAVGRPNMRFVPVKSIEQQAILSVHRVRQGFVKARTAQANQIRGLLGEFGLIIPQGIINVAKRVPEILEDASNELPVPFRHLIDRLTTHLKELDRQVKEFEGEIIAWHRSSELSRKLEKIPGIGPLAASALVASIADAHSFDNGRQVSAWLGLVPRQSSSGGKPTLLGMSKRGDTYLRTLLIHGARSAILAAKNKVDNTNGWLTNLLKRRHPNIAAVALANKNVRTVWAILAHDREFKADYVPTRMAA

SEQ ID NO: 227592 - protein, 397 aa, unidentified
MYIVGIDIAKRKHEAAVIDGEGAVIIKPFSFTNNCSGYNRLLAMLTKAKLPLDEVSFAMEATGHYWLALFTRLQKEGFRVQVINPVQTNSIRSFYIRQAKTDPRDALLIAEVIRFGHFSESTLHPENIYELRELCRGRHAIVSMQADVKRKAVALLDQVFPEYETAFTNMFSDTSMAILQTCPTPKELSEMPLEELCHLIEVSSHKRFRMAKAQELQELARNSFGFAMAGDVFSTMIRLYAKHLDFLKQQVREMDRKIAEIMETLDTPITTITGIGPTLGAYILSEIGDINRFSSAAKLAAYAGIDPTMRQSGEYNGVRNRMSKRGSPYLRHAIWLAASSAVLHDPALKLYFQKKRDEGKPYMASVGHACRKMVSIIYAVMRDNKAYTPYIPNEISA

SEQ ID NO: 227593 - protein, 402 aa, unidentified
MKKVCGLDVHKDSIFCAIYNGADHSEVKEFSTMTPSIYSMGEYLQSEEVEEVALESTGIYWIAVWDLLYEMGFKLTLVNPYLIKQMPGRKSDIKDAQWIATLLHKSMLRGSFVPPPVIQELRIYSRKQSKLKQQLTRVLTLMDSILVKCGIRASSCLSSISTKSFLCIVEALIAGRTDPGYLVSLVYGNRKNKQSGKLKEALTGNVKAHHRQELLWAKQEYEMYQVQISECLSEMQRICDEHFSVMVKLLQTIPGISRIAAMTIIAETGGDMSVFESSDKLVGWAGLRPRNDESAGKYKSTATTKGNKYLRSILAQVSWAASRMKDSFFKEKFQRLSMRKPRKKALIAIARKLLVVIWNVLHYAREYNPKLVPVQDPVKMKARLAYHKKEYEKTAKLLNITV

SEQ ID NO: 227594 - protein, 385 aa, unidentified
MTTTRQVSTFIPRDYDVFAGLDVDKRSIAITFTDHGTMRKSLKLPYSARQLLNYTGKHFPGQRVAFVYEAGPTGFGLHDELTAASHYCLVVSPSMVPSAPRNKVKTNRLDSKKLSEGLGGGQLRGIHVPPPSYRELRHLVQLRDTQVAQLTATKLRIKSLLLYEGIAFPAVDGKWSGRVLRQLEILPCNATVRFKLDQLIDTLQFHFQSAAKVQKQIRYFCQNDPELSQCISFLISLPGVGTITATHALARLGDWRQIKDVRQIAGFLGLVSSEHSTGDKENRGEITHIGDKRLRSKLIQCAWTAIRKDPELGAFYRRIYERHPKKVAARKAIVAVARKLTTRMYAVLKEQRPFVIRADRSIAPLTAEETTGLGERLDGAQNDQP

SEQ ID NO: 227595 - protein, 409 aa, unidentified
MQVVHEVCCGLDVHKKSVTACVLWASGRRRQTREFGTFTKDLLEMSDWLQSCGVTHVALESTGVYWKPVWNLLEGQFEVLLVNAQHIKAVPGRKTDQKDSEWIADLLQHGLLRASFVPPTPTRELRDLTRYRASLAQEINRIANRIQKVLEDANIKLASVATDTLGASGRAMLEAIVNGEQDSQRLAEMSRGLLRNKIPQLQQALEGRVTPHHRFLLRELLDHHYFVESKMRRIEQEVAERLGPFQSEVARLCTIPGVDRVTAWGLLAEIGLDMSQFPDAQHLASWAGLCPGSHESAGKRKSGKIRKGSLWLRRCLCQAAWAVSTKKNNYLSALYRRLAARRGSKRATIAVAHNLLVIAYYILRDQTCYQDLGPDYFDRLNPEGLRRRLTKRLEGLGFKVTVEPLAEVA

SEQ ID NO: 227596 - protein, 391 aa, unidentified
MRFAGIDIASETHVVVIVDAEGTLVLKATEFAEDAQGYQRLLGLLGEPTTCKVAMEATGHYWQNLFAALAAAGFEIALLNPLRTHRFAGEDLVRTKTDAIDALGIARFAQQKRPQPMRLPDAATQELRELVRLRDRVVQDLGDATRRLHRLVDLGFPEFTRYVKQLDSELAIGILREYPTAAAFPTTSRPLAKLVYDGKHKVGAVLADQLVEAARRSVGWHHGDAYRVQVQYACEDIGLARRRLRELEQRIETTLRTHEVGKLLTTIDGIGPQTSARLVAEVGDFARFSAPAKLAAYVGAIPGLKHSGKKRPVRGPLSPLGHARLRRALWMPVLTAVRCNPWLRAYYQRLLAAGKLPKVALVACMRKLLHAIYSVATNRKPFVAQLPEAAS

SEQ ID NO: 227597 - protein, 494 aa, unidentified
MRMASSSPASRRNAKNALKLKKQTRERAATATSPVEMEKLEPVHRRAAGIDIGSAENYVAVPPETVAPGESSVRVFGVFSEQQDALVEWLRSCQISTVAMEATGVYWLTLYDKLEAVGIEVYLVDPHGVKAVPGRKSDWLDCQWLQKLHTYGLLQRAFRPDAPIRRLRTLTRQRTGLVCAAASQQQQMEKALVCLNLQLGLVISDLVGETGISIIRAILLGERDPKVLVERYRSVRCTKASIGEMKQALQGTYNDEDLFVLQQCVDTWDFVQEQVRECDGKIELALAAIPTARAVERKAPPLPVPAAAEQPKKKANGTQGKNAPVKDFTPILRRICGVDLTQVMGLNLLSVLMLLGEIGTDMSRWRSAQAFCSWLGLCPGAKISGGKVLSRRTRKVTNRAATILRLAAVAVGRTDTWIGLFYRRMKARKGGPKAVTATARKLACIVYHMLKFQEEFVALDMEKYVAHAQAHRLRYLKREAEKLGYELVEAEQVA

SEQ ID NO: 227598 - protein, 419 aa, unidentified
MSFKIIKNNCCGLDVHKTWIYACIGITDSCNRTEYKQARFSSFTRGLNELCEWLAKYSCKDVCMESTGKYWIPVFNILEKRGLWVTLSHPKYTKPMKGNKTDRKDAKWICDLYMCGMVKPSFIPPADIRHLRDLVRYRFKLTCMITGEKNRAHNCLTVSNFKLDDVFSDIFGKSSRSITEQILQHPGETFDVAPFVDGKCKTPIEEIQAAVDGAISEEQAIKLRQCLDHIDELEKHKAEIEREIFRLSEKYEAALNLIRTVPGFDKNPLTAIQVLSEISGDMSVFPTAKHLVSWAGCCPRNDQSNQKIKSTRISRAGSYFKPVLVQVANALIKSKKHPEFTNRYRRIKARRGHKKAIIAICRMILTAIWHILSDLKPYTAEGYSEPRPAKESKVLSTSQALNLLKQRGYIIKDEPAIAS

SEQ ID NO: 227599 - protein, 415 aa, unidentified
MDVVHPRCAGVDISKRDAKVCVRIQGAGRARARSTVTTWEAVTNRILALRDHLIAEEVTLVVMEATSDYWKPFYYLLEDAPFEVMLVNARHTKGIPGRKTDVSDAAWLAELGAHGLVRGSFVPPEPIRQLRDLTRTRTAITRERGREVQRLEKLLEDAGIKLSSVASDITGVSGRAMLEALIAGDRDPARLADLAKRRMRSKIPELTEALTGRFGEHHSFLARLHLDLIDGHSRAIEELDERIEEAMQPFRATRDLIVTIPGISTVVADVIIAETGGDMSRFPSAGHLASWAGTCPGSNESAGRVKSTHTRPGNPYLKGALGTAAMSVARSKNTYLAAKFRRIASRRGPVKALVALEHAMLVAIWNMCSTGTYYADPGEDFFTRLHPDRARDRALEQLHRMGYAVTLEPLPAQAG

SEQ ID NO: 227600 - protein, 326 aa, unidentified
MSSFSEIIGVDISKDVFDVVGETIPHRQFANNDEGFAAFRKDVSKDSLVVMEATGLYHARLSQFLYRKGIPTSVVNPLSVKRFMQMKLAKIKTDKSDAKAICEYGQLYEVPLFTAPSSFRQEAMQLFSLRDHYLKNRTAAKNKIHGEEVLGIPSKFVFRSLRRDLKHLNKEIAMMDKKLMQIVLRYYGEQFSLLFSIPGIGIQTALSLIVVTDGFSKFDSAAKLCSYIGITPTIRQSGSSVRGRSRISKIGNKKLRTLLFLCAFTASQSNEACKELYDRLVDQGKSKKLAMIAVSNKLVKQAFAIVKSGRPYQAGFSSSLTVTNLN

SEQ ID NO: 227601 - protein, 340 aa, unidentified
MITPTTLPDAPWYLGIDVAKDSLQLVWLHAQQEQPSRQTLPNSPEGIQCLLDLCQQRPCDRIILEASGGYEQRLVLALASAKLPGVVVNPKQARDFARATGRLAKTDPIDAYVLALMGKTLRPPVRPMPDEQLLTLKELTTRRDQLVESQTQEKIRLQQDPPPLVRKSITRSLEHLQRQIARIEAEIRKLIRQSPLWQAKDQLLRSVPGVGEQTAACLLAHLPELGQLNRRQIAALVGLAPLNRDSGRFHGHRTIWGGRIKVRNVLYMATLTATRCNPVIHQFYQRLCEAGKPAKVALVACMRKLLILLNAILRTGQPWNPHHPKNPTAQETPNHPEKSP

SEQ ID NO: 227602 - protein, 338 aa, unidentified
MKVYVGMDLHATNTYVGMVDEENEVLHKQRFRNELPLILAGLDPFRKDIEGVVVESTFNWYWLVDGLMAEGYRVHLANVSAIKQYEGLKQIDDKRSAFWLANLLRLGILPTGYIYPKEERPTRDLLRKRLHLVRHRTSHILSVKNILARNLGLRMKSEDVKKLEDPEVKRFFPDKEMQTAVLASVGLIRHLEVEISGIERMITKKLKIRKEFTKLMTIPGIGKILTLTIMLEVGDIRRFPTVGDYSSYCRCVKSIRTSAGKIIGYGNRKNGNKYLSWAYIEAAQAARRFHETVRSYYEKKMAKTNRIVAIKALSHKLTRASYYVMRDQVDYDPARLFR

SEQ ID NO: 227603 - protein, 370 aa, unidentified
MRNRSMFVGLDVHKETIDVSIAEGDRHGEVRHYGVIKSDLEPLDKVVRALRAPDRRLHFVYEAGPCGFGIHRHLTSRGEDCVVVSPSMIPKRSGERVKTDRRDSEMLARLHRAGELRAIYVPDDTDEAIRDLVRAREDAVVVGTQAKHRLKAFLLRQGRRYPGREGWTLPYRRWLTDLSFPSGAQHVALQEYRDTIGETEQRIDRLTEQLRQLAPAWRWAPVVNAFQALRGVSFITGVSLVAELGDLTRFRHPRELMAYLGLVPSENSSGPRVQRGAITKAGNPHARHMLAEAAWAYQGKPRIGRKHASRQEALPKVVCDIAWKAQLRLTARFRRLVARGKAKPKVATAIARELTGFIWAIAQEVSPAPQ

SEQ ID NO: 227604 - protein, 345 aa, unidentified
MNKVTPAFVRLAVDLAKQVFQVAGEDAYGRVVYEERIKSRPAFSKLLAGLGAKVEVLLETGPGAQAWARQVQEAGAKVRILPAQRVAEHRSGAKNDRNDCLAILRAGRDEAIHGVPVKTVHALEMQAEHRVRTGYIRRQTSISNQVRGILLEHGIAIAKSNSALALWVTRIQQDTSFPIPEMLREIIADLWAEWEHLGQRRKRFDRQLEQIAQNDEVARRLMTIRGFGPIMTTALLAKQTQPERFPNARQFAAYFGLVPDQHSSGSTVRLGRMTRRGDGYIRSLAVTGAQSVLHRVRADATGADDKRLQRWCRQHGKKGAAIRLANRNLRIAWILMTTQAEYQPQ

SEQ ID NO: 227605 - protein, 398 aa, unidentified
MVSVGIDVSKSKSTVCLMKPFGEIVAGPMEIKHVDSELKALIKIIKSLNDEVKVVMEATGIYHLPVLTYLKDHGVFVAVVNPYQMKQYRVQGLRRVKTDKADSMVIAKYGLDKWDSLMDYFSSEDKYRELTLLSRQYRHYMRIHIASLQELTHILDYTMPGLKKEFKSWDPEKGKDKLADFVEHYWHYDNIRRKSERQFVESYLKWAKKKGYHRSQNKAAKIYSMAKEGIPTLPADQTTKMLVLQAVEVLRRVDETLNTILARMQEIANTLPEYTVVRSMGGVGDVLAPRLIADIGDVRRFHNGKALIAYAGIDAPPYQSGQFVGTNRNISKRGSSAIRKTGYEVMRMLKSHAEPEDNVVYRFILKKEAEGKPKKVAKVAGLNKFLRIYYARVMEVYS

SEQ ID NO: 227606 - protein, 407 aa, unidentified
MDIVHPKCAGLDVHAQTVVACARLGSGKAVAYDRRTFGTTTPELLALSDWLTAHGCTHVAMESSGVYWRPVWHVLDGHFELVLANAMHIRNIPGRKSDVNDATWIADLLAHGLIRGSFVPPASVQELRDLTRTRKQLVREIAQHTLRIQKTLESANVKLTNVLADILGVSGRAILTALIAGETQPERLAALASDKVKASRAELVAALHGRITDHHRFMLRLHLDQIASLDLAVRDVEARLGEALTPFRAAVDHLITMPGVSETVARVIVAEIGFDMTRFPSAAHLVSWAGLCPRLHESAGKRLSTRTRSSNPWLKTTLVQAAWSAARKKDSYFRAQFLRIKSRRGPKKAVLAVAASMLTAAYHMLRDGVVYRDLGADHFDRRDKAKLAKRLIARLHDLGLVVDIRAA

SEQ ID NO: 227607 - protein, 427 aa, unidentified
MRSVGLDIHKRVVQAVILDDQGRQILRDRFPCDREALLTFARKHFGDDARVALEATTNTWAIVDLLEPHAAEIVVSNPMRTRAIAEAKVKTDKVDATILAQLLRCDFLPPVWHPGPELRQLRELTSRRASLTHHQTAVKNRIHSVLHQRLLAGPQDLFSSKGLDWLRRLELDPLGRAAIDSDLRLLEAHEAELETLDEELAKRGYWDGRLKLLMTLPGVSIAVAQTLMAALGDPNRFPDGDHAASYIGLVPSTHQSAEHCYHGHITKHGRAHARWLMVEAAQHLDDHPGPLGVFFRRLAAKKGRNKAVVATARKLVVIAWHMLVDNEPYRYAKPVTTKSKLVHLRTTGGGGRKKGGVPQGSLLSQPTGHGSTRLIPSLAEVYASEGLPLPASIPPGEQKAIQQAGVEGYIATIHASRRTPKTSHQAS

SEQ ID NO: 227608 - protein, 343 aa, unidentified
MKYIGIDLHTNSFTACYLEEGKPERIETFRLQEPGLERFIETLAEEDEVALEATGNSCFFRDQILPYVSRVVVIAPWQFEVIRRSVKKTDKHDARAIAFFLSKDMLPESRIRKTEHTQLASLIQTRDQLVRLRVSLINKVHGLFTRHGFKVKKEKLTTKKGFASSIKTLAWDSLEKVEIDVITEQLESLKNSLRKLEKEITSFGETLPGFKNLMSIKGIGPLSAAILISTIGDISDFEKTGNLASYLGIVPRVSQSNDQHLVGRITKRGSKIARKTLVQCTLIAKRYSPYLHGFYESVKARRGSGKAIIATARKFLNTIFYTLKNNWVFEDFTKFKFNTCNQS

SEQ ID NO: 227609 - protein, 414 aa, unidentified
MLKIVYRVCCGMDVHKSFVVACIASTNEYGVTTYKSKRFSTFTKDLRRCADWLSENNCKDVCMESTGKYWILIYNILEPTCNVVLAHPKYVKAIRGKKTDKRDAKWIADIFKHDLVAGSFIPPADIRQLRDLVRYRWKLTNFTTGEKNRAQNCLTVSNFKLDDVFSDVFGKAASAITTRILQDPTEKITDVSGFRTKGMKATNEQVLAAVDGEMCEEQAEKLRIIRSHMDSLELYKLNLESLILSTAEQYLPQLNLVMTVPGIQSFAAIGIISEIGVDMSVFPTSKHLCSWAGLTPQNNESAGKKKTTRISRAGAYIKPLLVQCALCAIRAKQFPELRNRYLALKKRRGHKKAIIAIARMLLTAIYNMLKKNETYNPEIYRKGDRPPAHREVSVEEAIFILQRQGYLVTAPPTS

SEQ ID NO: 227610 - protein, 360 aa, unidentified
MIVQGTSVGLDVHALSVVAHAVDEGTGKLVRARLCPDYGEVLGWLGQLRAPVRVAYEAGPTGFGLARAINQAGMECVVAAPSKLQRPAGDRIKTDARDAAHLARLLRLGEITAVRVPERDIEAVRDLVRAREDARADLMRVRHRLSKLLLRQGIVYYGGTPWTCSHEEWLRRHRFADIHLKAAFDHSFDAVLAATAARDRLDEQITAVAASRRFADPVNRLGCLRGISALTGLALTVEIGDWSRFTGSAIGAYVGLVPSEHSSGSSRIQGSITKAGNTHVRRLLIESAWHHRKSYSTSGPSLRARWAKVDPALRARGHAGNRRLNKRWRTFTERGKNPRVANVAVARELAGWCWSLATMQ

SEQ ID NO: 227611 - protein, 341 aa, unidentified
MLYAGIDIHKTVFQAVVLDPDTGELSESRFAPSRERLGEWAGAWQGKLAAVAIESTTGWRWVARELEQRGFEVHLVDPGRASALRGRRRRPKTDKLDARWLALVLARQLLSECEAWMPPAEIQLLRDQTRLRKSLVDNRTGWAQRLHALLAHEGWPCSRGRLLTPEGRRWVIALNLDPAVRAQVDVMLTLIVALDEQLKVVETELRRFARSDARCQALETIFGVGPIFACHLLAEIGDARRFKRSRQVVRASGLDPAVIESADSKRRGRLAKQGSPYLRWALVEAATHSSRSTSPDHDLYLSTAQRCGRGRARLTVARKIARRSYHLLSAVEAATLETQKA

SEQ ID NO: 227612 - protein, 523 aa, unidentified
MVTRTKKRKSTGSKRRFIGKPNGQIQERVQAVGPEHFGIVAVDCAKRRSKWMLCNFYGKVIIEPTTVEHTTGALRMMTHYVSEVCQAEGLTDTIIAVEMTGIYHKPVQRAFRKAGFDTRIVHPFASNHYRRPLHPDSKTDDHDLEAIFQAAIKGYGLATLPVGEVYQSLQAVSRHRHNLVKQRARLMVQIRRLLHQTLPGFADLFEEDKLFHKSIALPIILKFTSADAIRKAGVDGIASHLNKTNVRFQTRTIERIVAWASTAADPSELAAMHTRQWQQLNDVRRLLGEHVCAAEREMAGFLVKTPYVLLLSVTGINVVSAARLAGEAGPIEHYASARAITGRAGLYPSRYQSDEIDHADGSLVRQCNRKLRGAAMLVAENLIKCHPYYRGLSALWTQRKVDPRDRRCRIANRALRMVYQLVAGRQLWRGKGVDREYLLAKLQEFHRLHKTPLEPAIRDLHEAFAWLPKSAYAAEAKPLAEWARKKHRGPQRLGDLLIPLLIRLGVQGSDKVECNTSEARSSD

SEQ ID NO: 227613 - protein, 342 aa, unidentified
MYYIGLDVHKKTISYCVKEVSGQIQSEGTLQATRAELDSWMKTLPQPWAAAMEATIFTGWIYDHLLPHAAELKVAHPLMLRAIALAKKKNDRIDAGKIADSLRCDFLPECHMASTAIRERRQTLRYRNLLVRQAVQLKNKISGLLMETGVSYNRQKLHKAGYFRELMATNQDVTARLRPLLKLCREALERSQKTEGALVRSLSRDPLLAQRVERLKTIPAVGPITALTWALEIGDVKRFPSLKQVISYCGLCGDEKSSANIAKRTRLSKQRNKHLQTVLVEAAKMAPRHSADLALIYEKEKQNGNANRATLAVARKIVAYLLAVDRGERDFVALENYKRTAA

SEQ ID NO: 227614 - protein, 414 aa, unidentified
MSHPLLVGVDPHRKTNTVSTMDRAGRETGQRFTVQNNRPGTETFVREVAQRALEGDFDAIHIAAEATGWYWWHFFQTLDQDPLLNQWPLSLYPFNPRLTRNYKKTFVDLDHEDSVDAFVVADRLRIGRDLPPPFHYEDRYFPVRMLTRYRYHLVHQLAREKSYCLAILYLKYSEYSRKDKKPFSNLFGATSRAVIQEFASIEEIAALPFDELVEFIDCKGKRRFPDPTDNARKLQRVVRDSYLLPQALQQPVNLVLSLSLRHITVLESLEKRMNTAIAEGMSAIYHSLDTIPGFGPVFSGGIVTEVGDIARFAYNQAKVAKYAGFKWRKTQSGEFQAEETRMTRTGNRYLRYYFCEAANRVRQCDPEYRAYYDRKFHEVRKHQHKRAIVLTARKLVRLVVRLLTTNEPYRPRRL

SEQ ID NO: 227615 - protein, 377 aa, unidentified
MKKELYLGLDVHKDCIPTAVAEEGRTGEVRDTGEISNDLHALEKLIGRLRKAHGPEAVIGACYEAGPCGFGIARRLKALGVECQVVAPSLIPKRAGDRVKTDRRDARKLARLLRAGELTPVYIPETTDEAIRDLCRARTDAVDDRRRSRHRLKGFLLRHGYRYQGKSAWSAAHQRYLRELVLPHPAMKAILEEYLIAIEAAGQRIERCEQAMRDLLPSWRLESAVRALMGMKGFQLVAAMILVSELGEVYRFAHPRRVMAYLGLIPSENTSSDKRRQGAITKCGNAHARWLLVECAQHYATPPKISKELSRRQEGQTREVRAISWRAQNRFHRRYTRLMARRLQRNKAIVAIARELCGFIWELLRTQRCYEAQPLST

SEQ ID NO: 227616 - protein, 346 aa, unidentified
MKVKTLGIDLAKETFGLHGVDPLGRVVVHRRITRKQLLGFLVKLEPCLVGMEACGSAHYWAREIEKLGHTVKLMSPQFVIPYRKGNKNDPNDAEAICEAVTRPSMRFVPIKHEEQQDLQALHRVREQLVKNRTALANQIRGLLRERGVVVAQAIARLRAALPVILEDQSNRLSALMRELLGEMAERLRMLDDRLRQYDQRIARVCQQDERCRRLVKVEGVGPLVATAVVGAIGNARQFTNGRELSAWLGLVPREHSSGNRTILLGISKRGNRYLRTLLIHGARAATRVAERKCDARSIWLSRLKLRGGPNVAAVALANKNARVLWALLARGDSYRVRSALDRASAA

SEQ ID NO: 227617 - protein, 338 aa, unidentified
MTVVTVGIDLAKNVFAVHGVNAAGKAVLVKPLVRRAKLLELIATLPACLIGIEACTGAHYWAREFQKMGHTVRIMAPQLVSPYRMGGRHGKNDAADAAAICEAITRPNMRFVPIKSVEQQGQLFVHRAHQGYVSERTALINRIRGLLSELGIVLPQAFKVFLSGVAQVLEDLPGYCNQVIGDLLNELYHIEEKIKNSEKLIQQLARDNSAAQLLMQFRGIGPMTATAIVASIGNGHDFKNGRQFSAWLGLTPRQQSSGGKARLGRITKAGDSYLRTLLVLGARSVLLGAAKNDDPVSRWALQLKERRGYGRALVAIAAKNARMCWAMLHLRDEFRFPA

SEQ ID NO: 227618 - protein, 424 aa, unidentified
MRTQAEAQFAAFIGLDWADTKHDLCMQITATEEREFSVLPHRADAIEAWVRSLRQRFAGQPVALCLEIAKGPLVYALQKYDFLVLFPVHPATLAKYRQAFTPSGAKADPSDAEIALELLLRYRIKLKALQPQSASMRALLRLIEQRRRLVGDKSRISNRLTDALKQYFPAVLDWFEDKDTALFCDFLSRWPTLKQLKAARRTTLQAFFHEHHVRSQACIEERLRAIRAATALTDDVAVIEPNRLLVLVLVEQLRVTLRAIERFDIEITRLSETLPDYALFRALPAAGAALAPRLLAAFGEQRERYASAAEIQQYAGIAPVTESSGKKRWVHWRLQCPTFLRQTFVEWAGATIPHSFWAATYYRQQRAQGCSHHAAVRALAFKWIRILYRCWQSRTPYDEATYLNALRRRGSPLLTSIAEAARNT

SEQ ID NO: 227619 - protein, 357 aa, unidentified
MLSSNVKYIGLDVHKEAIAIAVLNSAGKLVMESIVETKSSTVLDFLHGLRGELHVTLEEGTWAAWLYDVLKPHVREIVVCNPRRNALLKEGSKSDKIDARKLAELLRAGLLRAVYHGENGLQTLREMARSYLTINKDLKRVKNRLKALYHSWGICCGGKQVYAARHREQWLSKIAQAGVHRRAELFYEQLDGLLVLRNTVRGELLAESRKHQAVKILHQVPSIGPLRAALLLALMQTPHRFRSKRQLWTYSGLAVVTHDSAQHRYVDGQLQRSKKPQQIRGLNQNHNHAMKEIFKSTALNASRCAGPLQDFYVGLLAKGMKPDMARLTLARKIAAITLALWKKGGSFDAGHLKSQAA

SEQ ID NO: 227620 - protein, 414 aa, unidentified
MKTCGLDVHKDMIFCAIYNGKDSVVKQFSSFTPDLRDMCGYIKGEGVTTVAMESTGIYIEAIRTVLRQSGMRAVVVNPFLIKQMPGRKSDVKDAEWIAKLHHKQMLSESFVPDGTLAELRAYTREHRKLTQRRTQVLTKIDRLLVAGGIRLSSCVSSLDTKGFLKVARAVAGGDTDPERLEKMVQGCTKYKRDGTLRKALTGCMERHHMWRIAVAMEELDLYDRLIAEAKDKMEGLTEAHYHEEARLLQTIPGVGRLGAISIIAEIGTDMRIFGSGGRLAGWAGLRPRNDESAGKCKSTAITKGGAHLKPILVQCAWSAVRVKDSKFQQCFTRLCVRKSAKKAIIAIARKLLVTAYALLLNHEEYSPNKAGDGVTPEQLHRRIQYHIAQTERLRRRMTLASRMTAPNSNNTIIA

SEQ ID NO: 227621 - protein, 408 aa, unidentified
MLAVKSIISELFNWRGIELTRKPVAFSNSMEGFNSFYNTIVELMQKSELEEALVGIEPTGHYWFDLGQFMGEKDIKFVMVNPHHVHKTKELDDNSPSKNDRKDPRVIAGLVRDGRYFYSYMPTGAYAELRNSSNRRFVLVEEQTRAKNRLQKWIAVYFPEYKGIYTRIDAKGGLLVLKQAPTPEEIVRLGVEGIIKIWKDAKLRGNGHKKAMLILAAAMRSIGLKAGLTEARMEIQDLIEDYELQTKRLERVNDLIKGLCQQVRYADKLLEIKGIGITTVAGFIAEVGDITRFDSTKELQKLAGLELVADSSGKHNGKTKISKRGRKRLRYLLFEAAISVVGKNEEFKEIHRYYTTREKNPLKKMQSLIAVACKLIRVFHVILTKGVSYDASKMLKDIRHPGEQLKAA

SEQ ID NO: 227622 - protein, 387 aa, unidentified
MQKPHDDSKMCPAAFQQDSTLVVVVEMSLSSWLVAGLIPGVSREPLKKIDPDPERLLQLLYRWRDEAVAAGRKISRIAVAYETGRDGFWLARWLRNRGIDAHVIHATSVAISREHRRAKTDRIDTAMLRRGFLGWLRGEPGHCSMAIVPSIAEEDAKRPHRERDTLIHERTSIVNRMKSILIQFGVRNFNPVLRKASEKLDAVRTPEGIPLPANAVAALHRLMDRLRVIKEQVKAIEQTRLQRMQRNPADRMNAMVFLLVRIIGMGVETAEQLVREMLFRNFHDRKAVARYAGLTGSPDESGSKRREKGLSRSGNGRVRNILIQLSWRMLQFQPDSGLVIWYKKRTESARGSRKPMIVALARKLIISLWRYVNTGVVPEGFELRSAA

SEQ ID NO: 227623 - protein, 357 aa, unidentified
MKKTYRLQEYVVRGKEIFVGLEDSKRTWKLAVRSEKMIIHQVSMEAKYPVLIGYLRNKFPDCAIHLMYEAGFKGFNLYDALTEDGIDCVVIPPHVVTEPKVNRIKTDKRDARRLALVLENHDFKDSCYVPDKERREDRQVTRTLIAVQKDIIRTRNRIRKFLQFHGIEVSFPDRWGRGEFRALKKLELGEPLRISLDVFLTQLEELWAHQVSLRAALRKLCKKERYHKAFTIAHSLPGIGWFTAIRFVLELGEDLSRFGSGKKIASFVGLTCSEDSTGETIHKGRITGMGPGFIRATLIENSWMAVRKDPVLLGKFTRVWHASGSKKKAIVAVARMLIVRYRACMLAGTPYVIGVAA

SEQ ID NO: 227624 - protein, 355 aa, unidentified
MKYYTSSTQFNCGIDLHARQMYVCLMDRDGKKLVHTNIKNNDFDFFLKLIEPYRHDLTICCECMFGWYWLADACQAAGLHFVLAHALYLKAIHGGKNKNDRIDSEKIAHLLRSNLIPPAYVYPAAKRPLRALLRQRLFFVWRRAELLARIHSHQLAHNRIPQKQTRSNRDPWEQQLLAAENDPLRQLALKNDLAMIRHFDHQIGQLEAELQRQAKKTAAREYALLQTVPGIGENLGLTLLCEIGDIARFPTVKNFLSYCRLVKGTVASAGKIKGLRGAKLGNPYLRWSFGEAAVIAKRDHAVIGPLAQRLEARMNGNKFKANTVVAIKLARAVYFMLKRKTVFDPDRLVATLSRN

SEQ ID NO: 227625 - protein, 407 aa, unidentified
MELVTMYKRVIGLDVHQAQITACALIEEADGATRIEQRQFGGFKRDRRELAAWAAALKPDQVVMESTGIYWKSPYAALEAVDIRALVVNARHVKNVPGRKTDVGDAHRLATLARAGLLRGSFIPPAKLRGLRLVARQRQKLVSQLVGEKNRLHKILTDGGVRLGVVVSDLHGQSARAMVKAIIDDRSVQEVLDQGSRRLKASRETLFDALQGELTDAHRFVLAETMAHLEELETRIERFDTYLLTHLQDEHNTLAILQTIPGINLIGAAMLLVEIGSDMQAFGSADRLASWIGICPSNHESAGKRKPGKVRKGNPYVRRLLCEFAHAACRTQCVFKPKFESLMLRRGYKRSIVAIAHGILRTIFFMLERREHYRDRIVDYEAIAVRRNAPRWIKALTKFGFISPASA

SEQ ID NO: 227626 - protein, 342 aa, unidentified
MEYYAGIDVSLECSSVCVVDGSGNILREAKVASEPDALIGWLASHGHELARIGLEAGPLSQWLYAAMKQAGLAVELLETRHVRDAFRAMPVKSDRNDARGIAQLMRLGWFRPVHCKSIGAQEVRAVLTARKLVQSKLLDVENSLRGILRGFGLKVGKTTARSFAGRIRELVQGHPNLEPVGESLLAVRDVLLREFNAFEKRVRTLSNSNARARLLMSTPAVGPIVALTYAAAVDDPARFSSSKRVGAHFGLTPKKYQSGETDRSGRISKIGDASVREALYQAAHVMLTKPVKGCTQLKGWAMRIARRAGMSKAKVALARKLAVILHRMLADATVFNAAAAAA

SEQ ID NO: 227627 - protein, 312 aa, unidentified
MRPVVGIDIAQEEVVVVVHPSTQAARYPNTARGHRRLSAHLLALDPYRIVVEGTGGLERPLVDALAEQQLPVCVVNPRQVRDFAKGTGRLAKTDPIDAAVLAHFGEVVELPEPRHRTANERALQEWLERRRQVRDMRSGEKCRSKRPAKRTLPSLERSLGFLQAEMKLIEAEITALVDSDPVLCRNAALLQSIPGIGPITAVTLLGELPELGSLSRQQIAALAGVAPYTVQSGLLRGHAKIRGGRSAVRTTLFVATMTAKRFNPVIRTFHERLTAAHKPHKVAMIACERKLLTILNAMMRDGAPWNSELVMA

SEQ ID NO: 227628 - protein, 397 aa, unidentified
MWTLGIDIAKRKHVAALLDDNGKRVFKNFSFTNTMEGVNRLLDRINQIGFSIENLLIGMEATGHYWMILYHFLSNAGFQVRLINPLMTAARRNAGIRGTKTDSVDAELIANILREADPKFSAVPDDEVRQLRNLTRLRYECSQTFVAEKQRLIGLLDLVFPEYSNYFSDIFGAASRQLLAQYPTAEDIKKIDIRKLTRILKEASKGHMGREHAHRLKNAAKNSFSLSASNLSFALEIKFLVQRMNILLQQIEELDKQAKKYMKKNQKLLQTIPGIGPVWAPTILAEVLPVFHPEEKNGARKLVAAAGLDVRLNESGQSKGKGKMSKRGSRYLRTAAIQAAEVAALVAKDPMFRAVYEKQKAKGKKHLVAISHVANKLLHVVFSVLKNKKPYEVHLIH

SEQ ID NO: 227629 - protein, 392 aa, unidentified
MQGYDVVVGLDVGKSFHHLYALGSDGSELVNQRIDQSECALTETFSAIKEYGSVLVVVDQPNNIGSLAVACARRSGCDVAYLPGLAMRRAAGILPGDAKTDERDAFVIAMTAHSMPQALRAMPEENTLRADLIALASCDDDARCDMTRESNRLRSHLVEAHPAFERALSSDVTSPFALKLLVRFGGPCGMRRAGTGAVTRWARTQKRPALKLLERLLASLEEMTETPPGAHLREEVGIPACARRIAELAAIRQDIERRAVHLLKDCPTFQLLTGMPGVGTKTAIAFIIHVDIACFESASKLASYAGIAPKTHQSGTSIKGESAGRSGNKALKNALFLSAFASLRTDLLSREYYDKKRAEGKKHNAAVICLARRRLKIMFAIVRDQRPYRLAA

SEQ ID NO: 227630 - protein, 419 aa, unidentified
MSFKILKNNCCGLDVHKTWIYACIGITDSFKRTEYKQARFSSFTKGLQELCLWLAKYNCIDVCMESTGKYWIPVFNVLAKNNIFVTLSHPKYTKPQKGNKTDRKDAKWICDLYMCGMVKPSFIPPADIRQLRDLVRYRFKLTCMITGEKNRAHNCLTVSNLKLDDVFSDIFGKSSRSITEQILQHPGEVFDVAPFVDSRCKTPIEEIQAAVDGAISHEQAVKLRQCLKHIDELEMHKAEIEREIFRLSQKYESVLDLIRTIPGFDKNPLTAIQVLSEIGADMSVFPTAKNLVSWAGCCPRNDQSSRKIKSTRISRAGSYFKPVLVQIANALIKSKKHPEFTTRYRRIKARRGHKKAIIAICRMILTAIWHILTDLKPYTPEGFLESRPVNKEKVLTISQALNLIKQRGYIIKDDVGPVT

SEQ ID NO: 227631 - protein, 310 aa, unidentified
MHPCVGVDVSKHHLDWTFGEDGPVEQLPNTPAGIRQLLVRARRHEPPLIAIESTGGYERKLVVALQDAELPVVLVNPWRVRCFGEGLGKLAKTDPIDARLLALYAERAQPPRRPLPGPRARRMADLVARRRQLLAIVVAEKSRLENAPAWLRKDIASLVAVVERRIAKLDVKVDAAIALDPEQHETSEILQSTPSVGPGVARTLIVDLPELGTLSRRQITSLVGLAPYARDSGRKSGMRRIRGGRPAPRTALYLAAMNAARFNPVLKDFYQRLRAAGKPAKLAFVAVARKLLTLLNAMVRDRTMWRETIP

SEQ ID NO: 227632 - protein, 403 aa, unidentified
MSYTVAGVDVHKKLLVVVAADVSQPEWTFECRRFGTGAGELHDLALWLCDRGTAEVVMESTAQYWKPVWLELEPYMRLHLAQAQSNRAPHGRKSDFGDAKRLLRRFVAGELCLSFVPDAEQRGWRTVTRARLQLVCERVQLQNQMESLLEEGRIKLSSVISDLLGASGRRILRELAKGQTNPQQLAELGDERLRCGRAVLADALTGSMSAIHRKLLAQHLDRVELIDRQIEELSRMSAQQMQLHQQAILRLIELPGIGAEAAHQIIAEIGPTAGAFPSGRRLASWIGVCPGSNESAAENHSGRCAKGNRFMRRLLCQAAQAGVHKKGSHLQSLFRRLIVRLGYVKAIWAIAHRLCRIIWNVLHEGARFIEYGEAVNPRAVQRAIRHHLTALRRLGYEIPHEAA

SEQ ID NO: 227633 - protein, 343 aa, unidentified
MAIVNRIALDLAKDFIQVLALDENEQEVFNKKLRSNKVSAKLATLSRTDDCEVAVESCGMSHYWRRECEKLGYKTVALPPRFVKAYLQGEKNDANDARAIAEAASRPNRQTVRLKSIEQQDLALMVNQREGFVQTRTQFSNRLRGQLAEYGILLPKRVGTILQRVPEVLEDDSNALTLQSRDLINRLYQMLRAVDEEVKALDKHLATQAERNEDSQRLMTLPGIGPITATSLLALIGDVSEFKRGRNLSEYLGLVPRQNSSGGKDRLGGITKKGNTKLRTLLVHGARSALRVAQQRHDRLSLWAQDVAKRRGNNVAAVALANKHARIIWAMLKNKEDYRMTAA

SEQ ID NO: 227634 - protein, 431 aa, unidentified
MLKINPLSTLYVGIDVSSKSNYVCALDFYKNKYINSSFANNQPGAEELALRILECLKEHPDITTIVAALESTSVYSIHIANYLSSCEELMRFKPYVFVLNPKCTANYKKSYIGLGKSDPIDAFVIADYARAGNIESEPWRGSQFLALKRLTRHRLHLVECMTREKTYLVSNLYLKFSELQMLEGDDQPFCDIYGATSSSVLMEYFSPEEILDSSEEDLIAFLAKKSRNRIKDISKTADLLKKAARDSYRLDKALYEPLNVSIASSFNCIETFKREIKVIDNAIEKEIKGLNPNAFIILQSIDGIGPVFAGGIIAEIGDITAFHSSDALAKYAGLTWKSNQSGDFDGEDTPMIKAGNRYLRYYLGEAANSMRKHNVEYGAYYRKKYNEVPKHQHKRALALTSRKFVRLVYGLLARNQLYSGVSLDTSIKDSN

SEQ ID NO: 227635 - protein, 392 aa, unidentified
MRKPKQRKPLNDLSRSLTTLDTDHTLIAVIEMGQKSWLVAGIVPGVERQPLKKLDTDENALLKLLERWRMEAEKAGHKIKRITVAFEAGRDGFWLARWLRARGIEAHVIHASSVAVSREHRRAKTDRLDTELLKRAFLGWLRGERDHCKTVAIPTIKDEDAKRPNRERDSLVGEQSRIVNRMKAALARLGIRNFNPKLKKAAERLGGLRTPEDEPIPPNTLAELHRDMERRRLVIDQIRQIETARLQRLAQAPSHGPNAMVRLLARVIGISIETADMLVQEVLSRNLRDRRAVARYAGLTGSPDESGSKRREKGLARAGNARVRRGMIQLAWRFLLFQKESALAQWYRARTENARGSRKTMIVALARKLLIALWRLVREGVVPEGVVLRPAQ

SEQ ID NO: 227636 - protein, 386 aa, unidentified
MTQHSHIAASHQLDYERTLILAVEVSGRSWVVAAQVPGLRQKGVKQQLAPRADALMAAVEGYKRRAAAAGMAVERVIVAYESGGSGFWLARWLQQRGVEVYVMQPSSVPVDRRMRRAKSDRIDADMLLRTLLAWLRGEPRVCSMVPVPDEATEDARRPIREREELIRARVALVNRIEAVLTVLGAGEYNPLRRDCRERLGQLRTALDQPLPPHARAQIERLLDRLDLIRQQVADLEAQRDRAVEGETVGQAERMIQHLARVRGIGVQTATVLVHEAFVRRFRNARALGSYAGLTGTPYGSGGTHREQGISKDGNRRLRATLVELAWMWLRYQPGGALSRWFHDRLGGSRGRLRKVMIVALARKLLIALWRYLQDGAVPQGMELKPA

SEQ ID NO: 227637 - protein, 354 aa, unidentified
MKYYTSTTQFNCGIDLHARQMYVCVMDREGKKLVHTNIRNNDFAYFLKLVAPYRHDLTVCAECMFGWYWLADACQEAGLSFVLAHALYLKAIHGGKNKNDRIDSEKIAHLLRTNLIPPAYVYPAAKRPLRALLRQRILYVWRRSELLARIQSHQLAYNRPTLPQTRSNRDRWEEKLLAQEDNPIRQLALQNDLALIRHYDTQITILEEQLQTLTKATAWRDYTLLQTVPGIGEHLGLTLLYEIGDIHRFPTVKDFLSYCRLVKGTVASAGKLKGLRGAKLGNAYLRWVFGEAAVIAKRDHTVIGPLAQRVEARLGNKFKANTVLAIKLARAVYFMLRDHTVFDPERLVAALTHQ

SEQ ID NO: 227638 - protein, 341 aa, unidentified
MKNTTTISIDLAKTVFQVALFNKYGVLKSNNKMSQAKMVQFIAQYPEAIICMEACGTAHYWGRRFQQNGHKVFLVPAHIAAKYRTGNKNDANDALAIYEAIKRPKTYFVHVKNLDQQDLASLLKLRQGYIKQRTQTVNRMRGLGLEYGVKIPQGIAKARKHLPYFLEDAENELTTSSRFILRDLLDQLLLLDIQVDNATNALVARAKEVPVCSRLTALPGVAWIIASALYARLGDGSAYKCGRDASASVGLVPAHSGTGGNNKLLGITKRGDRNLRSLLVHGARSIVSRIKDKQDGLSCWIREQLLKNHLNKTTVALANKLVRMAWAILKSGEDYRAPLAQ

SEQ ID NO: 227639 - protein, 389 aa, unidentified
MPSVADRTEAPTTIRTDLAAIFISLELSRSIWLVTSVSPGSGEKMSKHSVRAGDVAALLARFSELKHKALTRTGKSFAIVAIQEAGLDGFWLHRALEQEGIESHVVDPASIATSRRRRRAKTDRIDGEALLRALLAYKRGEPRVCTMVRAPTPEDEDRRRLCRERKTLIAERVEHVNRIKGLLFSQGISSYEPLRRDRRQRLEDLRTGDGRSLPTHLKTQISRELDRLELLLDQIKLAEAERDALLAEDQAAAPEPPGRMLLEFKGIGAEFAATLWLEGLFRRFDNRRQLASYAGLAPTPWQSGSVDREQGVSKAGNPRLRAILIELAWLWLRHQPQSALALWFKERVKRNGGRMKKTTIVALARKLLVALWKYVTAGVLIEGAVMKVA

SEQ ID NO: 227640 - protein, 355 aa, unidentified
MSVYVGIDVHRKRSQVAVVGEDGKVQLNRNVVNGQEPMLRLIGALPAGTAVAFEAAYGWGWLVNLLEDYGFEPHMVHPLRCKAIASARLKNDKVDAAILAQLLRADLLPEAWIAPPQVRQLRALLRHRASLVRLGTQLRNRIHAVAADHGYDRAASYWTGPGRGWLAELDLPPASRQIVTDCLAFIDALAPVVARLDGELRRRANADPQARVLMTLPGIGPFTALVLLAEIGDITRFASARKLASWAGLTPTVRGSDLTVRHGHISKQGSAWLRWVLNQAAQTAKRSPEFAATYAAITRRRGKQIATIAIARKLLTRAYHLLAAAQAAQASAATGNAPADQGNGRQTPGTLDPAA

SEQ ID NO: 227641 - protein, 349 aa, unidentified
MIWIGVDAHKQVHEALALGSEGVVGQQRIPNTPQAWAALLDWARQWPERIWAVEGAWYLGRGLAQYLARQGERVHEVNGRWTARRRRGMRTPGKSDRLDARSVATLLREEAATLPRVYAEEDELAAVQLWSRSQAELTKDITRLVNRLHELLLQCDPEYKAKLPALTTKAAIAALQGYVAPGSGVLAREREALIRATAAQLALLDEQDRELRRKLERVSKTRFPPLRRIEGVGPLIACAIAAEVGGPRPGFGEEQLAALGGLSPLEASSAGAVRHRLNRLGNRRLNMLFHQIVLTQARVYPPARTYLLRRQAEGRTSREARRALKRLIVRRVYRAWHACFETNLERVAA

SEQ ID NO: 227642 - protein, 318 aa, unidentified
MKTNTATVYVGVDVAKATLQVHQQGRQIELHNVPAGLTQFCKKLKALEGAHVICEATGGYERALVQALHKVKIPVSVVNPAQVRGAAQAQGQRAKTDRIDALMLTDYGQRYQPQPTPPASQSQRQLAALAQWLKQLVDAQAVAKTQAEHHEDPFVRKQHKTLLDHYQSQIEAVETKLKALMRKDPVLAQRVECLDAIEGVGLRTAFMILAHMPELGQINRQQAAALAGLAPWTRDSGTMKGMRCIGGGRSEVRLALYMSALSAARCNPVLSAFYQRLIAKGKLPKVALTAVMRKLLIYMNHHLKALDAQPAPDAQKQN

SEQ ID NO: 227643 - protein, 277 aa, unidentified
MSESRTVTVGLDVHARSIRLAAIRGDELLEERTLPYDEEAVERVLRGWPRVRCCYEAGPTGFGLYRHLVERGFECEVVAPGLVPTRPGERVKTDSRDARKLARLLAGGLLQPIHVPSRELEAARDLVRAREAARLDRMRDRHRLSKFCLRHGRLLPGSSWTVTRRTWLSEQRFAFAAEQLTFDTYLHAVDLVDLRIAALERSIREAAEEDSWRQLVARLRCLRGIDTLSALGLVTEIGDFSRFRTAEEFMAFVGLVPSEHSSGERRRQGSITKAGNA

SEQ ID NO: 227644 - protein, 343 aa, unidentified
MGFEPEPSKEGSWMMAQNGLLVAGIDVAKDKADACIRALSQRRTFESTAEGRRQLISWLRKHKATKVVMEASGGYEREWAKALREKEVEVRIVDPKRVRHFAQSAGRLAKNDTIDSDTIAWFAETFGEAPGQAYDAEREKLAQIVNARRGLLETETMLANQGEHSVPDVVRKMQARLLKKIALEVAKLDAAIAAMIKATPHFARLAEIIESVPGLGEGASAGLIAGMPELGQVSNKVAAALLGVAPYDDDSGKRRGERQIKGGRRRIRNLFYMPCMGAATRHNPVLKAFYDRLIAKGKLKKVAIVACMRKLIVILNIMIARGEKWDAKRYASAHERADLALGA

SEQ ID NO: 227645 - protein, 367 aa, unidentified
MKKVSIAATKQSRNISQQKLTIGLDLGDRNSWYCVVDEAGQIQLEQRVRTSAKALQEVFGAMPRSRVALETGTHSPWISRLLSELGHEVIVAHARKVRLIGESRKKDDRLDAQTLARLARIDPGLLCPVKHRSAQAQADLMMIRARAGLVRARTGLVNTARGLAKSYGERLRGCNVRNMNPEKAESLSPELQRALESLLAAIAELSEGICQYNERIEALAQESYPQVALLKQIKGVGTLIALTFLLTLEDPHRFRKSRDVGCYLGLQPGRRKSGQSEPQLHITKEGDPYLRTLLVQGAQHILGPFGIDCDLRRWGLKLAERGGRNGKKRAIVATARKLAVLLHRLWVSGEVYEPLHNSSRTTVAAAA

SEQ ID NO: 227646 - protein, 343 aa, unidentified
MKQKATVLGIDLAKRVFHVVGMDDAGHVVLKKRLTREALLPFIAQLSPAIIGLEACGGAHDWARRFRGYGHTVQLIAPQFVKPYVKSHKNDPADAEAICEAVMRPTMRFVPMKEVEQQDLQSLHRARERGVKARTAFVNAIRGLGMEYGFVFPHSVTKFRHTFAATLEAEQDKLTPLSAELFRQLYDEFGTLDKRLAYYNEKIAAIGAAHPVCQRLETIPGLGPLTATALVAAVSDARHLKHGRQFAAWLGLVPRQHSTGGTARVLGIRKRGDVYLRTLLVHGARAPLRWVGLKTDRRSQWVRGLVERRGKKKAAVAVANKNARMVWALLMTEQEYTAEHAAA

SEQ ID NO: 227647 - protein, 343 aa, unidentified
MDHFAGLDVSVKETSVCIVDETGKIVREVKVASEPQALLAALVKPAYHFKRIGLEAGPLSQWLYSAFAEAGLPVICVETRHMRAVLKAQINKTDRNDARGVAQMMRVGLYRPVHVKTLRSQKLRMLLTHRKLLQSKAIAIDNDLRSTLRNFGLKVGMVRATRFEARIKDLIENFPDLGVLVEPLLVVRRVLREQLGILHRRLLAVVRDDDVCRRLMTVPGVGPVVALTYRATVDVPARFRKSKAVGAVFGLTCAKYQSGEIDRTGAISRCGDEMMRTMLYEAAQSMLFHSTRWSWLKAWAMKIARHRGMKKAIVALARRLAVIMHRIWVDGTEFRWTREAVPA

SEQ ID NO: 227648 - protein, 376 aa, unidentified
MSKIRFVGLDVHADTIAVAVAESGGEVRTFGTIPNRLESIRKLIGKLGPAKELKACYEAGPTGYVLYWQLTQLGVACEVIAPTLVPKKAGERVKTDRRDAEKLARCYRAGDLTPVWVPDAAHEALRDLVRAREAAKKDQLKARHRLGKFLLRHGRRPEGMKAWTKQYLEWIKSHVHFELPALEATLADYLHEVEHVAERIVKLEKAIDEAVRTAPAETRCVIEALQALRGVAQTTAATIVSELGTLSRFETAKQLMGYSGLVPSEHSSGNKVVRGPITKTGNGHLRRVLVEAAWAYQHRPNVTGFLLRRQKTLELSEEVKQIAWKAQQRLHKRYKVMAGKGKNKNQIVTAVGRELLGFIWAIGRQSEQQQKLQKAA

SEQ ID NO: 227649 - protein, 366 aa, unidentified
MRKVMAGMDLHGNNVMVGIVDAQGARLQHRRLGCELPEIIEFLAPYKTELESIAVESTFNWYWLVDGLRAAGFPVVLANPAKIDQYGGIKHADDKNDAYFLAELQRLKILPTGYIYDPELRPVRDLLRRRMSLMRQRTTLFLSAKSLHQRTTGRALELRRLKAMEPEEAVALYTHPANQLIARIQKEHIDSLDQSIRQIEKAVMKVALQQPYYQRLQTMPGVGIILGLTISMEVGNIDRFAGPGQFASYCRTVDAKRVSNGKTKGENNQKCGNKYLAWAFVEAAHGARRFDTACRRWYDRKAGKRCPTVATKALACKLAKAAWYVMAKGEEYQAGRVFPGLTEPKAEEISGEQASARKGVGPNPED

SEQ ID NO: 227650 - protein, 367 aa, unidentified
MKKVSTTAAKQIRNFSEQKLTVGLDLGDRSSWYCVLDEAGNVQLEQRLSTTPKAMREVFGTMPRSRIALETGMHSPWVSRLLSELGHEVIVAHARNVRLIGESRKKDDRLDAQTLARLARIDPQLLCPVKHRSAKAQADLTVIRARAGLVRARTALVNTARGLAKSYGERLRGCNVRNMNPEKAEGLSLELQTALEPLLAGIESLSERICEYNEQIEHLAQERYPQVALLKQVKGVGTLIALTFLLTLEDAHRFRKSRDVGCYLGLQPGRRNSGQSEPQMHISKQGDPYLRTLLVQGAQHILGPFGADSDLRRWGLKLAERGGRNGKKRAIIATARKLAVLLHHLWVSGEVYEPLHNSPQRPLAIAA

SEQ ID NO: 227651 - protein, 350 aa, unidentified
MLIIGCDFHTRYQQIAMMDNLTGELTERRLEHGNGEAQAFYRSLRGSVRVGIEATGPIHWFERLLAELGHELWIGDSAKIRASEVRKQKTDERDAALLLDLLLTNRFPSIWVPTPAERDLRQLLWHRHKLVCLRTMLGNQLHFLAMSQGLCRKKKLFSRKGRTELVGLSLAPWASRRREELLKLLDQIDPALAELDRAVLEEAHRREDALLLMTHPGIGPVTSLAFVLAIGSITRFARSRKLVSYLGLNPSEDSSGGRQRLGAISKQGNTLVRWLLIEAVHQAVRQDPELRQDYQRLKFRRGHAVAKVAIARKLAVRMYWMLRSGADYAQLVRRQGSPGGTLVEATPSTF

SEQ ID NO: 227652 - protein, 314 aa, unidentified
MSQIFVGVDVSKDRLDVATYPKPSSWSVPNDEAGIESLVQCLLPLHPARVVLEATGGYEMPAVGALGAAGLPVAAVNPRQTRDFAKAAGLLAKTDRIDATALARFAEAMKPEIRPIPDPAAQELGALIARRRQVVQMLTAEKNRRQIAPKRLHKDIDRHVAWLEEALRRLDDELQKTIRKSPAWREKDDLLQSVAGIGPKTSAVLIAELPELGRLNRHEIAKLAGVAPMNRDSGRYRGERHIQGGRAMVRSALYMATLTAIRFNPVIAAFYQRLRKDGKKFKVAVTACMRKLLVRLNAMLRDRVPWREKSPQVA

SEQ ID NO: 227653 - protein, 342 aa, unidentified
MQESIYVGLDLGSSSCHQTVINADGSLVRSRVIPTSEQHLRSAFTALGNNVRVHLESGELADWVSSVIKPMVAEVVVSHSRTLAWIGKDSQKNDAVDARKLAELLRLNRTHPVYCQTHLDRRLFKQLVTHHENLSREQARLKSKIKARLRTLGIIRKDARLFTKSGNAALLDDIKEPSVRVMFEQTFAVLNPLLASLAAAERVMTQASEQFPEVCLLQSAPGVGIITACRFVAYVQTPHRFSNKRKLWRYARLGITRRESNGKRLAHPRLDGAGVGSLKDVSRKVFEAARRTKADNSFKRFYEQSLLNTKNAVHARLGAQRKILSTLRAMWLSMQPYRDHGT

SEQ ID NO: 227654 - protein, 349 aa, unidentified
MSQTAQTAVAVIGIDIGKNSFHIVGHDERGAIVLRQKWSRGQVEARFANLPPCLIGMEACVGAHHLSRKLNGLGHDARLMPAKYVRPYSKGQKNDFRDAEAIAEAVQRPTMKFVATKTADQLDLQALHRVRERLVSQRTGIINQIRAFLLERGIAVRQGQRFLRAELPRILATPPDVLSPRMARVIEDLAGNWRRLDERIESLSSEIEAVARQDAGCERLMSVPGIGPIISSAMVAAIGAGDAFTKGRDFAAWLGLVPRQMSTGDRTILGKISKRGNRYLRVLFVQAAWAVLIKPKSWERHGLKPWIEAAKKRLHHNVLAIALANKLARIAWSVLAHGQNFEVSKIQTA

SEQ ID NO: 227655 - protein, 467 aa, unidentified
MKHNQQRARSGKKSRGSISLLERIQPDAAGIDCGQNSHFVAVPTDRDPQPVREFRTFTAELHRLADWLAQCGVKTVALESTGVYWIPLYEILEQRGFEVLLVNARDVHNVRGRKSDVKDCEWLRELHSVGLLRASFRPAATIVPLRSLMRQRQTLVEEAATRIQRMQKALTEMNLKLHTVLTDLTGQTGLKILRSILNGQRDPEQLAAHRDHHCHASHQEIVAALTGNYRAEHLFALRQNFAAYEFHLQQIAECDTAIEELLAKLAEQQPPPSGPLSTPRRKRGSKHAPTFDIRTSLHRLTGGADLSQINGIGPHAALQIVAEIGTDMRRWPTEKHFTSWLTLAPNNKVSGGRLLTSRTPPSANRAAVILRRCAMSLGRTSTALGAFYRRLAARTGKAKAITATARKLAVLVYRVLSGDLIYNDPGAAAYHQLNRARELKSLRKRAKLLGYQLVNHSTGEVLSIPVS

SEQ ID NO: 227656 - protein, 341 aa, unidentified
MPAIGIDTHKRTLAACAVDDVGSIIDERTFSCDQGGFVELAAWAGGAAPEATIGVEGSASYGAPVAHHLIAAGFVVREVPPHLSRRERARSRRPGKSDPGDALAIARVTLREPDLPPVRLEDRSTELGLLADARDDLIHAQTRARNRLHAHLVVLLPGYGRTVAQLVSGRQLETIERALGGSTGVRAELARALLTEVRDLGRRASELERSIAALVAGHPLLELPGVGILTAARLVAEVGDVGRFRSPAAFAMLAGVAPIPASSGEVHRMRLNRGGNRRLNRALYTIALSQAWHHEPAKAYIARKRASGKSWAEAVRCLKHRVSRPVFRLLQAGQLEWARAA

SEQ ID NO: 227657 - protein, 357 aa, unidentified
MKRNSRGNISIEWKERPTITVGLDLGDRFSHYCMLNQDGEVVEEGRIQTTEAAFREHFEDVPRMRIAMECGTHSPWISRLVDKLGHQTIVANARKLRAITENESKNDRHDAEMLAHLAYSNPRLLSPIRHRSVERQRDLNLIHARDALVRARTMLINSVRGLVKSSGRRLPHCDAKCFQARVLPAVPTELSAATEPLLEQITALTVRIRAIDKQVEQLAVRYPEIRLLRTAPGVGPIVAAAYVLTLDRFDAITTSRGAGAFLGLRPRQSQSGSRDPERSITKMGNMYLRRLLVQSAHHILSRFGRDSTLRRWGLKLASSGGKRAKSRAIVAVARKLAVILHTMWRTGDCFRPFPAEA

SEQ ID NO: 227658 - protein, 391 aa, unidentified
MVCVGIDVAKDKHDCCILDSDGTIRADCITIPNNMDGFKQLLQTIRDCTKKSDKIKVGLEATGHYSYNILGFLLDNGLPTYVINPLHTNLYRKSLSLRKTKTDRVDARTIATMLLSDVDLKSYTDIAYHNEELKSLTRYRFDKVQECAKLKQSVSRLATILFPELEGLVSSIHGTSIYALLGEYPGAKQISEVHLTKLTNLLTTASKGRYGKEKAIQIREAARASIGSVMPAKSLELKHTIKLIQELASEINEIEDSIQKIIDELNPPILSIPGMGVNSAAVILAEIGDFSNFSSPDKILAYAGCSPSTYQSGKLTNCYAHMEKRGSRYLRHALYNATKYVCHWNPVFAEYLAKKRAEGKHYNVALSHATKKLVRLIYALQKSGKAYLVAA

SEQ ID NO: 227659 - protein, 467 aa, unidentified
MDCIAIGIDVSKGRADIAIINQSGTILKGSGGYDDTRADHDRLSAVLRELRREHPDTRLIAGVEATGGYERSWVGFFRREKHAGRAVFLHRLNPLAVKRFLEADLHRKIDDARAAQGIARYLFERRREEDPHTIPLDGRVVFYRNIRGLIDVRATLRQRYQALLSSSHPELVQYCDSGLPAWLLLVCRQYPTSSLLARSHLTTLAAIPHVGAAKAERLREAAKTSTASLDDSGTAAAMMLLVEELLHLDARIESLQQSLITMMQDDPRVARIDSIPGIGPWSAVSLALEIGDPERFADVRQLIAWAGLDPRVDESGDKSTTRGISHRGNAYLRALLFPLMMAAMQHHPIVGDFIRKKIGEGKPKKVAMIAGAAKLLRIIFALLVSKKNYDTHHEATRATAAAQQRQQARQTTMTTSTTSVVTATDTPTPAKDLTAPISGAERRRRKERSAQEKKRPPGCPTHARSSL

SEQ ID NO: 227660 - protein, 312 aa, unidentified
MNNVFIGIDIAKDSLDIHVAPTGDSWTSKHHAKAIQDITDRLIAYEPASIVLEATGGLEILLAASLASAGLPVAIVNPRQVRDFARAMGVLAKTDSIDAEVLALFAEKVQPECRPLPSDEDRALKELVSRRQQLVNMRTMETNRQHTIQSRQVAASIQVVIDTFNQQLDDIEREIQHRIKASPVWRAKEKLLKSVPGVGDGTATMLIAMLPELGTLNRRQIAALVGLAPMNRDSGKFRGKRMIVGGRAAVRAYLYMPMLTAIRLNPVIKQLFDRLTAAGKEFKVAITACMRKLLTILNAIMRDLRPWQPITP

SEQ ID NO: 227661 - protein, 397 aa, unidentified
MIAVGIDVSKSKSTVAILNGDGSIRAKPFNVRHTADELLALVNYIKGTSEVPTILMEPTSHYHYPLLKAFRDANLPVCLINPYQMKKYGDTALRKVKTDKRDSIRIAQYALEKSYSLIPYTPSDQKYEDLRFLSRQYSQRISILTVNKVQLLALLDQTMPGITSLLPLKSRDPDNCVLLRFVKRFKSFDMIRKMGKTRFLESFQLLVRKTKDRCAGTKGLRIYELALNSVTTRGDNPLTAMTQEQCVALISTSQKAADEINLQMRTIAETLPEYKVLRAMAGVGDRLGPVILAEIGDVRRFHSGKALNAYAGNDAPPYQSGQFESRNRHISKRGNPALRKACFEVMQALKLTKPQDDPVYLFLAKKEQEGKPYNVAKMAAVNKFLRIYYARVMELYK

SEQ ID NO: 227662 - protein, 347 aa, unidentified
MNKIKLVAVDLAKRCYQVGAIDEHGKLLYNRRYSPAKFALAMQQLEPTVVAMEACAAAHYWGRRLKALGHEVRLVPPQHAKAFRRVHKSDAHDTLSIAEAAQRPGIHFVPVKTIAQQDLQVLGRMRERLVAQRTALVNQARGFAREYGVSFAQRRDVLMAQLPCALADASNELSAIAREALSELLAQIRQIDAQLKALMQRLTALADEDPAYQRLLSIPGIGPTIALAVLASIGHAQQFANARCCSAWAGLVPRQYSTGGRVQLGGITKNGERSLRVMLIHGARTVLRWADKHSHAQSRWIKDLIARRGKNKATVALANKLMRIVWVVLTQGVSFDMRKAFRPQPAR

SEQ ID NO: 227663 - protein, 344 aa, unidentified
MEHYAGLDVSLELTSVCIVDARGEIICEAKAPSDPEALIGFLNGQQLEIGRVGLEAGPLSQWLHAGLIAAGFEAVLLETRHVKAALSAMTVKTDRRDARGIAQLLRLGWYRPVHAKSASAQEVRALLTSRKLMQGKLLDIESGIRGLLRGFGLKVGLISRGRFETRIRELVEGHLILETVSDAMLGARAALETEFKRLHRALLALVRDDPVCRQLMSVPGVGAIVAITFKSGVDDPTRFRHSRDVGPHFGLTPRKYQSGELDVTGSITKVGDRMVRTALYEAASVMLTRTVRFSTLKAWGMAVARRRGTKKARVALARKLAVILHRMWVDGTHFRWTNQENAIA

SEQ ID NO: 227664 - protein, 420 aa, unidentified
MAYRIAGVDVHKKMLAVVIADVAGDGEYQFTRRSVGTSPGDLRGLAAWLVAQEVEEVVMESTAQYWRPVWEALERDWTPHRRTRAGASPMAGTLHLAQAQSNRGPGGRKKDFPDAERLVKRLVAQELILSFVPNAEQRLWRTVMRRKYQLTRNRVQLQNRLECLLEEAHLKLSSLVSDLLGASARRILQALAEGETDPRTLAALADQRLRATPEQLCDALSACTHLHPVYRRLLHMTLEELRVLDTHLGQLDHDMARLISQHQEAVQRLAAVPGLGVDSAQQILAEVGATAATFPSPKQLASWVGACPGEEESAGVSYSHRSPKGNRQMRRLLNQAANAAVKTKGSIFELVYRRLVPRLGHAQAIGAIAHRLCRLIWKILHQGIVYEERGPAVSRTSTQRRAAKMIRELRSLGYRVEVPA

SEQ ID NO: 227665 - protein, 445 aa, unidentified
MASKRVGKRLSVLYPDCAGVDVGKKKHFVAVDPSRSETAVRSFDTFTDDLEDLAGWLKACGVKVVAMESTGVYWIALYEVLDRAGFDVRLVNPRATKQVSGRKSDVLDCQWIWQLMSYGLLDGAFRPCDEICELRSYVRQRARLTRDAARSVQHIQKALTEMNVQLDSVLSDIMGHTGQAILRAIVAGERDGERLASLRHSRVRADTATIARSLRGNWRAEHLFALEQALARYDFLQAQIGACEQQIATFMERVSEAQASETVTLAKPSRNQAERTLQLALTRLMGVDLTAIPTIGVETALAVASEIGPDFSRFPTCGHFCSWLNLAPATRISGGHVLPGRAPKRTNPLGQALRLAAVSARHNNSFIGAAHRSRLARLDKGRAIKATAHQLARLIYAMVTRGEAYVEKGIETFEYERRVKQLTALRRNAKRLGFELSEKPLETAA

SEQ ID NO: 227666 - protein, 325 aa, unidentified
MNIVFLGIDLAKNVFQLCGLNQAGKPVYTKRTGRKELLQALANIPACLIGIEASSGAFYWQREFEKLGHKVKVISPQYVKPFVRGQKNDGNDAQAIAVALMQPTMQFVPPKSPEQQDIQALHRARQRIVNHRTATVCQIRGLLLDRGIPIGSAVSRARRAIPLILGDAENGLSSRMRRTIAELYDLFNDLGRRIHFFDKEIETVFRQSEACQRIAKVKGIGPKTATAVVAAIGKGTEFKNGRHFAAWLGLVPRQHSSGDRQVLMNMTKKGDRHLRTLFIHGAPAVVRVATNNNDGHMNQWVNQLKERRGFNKTTVAVANKNARII

SEQ ID NO: 227667 - protein, 405 aa, unidentified
MTAVMIGIDPHKGSHMAVAISAAEEPLGDLQVRAGAAQEGTLVAWAASWPERMWAVEGAGGLGHLLAQQLVAVGERVLDVPPKLAARVRLLQAGDTNKNDPNDALSVAVAALRSKARREVAAEDHAAVLKVWSKRHRDLARARNQVACRLHAVLCDLLAGGVSKEITAARAARILEQVTPSGPVAAARRELAGQFLEDLRGLDAQLRDTKKKLAAAVRASGTSLTEVFGFGPVNTGTVIGDVTDVTRFPSRDHFASYNGTAPVEVSSGNRKIYRLSLRGNRRINHALHMAAITQIRHAHSDGRAYYDRKIAEGKTHKEALRCLKRRISDTVFARLQADARQAKATAAAKGPGGQPGNDSDSSAAGSHPVNRLFGQATPEPATTLRPATPASYATETTSRTTRRSP

SEQ ID NO: 227668 - protein, 374 aa, unidentified
METIYIGVDFHARQQTICYLKTETGELVTCELKHQDKAVVRDFYAQFRGPVIVGLEASGYSPWFERLLEELACEVWLGHATEIRRRARWRQKNDRRDAELILDLMLHDEFPRLHRPAVQSREVLRMLRYRQKLIKIRTMSKNSLQALALQSGLAKGSRLFTQAGQQELSAAVMSPVMHWQREHWLQLMEPLNQQLLETMVWFKAQSKDDVCIKRLRTHPGIGLLTSLCIVHSLQPVSRFRNTRKVAAYAGFDPVERSSAERKCFLGISKAGSRVLRFLLVEAAHTAIRKDEDLKRFYKRLAERRGRPKAKVAAARKLLIRAYIMLRDEIDYAEFRRRAVAARLARRGQGPNVPEVLIGQPASADHRDELTSESQ

SEQ ID NO: 227669 - protein, 320 aa, unidentified
MSKKKSKSFIGIDVSKQQLEVAMHESDFKFRCPNKISCFGQLIAELIDLRPALVVLEATGGLEIPVVNALHGVGLPVVVVNPRQVRDFAKALGQFAKTDRLDARVLAHFAAVIKPPLRPIKAKDAQELDALMGRRGQLVEMLADEKNRRGSAASDSVRKKIKEHIDWLEDCIAEVDEQLKALMKTSACWQAKDEILQSVPGIGPVTSFSMVADLPELGKLDRQKISKLVGVAPLNRDSGQLRGSRHIYGGRAQLRRVLYMAALTASRHNPVIKAFYQRLRANHKPFKVAITACMRKLLSIINVMVRDSTPWKSPEVPVSA

SEQ ID NO: 227670 - protein, 420 aa, unidentified
MKVVYQTCCGVDVHKSFLVATIIKTTSGVEPSYQKKRFSTFNNSILQFKNWLIENQCRDICMESTGKYWVPVFNLLEDDINVTIANPKWVKAVKGNKDDTKDSKWIGDLFRLGLVPGSYIPCKPIRILREFTRYRCKLISCRTSEKNRYQNALTVCNVALDSVVSDIFGKSATSVIDYLIEQSNNSINHEEIASRLLRSLKKKSDSVIESIEGYQMTDSQKYRMRLVRAHLDYITSSINDIDTMLDSLIAPYENAVQLLCTIPGVDRNSAITVISEIGTDMTPFSNSKRLCCWAGLTPGNNESAGKKKSVKITRAGVYLKPALVQVAHAAVKSNKSPYYKQKYERIMKRRGKKRAIIAIARMILTAIYQMLSTGEAWNPTDLYKIDMPEPMKEKQKEKAIKQAKKLLIREGILSESQLVS

SEQ ID NO: 227671 - protein, 425 aa, unidentified
MHSSDPLSSPVDASGFAYVVGIDVGSQTATFCVCKPDKRQVIKPGELANSRAGFEALDRSLRQLGVPPERILIGLEATGRYSENLYQFLRAQGYLLCLLHPRQTHQFAQQRGLRAKTDRLDATTIARLLLSGEARPGYVPDELIATYRELERLHSQLADDSARYQNEIQALVVVLFPEFVQVFADPCRPTALALLKRYPSAQAFVEASVEAVAATVRELAPRHYGRKTAQQLVCLATQSAASGRASGARALSLKILCDQLEHTLANLAQVESELDHLLERDTGATGLKSTPEFGRKTVAVLRAELGDVTRFQRVDQVVAYAGLDLEVKQSGKWQGQVKLSKRGSGRLRRVLYLAALRCICLPASAFGAYYQRLVARGLKGRAALMAVMRKMLIVAYHLLRSNELYDPRKVCAVAGPPPRTPSSGS

SEQ ID NO: 227672 - protein, 352 aa, unidentified
MGRQQNKMIDKEELFIGIDLHKLRWHVTIRTFDVEVFSASIPGTWEALQRVLARYHGHPRQAVYEAGYFGFRLHDHLVEHGIPCLVTPPSLVPQEYGNRVKTDRRDSSKLAHLLAKRMLKRVWVPSEEELYHRQVIRRRRQLVRDRVRTQSRIKAELSFFGIRLGEPRGRWTQIYFETLRRIKFGNRWMQESFNRLLEQYEFLSAQIDKQTQLLRELSETELYQERVKILQSIPGVGLISAMELLLELQDVSRFRRAEQLAAYVGLTPSQYSSADKVRMGRITGIGKNTLRAILVEASWKLITKDQVMREKYERIKIRSGGKRAIVAIARTLLLRMRRMLLDGREYALPLAA

SEQ ID NO: 227673 - protein, 319 aa, unidentified
MSASPVLVGVDVSKEHLDVAVLGARLEAARFRNDVEGHSALAAALGPLGPKVIVLEATGGYEAPLACALQAAGLPVAVVNPRQARDFAKSMGQLAKTDRIDAAILAQFAGVLAARDDFARFLRPIVSEQQRELAALVTRRRQLVTMLGSERQRLQMASAIVRPSIESMIKAIQAQLNEVEGQMVSHVRSHFAELDSLLQSVKGIGPVSSAMLIADLPELGRLDRRAISSLVGLAPMAHDSGKSRGYRYVRGGRFELRRGLYMAALVASRHNPIIKAFYDRLIAHGKHPKVALVACMRKLLTIMNAMVRTSTPWRNPQKA

SEQ ID NO: 227674 - protein, 368 aa, unidentified
MKDVTTYVGIDAHKKDLFIAMLVGTQATPLTWTVANEPNAIRRLVRKLEREAPGPVRSCYEAGPCGYALQRRMTTTRVVCQVIAPALIPRKPGERIKTNPRDARKLAELLRAGLLTEVQPPTPEEEAVRDLCRARDDAREDLQRSHHRLGKLLLRRGLHYSGRNWTRAHRQWIDSLEWAHTAERVVVDDYLLAIDHLEARLIELDARLTAIAATEPYREPVAWLRCFRGIDTLTAILILAELHDFRRFQSPRALMAYVGLVPGEDSSGEKHRRGRITRTGNALVRRLLVETAWHYQHRPSVGVALTRRRKGQPTRVIAIADKAQQRLCRRFRRLAEHHKPAPKIAVAIARELAGFLWAVLQPASVSAS

SEQ ID NO: 227675 - protein, 394 aa, unidentified
MKLIGIDIGKNKHFFCIMDQQTGEIISQPVSFSNDKEGFDFLIQKINSYPKDSVLIGMEDTGHYHFALLKYLLNLQYTVALINPKTTDFNRKMQGGITKNDKLDTINICDVLDTPERKKQYRITKVNSFDLYEQKQLTRHHHNLKEEENVYKNRLQKCIDIVFPEFNKLFNSKYGTVYMNILKTFGSAENIANTDIRTIRKCFEIEGRGNRISLTPERLKECARSSIGISSSAEVIQIKHLTAQIELIEEQLTEIDKKIEEFSIQNNSPILSIPGISHFSGTSILAELGDISNYSKPSQIIKFAGVAPLHYESSQFNAQHTAITKKGSKYLRKTLYQIILPVIRHNPVFNKYYQLKISQGKGHRCAQGHCVRKLLRIIYHLLKTNQQFDPQLLR

SEQ ID NO: 227676 - protein, 416 aa, unidentified
MDTMYERCCGLDIHKKTIEACFRSGKKKTHMSFGTTSAELRKLTMWLVENDCQSVAMESTGSYWKPIFNILELSGTDMKIIVVNARHMKNVPGRKTDVNDAEWIAELLQYGLLRPSFIPDREQRELRELSRYRKSLVGERAREINRLQKMLEGGNIKLTSVVSEVTGYSSRRLLDRLLRNDEPMTEDVISGLVHTSLAGKSKELETALDGLLSELQKELLIKVLDHIDDMSRRIADLDDFCRKQMKKYEDALDKLDEIPGIARRTAETILIETGLDMSRFPTAKHFARWAGLAPGNNESAGKRSSGRTTKGNPTLKSTLIQSAKVAARKKDSFFKARYQKIAAKRGANRASVAVAHSMLIAIYHILKSGERFKDLGEDYYNQFNREKKKNYYLKKLTKLGVNLKEATLSISIQAAT

SEQ ID NO: 227677 - protein, 313 aa, unidentified
MNTEIVHYGTDVAKATLEINGASGGPSLANTARGHTQLLAWLAQQPGVPHVICEATGGYERAMVAALQAAGVRVSVVNPHRIRAFARARGVAAKTDRLDAAVLRDYGICLAPAPTTPLSAVQLELAALATEYQYVVASITREQGHAELLVHPQAQRHSEARVRQLERQRDQLEAALAQALEADPQLSQHATRLEQVEGIGRKTVVSLLAFLPELGRLRPGQAAALAGVAPFNRDSGKWCGKRMIGGGRPAVRRALYMAALSAAKHNPVLAPFYQRLRTRGKPAKVALTAVMRKLIEHANRVLAQSQNLSPCIA

SEQ ID NO: 227678 - protein, 321 aa, unidentified
MEPTVVGIDIAKKKFDVALLREDKEKSGAFQNTPEGFAMFARWLERNGAEHVHACMEATGVYGDSLARYLHGAGHVVSVVNPAKVKGFAQSELSRTKTDKADARLIARFCRMMRPEPWQPPALEEKQLQAFVRRMDELNGMLTQERNRLATADDVVKPSIENVISLLEERIKEVRRLIREHIDQHPDLRGKRELLESIPGIGPATSAMILAEFGDVMRFQDARSMAAFCGLTPQQRQSGSSVRGKTRLSKTGSSRIRKALYMPALVAMTHNPVIAAFCERLRGYGKCPMVIVGAAMRKLIHIVFGVLKSGRPFDPSIAMAA

SEQ ID NO: 227679 - protein, 420 aa, unidentified
MKVVYQTCCGVDVHKSFLVTTIIKTSSGVEPSYHKKRFSTFNNSILQFKEWLIENQCRDVCMESTGKYWVPVFNLLEDEINVTIANPKWVKAVKGNKDDTKDSKWIGDLFRLGLVPGSYIPCKPIRILHEFTRYRYKLTSCRSSEKNRYQNALTVCNVALDSVVSDIFGKSATSVIDYLIEQSDNSINHEEIASRLLRSLKKKSDSVIASIEGYQMTDSQKYRMRLVRAHMDYITSTINDIDTMINSLIAPYENAVQLLCTIPGVDRNSAITIISEIGTDMAQFSNSKRLCCWAGLTPGNNESAGKKKSVRITRAGVYLKPALVQVAHAAVKSDKSPYYKTKYERITKRRGKKRAIIAIARMILTAVYQMLSTGEEWSPTDLYKVDMPEPMKEKQKEKAIKQTKKLLISEGIISESQLAS

SEQ ID NO: 227680 - protein, 344 aa, unidentified
MNNVTTYGLDLAKQVFQAHWVDVDSGEVHRKTLSRAQVSAFFARAPRGVIAMEACGSAHHWGRLLQTLGHEVKLIAAQFVRPFVKTNKTDAADAQAIWEAAQRPEMRFVAVKNEEQQAVLSLHRLREQWVKIRTQQANQIRGLLYEFGVVVPMGWRTLLKAVPEHLTATGSPVPTLLQEPLLEQLEALRAATAHIVALEKQLASWQRSEPECQRIMAIPGVGPLTASAVVASVTDARQFRSARQFAAYLGLVPRQSGTGGRVKLLGISKRGDTYLRTLLIHGARSVLLSQSRRGRSIDPWLGALLQRRPSNVVVVALANKMARTIWALLAQGRTFDAAWVSKRP

SEQ ID NO: 227681 - protein, 339 aa, unidentified
MTTPTIIGLDIAKSSFQVHGVAASGRPTLRKKLRRGQVLEFFANLPPCVIGLEACGGAHYWARALTGLGHEVRLMPAQYVKPYVKTNKHDAADAEGCCEAVQRPSMRFVPVKSETQQALLMLHRIRDRLVAERTGTISAVRGHMAEFGLVAARRGPGMKELLAIVSDLDDARLPPLARELLVLQVEHLRAIESRIAELDGRLQRQARSDGAARRLTAIPGIGPVIATAMVATVVDAQTFPSGRSFAAWLGLTPRQHATGGRERLLGISKRGDGYLRRQLMHGARSLVRLAAGRTGGLWTWIDGLVARRQFNVVVAAVANKLARIIWAMLRRDELYRAPA

SEQ ID NO: 227682 - protein, 362 aa, unidentified
MQHQGNELDFKGQNIYVGIDVHLKSWTVTILTETQPHKTFSQPPKPEVLFGYLEKHFPNGSYHSAYEAGFSGFWAHYRLMSLGINNIVINPADVPTTQKEQYHKNDPVDSRKIAKSLRSGLLTPIHVMGNESLEDRSLVRTRSTLVKDMTRFKIRIKSFLFFYGINYPENFENTRTHWSRNFMQWLKEIKLETWSGRAALDMLIQEAENQRQLLLQIDKKIRVLCLSDRYKQNIELLQTVPGIGITNAVVFITQIENVERFRTIDDLASYVGLVPTSHSSGEKENKGEMTFRGQKILKSMLVESAWVAVRIDTALSLSYNTYIKRMQPNKAIIRIARKLLNRMYYTLKNKRPYQMGIVGQNL

SEQ ID NO: 227683 - protein, 344 aa, unidentified
MEYFVGLDVSLRSCALCAVDPKGNVVLERELACEVNDIAECLSEFQFPIECVGLEAGTMSQHLYFGLQAAGFDVVCLEARQVNAALSAMRNKTDKNDARGIAHILRTGWFSPVHMKSREAHGLRALLSTRKALLKKTMDLANETRGLLKIFGIRLPKSVSHGSFDGIVRPIIEMDDVLAHALVPLLDARVALYQQYLELDRRVKRAASHDEVCLRLMTVPGVGPIAALTFKAAVDDPTRFKRSRTVGAHFGLTPRRYQSGEHDNPGRISKAGDSDVRAALYAAGNALLMRSMAQSQIKSWGMRLMRTKGRRRAVVAVARKLAVLLHRMWIDGTEFRQDQVGGTA

SEQ ID NO: 227684 - protein, 399 aa, unidentified
MECRDAPAERPRPAPGQALSRSLVALDQNSTIIAVVELSQSSWLVAGMLPGIERQPRKKLEPSPERLLGLLHRWQDEAVRAGRTITRIAVAFEAGRDGFWLARWLAARGVEAHVIHASSVAVSREHRRAKTDRLDTELLKRGFLGWLRGERGHCSMARVPTIAEEDAKRPNRERDCLVGERTRIVNRIKSTLARLGIRNFKPTLRKAAERLATVHTPEGMPLPPNTLAELQRDTARLGFVVSQIREIEEARQKRLEQQPETGPHAMVRLLARIVGVGVETADLLVHELLSRLMRDRRAVARYAGLTGSPDESGARRREQGLARAGNARVRRAMIQLAWRFLMFQKESALALWYRARTTDSRSGTRKTMIVALARKLIIALWRFVTTGEPLEGVVLRPAS

SEQ ID NO: 227685 - protein, 326 aa, unidentified
MAKRTTICAGIDTGKRKLDVALDCSPDQLQIDNTPEGYKVLLDWLRQHRVKRIGIEASGGYEQAVVAELRRKRFVVVVFQPAQVRAYAKFHLQRAKNDKIDAALIATCTAAVKKIHAPPDPRLLPFAEHLTMIDQIKEDIARLKNRLETCRDPRMQQLWKEDIARLACRERIEFKALVAAIRKHRDLAERLYLIFSVSGAGLPTAVAILVRMPEIGQLTREQAAALAGLAPYDDDSGQHVGARHIWGGRERLRRALYTAALPASFRWNPQLIALYQRLRAAGKEHKYALIACARKLLIFVNTVVARGTPWQNQPPPPAALTSTLAG

SEQ ID NO: 227686 - protein, 346 aa, unidentified
MPTSFHCGIDLGSKKTQVAIIDDEQRVLSNVRLDNDLTEIRKQLEPYRGRVQVVAEATFNWYWLIDGLQADGHPVTLAHTAGLAAISAAKVKTDRRDALTLARLLRAGMIPPAYIYPSEHRPTRDLLRHRWDLVAMRATEYRRIRNLLYQHGICDLGLADIKALDTEDVERLLQHPLTQAKALLELERIRLFTQQIDAVESELETVADPRPEFALLQQIPGVGTVLGLTILYEIGDISRFADVRHFASYCRVVPGCADSCESRRRGRNDKSGNPYLKWAFTQAATKAVAHYPRFKQHFERHLRRHGGRAKKIVCYAITAHLLAKAAFHILRTKEPFSEEALFRHQP

SEQ ID NO: 227687 - protein, 416 aa, unidentified
MNAVGIDVSSRKSTVAVLRPLGEVVCLPFDVTHDIAGLASLVEKLKALDGETRVVMEHTGRYYEAVAKALHEAGLFVCAVNPLLIKEYGANSLRRVKTDKADAVKIARYALDNWADLRDFTPMDAIRYDLKTLNRQFQLASKQRTASANNLIALLEQSFPGIRKCFDSPVRSDGTQKWVDFAHSFWHVDCVRKQPFAAFCERYRKWCKRHAYLFKLSNAEEVYALAKRAVVLTPKSKVVKVLVQEAANQLISISRSVEVYRAEMDRLAAMLPEYPVVMAMYGVGKSYGPQLMAEIGDVRRFERKQALVAFAGIDPMPNQSGDKNVRSNKSSKRGSPYLRKTLFNVIRTYLQCAPQDEPVFQFLNRKRAEGKPFYVYMLAAANKFLRRYYAKLRDYFASLKPLQPVDPISATLKATL

SEQ ID NO: 227688 - protein, 484 aa, unidentified
MSGILPPRAAADTEGQAPRYIGLDLAKKETQLALLNAAGQQIHSRRFASTRENFLQLASELGPLDCVALEVTTNSFTIARLLWPSGARVSLSDPMRTRIIAESKFKNDKIDARKLAELDRVDYLPKVWLPDPDTETLRHLMSQRQSLVDRRTEQKNRVHALLHRYLLRFEGTDLYGAAGRRFLDALLADATLAPYDAFELHSSLKEIDRLEGQLTEFEQLLADFIVTRPLLLAQLDHLLSVTGVSLVVGAGLLAAIGEVTRFAKPKRLASYFGLVPSTYQSGDSRAFHGRITKRGRAQARWLVIEAAEHLRKSPGPLRSFYQRLAKKRGHNIAVVAVARKLTELCRQLLTKTEDFIYALPRLTDEKRARVRFLARQWQAQLSGQPVAKAKGGSSVVSPLYATGLSGRSLKTRIARQAASQAETQYEKLLATRATAARATAAHESAALPANSSSFNPLRPTLPDWQRVLQQVAAQLSREPVKKGG

SEQ ID NO: 227689 - protein, 376 aa, unidentified
MNEIESIRLEQFRQLKKEIRGSKEYVIVGIDVAKDKHNAFFGTATGKTLFKRLVFENTREGFKRLLIHSEAIKVQHALTKTVFGLEPTANYHKPLGEFLIKSDYMVVLVSGVAVKRNRELLDGRWDKHDTKDSANVADLISQGKCLFYEYPPMALRELRSLLSLKRRLKKQEHGLKVRIRNQLLATYFPELDRFYGQSESDSLEIVKWCFNPSGSAGLDYEQFLQVVAPQKRGIEQQNRLKAIWKKAADSIGCDAGESLEFEAKVMVEGLQQMRNTIRDTDNKIGDICCEFPEYRYLLTIPGFGPDVSSTVLGAIGDPFRFKTGKQVLKMAGLDLSAERSGKRSDAARPVLSKKGKAHLRYALYQAAMIASRLLNH

SEQ ID NO: 227690 - protein, 416 aa, unidentified
MNFNKLLSGNITKYQKEGFIMISVGIDVSKGKSTVCIMKPCGEILESPFDIGHTADELDSLISLIKSFDEETRVVMEDTGHYHLPVATYLSSHNIFVCCVNALRMKKFCSQSIRRAKTDKIDSIKIASFGITYWNELVKAYPSNVIYDELKFLARQYYQVTGMLVKSKVNFSNLLDQVMPKINDVLSNQGENHKLTEFVSRYIHFQNILDMGEMKFTSDYCKWAKKKGYRLNERKAAEILALAQNGIPTLPNSQSVKIAVSEAVKLIHSIEESRNTILAQMQDLCNTLPEYSVVKEMDCIGDTLAPRIIAEIGDVRRFKNKHSLIAYAGIDAPPYQSGSFHASERHISKRGNSYLRKTGYEIMQSLIKHKPADNAVYDFIQKKRSGGKCGKEAMIAGLNKFLRVYYGKVMEFYSEH

SEQ ID NO: 227691 - protein, 310 aa, unidentified
MFNEFKTTVSGYKQLIKWVEQNSSGIEPSLWLFCGENTGDYSKGLCNFLYGKGYDMWLENAKSIKDASGLRRLKSDRADASMIAEYAMRNYDRAIMYEPLSESLAQLRELFLYRQMVVHHRCSFQVRRGEKKLTMEKSPIKTMISQSGRHIVSELNKEVEKIDKRISELIKSDEELTEVFTIVTSVPGIGTQNAVCLMVYTDNFRRFNYDSRKIACYYGIAPFGKDSGTSVHSDPRVHYMANRQIKSMLTQAALAAINFNPVIARYYMRLVERGKKKQVALNNVKNKLIRLVTAMVRNRQIFSPEYKISA

SEQ ID NO: 227692 - protein, 427 aa, unidentified
MLVPRENAVLGLDLGERKQALAVAGADGRVLARRSPRVSVHELGPFLDWALAQARAAGYGGLSVACEPTGPGWMAVQDLCAARGLPFVCVQPLMSRLAREQEDLTGDKTDEGDCVLIARLARELHCYEPERLEGAWAELREEGRRRAQLITNATAAKQLLRDKLGLVAPALLEAACEPFDSPAWLASLEVVLERCGGDPATVTAIGFAGFTAAVRAALPGWGGQRAGGTCRQLFAALGDGRGVARMRRAALRRVRGALADLKYARARRAQTETDMTALLAGLGIDTARICQIPGLSPVTLAAILAETGDLDKYESSSSVVKHAGMSPARNESGSFRGQAKISRRGRPALRLATWRATWAVLRHCDVLAAKHAALTSRDDDSRLTPGQARVACAASLLRWIWSLTVHGTQWDPRIAAGQLGHHHAVAA

SEQ ID NO: 227693 - protein, 369 aa, unidentified
MPHVTSIGLDVHARSVAAAAFNPFTGEVVRRSFGTDASEIAEWALGFEDPRACYESGPTGFHMARELRALGLDCAVAAVSKMQRPAADARRKNDRRDAEFIARMLATHNIVEVPLPDMAVEAARDLDRALDDATRELRRSRQRLNMFLIRLGHVWDERNADGARKKAWTRAHWRWVSEIRLEGPQRDALEYYVTAARCAESDRRQLERRVVALAGTERWRATVEALSCIKGVDTLTAFRLAAEAGSFSRFRSAPAFASWCGLTPSEHSSGESERRGGITKAGNALARTALIESAWHYSTCSPRPKAPAPGTDVPPAIRSRADDCTARLHRRREALAAAGKSACKANAAVARELACWVWEIGCRSEGTVL

SEQ ID NO: 227694 - protein, 343 aa, unidentified
MKITRVGVDLAKNVFQVHGVDRNEKPVWRRKLNREEWLKVLLEKIEPGCEIGMEACGGAHHWARKLHALGYRVKLIAPQFVKPYVKGNKNDANDAEAICEAMSRPHMRFVKVKTIEQQDIQAVHRIRAGLMEQRTAKANQIRGLVSEYGLVATKEILHLRAAIPLWLEDAENGLTSRFRSLLHGLWQDLLLLCERIAELDLESARIAADDPVAKRLQQLRGVGPMIATALLATVGDATQFANGRQMAASLGLTPRQNSSGGKDRLLGISKRGDAYVRCLLVHGARSMIRMAKEKDDRLSQWVMRIATTRHPNVAAVAMANKTARIAWAMITRGSDYQPDLVAA

SEQ ID NO: 227695 - protein, 349 aa, unidentified
MKILALDLGKYKTVGCEYERETGKHSFRTSFTTPAALAQLVKEVQPERVVIEVCNIAGWVCDRLRGMNVEVQVANTSEDAWRWRKVKKKNDRCDALKAAQLSAVNQLREVHIPHLEVRQWRALIAFRQQLVRRRGKVKNHIRDLLVSEGQILPRGAKCWTQLGLAHLEGLTKGFSELGMHELWRGQLDSELRQLRDLQQEIAQVEEKLDVIAKAEPRIALLRTIPGVGPRLSEAIVALLDQPERFHNTREVSAYVGMVPKELDSGETERRGRITKHGSRLVRCLLVEVAWAGMRYNPWVRETFQRISGGKKSRKKIAIVAVGRRLLVRCWAMLRDGTSWRPPALARMIS

SEQ ID NO: 227696 - protein, 376 aa, unidentified
MREKLRFLGLDVHAETITIAIAEPDGSVRSLGTIANREDSIRKFIKKLGSPEQLRACYEAGPTGFVLYWQLTQIGVDCTVVAPSLVPRKPGDRVKTDRRDALKLARCHRNGDLTAVWVPDEASEALRDLVRQREAAKQDQLRARHRLTKLLLRTGQRPPLGVKAWTERYWRWIEQVRYTQPAQQATLRDCLNEVQHMSARVKRLEEAILEVVKLAPQAMQELIGGLQALRGIAHISAVTIAAELGNISSRFQSARKLMGYSGAYPEEDSSGDRIRRGGITKAGNAHLRRIIVESAWCYRHWPRVGAKLRKRQQGLPPEIIEIAWKAQNRLYKRYLKLSMAGKDQRKVMTAIARELLGFIWAIAVKAERVSTQPIAA

SEQ ID NO: 227697 - protein, 391 aa, unidentified
MFYLGIDVGRYHHAAALADPRGATVALLPQFPATAEGFLTLRSFVQRHLPPGEQLRVGIEATGPYWQPLARWLSLQSWPCVVDNPIKASSLRNYGIRGAKTDRIDAVLIAQALRWEDKAPRERLHHSALELRHLTRLHTHLVKERTRASLRIDSLLASLFPELPLLLPKKRSSPTTLAILEAAPSPAKALALGLRALTTLLRRTSRGKLGQARARRILNAARRSVGVPSPAAEIALTLLVAQLRLLNEQIDSLEKNIFDLYSRLELPLHSLPGVGLLLAAVLAAELGSVHLFARPQQMVAFAGIDPKLRQSGSLQGQVRMSKRGSRYLRRAIYLACQNAVRTDDHFKALYERHLARSKPPRRALGAVMNHFVHVLFAIWRDNRAYVPLTSS

SEQ ID NO: 227698 - protein, 346 aa, unidentified
MKTKVSVLGIDIGKNICSLVGLDAAGTVIMRRRATRETLIGLAPKLPACVVAMEACCGAHHLGRVFAAHGHEVRLMSPEYVRPYVKAQKNDDRDAEGIAEAATRPTMRFVELKTQDQLDIQTLHRSRDRLVGERTALINQLRAILLERGIVVPKGKRHLADYLAVLLDEGNRHTLSDRMYRLVDDARTQWRELDKRIAAFDAEFTAFAKENEDARRLATIPGVGALIASALLAAIGKAETFEHGRDLAAWLGLVPRQATTGGKPKLLGISKRGNRYLRRQLIHGARAALPHAAKRDTPLGRWLTALLARVHQNVAVVAFANKLARISWAVLRRGETFADKEAILAA

SEQ ID NO: 227699 - protein, 340 aa, unidentified
MEELYVGLDLHSRNTYTGIMTKDFKRVFGKRLTNYLPVIVGALEPFRNDIQGIVVESTYNWYWLVDGLMDAGYDCLHLANPSAIKQYEGLKHVDDKSDSFWLAHLLSLGILPEGYIYPKEERPVRDLLRKRSFLVKQRTSHIHSLKSMIERNTGERISTRKLTGPDRIDLEQLLKEEYLFLSANASRSNIKFLSHHIKIIEKAVRKKIKIKKGFEFLKTVPGIGDILALTIMLEVGDINRFPKVGDFSSYCRCVSSKWTSNGKSKGKGNTKNGNKYLAWAFVEAAHFAQRFSPTIKRYYQRKSAKRNEIVGRKAIAHKLARACYYIMRDRVPFKEETSFC

SEQ ID NO: 227700 - protein, 420 aa, unidentified
MQDKRRDDMQRRENYLYVGMDLHKDTHTAVMVNCWNEKQDVIVIENKPSEFGKLAKRVNKMAVKLGLSPIYGLENAYGYGRSLAVWLIEKGYIVKDVNPSLAYDQRKSAPMMKKNDEHDAYCVATVLINQLHTLPDAKPEDNHWTLSQLVNRRDTLVKDGIRLKNGLHEQVSVAYPSYNRFFCDIDRKTALYFWKHYPSPIYLRNKPVDELFEEFKAIASNTTKSKIELIFECVHNDGDTIREYQESRDFITQSLARCLEQQKEELALVDCEIERMLRYFDYKLTTIPGVNIATASKLIAEIGDIRRFPSADKLARYAGIAPIKFSSGGKGKEQSSKQGNRELHGLFYFLAVSMVTVPKTGKPNQPIFYSYYQRKISEGKTKSQALVCIMRRLVNIVYGMMKNKTEYRPYVVEDHAVEEQ

SEQ ID NO: 227701 - protein, 386 aa, unidentified
MQTVADRPEAPTAIRTDLGAIFVSLELSRSTWLITSLSPGGGEKMSKQVVRGGDVAGLLERFARLREKTRARTGKVFPFVVIQEAGLDGFWIDRALQNEGIESHVVDPASIATSRRRRRAKTDGIDGEALVRALLAYKRGEPRVCAMVKAPTPEEEDRRRLCRERKVLIVERVRHVNRVKGLLFSQGISGYEPLRRDRRERLDTLQTGDGRRLPDHLKAQVRRELDRLELLLEQIKAVEAERDVLLAAQRVAAPAAMLLDIKGIGPEFAAILWSEGLFRHFDNRRQVASYAGLAPTPWQSGSIDREQGVSKAGNPRLRTTLIQLAWLWLRHQPQSALALWFEERVRRNGGRLKKTTIVALARKLLVALWKYVTAGVVIEGVVMKRT

SEQ ID NO: 227702 - protein, 370 aa, unidentified
MAESTTLYVGLDVHKDSISVAYAAGGGDTPARFVGPIGTRQRDIDKVVRQLQSRSARLVFAYEAGPCGYVLHRYLTGKGLDCRVVAPSLIPKRPGDRVKNDRRDAVEIARLLRSGDLQPVYVPSVDDEAIRDVARAREDTLCALKAAKLRLKSFLLRLGLQYVGRADWNNAHRRYLAKVVCPTPAQQIVFQESIRAVDEQVARLARLEAELRDRAASWRLAPVVAAIQALRGVQDTVAITVLAELGDLTRFDNPRQLAAFVGLTPSEYSSGATRRQGGITKAGNGHARRVLVEGAWAYRYPAKISPHIQKRIEGLPKPIRDIGWKAQVRLCKRFRRLAARGKHANLVVTAIAREILAFMWAIAQEVKGTA

SEQ ID NO: 227703 - protein, 379 aa, unidentified
MTCKECGQVVKLTRTMNKCHSNTELSSHEETRCQFNGGTGAIKLGIDVHQDFYVVVEQAGGSNPKPPQRFPKAAFLHWAAKLKSQATEVYAVYEACGFGFSLQRKLSALSIKCYVVCPQKLDEQNRRVKTDGLDAKALCLKLDRFVQGNRDALAIVRVPSEEEEQARAIHRQREQLVKARKQLEAQGRSLMVNHGLEPVPNWWKPRTFTALPAPQWMKELLANSQPILVGLQQKIAALTVQLQSAASPEQPRGLGKMTSVVIDREIGDWNRFSNRRQIASYTGLCPGEYSSGNTRLQSCVTKHGNPRLRAALVELAWRLVRFQPNYHPLRKWRQILAKGALATGAARKKAIVAVARQLAVDLWRIKTGRLRSEELGLIN

SEQ ID NO: 227704 - protein, 346 aa, unidentified
MKITTSGIDVAKSVLQVHGVDERGNVALRRQIRRSQLLLFFSRLEPCLIGMEACASSHYWARKLMALGHTVRLMAPQFVKPYRKNDKNDGNDAEAICEAVQRPNMRFVPLKSPQQQAELAVHRIRRRLIGQRTALINQLRGLLAEHGLVLAQGANQVRSKLPALLEDGSESLPPLAVELFRDLYEELVQLEQRLAACDRRVERLYRGNSVCQRLGQVEGIGALTASAFVATVAHAAQFKNGRQCAAWLGLVPKQDSSGGKTRMLGISKRGDVYLRTLLVHGARSAMRHTPKRNDPKSRWIEQLRKRRGENVAAVALAAKHARILWALMVQGEASTQHVTQIIEQPV

SEQ ID NO: 227705 - protein, 314 aa, unidentified
MADPCSVGIDVSKGTLDVAWSTNPTARWQTTNDDVGWTALVAHVRALQPTIIVLEATGGYEIGAASALSTADLPVAIVNPRQVRDFAKAFGLLEKTDAIDAAVLAAFGARIRPTPRPLPDDLQADLQALVTRRRQLVDMLTAERNRVPLARGAVRRNVLAHIAWLEKQLAKTDRDLRTQIEASPIWRARDHLLQSVPGIGPATSARLLASLPELGTLSHRQISKLVGLAPMPDDSGRRRGYRRIQGGRGDVRSALYMATVTAITHNPTIRAAYRRWRAAGKLPKVALVAAMHKLLIHLNAMLRYQTPWHPPATA

SEQ ID NO: 227706 - protein, 449 aa, unidentified
MTKKGKSMGLPIVNARAAGIDIGSRIQVAAVPPELCDEPVQTFQSFTGDIERMADWLVSVGVTTVAMESTGVYWVPVYEILEDRGLTVVLANARDCKTVPGRKSDVNDAQWLQRLHACGLLRASFRPTREIAALRTYMRIRERHLEYAAAHMQHMQKALTHMNLQLHHVISDISGATGLKIIRAIVQGERDPDALAAMRDVRCRESVQTIRKALVGNYQPEHVFALAQALKLFDSYQERVADCDAQIEQTLQLLCADKIEPREPLTKPRHRAKQTNAPSFDARPLLYQLTGTDLTQIHGLGPSVALSLISECGTDLSRWPTEKHFTSWLTLSPGCKISGGKVLSSHTRKSSNRIAARLRLVATSVGRTETALGAFYRRLAARIGKAKALTATARKIAILFYRAMRFGLRYEDPGADQYEQRYRERVVRQLQRRAAQFGFALQPTEVSVS

SEQ ID NO: 227707 - protein, 372 aa, unidentified
MKEETAGHPGVVGGVDTHKDLHMAAVVDEHDRVLGSECFATTRHGYRQMLIWMRSFGELLRVGVECTGTYGAGLLRYLQHAEVTVLEVTAPDRSDRRKRGKDDTLDAENAAHAAFAGVRTVTPRTRDGMIESLRVLKVCRKTAVAARRGALQLIHNTVVCAPDELRESLRTMTRMQLIRTLAAWRPDLSDYRNLTSAYRITLKSLGRRYLELHDEIADLDVMIAALVNELAPDLVSRNSIGYESAAQLLLTAGDNSERLQSEAGFAALCGVSPVPASSGKVTRHRLNRGGDRAANSALHIIAIGRLRTDPRTKAYVDRRVSEGHSKLEAIRCLKRYIAREVYYVIRKRNRQIGQVQVAWKRPVPDNRQAFVI

SEQ ID NO: 227708 - protein, 405 aa, unidentified
MKVREKVWVGIDVGKAAHHACVVDQAGKVVFSGKVVNGQAAIEALIARVRAKAGAVVWAVDMTSGAAGLLMALLTGSGDPVVYVPGRLVNRMSGAFAGEGKTDAKDARTIAETARMRGDLTPVTGHDQIVADLKVLTARRENLMTDWVRGVNQLREMLASIFPTLERAFDYSTRSALILLTGFQTPAGLRGAGHHGVRGYLSEHGAWAKGIAAMTDKALAAAGEQSIALPGEMVTAPLIARLATQLLDLDREIKALDKQLTERFGQHPHAPSITSVDGFGPILGAQLLADAGGDLHTVFGSASRLAAYAGLAPVPRDSGKITRNLHRPKRYHRGMRKVFYMAALSSIRRADGPSRAFYEKKRAEGKVHTQALIALARRLIDVIWALIRDNRTFTIQAPTPISAAA

SEQ ID NO: 227709 - protein, 345 aa, unidentified
MQAEYDGRQIVGIDLHRRRSVIVRMSEAGEKLETVRIDNDPVALGLEIAKAGPDPEVVLEATYGWYWAVDVLAAAGARVHLAHPLGVKGFAYRRVKNDARDAADLADLLRMGRLPEAYVAPPAVRELRELVRYRAKLVAWRSGLKASVHAVLAKQGVHIAVSDLFGVGGRELLARAPLDGAYRGRVSSLCRLIDAVDFEIDALAGPIRARLAGHRGYTAVQAIPGVGPVLAAVFVAEIGEVDRFPGPAQLTSWAGLTPRHRESDLVVHRGRITKQGSTLVRWAAVEAAHGIPRSASWLTCTRARIGERRGRNIATVAVARKLLTLVYYGLRDGHIRALGPARAAA

SEQ ID NO: 227710 - protein, 412 aa, unidentified
MEVIHSRCAGMDIAKRDAKVCIRLAGSGRRRTVETVTTWGATTRQILALREHLVAERVTCIVMEATSDYWKPFYYLLEDLVGVEVMLVNARHVKNLPGRKTDVADATWLAQLGAHGLVRGSFVPPAPVRQLRDLTRTRTAVTRERGREIQRLEKVLEDAGIKLSSVASDITGVSGRAMLEALIAGNSDPTAMADLARRRLREKIPALTEALTGRFTGHHAFLTRTHLNLIDQHTAAIDELTARIEVVIEPFRRFRDLICTIPGIGGNTADVIVAETGADMSRFPSAEHLASWAGTTPGNNESAGKVKSSRTRPGNPYLQGALGIAAISVSHTKHTYLAAKYRRIASRRGPLKANVAVQRAMLIAIWNMATTDTAYLDPGADYFTRLNPEKARTKAIRQLQATGYHVTLEQAS

SEQ ID NO: 227711 - protein, 335 aa, unidentified
MPILAELVDAVVGVDTHRDSHEVEIAHPNGAVIATCQISNATSGYAEVLAWILDHAPGPRLVVSIEGTRSYGIGLARAVSTAGVAVIECEQPTRNTRRGRGKSDPIDAHLAVLSALRLDADRLPTPRADGDREALRILLGARQELTTTNTAQTNRLRALLLTGDDHDRDRARGKLSDNALTTLARRRLPRDADRAQAIRHAEIRRLALALREATHALAANRAQLQAIIDELAPGLTDRRGIGPVSAAQAVVSFSHPGRCRNEAAFAALAGTSPLPASSGNTVRHRLNRGGDRALNRAIHTIAMTRARCCPTTRAYITRRRAEGKTDREIRRCLKR

SEQ ID NO: 227712 - protein, 414 aa, unidentified
MLKIVYPICCGLDVHKDFVYACIATTENGITTYKSHRFSTFTKGLRELLSWLLANNCKDVCMKSTGKYWIPVYNILENDCKIVLAHPKYVKAIRGKKTDKKDAKWIADIFKHDLVSGSCIPPADIRQLRDLVRYQTKLTSFTTGEKNRAQNCLTVSNLKLDSVFSDVFGKASSNIIGHILANPSEKLSDVSAFRTKHMKATDEEILEAVDGEVCPEQAEKLRIIREHMSNLDLCKLNLQSLILSTAEKYIPEMELICTVPGMATFSAISVIGEIGVDMSVFPTSKHLCSWAGLTPQNDQSAGKKKTTRISRAGAYIKPLLVQCALAAIKSKNKHPEIYNRYSALKKRRGHKKAIIAIARMLLTAIYNILKKKEPYKAELYAHSYDTPPEHRAVSVEEAIFILQRQGYIVTPCAT

SEQ ID NO: 227713 - protein, 422 aa, unidentified
MMDKERSWFVGIDWAAQEHVVSLYDGAGNKIGQRKFSHGGTGLTDMIAWLLKASGGEPGEIHVGIETPHGPIVEALLERRFNVYSINPKQLDRFRDRFTVAGAKDDSRDADVLSDSLRTDMRAFRKLSIADPLIVELREWSRIDEELKVEHGRLTNRLKHQLWRYYPQMLELADDVGAKWFLELFEAVPTPEKAANVREKTIARILKNHRIRRFDAAHVLAELCKPALAVAPGTIEAATAHIRSLIGRIRIINGQLADAGQQLDRLCKKLSEPVADEDGEAAPGQKPEQRDAAILDSLPGVARTVLATLLAEAPDTLQRRDYHALRALCGSAPVTRRSGKSRMVVRRYACNHRLRNATYHWAQNAIQHDHTSRAKYDALRARGHGHARALRSIIDRLLSVACAMLDSGTLFDPEFASKRATG

SEQ ID NO: 227714 - protein, 411 aa, unidentified
MDVLVRRCAGLDVGKDEVVACVRAPDDTGRRRQTIQKYATFTSSLEAMATWLVDEGVTEVVMEATGQYWKPVWYVLEGRGFELKLVNARHVKILPGRKTDVGDAAWLAELLEHGLLRGSFVPPPAIRELRDLTRYRKRLIQAHASETQRIQKTLEDAGIKIDSVASDIMGVSGRAMICALVAGERDPHVLAELARGRLRSKLPYLREALRGRFREHHAFLIRLSLGHLEHLEAAIAEIDAEVDRVMVPFGEVRDHLDTITGVGKRAAECIIAEIGVDMSVFPTAGHLASWAGRCPGNNVTGGKRRSGKTNNGNVWLGDVLTECAWSASRARDTYLSAQFWRFARRIGRKRAATAVGHSILVIAWHLLTDNCDYQDLGGEYFIRRDTERSRQRAIAQLQSLGYRVTIEPAAA

SEQ ID NO: 227715 - protein, 402 aa, unidentified
MKEFSAEEIRIEAVSALETVKRAQVNGRYPAFIGLDVHKESIVFAVARAGREAPESRGEIANKPKAVAKLVERLNEEFGGEELLFCYEAGPCGYGLYRQLLALGHDCQVVAPSLIPKKPGERIKSDRRDARKLAQSLRSGDLTAVWVPDEEQEAMRDLTRARDDMKSQERKARQQLNAFVLRHGHAWPSNKTRWTKTHYNWLESLKFAHDWQHVVLQEYIDAVKTATQRVIDMTAQMERVLPHWSLAPVVDSLVALRGIDKLAAMVLLAELGDISRFQSPRQLMAFLGLVPSEHSSGNRRRQGAITKTGNSHARRMLVESAWSYRFPARQTAHLKRKAANASDEAKAIAWKAQKRLCGRYQTLTHAGKNTKLVCVAVARELAGFIWDIACREMPKVDSRAAR

SEQ ID NO: 227716 - protein, 358 aa, unidentified
MKKNSKLEARGQLTIGIDVSDRSSCYCYLNRAGEVCGEGKLPSTPEAFRQHFGGMARAVIALEAGTHSGWMSALLRECGHEVIVANPGRLRLLTTSDNKNDPQDARTLAEIAWARPSLLKPVRHRSAEAQRDLNLVRARDLLVEARTKLINGVRCLVKGLGARVPKCASGQFCQHAHQHLPEEGRPATGPLLEVIDELSVRIGEYDEMLEHVAQTRYPQTTLLKQVSGVGTLSALAFVLTIEEPHRFARSRDVGSYLGLRPKQQDSGDRSPQLRITKAGDSYLRKMLVSCAHYIIGPFGPDTDLRRWGLKLCERGGKNAKKRAVVAVARKLAVLLHRLWVTGEVYEPLRNQAEADVAA

SEQ ID NO: 227717 - protein, 403 aa, unidentified
MNSVGIDISKGRSTIAVMRPFGEVVISPFEVRHTDSELSELARQLKSLNGETRVVMEATGNYHAPVAKLLHDAGLYVSVINAKLVHGYGNNDLRRVKTDRKDAVKLANYGLDRWLTLPRYVPEEDTRLLLKNCYRQYRQYSKVQTVLKNNLISLLDMVFPNVNRLFSSPIRGDGSEKWVDFVAEFWHCRCVSEKSQKAFTNKYQRWCRKHGYNFSEAKAHTIHAEACGHIDVIPKSETTKLLVEQAVAQLRATSAALAALKHEMQALASMLPEYPVVMDMFGVGPTLGPQLMAEIGDVRRFYSKKALVAYAGLDAPPNDSGDVTGRHKSMSKVGASSLRRTLFLVMSVYLQNAPLAEPVYQFMDKKRAEGKPYRVYMMASANKFLRIYYATVKAYLESLEHTA

SEQ ID NO: 227718 - protein, 343 aa, unidentified
MSNDTRIGVDVAKAVFELAISDRPGHVTRRERLPRGQFLAFIAQQPQATVVMEACGSAHHWGRKIQGLGHRIVLLPPHHVRPYIRRNKTDRTDAKGILEASRNEDIRAVPVKTVGQQVLTSLHRLRSGWMRERTARLNALRGLLRELGVFIPMGAREVVPLVWSLIEDADSELPEALRSIFAEACREIREIEARVKQVERQLEATAEQLPAVEYLRTIPGIGLLIATALVAFIGDIRRFPSGRHFASYLGLTPREYSSGLKRNLGRISKRGDGYLRTLLIHGARSVLVHARKQQPDRLREWANKLAKTHVHNKAAVAVANKLARIVWAVWHHERPFALIAKVA

SEQ ID NO: 227719 - protein, 418 aa, unidentified
MQMELSQFAAIIGIDWADKKHDICIQVTDTGQRKTYQIQHKADKIDEWARSLHRQYGGRIAVALELSKGPLVSALQKYDFFVIFPIDPTTLANHRKTFTPSGAKDDPTDAEFALDLLLKHTEHFTALNPQSVEMRTLMTLVEQRRRLMNDRVRMTNRLRNALKQYYPHALEWFDRIDTLLFCDFIKRWPSLVQVRRARKATLEKFFREHNMNRKALLERRLAEIKSALPLTTDEAVIVPYRLQVLTLVAQLEVALESIRIYDEEIAGLAPQHPDYGLFNTLPGAGPSLAPRLLVAFGERRQRFASAAAVQKYAGIAPVTERSGQKSWIHWRWQCPTFLRQTFVEWAAQTINKSYWAGLYYYQQRAKGCSHQAAVRALAFKWIRILYRCWVTRTPYDEAKYLKALQERGSTLLKMAEAA

SEQ ID NO: 227720 - protein, 335 aa, unidentified
MVKENFIYVGIDLHKETHTAVMIDCYNQKLGEITFPNRPADFPKLVTKVKKCNTDAKEVVYGLENAYGYGRPLAVWLIDKGYFVKDVNTAISHRQAKHRGAMYRKSDSDDAEAIALATLNMLDKLPDACPNDAYWSLGQLVHRRDNIMKQRTRLVNQLHEQLCIAYPSYKQFFNDISRPTALYFWEHYPSRKYLKGKSVEDLRAELVPVSHNKCSTRTCEKILDAIAGDKVKNNAYQDARDMVTLSIVSDLQHYDKQLAEVDKMLEQMYKMLGCTLTTIPGVNVITAVKILAEIGDIKRFANANKLAQFAGIAPLHLSSSGKGKDVATKQGNRRL

SEQ ID NO: 227721 - protein, 412 aa, unidentified
MSVVQFTQVLSRGCGMDIHKKVVVAAVQGEGICKETRSFDTFTRSLTQLREWLVSLGITHVAMESTGVYWKPIYNVFEGFIPHIWIVNARHIKNVPGHKTDKNDSEWICQLLMAGLLKPSFIPPKAQRELRDLTRYRRKLIQSVSANKNRIIRILEDGNIKLSSVLSDTSGATAVKLIDMLCDGKQITLSDIESVRHGRCQHTKEEMLEACTGCLDEHKVYMLGKIRECNASLKEDILDFDKRIKDVLSSYHDAIERMCEIPGIQNRVCEDLVAEIGLDMSNFSTSAHLCSWAGMCPGNNESAGKKKSGRTNHGDKQVKETLVEAAWAASRAKGTFFMERFNRLAPRKGSKKALIAVGHSLLKCIHYVLSTGGRYKELGDNYVPNKKEQKRKEYLKKELQKLGYSVKLSKED

SEQ ID NO: 227722 - protein, 406 aa, unidentified
MLFVGDDWAEDHHDVEVQDETGRRLAKARLPEGISGIARLHALVGRFLPEDSDPAEVKIGIETDRGPWVAALVASGYQVYAVNPLQSARARQGGGVSGAKSDAGDAHVLADLVRTQSHQLRTVAGDSEQAGAVKVLTRMHQTLIWDRTRQVQRMRSSLREFFPAALEAYEDLDSPDVLELLTKAPEPASAARLTRAQIAAALKRAHRRDRDTKTTAIMAALRTEHLTQAPLIAAAYGATVRALAAMITTSNEQITALEGPVEACFGQHPDAEIYLSQPGLGPILGARVLAEFGDDPTRYVGARARKNYAGTSPITRASGKKTVVLARYVRNKRLADAVHRQAFSALSGSPGARAYYDALRDRDIGYNAALRQLGNRLVGILHGCLKTRTRYDEATAWNQHTQQTAA

SEQ ID NO: 227723 - protein, 400 aa, unidentified
MRAVFGIDVSKTSSEVAILVNGEKVHGYSILNDAIGFNRLLGDLKTVHNPEIIFEATGVYSRCLQAFLEECGYAYTRLNPLEAKKQLDSLRVRKTDKIDAEKLAKSQLVHNRKPTYVQEEVYQHLRDLSRFYQNMTEDLVRAKNRLHKVLQVTFPELENLLSTPTGEQYWNLVMAFPCKEFVLSLSQSDLYEIIRQSTSKRISEKRIAYLTDKLIKLAKQSFCAVKKTSPMLEEVRYYAQELLRLSERRQVVLNDMVALAQPLPEYDILRSIPGIAETTATSIIGKLGDIRRFHSANQINAFIGIDLRHYESGNFLAKEHITKRGNPYARKILFKCIHNIASASHTNPCHIADFYEKRKRQSTIASTKPHTIASIHRLIRTMYYLITHNKLYDYSLTQNR

SEQ ID NO: 227724 - protein, 504 aa, unidentified
MAPGRRLNIGEAQRGTPLGESRGINPPGRPVFTNTGREGCDGMANEERTGRPEGLKPIDEGFPVLRADVAGIDIGSQQHWVCAPTPTGKGREVAVFAATTPGVEQLAAWLKDRGVTSVALESTGVYWIAPHEILEAHGFDVVLVDTRELGRVPGRNKSDRRDCEWIQRLHSCGLLRGAFRPVEQVCMLRTLVRDKGTLIAERANWIRRMQKTLDQMNVRVHRAVSDVDGATGMAILRAIVAGERDPHQLAALRDPRCRKSEVQIAEQLTGHWRDDHLFSLQQALKMYDALSETIAAYEREILRQLERMTNVDRRDDQAPPPTSPTKAKAIKKRGEDPLRHALYRISGVDLTTIDAVGVETVNVVLSEYGPNLSQFPTEKQFVSHVGLAPHTPTSGGKVVKKKKKPGSASARVGAALRMAATSMRHSQTALGAYYRQVARRGGADVAVFATARKLAQYIYRLLRWGQPYVDEGVAAYEKRYQLARAQRLAAAAKNLGYRLIPVEA

SEQ ID NO: 227725 - protein, 382 aa, unidentified
MENPRPHEPAFTRSAREVAQGRGAEASLIQIVRADMAKTATEVQVFAGVDVSARELSVAMRSATMDREEVQSFSNNAAGHQALLGHLLRGKGRARVCLEASGNYSLDLALTLHANRRAEVSVVNPRRARRFAESLGERNKTDPVDAHVLCQYAVRMPWEPWVPPSALALRLRGLTRAIEALGVTQTQEKNRQHSLRASRALPTFVIRELQRHLEYLQLRITRLRREALRLIARDPELDRRFRLMLTTPGIAETSALQILGELAALPATLDARQWVAFAGLDPVRFSSGTTVDKKPRISRGGSRHLRRALYMPALVAIRHEPHLRAFFHRLVAHGKAPLQAIVAVMRKLLHAFFAMFRSDHSYDGSRLCLVEVASNPVAMCAA

SEQ ID NO: 227726 - protein, 368 aa, unidentified
MTRLAKVGTFFKNVNLTSDDEVFVGVDVHKKSYHVALFLNDMPAIDFQMAAEPKQLNKKLQPIACAIKDIVYETGPTGYGLARNLIKNNLPASVVATSRIPRPAGAEDKTDRLDSRKLAEYSAKGLLCPIRIPTPKQEADRQLYRMRHRQALQFAKVKVQIKSFLLMHGIKEPDGLGNWTIASVCQLRDMCLIDTLRLSLDELLSDYDYFNNRIKVLNKILADNLNKGVLGQRMDLLKTHPGVGPVVACQFTTELYHYRDFSSTRQLYKYLGLSPRVSQSGEKSSTGSINKAANGRLRNNLIQAAWSWVLTDIEAKKCFYRICDNCGGIRQKAIVAMARKMSGHLWAMLMNDQPYDKNKAKCRHNNER

SEQ ID NO: 227727 - protein, 404 aa, unidentified
MVVFCGIDWAEHHHDVAIVDAAGEVVAKRRISDDITGFTQLTELLCVHAERPADVQVALETDRGLLVAALRAAGYRVFAINPKAVDRYRDRYAVSGAKSDAADALVLANLLRTDAARHRELANDSAQVEAIAVVARAHQDAVRVRLRDTGRLRSLLREFFPAALTAFPNLATRTAMQILAAAPTPSQAQALDRDQIRALLGAAGRICLRASDVERLHQIFAAEQLHQPPQVEEAMGVAVQAIVTTLMGTDAAIAELEAALAARFDNHPDAEILRSLPGLGVVLGGRVLGEFGDDPTRFLDAASRRRYAGTAPITRASGKSRVVLLRRARNQRLADACRWWAFNAMQHSPGAMAYYRRRRAAGDTHEAALRRLGSKLVGQLHHCLEHREPYREDIAWPANLPIAA

SEQ ID NO: 227728 - protein, 385 aa, unidentified
MKTILKYSIGCDISKEKFDACISTIDTTQQVVVKATRKFNNTNSGINEVVVWIGKHIKQNVSITVTMEATGVYFERLAFALYEKDFYVSVVLPNKSKKYMESIGYKSKNDKIDAIGLARMGAEQNLKQWMPCSTHISQLRLLTRQNEDLQQQKTVLINRKEAQKFSQYENKLVRDQLDQMINIINQQIEQIKKEIVKVIEKDPILKEKVEKINTIKGLGILSIATIIAETNGFYLFKNQSQLVSYAGYDVVENESGKRKGKTRISKKGNSHIRRVLHMPAFNVVKYSQGTFSSLYERVYDRTKFKMKAYVAVQRRLLILIYTLWKNNEEFDPNYHKTSGNDELKSLFSLGFEKSVKKVAPEESEATQDELPCKESPEVLFSLLQK

SEQ ID NO: 227729 - protein, 291 aa, unidentified
MLFSGIDLHKRSLVVHTLDADGTTAREAELKSDRAAVMAYFGTLAGPHCAVVECVQSWYWLRDLLAPAGVDLRLAHAKYVKAISYAKVKTDRVDARMLAQLLRVGLIPEAHMIGAEHRETRDLLRSRLQLVTRAVRCQHAVGSLLEKYNVATPAELPELARMQATLQDEQRTLLRTHIKRVEATLKQRLLPTADVQRLVWVPGIGKLGAYALVLEIDDVTRFPTVRHFHSYCRLVPGADNSAGKTRHKRSRDGNRYLKQVFHTAAIRAAQCAVPPGTREEAASGVAGLTRN

SEQ ID NO: 227730 - protein, 394 aa, unidentified
MKLVGIDVGKNSHHFCVMDKETGEFNVTPTSFSNNKEGFDFLINSLKPYSKKSILLGMEDTGHYHVALLKFLLNNGYTVALINPKTTDLTRKMEGGITKNDKLDTITICDVLDTPERKKQYRITKVDRFDLYEQRQLTRHHHNLKEELNVYCNRLQKSIDLVFPEFNTLFSSKYGVVYMNLLKTFGSAEAIASTDIRTIRKCFEIKGKGNRISLTPEKLKECAKNSIGISSEVETIQIKHLVSQITLIKEQIAEIDKKIEEFSITNNSPILSIPGISHFSGTSILAELGDIGNYSKPSQIIKFAGVAPYHYESSQYNAQHTAITKKGSKYLRKTLYQIILPVINNNPVFKKYYLLKISQGKGHRCAQGHCIRKLLRIIYHLLETGQSFDPALLR

SEQ ID NO: 227731 - protein, 486 aa, unidentified
MAKGTSVYERLTGGNRKQRKDLRRRLYSDDPGLGVVHANAAGIDIGNESHFVAVPPARDAEPVREFGSWTADLERMATWLKSCGIETVAMQSTGVYWFAVYDVLEKHGLKVFLVNASHTKNLPGRKSDVQESQWLMKLHTYGLLRNSFRPPEEIRPIRAVWRLRERHVQDAARSIQHMQKSLTSMNVQLANAISDIGGVSGQAIIRSILAGERDAHQLARLRDRRIKASEEEVARSLEGHWQEDQLFELQQAVDEYDFRQKQLTECDRKLQAYLAVLPSRPVPPADTGTVLPAPAAPGKKKRRAKKIGGGNAPQSFDLAAELKRVTGVDAIRIEGVNLMTIQTVVAELGTELGKWWPTEQHFASWLGLSPKRDVSGGKVIRHTHEKNRNRVAGILRLAAISLLRSDSYLGARYRNLRARLGAPKAIKAMARYLACIVYRLFTKGQAWVDRGAEQYEQNRQKRDLARLQAQASSRGFRLVPTADQVA

SEQ ID NO: 227732 - protein, 328 aa, unidentified
MATISVGIDVSKATFVIAVHPTGERWSSATTPAAIDATIARLRALSPTIVVVEATGGYERALVAAGVAAGVPFAVVNPRQVRAFAEALGYTAKTDTIDAAVLAEFGDRVQPEARAVADAATQALAALVLRRRQLIEMIGMERNRLEHAPPTGPITRDLRHHIRWLERRVADVDEEIGTAIEASPVWRVSDDLLRSVPGIGPTTARTLLAELPELGHLSRRTIAALVGVAPYNCDSGPHRGQRHIWGGRAQVRRTLYMAALSATRSNPPLRAFYRRLRAGGKPAKVALVATMHKLLTIVNAMLKHQTSWNGQVASTPASLNGRARAATV

SEQ ID NO: 227733 - protein, 371 aa, unidentified
MPQSNTLYVGMDVHKDSIAVAYVSQEHPAEVTYCGAIGTRQCDSDPLIRKMQSKSKHLVFVYEAGPCGYWLYRYLTQKGHVCWVVAPSLIPKKPGDRVKTNRRDAMQLARLMRSGDLTPVYVPQVADEAIRDLSRAREDALRDRKTAKHRLKAFLLLRHDIRYTGQATWGPAHLRWLSAVVCPTPAQPIVFQEYVRAVTDHSERLARLAQELQDCVQTWRLRPVVDALQALRGVQFTVAVTIVAELGDLTRVDKPSQLMSYLGLTPSEYATRDYRHQGAITKTGNAHARRALIEGAWAYRYPAKVSRHLQVRLAKVPKAIQEISWKAQVRLCKRYRQLSARGKHANRVVVAIARERSAFMWAMAHQVPVIS

SEQ ID NO: 227734 - protein, 367 aa, unidentified
MGEISTIGIDIAKHVFQLHGVDGAGEIVLCRRLRRGQVAGFFAALPPCIVGIEACGTAHFWAREIAGCGHDVRLMPPSYVKPYVKRNKHDAADAEAVCEAVRRPSMRFVPVKTPEQQAALVAHSVRDLLVRQRTMLANALRGHLAEFGIVAPRGIQKIDELVAVVADETDGRIPTSARKALQILVAELAALDLRITRLETEIVARAKTDAVARRLATIPGIGAIIASRLSAMVPDPSIFRSARDFAAWIGLVPRQSSTGGKPRLGGISKHGNGSLRRLLVGGAMAAMFRSKALQNDPWLSQLRARKPVMVAAVALANKIARAVWAVMRRNAVWRPAAERSSARPHQPGVVLTAVKTMPPAAVAFGQS

SEQ ID NO: 227735 - protein, 341 aa, unidentified
MQTVTTIGFDIAKSVFQVHGVDAAGEVVIRRQLKRRSVLAFFQKLPPCLVGIEACASSHHWSRELQALGHTVRLMPPAYVKPYVKRQKNDMADAEAICEAVTRANMRFVPTKTPEQQSCLMLHRTRHLFIRQQTAVINSIRAHLAEFGIVAPVGRKGVMELLHVVADPGDKRVPEVARACLAALGTQLLRLKEQILEFDRMIMAWHRSNQTSKRLHCIPGVGPMLATALVASVADPRTFRSGRNFSAWVGLVPQQHSSGGKDRLGGISKQGDRYIRSLFVALAVIRYAKIHGTKHRPWLTALLGRRPTKVAAIALANKIARMAWAMMAKGERYKQPVALAA

SEQ ID NO: 227736 - protein, 314 aa, unidentified
MNKQEYSAYIGIDVARDRLDVHILPDGEAFDVERDESGLVELIEHVREHETPLVCLEATGGYEMDVVAALAAEGIAVVVMNPRQIRDFAKSTGQLAKTDRLDAEIIAAFAKVVRPAVRSLPSEDERRLSALSRRRLQVVGMLASEKRRIKRQRDPSIQARIAAHIEVLSEERNDLDMEVRGIVEADTTWSKKAQLLQSVPGVGEATAFTLIAGLPELGSLERNPIAALVGVAPINRDSGTMRGRRMIYGGRKHIRNALYMATISAVRCNPVIREFRDRLRAKGKAPKLVLTACMHKLLTMLNAIIRDQEKWKTA

SEQ ID NO: 227737 - protein, 343 aa, unidentified
MEVKRVGIDLAKNVFQLHGVDRHEQAVFKRRLKRDRWLRVLLDNTDPDCVIGMEACSGAHHWARVLQSRGYTVRLIPPQFVLPYVKSNKNDANDAEAICEAMSRPSMRFVSVKRVEQQDVQATHRVRSELMKQRTAKAQQIRGLVSEYGLVAPLRLTALRAAIPRWLEDAENGLTSRFRALLHGLWRDLAGLDDRVAELTGEIEAIAKADPVAQRLQQLRGVGPLVATALLASVGDGHQYKKGRQMAAALGLTPRQHSSGGKDRLLGISKRGDAYLRSILIHGARAVVSTAKHKEDRLSQWVTQIAQRRHPNVAAVALANKTVRMAWSMMTSGSDYDPEFVIS

SEQ ID NO: 227738 - protein, 466 aa, unidentified
MQPNRRRSLGKPRVSPTVFDRLNPHVAGIDCGSGEHFVAVPPDRDPHPVQSFPTFTSDLLRLADWLAACRVTSVAMEATGVYWIPIYEILDARGFEVLLVNARHFKNVPGRKSDVSDCEWIRELHSVGLLRGSFRPTDAIVALRAYRRHRQTLVESAGTDTQRMQKALVQMHLQLPLVVSDITGVTGLRILRDIVAGQRDPQHLAAHRDARVRASTADIVAALTGHYRPEHLFVLQQNLELFDACQAQLAACDRAIDAHVQTLTAQRPPPVTPLPDPRVTKKPHDNQPRFEIRTPLFQLTGGVDLTQIDGVAPYTALKLISEIGLDMTRWPTEKHFTSWLSLAPKNKISGGRLLSSRTPPSANRAAVVLRMAAMSLGRTQTALGAFYRRLAARIGKPQAITATARKLAALVYRALKGELVYRDPGADAYDIQQRARVLRRLRQRAATLGFSLVNRDTGEILAPAIP

SEQ ID NO: 227739 - protein, 391 aa, unidentified
MDLFIGLDVSLASTAICVLNVHGKVMKETTVASEPEALAGFLRDLCGSVITVGLEAGPLSQWLHKHLTEAGFEIVLMETRQVKGALKAMPIKTDRRDALGIARLLQVGWFRPVHCKSVSAQEMRAVLTSRKSIQQACLNLEQSVRGVLRNFGLKMGKVAKGRFEARVRELTVGNPMLEAAADPILRARAALRSELAGLKKLTRDHAGSDPVCRLMMTMPGVGAVVALTVKSAIDDPERFRSSKDVGPWVGLTPRREQSGERDIIGRVDRLQSRGDGLAVLVAGKAHGMAQQMDNTGLDMGSGEGRLDGLGEALEAVHDSDQDVLNAAVAQIAQHLGPEFGPLIGLEPQAQNVPCAVCHPAGDLHGKSAERAAGSPGPRRPPCSRPRRRCGC

SEQ ID NO: 227740 - protein, 355 aa, unidentified
MSHLNSGIAVIGIDIGKNSFHLVGQDRQGAIVLRQKWSRGQVEARLANLSPCLIGMEACVGAHHLSRKLQLLGHNARLMPAKYVRPYSKGQKNDFRDAEAIAEAVQRPTMKFVATKTADQLDLQALHRVRERLVSQRTGIINQIRAFLLERGIAVRQGLRFLRAELPGILATRTDVLSPRMLRILEDLSADWRRLDARIEGLTGEIETLARQDQHCERLMSVPGIGPIISSAMVAAIGTGDVFSKGRDFGAWLGLVPKQISTGDRTILGSISRRGNRYLRALFVQAAWVVLVKLGPKQWERYGLKSWIEAAKKRLHHNVLAIALANKLARIAWAVLNKGRAFACDKTDAMASRPV

SEQ ID NO: 227741 - protein, 390 aa, unidentified
MMEVMVKRCAGIDVHKKTITVCTLVGSLNQSKPEKQTKEFDTTTRELQACAQWLESLDITTVLMESTGQYWRPVWNILEPYGFKMILANAQHIKQVPGRKTDMRDAQWIAELGRCGLVSGSYVPERDIQDLRQLTRHRSSVKEDLTRRKNQVHDILQRSNIKLSSYLSDIFGATGQRLLSLFINGEVINEQIIEDTISKRVNASPQQLFEAMNGSLTTINRQLLQLELATIRRLTDEIKECEQLIEEHLQPYEDLYLRLLEIPGISKTTAQVVIAEVGPTVDAFGTVERLASWAGLCPGSYESAGIQYGSKTTRGNRYLKAALCRAGLTAGRSNHQEFRAIYFKFSERKQKGKGVVALAHKLLRIVYMLIKTGETYTPWQQKKTPATAIA

SEQ ID NO: 227742 - protein, 356 aa, unidentified
MSNKKDTPISFKGQHFYIGLDVHKKSWAVNIRNNGIRLKAFSMDPYPEQLKRFLGENYPEGTYHVVYEVGFCGFWICRDLREMGMDCIVVNPADVPTGHKEKDRKTDPIDANKLARELEKGGLNCIYIPDEADQHLRSLSRLYRSAVKDTTSVKNRIKGHLYFNGVELPRHTSQWSGKFIAYLKSLPLDDGPAKECLMISIDELEQRRQTTIHILKKLREYVRDHLEPSVFQNLLTVPGVGLKTAFVLYTEIIDMKRFRTLDHLKSFVGLVPSTDSSGENDWVRGLTYRKNKHLKHVLIEAAWVAIRQDPVLLHKYNKLIVRMKAQNAIIKIAVKLLDRIRYVWNNNCPYIKGVIQ

SEQ ID NO: 227743 - protein, 452 aa, unidentified
MFLPEEPDFAAFVAIDWADREHAWAMQVAGKTKREKGKFLQTPEGVEAWAMQWAERFRGRPVAVALEQSRGALAYALSKFPHLVVFPVHPSTSFAYRKAMYPSGCKDDPKDAGLLLDLLVLHRERLRPLKLDTEQTRQLQILVEKRRQLVDHRTAQTNRATDQLKIYFPQVLSWFDDLAAPICREFLKRWPTLPELQREDPAHVRQFFYQHRSRSTQRIETRLRDIQEAKPLIEDAAIIEPAVILVCTFLEVADRLNEGIRKLDKSIETITAAHSDYFIFQSFPGAGPAMAPRLLAAFGTLRDRFDTANEVQCFAGIAPIVEASGQQIWIHFRWASTNFLKQTFHEYAGLSIQQCTWAREFYDRQRAKGKGHHAAVRALAYKWIRILFRCWKAGQAYDETLYVAARAARACPLPVLATAPATTTRRPRGCGKDKDSGLKSVRDIFKSLMEGT

SEQ ID NO: 227744 - protein, 342 aa, unidentified
MLIIGCDYHPSFEQIAFCDSGTGECGERRLEHGGEAEAFYRSLQGQAVRVGMEATGGTRWFERLLDECGIELWVGHPGKIRAAAPRKQKTDRRDAELLLDLLLAERFPRLAVPSPEQRNLRQLVGHRHRLVQMQTRVKNQLQALAINEGLRLRRGLWSRKGQAQLQALALPYWSEQKRSDLLALLADLQRRGALLDQAVEAAAAASPVVGCLRQQRGVGPVVGLAYELTILDPTRFQTSRQVASYLGLIPAEHSSGGKQRLGHISKQGNALLRGLLVEAAHVAVRWDPEWRRQYVRLAMKKNRSIAAVAMARKLAVRLWWLWKSGLASGQIGGSGSHAEQPV

SEQ ID NO: 227745 - protein, 429 aa, unidentified
MTRISAGVDVSKNRSTVCIMDQDGKFIMRPFLVWHSTEELDFLADTLKRLNGEVRVIMESTSVYQYPIALQLKERGIFISIVNAYKVKEFANIDFRGGKTDKKDSRTIASYGISYWYKLVEWQIPKDTYFNLDLLNRTYMNAKKHRQIILQELQHYIDCAMPGMDKELHSLNLNTKKDFMLDFVEKFWHRDEIVNMTEAEFTEVFTAWAKKKGYRPVEGKAAKIYAIAKSCIPYYPANPTVKTILQCIVDKLSGVNRTLVTIVTQMIEEAKKLPEYQIVREMPGVGDPLAARFFGSAGDIRRFKNSKALVAYAGIDSPPDESGDFSSTHRHITKKGSKVFRDTGYEIMMALRAQKRTWEKVRKNPEVYDYMLKKEAEGKPRKVAKIAALNKFLRIIYARIKELYDNMALAERAKTKTRSKTRAKTKVTA

SEQ ID NO: 227746 - protein, 350 aa, unidentified
MMIIGCDLHTRYQQIAMVDTETGEFVERRLEHESGEAREFYAGLKGAVRVGIEATGHTHWFEAMLSELGHELWMGDAAKIRAAVVRKQKTDARDAAHLLDLLCSERFPKIWRPGLAERDLRQLLWHRQKLVWMRGAVKNQMHALAMGEGVCRKKKLFSAKGRKELEGLTLGPWASYRRRELLRLFDELQGSVTKLDEAVEQAAQSQPQAVRLMTHPGVGPITSLAFVLIIGPIERFERSRQLVSYLGLNPREHSSGGRQRLGSISKQGNPMMRSLLVEAGHTAARLDPQLQRMYQRLKFRRGAAVAKVAIARKLAVRMYWMLRSTADYAQLVRMRGSSWPTLVEDNPSLG

SEQ ID NO: 227747 - protein, 349 aa, unidentified
MIRNAPIDAAVFGVDLGKNVFHVVGLDDRGAVVQRVKLRRETLLAFFERAVRTVIGMEACPGSQWLGRKLQAMGHRVRIVPAQFVKPYVKSQKNDTIDAEAIAEAVTRPTMRFTQVRTTEQVDLQALHRIRDQLVSSRTRLINQMRAFCLEYGVAIRQGAGVFRLDLPRVLANETNDLTPAMRRMLGELFEDLARIDQRIAQATREIEGLAARDDRARRLMTIPGIGPLAATALLAAIGDGRQFRRARDLAAWLGLVPREYSTGGKTTLLGISKRGNRYVRRLLIHGARSCVAHLDRTRDRLGSWLDALQSRMHVNKVTVALAAKIARMTWAIITKPGALYERKDPAVA

SEQ ID NO: 227748 - protein, 372 aa, unidentified
MTSIIYVGMDVHTTNYTLCCYSMEDDRFFAEVQVEPDAKNILKYLARIEKQQSRDCRIVCGYEAGCLGYSLYHQLHAHGIDCVILAPTTMMTKPGKRIKTDRRDARLISKCLAFHTYSPVYIPTEVDDAVKEYIRMRDDANSALARVKQQIIAFCIRHGKIHDGKSYWTNKHLEWLSSLDLGNKILSEVLQEYLIRYYQLREQVDMYDMRINELAQAEPYRQKVEKLGCFRGIAAHTALSFCVEVGDFRRFATAQQFASYLGLVPGECSSGDKQQYTGITKAGNSHLRKLLVETAQVFGRSATKSGKSAALKERQAKCDSLTVAYADKANARLKKKYFKIAMRSKVNIAKTAVAREMACFIWGMMTDNISCA

SEQ ID NO: 227749 - protein, 345 aa, unidentified
MTIVNTRAITGGVDTHADMHVAAALDPIGGLLGVQEFPATAGGYAGLLGWLGGFGTVALVGIEGTGSYGAGLARHVTAAGIRVVEVDRSDRQDRRRQGKSDPLDAVSAARAAQSGRARGAPKGRDGAVEAIRALMVAKRSARSERVQTINQARALVVTGPDDLRTRFARHTAAGLVSGLASLRPRPGDVVGYATRIALRELGRRAEFLDAQLERLDELIAPLVAARAPGLLALHGVGPDTAALLLVAAGDHPERLRSEAAWAHLCAVVPIPASSGKVTRHRLNPGGDRQANHALWRIVLTRMSAHPPTLIYVERRTKEGLSKKEIIRCLKRYVAREVYRHLRAAG

SEQ ID NO: 227750 - protein, 342 aa, unidentified
MQITTIGLDLAKHIFQVHAVDETGKVAIRKRLRRSEVLSFFAGLSPCLIGMEACATSHHWARELIKLGCTVRLMPPAYVKAYVKRGKTDAADAEAICEAVTRPSMRFVPVKSAEQQSVLMLHRMRALLIRQRTMLVNALRGHLAELGIVVAQGINRVRELIKLMTDDSADAVLPPLARRALAPLVDQLVDLQPRIRALEAELLAWHRQSQESRRLETIPGVGFITATALAATVTDPSQFRCGREFAAWLGLTPRPNSSGGKERLGRISKMGDGYLRTLLVVGATAVIRYARTKTAADTAWINSLLARKPARLASVALANKTARIAWAVLAKGEVYRAPVPAA

SEQ ID NO: 227751 - protein, 314 aa, unidentified
MSHVFVGVDVSKDRLDVATHPEPGSWSVSNDEAGIEDLVKRLLPLQPACVVLEATGGYEMPAVAALAGAALPVVAVNPRQTRHFAKAAGLLAKTDRIDAAALARFAEAMKPEIRPVPDAAAQELGALIARRRQVIQMHTAEKNRRLIAPKRLHKDLDQHIAWLEEALRRLDDELQKAIRSSPAWREKDDLLQSAKGIGPKTSALLIAELPELGQLDRWEIAKLAGVAPMNCDSGRYRGERHIHGGRAMVRSALYMATLTAIRRNPVIAAFYRRLREDGKKFKVAMTACMRKLLVRLNAMLRDRVPWREKSPQVT

SEQ ID NO: 227752 - protein, 400 aa, unidentified
MSGLKGSFDCFVGIDVSKDKFDACGITGEEAKLFQISAGMDRKGFEKLKGPLASVSVSSVLIGMESTASYHVNLFSYLVSEGYKVILINPLLISNYVKMQLRKTKTDKKDAVVIAQFLLANGDTLIQRITPSLISDLRDLSRQRESLVDEMTSLKIEIKQLLNITFPELEHMVGIFTKSILNLLQQYPSAFALRDADLDQLSQMLIADSYGHKREAFAAALIKAAHSSIGINSTAKEMILKQKIALLFHLEDALQEITGMLIEMARKLMEEDINIMTSIKGIGDKTATNFLVEMGGDINQFERSGKIIAMAGLDPAVYQSGKHEGKGRITKRGNRHLRRIIWLMTTKVIQYTDIFNAYYQKRRKEGLPYKMAVLATAHKLIRVIYAMLTQRTTFCPQMNS

SEQ ID NO: 227753 - protein, 425 aa, unidentified
MNYKQNEKINQVKESTLVVGIDIGSTTQYARAFDWRGIELGKVFTFSNSREGFESFKAWMQHLQDKYRKSDVIIGIEPTGHYWFDLGAYLEDEGIRLVMVNPYAVKQTKELDDNSQSKNDRKDPKVIAKLVTEGRYSAPYTPDGVYADLRIMVANRKRLIREMTQIKNRFARWFAIYFPEYTDVFGDYEAQSSMLLLKKVCTPEAIVELGAEKINQIWRDAKLRAVGMKRATTLCETAKRSIGLKKGSSAARYEMKLLLEDYEYKKAQLDAVMEEIEKLCRKIPESEQMLAIKGIGVITVAGFLAEVGDVRRFESPRQIQKLAGLSLRENSSGKHKGQTTISKRGRSKLRAVLFNAAIPLIAKNPEFKSLHEYYTTRANNPLKKKQSVIAISCKLIRVFYAILANGVTYDAQKLLSDIHRQPQVA

SEQ ID NO: 227754 - protein, 371 aa, unidentified
MKSIIYIGMDVHKNTYSLCGINSSTGEVIAQTKCAAEVKNILKFIKSAKERMSEENEVDILTGYEAGCLGFSLYHELAYHDIPCVILAPSTMHGSVKNKKVKNDKMDAFNIATNLMYDSYKAVHVPTEHDNEIKEYIGLREDVIQSRKRIKQQISALVLRRGLRYEGKSNWTVAHIKWLETIELPVIVRETLNEYLKVYDYLNERIEKYDERIEEFSKEEEYKEPVSKISCFKGIDTLSAMKIHVTVSDFQRFPTAKAFMANLGMLPGENSSAEKYSNTPITKMGNAMVRKTLVECTQALVRGTVGKKSKALKKRQKGQEDEIVAYADKAVERLQKRFRRMVLRGKPYNVAIMAVARELAGFIWGMETGRI

SEQ ID NO: 227755 - protein, 357 aa, unidentified
MRVHYTVCCGIDVHKNSVTACLMWGPADREPQSEIRRFGTMSSELQKLAEWLKQARCEVTVMESTGAYWKPIWNILDGHVKLILANAQHVRALPGEKTDNKDGKRLASLMRHGLIRPSFVPSRDIRELRDLTRYRKKLLANGAAERNRIQKVLEDANIKLGSVLTDVFGVSGQRMLHALVENERFDVDQVAGLAHWSLEPKMETLKKALQGRLTPHHRFMIEISLGHMEYIEKQILRLDEQIAKHLVPYRKQYELLQTIPGIGENVAAVILAEIGPDISQFPDDRHLASWAGICPGNNESGGKKFSSATRNGNPHLMANMVEGAWAATRKKNCQFKSTYYALRARRGAKRRYRRRRP

SEQ ID NO: 227756 - protein, 380 aa, unidentified
MMALLPWGKVDVDRNELSPKETTQMSREVKYIGMDVHKEAIVIAVRTTRGHVVMESIVETKASSILQFIHGLQGELHVTWEEGTWAAWLYDLLKPHVHQVLVCNPRRNALLKEGSKNDKVDAGKLADLLRTGMLRPVYHGEHGLRTLRELARTYQTLSQDLNRVMNRLKALYRGWGIACGGTQVYAPRYREEWLGKIEHAGVRRRAELLYQQLDGLQALRRTLRSELLTESRKHKATKLLRQIPCIGPIRAARLIALMQTPHRFRSKRQLWTYSGLGIETHDSAQYRFVRGELQRAKKPQQIRGLNRNHNHEMKDIFKGAANRASCGVGPLRDFYVALLAKGMKPEMARLTLARKIAAIALTLWKKEERFDAEQLKTQAA

SEQ ID NO: 227757 - protein, 397 aa, unidentified
MIAVGIDVSKSKSTVAILNGDGSIRAKPFDVHHVADELQALVDYIKRTSEPPTILMEPTSHYHYPLLKAFTEAELPVCLINPYQMKKYGDTELRKAKTDKRDSLRIAQYALEKSYSLIPYTPQDQKYEDLRFLSRQYSQRISTLTVAKVQLLSLLDETMPGITTILPLKSRDPDNCVLLRFIKRFKSFDVIRKMGKTRFLDSYQVLVKKTKDRFAGSKGLAIYELVLSSVTTRGENPLSAMTQDQCVDLVSTSQKAADEINLQMRIIAETMPEYKVLRSMAGVGDRLGPIILGEIGDIRRFHSGKALNAYAGNDAPPYQSGQFESRNRHISKRGNPALRKACFEVMQALKLTKPQDDPVYLFLLKKEQEGKPYNVAKMAAVNKFLRIYYARAMELYK

SEQ ID NO: 227758 - protein, 536 aa, unidentified
MRRHNLAGELSCPDNQTACRLSSGPIKEIGVLEKEAPYQGRKHGRRARPILTEPEYFLKETTLIRSVGIDLSRTGSHQVRCLDEQARPCDSFSFDSTVEGLEKFEKRVFSNGDTPAIIFEPTGLAWIPMAVYLRARHPECQMVKARLQKVAALRRYLRNHTKSDRVDGLTLAKMPFIDAEQLDEAYLPPSEYHALQRLTRQRERLMKSITIRKNRIGSIVNGYLPDLRKAFSDEWSDRARLFYRQQLNPFTVVRDGKSALETFLVSVKEKGAVTESHRVYQACQKLAEFYENSKPAGMIDEDFFDDLQNEIACELRLMETEEAEVERVSGRIEELYRHLHPSDHLRTIPGIGVRTAQVFLAIIGDPHRFRSQSAFANWTGVVPGARQSANSEGKGLRMTKAGPSMMKRALFQAGDIARRYDPQLADLYYREMVQHGKTHLQAMGAVMSHLGARIMAVLREGRPYELRDNQGKLITKKEAMELIRSAYKVPEETRQARRHRKSNVGRLASRGTREAAKAPQSRHTSTSPVTVYLAED

SEQ ID NO: 227759 - protein, 339 aa, unidentified
MTQHAAFDVSLKVAHGCIVDASGQVLKEGKVAAEPETMAAWLNRHAPELARVGIETGPLATWHLHALPKLGVPAVCLDARHAHKVLSCWPIKTDKNDARGLAELVRLGAFRQVAVRSEASVRRRALLGAREQLVKMRRDVENQIRGLLRSFGRLLGSARGRAFAGRAKELVADEPLLAAIIEPLLRVRERLVDEVAALEGKLVAEARTDPVCRRLATVPGVGPITALAFQSGVDDVTRFEDRRQVGAWLGLVPRRHQSGKMDYSGKISKAGDGRVRALLFEAAHVLLSRVKRGCALKDWAEQLARRVGMRKAKVAVARKLAVLLARLWAKEEVFRWQAA

SEQ ID NO: 227760 - protein, 354 aa, unidentified
MQNDRQSSETVILGVDTHLDIHVGAVISQAGKLLGTHIIQTNQAGYLELLDWARSFGSLERAGIEGTGTYGAALTRYLIKNSIYVVEVNRPDRSKRRLEGKSDPLDAENAARTVLSGSSKAIPKMQSGACEALRIISVARRSAVKACTQAINQLRALLVSAPQDVRDKLWKSKPHECVTACINSEVSEHSPLRIALCSTLRSLAKRWMALTEELNELDESLDKLTRKYASNLRSQFGVVPQTAATLLAVAGDNPERLKNEAALASLCGVNPLPASSGKTVRHRLNRGGSREANNALWTIALVRMRSDPRTRIYVDRRTGEGLSTKEILRCLKRYIVRELYPLILSDLAYANRRS

SEQ ID NO: 227761 - protein, 391 aa, unidentified
MQQPEIGRSTATFVPEETLVAVIEMSLSTWLVAGLVPGVDRRPLKKLSPDENDLLLLLDGWRCEAIAAGRTITRVVVAYESGRDGFWLARWLRTRGIEAQVIHASSVAVSRDRRRAKTDRLDTTLLMRVLLGWLRGEAGHCSMVAVPGIDEEDAKRPTRERENLVAERTRIVNRMKATFARLGIRNVNPALRKTAERLDKLRTPEGGMIPANTLAELRRDTARLRMVEEQIAEIERERMDRIAQAAPQRSRADGMLRMLSRVVGVGVETADLLVQEILLRDLRDRRAVARYAGLTGSPDESGARRRERGLSRAGNARVRKAMVQLAWRFLVFQKESALVKWYRERTADGRGRTRMALIVALARKLLIALWRMVKTGEVPQGALVRPDPAAA

SEQ ID NO: 227762 - protein, 343 aa, unidentified
MELSIKWRFIVGIDISKDHVDCYLLDRKTSRGWDLKITNSYDGFDKLGHWLVEHNAAKSQSILVSEHTGRYGEHLLRWTTDNDWPHAVVKTTALDKVTPEHHRKDDPYDAAELADYGVRFSDRLRPTEAPAPAVGQIKRLQAERRKMVDRRAALKSKLTEADTHDADMSQLTAMWVQQIELLSEHIEQLEQAMDQLIGQDESLKARHQTMRTAPGYGPVIGRFWLSLFAGQKKLDPRKISSRFGFAPHAYRSGSSVKSPDRSTGFGNSEMRKLLHLAARSVANHRPHYREYYEQKLAEGKHELLAINNIINKLIRLYCTMWNNKAEYEPNYIQKNKHKWKKTA

SEQ ID NO: 227763 - protein, 412 aa, unidentified
MDVVVERPAALDVHKAQVTACTRVPGEHGERVQHLAEFKTTVRGLLALRDWLASHGVTQVAMEATGVYWQPVWHVLEDDFELLLVNARHVKQVPGRKTDVSDAEWLCRLAEAGLLRSSFVPPKPIRELRQLTRYRKAQISERQREANRLHKALEDSGIKLDCVATDILGKSGRAMLNALCSGTTDPAVLAEMAKGRMRTKLPELREALEGRFNELHALLIGSILAHLDFLDGQIEALSQAIEVKLAPFASAVELLRTVPGIEQRTAENVIAEIGVDMGQFPSDAHLASWAGQCPGNHESAGKRKSGKTRKGSKWLNEALKEAGMGAIRTNGSYLQALYRRKKSQLAHARALGAVKHSILCSIWHMLSTGELYNDLGADYHARRNPERQTKRLVSQLEALGHHVTLQAVQVAA

SEQ ID NO: 227764 - protein, 317 aa, unidentified
MEVVPIFVGIDVSKARLDVAIVPSGERESVVNDESGITSLIKRLVGLNPALIVLEATGGIERAATRGLASAELPVVVVNPRQVRDFAKATGQLAKTDRIDAWVLARFAEAVRPAIRPLPDEMTLELRALIARRRQITEMIVAERNRLSGASKVVRKRIEAHLRWLQADLKRADKDLDQSIGQSPLWQESQDLLKSVPGIGPVISRTLLAELPELGLLNPKQIAALVGIAPLNRDSGTLKGRWTIWGGRATVRAVLYMAALVASRRNVVIRAFYKRLRVAGKAPKVALVACMRKLLTILNSMIKHKTRWSETFSVQSS

SEQ ID NO: 227765 - protein, 356 aa, unidentified
MSHDVKYIGMDVHKEAIVIAVLNGSGKLVMETILETKASSILQFIHGLRGELHVTWEEGTWAAWLYDLLQPQVQQVLVCNPRRNALLKEGSKSDKVDARKLAELLRTGMLRPVYHGENGLRTLRELGRSYQTISKDLTRVMNRVKAVYRGWGIPCAGTQVYVPRYREEWLSKIPQSGVRRRAELLYQQLDGLQALRREVRGEFLAESRKHKAAKLLRQIPCIGPIRAAGLIALMQTPHRFRSKRQLWTYSGLGIETHDSSQYRYVNGQLQRSKKPQQLRGLNRNHNHEMKEIFKSTATSASCGRGPFHDFYAALLDKGMEPEMARLTLARKIATITLTLWKKEERFDAEQLKTQAA

SEQ ID NO: 227766 - protein, 423 aa, unidentified
MKYALVRVLPEVPPGGVCAGIDWASADHAVCVVDLAGQVADRFAAAHDRAGIAGLIARLRGRGAAEVAIERGDGVLVDALLAAGLTVVVIGSRQVKNLRSRYGSSGAKDDRFDAFVLADTLRTDRARLRPLVPDSPATLALRAAVRARRDLVAHRVSACNQLRAHLQVAFPGAVGLFSELDSPLSLAFLAAFPGQQAAARLDEQALAAWLATVPRRGNTAPAGVLAARLAAAPRGAAGADAAQAAVTTQLAAATAGLAGRVRALEAEIAAQLAAHPDQHIFTSLPRAGTLRAARLLAETGDCRARYPDPWSLAGLAGVAPVTRRSGTYISHEFRWNVNRQLRDAICDFADGSRHASPWAATVYAAARDRGKDHPHAVRITARAWVLIIWRCWQDGTSYDPAKHRALQDILTRQAAAGTPQPHR

SEQ ID NO: 227767 - protein, 343 aa, unidentified
MAQNMQTYVGLDTHKKFVFGCVKNKDGNILFEQKFKNEPHSIDTFLLNVDKDSKIALESSSCWQYVFDYLVDQGYNVFLSNPAKTRLIGESKKKTDVEDARKLADLLRMNMLPLSYAAPLHIRMQRQITRHRASLVSMRTQTKNKIHAILRRHGITTELNDCFTQKGLEYLESIDLPMCDRFELDQYIGILRHYSKKIQDTQERIEEIAADDPYAKIVMTHVGMSHYSSLMVVAEIADIRRFCSCKKLVSFAGLNPSVSQSGEKCYLGNISKQGSKHLRWILIQCANIAAQKDKKLKSYYMKKKLGKGHNKAIVAVARKMLINIYVMLKHNITYDHLRANKAS

SEQ ID NO: 227768 - protein, 374 aa, unidentified
MGTQGITFVGMDAHKKAINVAMLLPGQLEPVEWQVANEPAAIRRLAKKLEREAPGEVRCCYEAGPCGYVLMRQLEAAGGVVCEVVAPSLIPVKPGERIKTDRRDAHKLARLLRSDDLTMVRPPTAADEAVRDLCRCREDARRDLLRTRHRLASFLLRRACLYTLTRRTWGQPYRAWLQGLKFEHAPDQMTLADYVTGIEQIEQRVGSLDQQLAGFAEQVPYREPVAWLRCFRGIDTVTAIALVSELHDFRRFETARALMAYLGLVPSEYSSGEQRRQGAITKAGNTHVRRLLIEAAWHYRHRPHVGVALRQRRQGQPSAIIAIADRAQHRLYHRFHKLMNRGKPSPKVVVAIARELVGFVWAALYPAASGASAR

SEQ ID NO: 227769 - protein, 321 aa, unidentified
MSNIIGIDVSKVDFYASFNEQDQSKLFQNDKRGIKIFEKYLNKNNFKKDQTIIGLESTGIYHLPLSHKLTQAGFTVKVINPLITKKQNQTTLRRVKNDCKDASLVRYCTLNGAGYEFIDTPEMLTLKSLVRLRDNLSNMKNVLNLQQKSLEYKEKNLDISVSKANHRLNKSVSVEIEKLEKELKEYRKAEQKLLQTIPGVGPITAVSFISEVGNVSRFPFSQKLIAYIGLDSRVHKSGTSINGKGYISKRGNKILRTRLYNACSVTVLRPNIFQDFFQKKRSEGKPYKVALVATMHKMANVIYAVWKNNTPFQDRRGLTGI

SEQ ID NO: 227770 - protein, 379 aa, unidentified
MKKFITHIGMDTDSRGFDIAIAEGFGSNNNEVRSWGRMPATLEAVDKLIKQLRKQGHTQLRFVYEAGPCGYGLYRHLKARGEECAVVAPSKIPRQPGERVKTNRRDACKLARLDRAGELEAVYVPTEEDEAMRDLSRGRTAAVEAATRVKQQLKSLLLRHGIKYTGKGESWSSAYREWLRRLQLPHAAQAYVLAEGLVALDEAEARVKRLTERISELLPEWRMQPVVAALQALRGVALVTAVEMVAEVGDLTRFGNPREVMGYLGLVPSEDSTGEKRRQGSITKTGNGNARRSLVESAWAYARPPRVTRALKQRQQGLAREVIEISWRAQVRLCGRYRRLSARGKNKKKIIVAIARELCAFMWAIAVAISDQKLPAQAA

SEQ ID NO: 227771 - protein, 368 aa, unidentified
MHLQCPVLQLGNINWRMVMNINDPRNQLILGVDTHLDLHVAVLVNMIGQVVSTEVFETNKKGYNRLFKWCNSFGQLLKAGIEGTGTYGAGLSRFLVSHNISVYEVNRPNRARRRLRGKSDPTDAENAARAVLADEAKAVPKTQNGSVEAMRFLLIARRSAIKSRTQAINQIRAILVTAPDEVRKQYLIASTSACIEACKNIETLGDSTLLDSLAISLKLLAKRWLVLTEELKILDRNLKRLTLTTAPLLTQELGIGPYVAATLLVTAGDNPERLKKESSFAALCGVSPVEASSGKVVRHRLNRSRSGVANNAIWTITLIRMRSDPRSQQYVDRRTKEDQSNKEIQRCLKRYIARELYPKILNDLTSAA

SEQ ID NO: 227772 - protein, 327 aa, unidentified
MQVLKTHVAGVDVHKAILAITILIGEADQEPKFEQFSCETFTEDLMAMGLVLKERGVTEVAMESTGVYWKPVYNVWSKMGIRCTVGNARTMRNVPGRKTDMNDSHWIAQLHRFGLIKASFIPEDKFQQLRLLSRHRTNLTDDLARVKNRVQRILEDGNIKIGSVVSDVFGVAGLNVLRLLADGVTRADTLAAAVTTNVKRKGEIKKSLTNCFTTNHCFLIKELMQQYDDLNARILVVDRQLAHDVTPYVHLIEELKKIPGIDMTLAVGIIAEATNDVSSFADERKFAAWAGVAAGNNESAGKKKEQNVDRARQTLENSLSRLLMEPN

SEQ ID NO: 227773 - protein, 355 aa, unidentified
MSSEKYIGLDVHQATIVVAVLDSTGKLVMESILETEAATILQFFAGLRGTLSVTFEEGTWSVWLYDLLNPHVDRLVVCNPRKNALLKDGNKSDRIDAHKLAELLRGNQLKPVYHGETGVRMLRELSRSYLTIVKDLSRVMNRLKAVYRSWAIPCAGRDVYYRRHRDEWLGKIKEAGVRRRAERLYQQLDMLQHLRQQARRELLAESRKHAITAKLRQIPYLGPIRSALVVALMQTPHRFRTKRQLWAYSGLALETRISAEYRMVEGQVRRSKKLLSIRGLNKDHNHDLKGLFKGAATMASVRPGPFLEFYQAALTKGIKPTMARLTLARKIAAITRTLWKKGENFDAAKLKSQAA

SEQ ID NO: 227774 - protein, 355 aa, unidentified
MSNCTTIGIDLGDKKHAVVGLDDKANIVLKRWIPNTKEDLEALFKRNRGAVFGMETGTHCRWVSALCGQCGCEVYVGNAHHLRSIFGNSHKNDMRDAEEIARLLHGDKRHFHPVQLRDAEHQNLVQLVKMREIVVSQRTKSANAIRGMAKANGVRLPDSDADSLHKKLAAVVDTLPESLQTLLGPQVGLLEKLCAAIEEYDRAIRDYRNAHFRKECNLLETIPGVGPVNAAAFVAFTGDVTRFRHARDVGPYYGLTAGRDQSSSKDEPKKITKEGNGFVRHLLVNAANLIMQGRGRNTELRQFGLRVWGNRGKVAKRKAKVALARKLAVTMAAMLRSGAPYNGIMEENENGQSNA

SEQ ID NO: 227775 - protein, 507 aa, unidentified
MARQETSKSIPRAGQIRPANQMPLVHPHAAGIDLGNQSHFVCVPADSVPPGQSPVREFGVFNPDLDQMVDRLKQCRVETVAMESTGVMWIPVFQKLEAAGLEVLLVNTKGLKHVPGRKSDMLDCQWIQLTHSYGLLAGSFRPADIICRVRTLMRQRENLVHGASRETQHMQKAMQEMGVHLHVVVADVTGDTGLRIIDAIVQGERDPEELVKLRDPRIRKSTVAQMKAALQGDWRDELLFVLGQSRRVYAFFQEQLASLDVKIIALLAEVPEAPPPPTEGSQAPSPGSSGAPQQSAGGESPVSGSTEGAAVSAQGKSQSRGRKNPKFKPNGAGNPLPEDVSPQLAKIYGTDLTLIPGLGILGVLIILSEIGADLKGRWRSGDVFAAWMGLCPGSKISGGKVLSSRTPHVVNRAAALLRLAAVAIGGTETCLGLFYRRIKARHGAPKATTATARKLAVLIYHLVTTGQEYQARDLKQYDERLRKNRIIRLSRQAKELGFDLVPVEKAA

SEQ ID NO: 227776 - protein, 377 aa, unidentified
MSNVRFIGLDVHAETIAVAAAEPTGEVRSLGIIPNRIESIRKLVKKLGPVKQLRVCYEAGPTGYVVYWQLTALGVTCEVVAPTLVPVKAGDRVKTDRRDALKLARSYRAGDLTPVWVPDAAHEALRDLVRAREAAKKDQLRARHRLGKFLLRHGRRPPTAMKAWTHAHLAWVKSAVRFDQAAQEATLLDYIHEVDHVAARIGRLEAAIEAAVQAAPARLRAVIDALQALRGIALVTAVTIAAEVGELSRFATSRQLMGYSGAVASEHSSGERTRRGGITKTGNAHLRRVIVEAAWAYRHRPTVGGALRKRQATASVEVKEIAWKAQHRLHARYRALIGRGKCKQQVITAIGRELLGFIWAIGVYVESRTANGKPVAA

SEQ ID NO: 227777 - protein, 396 aa, unidentified
MGIDAGKVSHHATLVDADGTIVWSRQVRNDQAAVEQLIAKAAATATTVRWAVDLTSAGAALLLALLIAAGQRVVYVPGTVVNRMSDTFAGEAKTDARDSYVIAETARLRRDLTELITPNELVAELALLAAHRADLMADWVRGVNRLRELLTRVFPALERSFDYTTRSALILVSRYSTPDAIRDADADQLAAYLRSEEAHRPSIPGMVAKAHAAAAAQTVRLPGEAATAALITRQARKLLDLDREIKDLDKQITERFRAHPQARIIESMPGMGPILGAEFIAITAGDLAAFGTAARLATYAGLAPVPDDSGKRKGVRHRPRRYHRRLRHVFYMAAFSSLKTDGPSREFYARKRSERQRHTRAMIALARRLVDVLWALLRDNRTWQPQPPTPLPATAA

SEQ ID NO: 227778 - protein, 313 aa, unidentified
MNEKFAGIDVSKYAFDLNVNGNDKVEHFNNDVKDIKKCSKALVKLAPALVVIEATGGYEMNLAMALQQAGLAVSVINPARIRNFAKAAGVLAKTDDIDAKAISFFASALKPPTTAMITESTRKIKSLVARRGQLIRMRTAEMNRQGHAVDKFVDKSLKATIKLLDKQIESIDKEIKDCINNDPEMNTKANIAESMPGIGEVTASMLVTELPELGSLTRRQIASLAGLAPIARDSGTFKGKRMTGGGRSDVRAKLYMPTLVAIQYNPAIREFYQRLVKAGKTKMTAVTACMRKMLTILNVMVAKKEYWKSELYA

SEQ ID NO: 227779 - protein, 402 aa, unidentified
MTQQIALAKAAVSVLRERRVIGNLAVQAELAEMEWRAVVPRRLSWHSVWQPKERKMEYFAGLDVSLETVNVCIVNAAGDILLEKKIAAEPAAIVHLLKGFGSPFKRIGLEAGPTSSWLYGELRAAGYGAICLECRHVKAGLSAMRNKTDRNDARGIAQLIRLGWFRQVHVKSEEAQRTRTLLVNRQQLLTKALDIENSVRGSLKVFGLRIGVVARRGFEARVLELVADDPILLAVTEPMLRVRQALLEEFERLDRLCQQLARRDPVCRRLMTVPGVGVVVALTYRTGVDAPERFSKSRDVGAHFGLTPKRYSSGQTDYDGRISRCGDEMVRTALYQAANVLLHHGRWSSLRSWAMRIAKRGSVKGAKVALARRLAVVMHRMWTDGTDFRWSDTSRMTAPTAA

SEQ ID NO: 227780 - protein, 352 aa, unidentified
MPMLADAVDAVLGVDTHRDVHHAEIAAPSGAVIAACSVPNTSSGYAQLLDWAHKHAPGPRLAACIEGTRSYGAGLARAATAAGLTVIECEQPTRRTRRGKGKSDPIDAHLAVLTALRLDTTKLPTPRADGDREALRILLCARQELTTLAAARTNRLRALLRDGDDTDRDLARACRLSGKTLAALAGRAQPSGASRAQAVRHAEIRRLALALLDTAQQVKANHRELNAIISDLAPGLTSRPGIGPVSAAQAIVSFSHPGRCRHDAAFAALAGTSPIEASSGQTTRHRLNRGGDRALNQAIHMIAVTRMRVCARTRDYVQRRTAQGKSTREIRRCLKRYITRELYRALTTAMTT

SEQ ID NO: 227781 - protein, 341 aa, unidentified
MNIKRVGIDLAKSVFQVHGVDSQEKVVLRKQLRRAQLLDYFKKLPPCLIGMEACGGAHYWARELQKLGHTVKLMAPQFVKPYVKSNKNDANDAEAICEAVARPTMRFVAIKTIAQQDIQAIHRIRSELVQQRTAKVNQIRGLLTEYGIVVGRRVDVLRNALPQLLEDAENGLTADFRVLLDGLRQDLITLDERVDDLDKKIKTLATSNPAAKRLQQIPGIGPIIATALICAIGDGKQFQRGRDMAAWLGLTPRQHSSGGKERLLGISKRGDAYLRTLLIHGARSALKVAGKKDDPRSRWLQNLCSRRNKNIAAVALANKNARIAWALLSKETDYLPEGEPA

SEQ ID NO: 227782 - protein, 343 aa, unidentified
MGIDIGKNSFHVVGLDQRGAIVLRQKWSRGQVEARLANMPPCLIGMEACVGAHHLSRKLQSQGHDARLMPAKYVRAYSKGQKNDFRDAEAIAEAVQRPTMKFVATKTAAQLDLQALHRVRARLVSQRTGIINQIRAFLLERGVAVRQGLRFLRTELPNILATRGDVLSPRMVHVIADLAGDWHRLDERIESVSAEIEALADQDPACERLMTVPGFGPIISSATVAAIGNGAAFSKGRDFGAWLGLVPRQMSTGDRTILGRISKQGNRYLRILFVQAARVVLMKPKTWERHGLKSWIESAQKRLHPNVLAIALANKLARIAWAVLNRERKFESAKTNAMASRPS

SEQ ID NO: 227783 - protein, 376 aa, unidentified
MSKVLFVGLDVHAETIAVAVAETGGEVRSLGVIPNRLESVRKMVHKLGAVQHLRACYEAGPTGYVLYWQLTQLGVACEVIAPSLVPTKAGDRVKTDRRDAEKLARCYRAGELTAVWVPDASHEALRDLVRAREAAKKDQLKARHRLGKFLLRHGRRPEGLKAWTKQYVEWIKSHVHFEQPALEATLADYLEEVDHVAARIVKLEKAIDEAVRQAPPEIRAVIEALQALRGVAQTTAATIVSELGSLSRFQSPRQLMGYSGLVASEHSSGNRVQRGGITKTGNGHLRRVLVEAAWAYQHRPNVTGFLLRRQKNLDISEEAKKIAWKAQQRLHKRYQVLAARGKNKNQIVTALGRELLGFIWAIAIETEKQYKLAKAA

SEQ ID NO: 227784 - protein, 320 aa, unidentified
MMAQNDLVVVGIDVAKDKVDACIRSLSLRQTFPSSPQGQRKLVGWLRKHPVNKAVMEASGGYERAWAKVLREAGIEVRIVDPKRVRSFALSAGRLAKNDTIDAEMIAWFAETFSDAPGQKHDAAHEELQTLVKARLSLIDLRMRLVSQSEHAAPGLVQKAHAHILKSLASELAKLEAAICAKIKSMPDFAERAEIIESVPGFAETSSANLVAGMPELGQVSDAIAAALIGVAPYDDDSGKRRGERHIKGGRRWVRNAIYMPCVGAATLNNPVLKAYYRRLIAKGKKPKVALIACMRKLIVILNTMIARRQKWDPSRHALS

SEQ ID NO: 227785 - protein, 352 aa, unidentified
MTSTTILAIDLGKYKCVACAYDRAVAAAEFRTITTSRAEVERLIRGAGPAVVVIEACTLAGWVSDLCAELGVPCKVANTAAEAWRYKHAKRKTDRDDALRLAQLEALGQIPEVVVPEKRVREWRALIAHRQALVAQRVAAQNRIRAVLVGQGLPAPRGSRAWTAAGLEGIAQFARPLAACAPEELWRGLLELALTAYRQAEALVATAEAKLDEIGRADARVRLLDTMPGLGPRTAEAVVAHLDDPKRFKSGKQVGAYGGLVPRQFQSGEDDRRGRITKRGPAVLRKLLVQCAWAMLRYNRWARSVFDRLSRGKARKKQAVVALARKILVRCWAMLRDGVPWRADPEPTPAPA

SEQ ID NO: 227786 - protein, 374 aa, unidentified
MKNVCGLDVHKDSIFMCIIKKNGDKVEEKFGVLTPELDRLRDLLVYHSVGDIAMESTSIYWVPIWRVLYSDFNIKIVNPYFIKQLPGRKTDVKDAQWIATVLQKELIKGSFIPDPIIQELRLYDRRIFYLNRNLQHAEQNIDLILQRCNIRLSNYVSDIGGKSMQKVIDSIIEGKTDPDILLLLVHKRTRNKHGDEVIKAALTGVISKTDRMMLKLSREETCMYERQIEECYVEMNSICQTYFSQEIELLQTIPGIKKDSAMRIVAEIGVDMKAFITASAVVGWAGLKPRNDESAGKIKGRKTLHGNKFLRVLLVQCAWAACRTKGSRFFYKYQTLTKRMNHNKALLANARKILVIIWNILSKKQPFTTTYIAA

SEQ ID NO: 227787 - protein, 383 aa, unidentified
MRAVCGLDVHKDTIYLCILCETGEIFEHVYGVLTCELKTMCREMKRRGVTEVTMESTATYWIPIWRVLEPHFRLKLVNPYFIKQLPGRKSDVKDAQWIAECTLKDLVRGSFVPPERIQQLRQYDRRIFDLDAEIVRKLSKLDGIMQRCNIRLSNYVSNTDTKSYKSVVDKLCEGVTDPEELIKEIHGRIINKHGRETILASLTGVVSEAEKDTMRQLRAELTLAEEHKQECHKKMVHICETHYPKEFKRLMTIPGIKERAATSLIAEIGVDMTKFQTAAHLASWSGLKPRNDVSNGKYKSRRITHGNVYLRKTIIECAWGASRTKDCFFSRFSYHQTVVRKKNKMKVLVAVARKLLIAVWHVLHDETDYVDFNPDCKAPATNG

SEQ ID NO: 227788 - protein, 418 aa, unidentified
MNVKARRTKKQVNVENQAINLLSKEELNKKIEVVEKELRSYTWRELETNGKFAKNDKLSFITDDMLIVGCDIGSENHYIRAIDVRGRELSRGAFEFSNTSEGFENAKAWVLALAAKHDKKQIVLGLEPTGHYWFALAAWMISNGISVVRVNPYAVKQSKEKEDNSQLKDDRKDPQLIANLVKDGNYGMPYFPEKVYADMRRLSMFRDQLTEDRIRNINRLHRELKIYFPEYMDAFGKIDGAFTLEVLKVSAIPSDITALGAEGIKNIWHNEKLRGRGYSRANEIVSYAEKSVGLTDGIDAGREAVKWYAEQILKLVACSSGKHKGQTKISHRGRKRLRYWLFQAAKSAVSHADEFKQLHEYYTTRTNNPLKKMQSLVVIACKILRVIYTILKTGTTYDPQKLLEDIKRPTASHAPMAA

SEQ ID NO: 227789 - protein, 504 aa, unidentified
MAPGRRLNIGEAQRGTPLGESRGINPPGRPVFTNTGREGCDGMANEERTGRPEGLKPIDEGFPVLRADVAGIDIGSQQHWVCAPTPTGKGREVAVFAATTPGVEQLAAWLKDRGVTSVALESTGVYWIAPHEILEAHGFDVVLVDTRELGRVPGRNKSDRRDCEWIQRLHSCGLLRGAFRPVEQVCMLRTLVRDKGTLIAERADWIRRMQKTLDQMNVRVHRAVSDVDGATGMAILRAIVAGERDPHQLAALRDPRCRKSEVQIAEQLTGHWRDDHLFSLQQALKMYDALSETIAAYEREILRQLERMTNVDRRDDQAPPPTSPTKAKAIKKRGEDPLRHALYRISGVDLTTIDAVGVETVNVVLSEYGPNLSQFPTEKQFVSHVGLAPHTPTSGGKVVKKKKKPGSASARVGAALRMAATSMRHSQTALGAYYRQVARRGGADVAVFATARKLAQYIYRLLRWGHPYVDEGVAAYEKRYQLARAQRLAAAAKNLGYRLIPVEA

SEQ ID NO: 227790 - protein, 323 aa, unidentified
MLRRAQGVNRKKAMEIFVGIDVAKAWLDIAVHEQEEAFRTGNDDIGIVSLVKRLKKLKPTLIVLEATGGFEMLVVAELTHTGLPVVVVNAKRIRDFARATGRLAKTDKLDAKVLAHFAAAVRPALRSLRSEEEEQLTALLTRRRQVLDMLTVEKNRLVTVRAKMRSEIEAHIQWISRSLKELDHEIKDFVAGTPVWKEKDALLQSVPGVGPVTSATLLGMLPELGKLNRQEIAALVGVAPVNKDSGKKQGKRRVYGGRAEVRSVLYMAALAAKQFNPVIRKFYERLIQHGKEKKVALTACMRKSLVILNAMMHTNQPWRTQAA

SEQ ID NO: 227791 - protein, 423 aa, unidentified
MKENIDQTEDQYAAYIGIDWADQKHVFSLQAAGSSKREDGILEQKPETIGAWVAKLQERFQGQTIAIALEQSRGALIHALLSYDFIVLYPLHPVTVAHFRKAFKFSGAKSDPLDTRQILEILTKHRELLRPLNPDTEETRLLGRLVEDRRKMVNLRTSHIEALGAGLKEYFPQALEVLGDLSTRLACDFIKKWPTFESFQHAKPSTLKKFFYGHNLRSPKAMERVLEVAKKGQALTTDAAIVESGSRLAQTYAQLISELNPIIEAYEERIQSLFNAHPEAYLFNKLPGAGPAMAPRLLAFFGTDRSRFQSAENVQSFCGVAPTTESSGKSRSVYMRQACPKFDRQTFHEFARLSVKTCQWAANYVQYYTDKGKKYQTIIRSLAFKWIRILFRCWKSKTPYNEEQYLASLSKRGSVFATLHLKT

SEQ ID NO: 227792 - protein, 412 aa, unidentified
MTITCGIDWAEQRHDVAVLDHDGRLLARRRIDVGIGGFTELVGLLSELADDQPAQDVLSVPIAIETDKNLLVVALQAAGFTIYPINPLAVARYRERHGQSGKKSDAGDARVLADILRTDAHRHRTLPAVTEHGSTVKALARQHQEAVWAMQQTANRLRSVLLEFYPQALQAFPNLLHKAAQTVLAAAPTPAHGARLTPKRVVALLHRCGRRNDPSLVEHILTALKAPALRQPAEVEAALGVSAQTLLTVLAAQQAAVETLEKALGERFDAHPLAAILRSAPGLGPVLAARVLAEIGDDPTRFDSPAGLRAFAGTAPVTRASGRSRYVKARKIRNKRLGDACHWWAFAMLTKSPGARAHYDRRRAAGDHHNAALRNLANKLLGRLWWCLKNNEPWNDAAAWRTPTTTPTTAAA

SEQ ID NO: 227793 - protein, 360 aa, unidentified
MASSTLAQPQPDDAFDVVIGIDTHRDFHVAVALAPNGGKLDEYRIPTTQQGYQALIGWSELFGNRPVFAMEGTSSFGAGLCRELLAASFSVIEANRPDRSTRRRRGKDDSIDAEVAARAFLAGTAMSIPKSGAEHVEMIRMLKVAKDSAIDCRTKAINQIRALLVTAPPALRERLAGLSRGELISTCAAFRPGELAGPLMAAKRALRSLARRIQALDHELAELLSDLDALTQAACPGLRRSYGIGVDGASILLTAAGDNPERLRSEASFAALCGASPLPASSGNTRRHRLNRGGNRQANAALHRIAVVRLRYHHATRDYAERRRGEGLSNKEILRCLKRFIAREVFHLLRGRPPLRTAAA

SEQ ID NO: 227794 - protein, 348 aa, unidentified
MEHYVGLDVSLKLTSICIVDRTGKVEREGVVASDPEAIATFIKLHAPHVVRIGLETGATSTWLWTELNKMGLPVICIDARHAKAALKMQINKSDRNDAVGIARIMQCGWYKEVCVKDLDSHATKALLVSRALLVKIKRDIENQIRGLLKNLGLVIGRAKMNMFAVRAAQLAEDRSELLAAVDPLLKAREAVEQQILDLDRKVLRLARNNAQVRRFMTAPGIGPVTALCFLATIDDPARFKRSRSVGAYAGLTTRRYASGEIDWTGRISKCGDKMLRSYLYEAANVLLTRVAKWSALKAWGSSLRNEAGCAKPRWPSLASLPSFCTECGSKVPNSNGHQRRLPISLHKG

SEQ ID NO: 227795 - protein, 400 aa, unidentified
MSVAVGIDVAKEVHWAAVKVAETGAVLASHAVDNMPTGIAELLDEIRCAESEHGSVTVGVDVVGGIAALLVVMLVDAGFTVVHVPGLAVNRARQGTAGGEHKSDPKDAAVIADQVRSRNDLRTLTRGREDDVELRLLVGRRRDIVDDQIRRAVRLRDLLVSINPGLERVVDITSKTGMWLLTRYVTAGEIRAAGQRRLVAHLHKAGGRGIRQKVIAALAEAAVNAAHTQRIAVPGEATAARLIRDLANEMLAARAQLADIDSEIERVLDRHPDAALIRSLPGMGAVLTAEFLAITGGIDRFPTPDKLAAAAGLAPVLKQSGKVRYLQHATAYNRDLRRVFYHSAFSAISCDPASKAYYQRKRAERKGHRKAVLTLARRRVNVLHAILRTRHPYTPAHVAA

SEQ ID NO: 227796 - protein, 402 aa, unidentified
MKKDIAKAIDQQTAAALDATKNCSRYGAFVGLDVHKETIAVSVALPGRGEPEYRGEIANEPKALKKWLERLGAEFGGMLLQFCYEAGPCGYGLYRQLIAAGHECQVVAPSLIPKKAGERIKTDRRDALKLARLLRAGELTAVWVPDTEQEAMRDLTRARDDMKSQERKARQQLNAFVLRHGQHYPRGKTRWTAAHYNWLESIRFEQAWLQIVLQEYIDAVKAATQRVKDLTQQLMRALPGWSLAPVVDALVALRGIDKLAATVLLAELGDISRFDSPKQLMAYLGLVPSEHSSGGRRRQGAITLTGNGHARRMLVECAWSYRFPARQTMHLKRKAKDASEQAKSIAWRAQKRLCGRYRQLSQAGKNIKLVCVAIARELVGFIWDIVRQEMPRLTLQCSAVAD

SEQ ID NO: 227797 - protein, 344 aa, unidentified
MEHFAGLDVSVKETSVCIVDDTGKIVREVKVASEPEALLAVLKNPAYHFKRVGLEAGPLSQWLFSALAEAGLPVICVETRHMRAVLKAQINKTDRNDARGMAQMMRVGLYRPVHVKTLRSQKLRMLLTHRKLLQSKAIAIDNDLRGTLRNFGLKVGMVGTVRFEARIRELVENLPDLAALIEPLLIVRRTLREQFCILHRRLLAIVRDDEVCRRLMTTPGVGPVVSLTYRATIDVPARFRKSKSVGAVVGLTCAKYQSGEVDWDGRISRCGDEMMRTMLYEAAQAMLRSKKWSWLKAWAMQIARRRGMKKAIVALARRLAVIMHRIWVDGTEFRWTREQATTAA

SEQ ID NO: 227798 - protein, 343 aa, unidentified
MDKDTMIGVDLAKNIFQLHIATMTGKVLSTKKLSRQRFKEFMETHAPAVVVLEACGSAHYWAETLCKMGHAVKLIAPQYVKPFVKRQKNDAADAEAIVIAAQRPEMRFVEPKTKEQRAKAVLFRSRERLVHQRTEQINALRAMLYEYGYIIPQGIASINRIEELLSEPNCDLPNLVCDECRDLLGLIATNTKLITTKTELIKELAKQTDMARQLQTIPGVGPMTAMAIEAFAPPMNVFKNSRALSAWLGLVPRQYSSGGKERLGRVSKAGQADIRRLLIIGAMSRLTWLGKKSISEGSWLAQMMARKPKILVAIALANKMARMIWAMLKTGTDYRDPMKTATV

SEQ ID NO: 227799 - protein, 486 aa, unidentified
MQLPSPVRLLGIDLGITSDHTAVVVDDAGSICARCRARSTVASLAALEAAALATAALGTQLVVVIEPTGPAWLPVAVFFGRRGHTVLRVTSAKAADLRRFLARHAKSNSIDAETLARLPLVAPTGLTAVEFGSPARASLDRRVRAVARLTAEIGRRKTRIRTLAQQLVPTIGAALSDDGLNHTDLAVLERYGDPRALLAAGPARLTRLIAPTSRGQLGQAKAQALRTAAAEAVALWEGDSAIAIGDLAAEVASEVRLVRAAEAERSRHEHARDAALACVDPAGLAASLPGLGPVGTTQLVATMGRPGRFPNGGAFKAFTGLTPRASETGQTDRKHQPMTKAGPRGLRSQLVQSANTARKLDPQLAAVYHAQMTERGATHRKALCVVAARLAERAWLTMARGEPYVICDLEGRPVTPEQAKRLIAERFTVTAEVRRRRRSSKEAGKAPHTALKAQHKSQREAGHEATFPSASLTTPPRIVNQATRPT

SEQ ID NO: 227800 - protein, 353 aa, unidentified
MNDSHSIAWLGLDAHSKNCVLGQLDDHGTEIKWWGFPTKPEQLVQHVKAIPATEKHLMLEESNLARWLSQLLKPHVQQLVVCDARRNRLISQDHHKHDKRDAFALARLLRLNEFKPVWQPTEAQRVLFKRVAKSYENAVQRQTRLKLQLKSLFQHWGLFPTGATIYSKPGRVAWLKQLPYDTLRAQALLLYELLDQALAGQTQFRRLMCQTGRQFPEIQRLSTTPGVGLVGSHLFVAYVQDPKRFPKFGRLTRYCRLGIRDRTSDDKPLGYQQLDREGIGTLKAISYRAYLQAAKRRTGPVWEFYQLSLRHTGSTTHARLNTQRKILLTLWTLWLTGREFDPDQFSRAQPLDV

SEQ ID NO: 227801 - protein, 459 aa, unidentified
MSRRKLKSDRRPQPKPVYREQVPTLQVLNPHAAGIDVHSDNHVVCVGPEQVETFGAYTADLQAIAEHLRQAGVTTVVLESTGVYWIPLFEHLEEQGFQCQLIEPSQLHGCGARPKTDVRDCQWMQRLHTYGLLKPSFRPPETVRALRAYHRQRQSLLQDAARQTQHMQKALEQMNVKLTEVLSDITGASGLRIIEAILHGERNPRMLAELADPQCAKPRAEFVLALQGLWQPEHLFELQQAYDLYQTHRRLIADCEQKLEAALTAQPNRAGDRPLPDKPRRRSKNRVQFEATNALFQALGVDLTEIEGIDVGTALVILAEIGVDVSRFPTEKQFASWLGLCPHTSRSNGRDKRRAPRKSANRVKQALKMCAQAVGRTNTPLGMFYRRIKSRIGGRGACTATAHKLARLVYQMLKYGRDYVKQGMDAYAEKMREQAERFLRRKAAALGYDLAPRATATVN

SEQ ID NO: 227802 - protein, 408 aa, unidentified
MGRVAEVVAPSSSTPTDGGCPVLQVNDLSRSLVAFDPISTLMVVVEMSKASWLVRSVVPGVERQPLKKLEPDATALLRLIERWRSEAVRAGRPISRVALAYEAGRDGFWLARWLIARGIEAHVIHSASVAVSRERKRAKTDRLDTAMLMRVFLGWLRGERGHCGMVAIPTMEEEDARRPSRERESLVNERSRIVNRMKSALARLGIRGFKPHLRRAPERLACLRTAEGTGLPANIIEELRRDMARLALVREQISSIEKTRVERLARAPDTGPHAMVRLLSRVIGIGIETADMLVREILSRKLRDRRALARYAGLTGSPDESGLKSREKGLAKAGNARVRRGLIQLAWRFLMFQKDSALARWYRTRTEGPSGARKTTMIVALARKLLIALWRLATTGEVPDGVELRPAA

SEQ ID NO: 227803 - protein, 344 aa, unidentified
MYHYAGIDVSLESSSVCVVDGAGKILREAKVASEPEALIAWFRLQGLVLERIGLEAGPLSQWLYAALREAGFAVELLETRHVRDAFKAMPVKSDRNDARGIAQLMRLGWFRPVHCKSIEAQETRAVLTARKLLQSKLRDIENSLRGVLRGFGLKVDKTSECTFAERIRELVAGHPGLELVAKALLEAHAVLRREFNGLDKHTQKFARAHPQARLLMTTPSVGPIVALTYASAIDDPKRFRSSKATGAHFGLTPKKHQSGQTDYTGRISKIGDASVREALYQAAHVMLTKPVKNCSALKSWAMRIARRAGMRKAKVALARKLAVILHRMLADAKPFNPMAKAAAT

SEQ ID NO: 227804 - protein, 325 aa, unidentified
MIQNDEKVEGRIIIGADVAKASIVLKQLRDGRPVCAGVQTIPNKAADITKALIDLGQIDLIVCEVTGGYERQLLEAATKLSIPIHRADGARVKAFITSHGVRAKTDAIDAYGLALYGQDRFNSLQNWTPPDPKREELQSLVKHRQALMDQRTMATNRSKAPNSCHIADFLNAEISFINTQINKIEQQIADLMKSDATIKAQEKRLRAIKGIGPVSAHTLIAMLPELGHATRKQIACLAGLAPHPAQSGNSFKKYPMTGGRDLIRRTLFMAALTASRCHPDLKHFYQNLLSNKKPKKLALAAVARKLVTIANAVLKPVHISDAQLT

SEQ ID NO: 227805 - protein, 358 aa, unidentified
MKQTTKYVGLDVHQATMVAVVGDDTGRVIARSVVPTEATALLEFMRGMRGAVHVALEEGTQAQWLHDLLVGRVARVVVCDRRGEPRRGSKGDWHDAEWLMGRLRTGELRAVYHGSPHLATLRELGRAYRNVVEDATRVMSRLKALFRARGIRTAGRGVYDAAQRAEWLAKLDGAGVRLRAATLYAELEVLQTLRPTAKAALVAEAQRDPAWGVLRTIPFLGPVRVALLLATLQTPWRFRTKRQLWAYAGLAVVTRTTAEYALDAQGRPVRRRRPPMTRGLNRNHNHVVKEVLKGAATVAAVRPGAFREFYRDVLARGMRPELARVTLARKVAALTLRLWKTGERYDASKLTVSTVPAR

SEQ ID NO: 227806 - protein, 428 aa, unidentified
MNSTQNERINQITSTTLIIGVDIAKFKHVARAQDYRGVEIGKPITFENNRGGFELFVSWFQKITAEQGFQDIIVGMEPTGHYWLNLAHYLSEQQIKYGVVNPLHVKKSKELDDNSPTKNDIKDARVIAQLVKDGRYAVPSLPQGIYAELREAMKIREHLKTDLCVVQARVHNWLDRYFPEFLTVFKDWECKSAIQMLSLYLLPHELVPVPDETLLKHLREAAKRGLGLERIKNLKAAASRSVGIQQGSELAKMELKLLLTQYEWHHNKLEELEAKLDELLLQIPHVQQLLAMKGIGRDTIAGFLAEVGDISQYRHPKQITKLAGLNLKTNSSGTHTGQTKITKRGRKRLRALLFRVMMPLVAKNAAFRSLHEYYTKRSINPLKKMQSLIALCNKLIRILFGILKKGHEFSEEKMMQDIPRCAELPQAA

SEQ ID NO: 227807 - protein, 346 aa, unidentified
MKQITRIGMDTSKYIFQLHGVDEAEQPILRKKLSRKQVLEFFAKLPPTVIGMEACGASQYWARELHRLGHEVKLMAPQLVKPYVARNKNDWRDAQALCEAMSRPSMRFVPVKTAEQQAALMLTGIRDGLITRRTQLGNVIRGHAAEFGLIAPQGLDKLEPLLARIAGDESLPALARELFTVLGREYARLQGELKEIESKLMAWHRADAVGRRLAQIPSVGPIIATMLVMKTPDPAAFRSGRHFAAWLGLTPKDHSTAGKIRLGKITRAGDEDLRRLLVVGATAVIQQARRGRGQHSRWLLALIQRKPPKLAAVALANKVARIAWKLMLTGEGYDATRMNAETALAA

SEQ ID NO: 227808 - protein, 365 aa, unidentified
MNNAHNAAIGLDVSDRKTQVCVMAKDGKSPKIVMETTIPTTREGLAKFLSTQDRSTPVAFETGTHCRWMDEVARKLGFKAYVANPCRLRMITESKTKNDVNDARMLARLALLDPELLHPVKLRGPEHQKMINLHEARNLAVKQRTEAIVQLRAMAKSMGFRIAKCQAASFHNLDRRAWPEAFRCIAWPMLKNLEQLAITIKTYEKQIRELAETPTFKAQVERLREIHYVGLYVATGFIAATGGDMDRFEKPRDVGPWLGITPKQDQSGDVDRQCHITKAGSPFMRRLLVESAQMILRDGAVDTDLKVKGLRICARGAKIAKRKAVTAVARALAVLMVAMLKKPDAPYVPLSERCGKELLAMRAST

SEQ ID NO: 227809 - protein, 389 aa, unidentified
MSDSTSESDRIVIGIDPHKASWTAAAVGPGLRPLATIRVPVDQDGYRNLCRFAARWTDVVWAIEGAGGLGAPLATRLSADGIAAVDVPAKLAARVRVLSTGHGRKNDDADAISVAVAAMSAAGLRTVTVDEAVTALRALVEHRDDVVKTRTQTVNRLHALLTQLLPAGAPRGLSADTAAQLLRPVRPRGIAARTLRRLAAELITEIRHLDRRISVANTEITAAVQASRSTLTELRGIGDLNAGKILARVGDVHRFRSAAAFASYTGTAPIEVSSGDVVRHRLSRAGDRQLNCCLHTMAITQLQRDCPGRTYYLRKRADGKSHKEALRCLKRRLSDVVYRCLIRDADQQNGAGPGGHQGATTNSSAAGSTPTTGSSDKSLPEPATTDPTT

SEQ ID NO: 227810 - protein, 441 aa, unidentified
MHHRLSLPCREARGIDYPIEVAAQANIRAARRRLVVEVVYERCCGLDVHKRSVVACAITPEGKEIRTFGTMTDDLVKLAEWIKSKGCTHVAMESTGVYWKPIYNILEMAEIETLVVNAQHMKAVPGQKTDVKDAEWIADLLRHGLLKGSYIPDREQRELRELIRYRRALINERAREVNRMQKVLEGANIKLSSVATDIMGVSGRSMIEAIISGIEDPKFLAELAKGRMKGKREALEQALHGLIGPHQRMLLSAQLEHIDFLDRKIASLDEEIGERMRPFEEDLELLDTIPGVGRRNGEAIVAEIGADMGRYPSSAHLASWVGISPGNNESAGKRKSGRTKKGNKFLRSILVEAARSAARTKNTYLSAQYHRIAARRGANRAAVAVGHTILVIVYHMLKRRQPYIELGATYFDECKREAIIHQMVKRIESLGYKVELEPKVA

SEQ ID NO: 227811 - protein, 497 aa, unidentified
MEVTGEPRLQRAASLLAESDRLLQTAPRPSGSQATMRLVAASSVSLARLPIHDEFSLILIRTGFPLRILVNAHALGVRRETTRMSQSSFPMPGPAPLAYVVGIDIGSQSCMMCCLTMEKRQVIKPSSFANKAEGFSSLFERLERLGTPADQILVGLEATSRYGENLYHGLQTLGYRVCLLHPAQMHAFAKQRGLRAKTDRVDATTIARALLSDEARFGYVPSEQVATYRELVRLQQQLSDDVVRYKNEIHALLVVLFPEFTQVFADPTRSTALAFLKRYPSAQAVAQTDVGTLSQVLRELAPKRYGQRTAQKLVDLANRTISSGVALAARSTSLRILCDQLQHTQANLKQLEQQIEMLLDKDPQVKGVLLIPEFGVMTVAVLRAELGDLDRFARMDQIVAYVGMDLEVKQSGKWKGQTKLSKRGSGRVRRILYLAALRSIWLKGSPFGAYYHRLVDRGMKKGMAVVAVMRKLLIVAAHLIQTQQVYDPGKVAAPSVG

SEQ ID NO: 227812 - protein, 336 aa, unidentified
MEREYVGIDLHRRRSVIVRMGADGDQRSSVRIDNDPGEFAAAVMRAPAGSDVIIEATYGWYWAADLLRELGYVVHLANPHGNDWGHRRVKNDERDAHDLADLLRLGRLAEAWIAPPEVRELRELVRFRAKLSSMRTGVKAQAHAVLAKNGILPVRNDMWGVGGAAQFDALEIPRAYSHRIEVLRDLVCFFNREILEIDRQTHLLLRADPGYQAVQAIYGVGEVMAAIFVAEIGDVTRFSSPEALCSWAGLTPIHRESDTKVHRGRITKQGSRLVRWAAVETVARYHGGIFEASFQAIAERRGKNKATVAIARKVLTLVYYGLRDGEIRCLASPRAA

SEQ ID NO: 227813 - protein, 431 aa, unidentified
MCFAPAFGDEEESMGKINERCGGIDVGKRFLLCCVLTGAAHEEPRSQTRRFDATVSDLVRLREWLAAERITHVVMESTGSYWVPVFNILEGHFIIVLANPEEVKNRKGHKTDRKDAEHLADLLRHDHIRASFIPPKPIRDLRDLTRRRLQLVQDATRERNRVEKLLEHVNVKIGNVLSDVFGVSGQSMLLALLDGKTTAEEIAHLARGQAKRKIPQLTEALEGHGMRDHERFLIRSCLRHLACLEEEVEQMDCEILQRMQEPPFQGAFLRLQTIPGVGQLAAASILAETGVDLATFPTAEKMASWAGLCPGNRESAGIKKGSQTTQGNSYLRTTLVQCAWSATRKTGCIFQTRFRELSPRRGQKRAIVAIAHQMLTVLHFMLKNDVPFNGAANAPTQRRRQRRAHHHLRCLRRLGISVQILGPAEFTPQTE

SEQ ID NO: 227814 - protein, 427 aa, unidentified
MSYKIAGIDVHKRMLAVVVSEVEVHGEYGFERRPLGTSPAQLQALAAWRLEQQVEEVVMESTAQYWRPVWGALERYWQPGCRKREEAGPTSGGLHLAQAQSNRGPRGRKNDFADAERLVRRLVANELRLSFVPDPEQRLWRTVMRTKYQLRCNQVQLHNRLEALLEEAQIKLSSLVSDLLGTSGRRMLQALAEGESDPAALVALADRRLRATREQRCDALGACRDLHPLYRKLLKAALEEWQRIETQIRQLEEEMATLLSKQQDQVRRLAEVPGLGVDSAQQIMAEVGAQAAAFPSAGDLSSWVGACPGKNQSAGVNTSSRSPKGNRHMRRILNQAANAAAKLKGSIFALLYRRYVTRLGHNQTIGILAHRLCRLLWKILHQGVRYQERGPAVSQKSAQSRAKRMIRELRSLGYRIELVTSPAGAAP

SEQ ID NO: 227815 - protein, 411 aa, unidentified
MLFVGDDWAEDHHDVEIQDESGRKLAVRRLSEGAAGISQLHELIGEHLGETDDPGQVVVGIETDRGLWVQALLAAGYRVYGLNPKQVARFKERYVTSGAKSDAADAHALADMVRTERHQLRAMAGDSAQAEAIKVIARAHQTLIWERTRHLLRLRVALREFFPAALHAYAPLGLAGADTLELLIKAPDPVRAARLTGGQITAALKRARRHHAVAKAEQVKTALRTAHLAQPEALSAAYGATVQAIAAVLVTLNEQIGRLEVQVDTHFHQHPDVEIYLSQPGIGEVNGPRILAEFGDDPDRYTSAKARKNYAGSSPITRASGRSRIVLARYVRNDRLADALHSQALSALTGSSGARAYYDKQRTRGAGHNCALRQLSNRLVGILHGCLKTGSQYDEARAWPQHAGHLEPVAA

SEQ ID NO: 227816 - protein, 347 aa, unidentified
MMIIGCNFHPSWQQVSWLDTETGETGEQKLVHATGDAERFYRQMPVPSLIGMEATGNSQWFMELVEDLGHALWIGDAAQIRASYVRKQKTDKRDAGHIRKLLAEGRFPKLWTPDREQRDHRQLVMHRHKLVQIRSRVKNELQHLSLNKGMQKQNKLWSAAGQKALRELPLKPWAACRREDLLQLLAMLDQQIGKLDAAVQQAAEHNPHAKLLMTQPGVGPVTSLAFVLTLGDVSRFPRGKQVASYLGLIPREHSSGGRQMLGSISKQGNRLMRALLVEAAQTAVRYDPGFRKEYLHRCHQKPKGVAKVAAARKLAVRLYWMLRTQKPYPEIVRIESSPRRVALVGAS

SEQ ID NO: 227817 - protein, 334 aa, unidentified
MKKRYFMGIDMAKATFDFCLLSSAGACLWRGRFCNDARGIERFLAQLRARGWKLSQIHFALEATGVYGKALIAALHRADLAVSVLNPAQVKYFAFSVLRRTKNDRVDAEIIARFCRERKPLATRPLRPIEEQLKVLVHERESRVGEQTRERNRAKKDPFQIELPKLIGRQRQQRLKQLAKEIAQLDAAIDSRIASDECLRTQSQLLCSIPGIAELTAAKLLSELAGKEFQSARQLAAYAGLTPAESRSGCSLYGKTHLSKIGNAFLHKALYLPAAVARRWCKPLKPWIAILESRKLHVLAIRGAIMRKLLHIAFGVLKHQKPFNPLLVSFPKTV

SEQ ID NO: 227818 - protein, 427 aa, unidentified
MKHIPIAGIDVGKRFSEMAVLSSDNIVVSRLKIFHDASSNIDKAVDLLLKAEKDFASRPVVVMESTGHYHKILFHSLCEAGFDVCVINPLQTDSIKNLGIRKVKNDKVDARRIALLYRFQELKSTNIPNEDLECLRSLCRQYFNLCDELTAYKNRLIGVIDQIMLNFTDVFKDVCSQTALAILESYPTPKHILKAKESDLIELIQKTSRKNVKWASKKYNLLISKAKDFEPLSLDSAANLAMLDVNISMIKSLSKSLEKVITTIVQLLDEDATKDMPILSMTISLLCSIPGIGLITAATVLAEIGDFSAFSKPDKLVAFFGIDPSVKQSGQFEGTRNKMSKRGSRLLRRVLFTTALANVRKKRNGNELNPVLYDFYRKKSTNKAKKVALGAVMHKLVFIIFAVLRDKKTFELRKPEEHAKMLNKKAS

SEQ ID NO: 227819 - protein, 339 aa, unidentified
MSIIGCDLHSRYQVVALVDTGTGEMVTRRLEHENGEARAFYATLPKPSLIGIEATGYTHWFERLVAELGHELWVGDPAEIRARAVRRQKTDTRDAEHLLDLLLSKRFPRLWVPTPEERDARQLLKHRNKLVRMQTSVRNQLHFLAMSQGVCRKQKLWSARGRAELEGLSLGTWASRRRKELLETLDQLGPRIAELDQAVKTEAERRPEAVELMKHKGVGPVTALAFVLTVGPVERFAHSRALVSYLGLNPSEDSSGGHQRLGHISKQGNEMLRWLLVEAGHSAAQFDPELRRKYRRLVFRRGRNVAKVALARHLAVRLYWTLRQASSATPPVRTPGSPK

SEQ ID NO: 227820 - protein, 339 aa, unidentified
MDLHGGMDLHGDNVVCSLMDKEYRTVFERRLPNDLAVVLEALEPYRERLAGLAVESTFNWYWLVDGLQAQKYPTRLANPARMQENIGLKSANDKTDARFLAKQMVMGVLPEGYIYPKEERPVRDILRRRMRLVHMRTGEWLSLEGLVARHSGKDLGIHALSGLEEGELNALLGRDPLVLQAAEISQRHIAFLDGEIRKIEKAVEAQVKLKDGYERLLNVPGIGRILTMTIMLETGPIARFAGPGNYASYCRAVKTEHTSNERKKGEGNGKSGNRYLAWAYVEAANFAIRHSPELRAWYQRKAARTKRVVALKALANKLAKACYFILRDGVEFDVKRLVG

SEQ ID NO: 227821 - protein, 374 aa, unidentified
MRLPGGGGTTNLTTGMKQNNTTPTEIHASIKLGIDAHAKWYYVARQVDGATPQPVQKMTLDGLLHFAAKQRRLAREVFTCYEAGAFGYYLHRLLTAAGVTNYVVQPQDWDERGKGVKNDQIDALALCQRLDRYVRGNRKAFSVVRVPTEEEERERALSRQRQQVVRERQRLQAMGRSLLSMHGIHVDGKWRKGKTWSRVRAEAPEWVIGRLELFVRLIEPLEAEELKLMEAIQEAGRRQKIPRGVGPLTFEVLRREVGDWSRFTNRRQVSSYTGLCPREHSSGGKRRAGSVSKSGNPRVRAMLVEMAWRLQRWQPGYHALRKWAHVLGDPARNGAARKKAVVAVARQLAVDLWRLFTGQTTAANLGLIYLPEPA

SEQ ID NO: 227822 - protein, 355 aa, unidentified
MTSVKYIGLDVHQATISAAVLDANGKLLMESVVETRGSTIVEFLRGLRGELVVTFEEGTSAAWLHDLLKPHVSKLIVCDPRKNALLKVGSKSDRIDACKLAELLRGGHLSSVYHGGAGVRTLKELARNYLTLTQDATRVMNRIKALYRSQAIPCSGRSVYGARDRSAWLEKLTEPGLRCRAESLHQQLDLLEPLRQQARRQFLAESRKYPARRCLQQIPCIGALRAALLIAFIQTPHRFRTKRLLWSYSGLGLETHSSADYGFKDGRLQRSRKNISVRGLNRNHNHDLKNLFKSTAISASTRKGPLQEYYAGLLAKGITPAMARLTLARKIAAISLRLWKKGEPFDPTKLKTQAA

SEQ ID NO: 227823 - protein, 401 aa, unidentified
MPELWAGMDAGKAEHHCVVLDSDGQRRLSQRVANDEAALLKLIVDVLALSEGEPVTWAIDLNSGGAALMIALLTDNGQKVLYIPGRTVHHASGSYRGDGKTDAKDAFVIADQARMRRDLQTMHRGDDIAVDLRILTSRRLDLAADRTRAINRLRAQMLEYFPALERAFDYSTSKASLVLLTGYQTPAALRRIGRNRLAEWLKNRKVRNSQLVAATAVEAAQAQHTAVPGEKLAAALVARLAREVTALDEEIAETDALIEGRFRQHPYAEVILSVPGIGPVLGAEFIAQTGGDMSVFGSPDRLAGVAGLAPVPKDSGRISGNMRRPRRYCRRLLRVFYMSAQVAARCCPTSKAYYDRKRAENKTHKQAVIALARRRLNVLWALIRDGRTFEITPPASPVALG

SEQ ID NO: 227824 - protein, 427 aa, unidentified
MKYSQNSKIMQISEKTLIIGVDIASEVHFARAFDYRGVELAKILRFTNDEPGFKEFAAWVEEIKSKNHKDKVTVGMEPTGHYWFNIAPFLKDHSMKIVLVNPFHVKRSKELDDNNPTKNDRKDPKTIAMLVKDGRYMEPYIPEGIYSELRTAMDTRWHIVKQLNVIRNKVLRWLSIYFPEFRTVFGDWEGKAALTVLKEFPLPKQVIEKDITGIVAKWKQDKIRAVGVKRAASLVEAAKRSVGVKEGIISAMNDITMLLEDYDLKMAQYDRVMALVEQLSKQIPGMEEILKIKGIGLIMAAGFVAEVGDIKRFEHSKQIQKLAGLNLKENSSGKHKGKTTISKRGRSRLRAILFQGMLPLVAQNAAFKELHEYYTTRKANALGKKQSLVLLCCKLIRIFYALLTKGTEYDSQKMMSDIRRNNASEAA

SEQ ID NO: 227825 - protein, 447 aa, unidentified
MSKDEKKTKKKLKVSMPLVNLNAAGIDIGDTFHAVAVPEGRDKESVRNFGAFTSDLESLAGWLKRCRVDTVAMESTGIYWKNLYALLIHHGFEVYLVNAKCTRNITGKKDDESDAQWIQKLHSMGLLKSSFLPDECTDKLRTLVRHRRTLTQDSTRYVLRMQKALESMNIKIHTVINDITGKTGTAIIKAIIGGERNPNCFLSYVDPRIKATKESILKSLEGNWRPEHLFLLQQCYNLYQHMQTQIELCEKQIEKVLKLYMETQHNAEQTVNASVKSKTKNQPKFNTRHYLKNIHQVDVIDIYGISEISALEILSETGTDLSKWINEKKFVSWLNLCPNNKITGGKLISSQLMKKKPNAAAQAFRMAANSLKQSKNWLGDYFRRKRSKGGQKYAIVATARKLAIIYYKMVRFKKPFTPFDMLEYNKKYKQAKIAYLERLLQRLRVAA

SEQ ID NO: 227826 - protein, 338 aa, unidentified
MKLYGAIDLHSTNNVTVVIDEQDRVVYQKRLPNDLAMIVEQLSVYRGSLQGIVVESTYNWYWLVDGLMEQGYKVHLANTAAIQQYEGLKYTDDHSDARWLAHLLRLEVLPQGYIYPKGERPVRDLLRKRSQLVRQRTANLLSIQNLVTRNTGESLSANRVKGLDVQQVDELLPDGDLALAVKANLSVMCSADEQTEILERTVTERVKLRPQFSFLKTVPGIGQILALTIMLETGDIRRFPAVGNFASSCRCVGSQKLSNGKRKGSGNTKNGNKYLAWAFVEAAHFAVRYNPCIKRFYQRKQAKTNTVVATKAVAHKLARACFYIIRDQVPFDVSKAFQ

SEQ ID NO: 227827 - protein, 412 aa, unidentified
MDVIHERCAGIDVSKTDVKVCLWLPTTGKRRRSEVRVFSTMTRDLLAMKDWLLAEGVTLVGMEAAGVYWKPVFYVLEHEVECWLLNARHMKGVPGRKTDVADSEWIAKLLEHGLVRPSFVPPQPIRELRDTTRYRTEVVRERTREIQRLEKPLEDSGIKLSSVVSDIVGKSGRAMLEALIAGERDPLVLAEMAMGSMRGKREILAEALRGRFTDHHAFMVRAMLDRIDGCIEVEARLSERVDAQVRPFRRRIELLITIPGMSTRAAEVVLAEIGADIARFPSAADLASWAGVCPGNHESAGRSSSGKTRHGDPWLKGVLGQVASAASRSKDTYLAARFKRIASRRGKKRALVALEHSVLVAVWHMFTSDAEYHDPGGDYFLERTGKTRQTRRLVSQLNQLGYQVTLQSVEAA

SEQ ID NO: 227828 - protein, 313 aa, unidentified
MTTSGAWIGVDICKKFLDVGSTAGTPVRVANDADERAALARRLKSDDVRGVIVEATGGLERALVKALEAEGVAAAIVNPARVRKFAEGTGQLAKTDRIDAIVLARYGAYMQPAPTLLADPPRQSLRDLIAYRSQITREITARSAQIRLYAAPDLLERAKAAIEALRSERKALEREMEALIKSQDAMRVLYRRIITVPGIGLIGAATLIAELPELGRLSRRQIAALVGVAPFPNESGDRRGYRAIRGGREEVRQALFNCARVAIEHNPVAKPFYERLRARGKGHKVALVATMRKLLTILNAMLKTNTDWTCKPA

SEQ ID NO: 227829 - protein, 382 aa, unidentified
MQASTIGTPTADHCGTIFVAIELSQRSWLVTLHSPERDRLSRHKLEGGDLAGFLGLIASVRERAARKLGAEPRVVSCYEAGYDGFWLHRLLSEAGIINFVFDPASIAVEQRARRAKTDRIDGELLLRTLMAYLRGEPRVVRIVRVPSVEHEDARRASRERDRLVKEQTGHTNRIKALLRLLGMEVGNPRRADWVGWLGCQTDRRGGPVPPHLMAEVAREHARLMLVRQQLAALEQMPVAKASAAAARTTERQDHLIRLKAIGTAIGATLTNEVFYKDFRNRREVGSYFGLVSSPWQSGGTDRDQGISKSGNPRARHKAIELAWLWVLHQPDSALSRWFRARTHNASKRIRRIAIVALARKLMVALWRYLTTGLIPEGAVLKA

SEQ ID NO: 227830 - protein, 331 aa, unidentified
MRYTTTHHCILEEVVDRLTLGHQRPLCSMGHHYNLKDRTRTVARGKTLTILVESMQLKSFDLNLIVLEATGGLETELIIQLQAALLPVALINPRQGRDFAKATGKFAKTDAIDAQVLAHFGEVIQPQVLPIESELARQLGELVSRRRQLVEMQTAEKNRRTRSRGKALADIEAHIEYLDKRLEQLNQEIESMTQNHSEWMEKVDLLKTTPGIGQVISTTLVADLPELGQLTAKQISRLVGLAPINHDSGQHKGKRMISGGRAHVRATLYMGAVVAMRHNSAIKAFYDRLVERGKSKKLALTACMRKLLVILNAMIRDKRPWQSADLCSPIG

SEQ ID NO: 227831 - protein, 349 aa, unidentified
MTIVEDRPVITGGVDTHADLHVAAALDPIGGLLGVQEFPATAAGYASLLGWLGGFGDIALVGVEGTGSYGAGLARHLAMAGVRVVEVDRADRQDRHRAGKSDPLDAVSAARAAQSGRAAGEPKGRDGTVEAIRALMVAKRSARAERTQAINQARALIVTGPDELRARFAGHRPAQLVEAIAALRPRPGDVPGYATRVALRELGRRARFLDAQLDRLDELIVPLVIARAPGLLALHGVGPDTAALLLIAAGDHPERLRSESSWAHLCGVAPIPASSGKVSRHRLNRGGNREANHALWRIVITRLGSRPGHPATRAYVERRTKEGLSKKEIIRCLKRYVAREVYHQLRAGA

SEQ ID NO: 227832 - protein, 337 aa, unidentified
MNVTTVGLDLAKNVFHIVGLSGQGREVLKKRLTRSQVLKHFANTPRCAVAMEACASSHYFARELRKLGHESKLIPPQYVKAYVRGQKNDYNDARAIAEASRVHAMRVVAVKTVAQQDLQALARLREGTLRSRTALVNRLRGLLAEYGMVRGNGVSTMRRALPALLADATNGLSERFRRLLKQGHTELIELDAHIEVLTAELKAAAREDDAAQRLQTIPGFGPIVAAVFAASLGDGRQFPNGRAASAAVGLVPRQHSSGGKPLLLGITKRGDRYLRSLLVHGARAVVRAAQNKDDHLSRWVNRLREARGMNKATVALANKLTRIGWAVLAHKSVYQPA

SEQ ID NO: 227833 - protein, 359 aa, unidentified
MNPIPVGVDIGKSVFQIHYIAPNSGEIINKSLKRANFLEYFANLESCMIGVEACGGSQHWARSLSRLGHQVRLMAPRVAKAFNIGNKNVAADARAIWLAVQQPRNKVAVKSEAQQAVLALHRLRQQLVKFCTSQINCIRRLLGEYGEVMPAGRRAFDANIAAVLDRVGDHVAAPLIDTLQEQCAALTHLDEQITRIEQRLKQWMSTDLSAQAIGAIPGVGLLTATAAVVTIGDAKAFKFGREFAASIGQLPRQVGSGGRTTLLGISKRSDAYLRTLLVHCARVISVQLRSKHPWVEQLQKRRPYPASASQARCSVGLPSRRLRTLPRTSHPSSTVLRSAISGPGAADAPAEQILLASPC

SEQ ID NO: 227834 - protein, 337 aa, unidentified
MKRYLGVDLHRTQFTVCTRLESGRTYLRQWPMRDLKLFAAQLRKEDEVAVESTGNTRLFHDAVIEHVARVAVVNPSQFKVISQSVKKTDKNDAELLALYLAKGLLPEVRMKERKQREMSHLAQTRDLLVKQRSALKAKINNLLSAEGINLKREALSSNKALERVLALPLSPLMLAEARVLVGQIRGLNQSIGELEELIEEEGPKLAGHENLMSIKGIGSVSAAVLLSVIGDIRDFSDAGKLAAYLGLVPRIQNSNETEHSGRITKQGNKLARTCLVQCALVAKRYSSFLQNFYQRIQRRRGGGKANIALARKFLGVIYHTLKNNWVFEDFPNFVLAS

SEQ ID NO: 227835 - protein, 335 aa, unidentified
MTVTINSLIFFMEVVMEAIVERCAGLDVHLDTVVACILYGDLDKKPNKEIKTFSTTTKGLLQLLDYLNINRCTHVAMESTGVYWKPVWNILESGAFELIIANAKKIKNVPGRKTDVKDSEWIASLLRCGLIEKSFVPPEVIRDLRDLTRLRKELLSEITRHKNRIHKVLQDANVKVSSVLSDVFGETGKVIINELISSRCITMNFVESLYEGRGKSRLKATPNEMYEALNGKIRGQHIILLTIHNNNILFLEKQIEEIEKEIDVLLQKESESIDILNTIPGINITSAACIIAEIGSDMSVFPTEKHLSSWAGLCPKNNESAGKKKEVVLNQEIRG

SEQ ID NO: 227836 - protein, 340 aa, unidentified
MKVRTLGIDLAKNLFHVHGVDGQGRTVVQRQLRRRQLLPFVARLQPCLVAMEACGGAHYWAREIAERGHEVRLMSPRFVRPYVKSNKNDARDAEAICEAVGRPSMRFVAVKSQAQQDMLALHRVRSLLVRERTALMNQMRGLLAEYGIVVAQGAVTLRRALALILEERDNGVSEILRELLVEMSERQRLLEDRLKRYDQRITEFARADERAGRLMAVEGVGPLTATALIAAVGNARQFRSGRELSTWLGLVPRQHSSGGRSVLLGISKRGDRYLRTLLIHGARAALRFAARKRDPRSRWIGAVRERRGANIAAVALANKNARVLWALLARNEDYRVATAA

SEQ ID NO: 227837 - protein, 353 aa, unidentified
MEQFIGCDAHKKFSVFVAVNEKGQAGETTRVAHDRQLYREFLARLPAHSAIAVEASGSYSWLVDEMERSGHQPRLCNPLEAKRRMGLTNKTDKLDARGLAILLRNGTLPEVWIPPAEVRDQRELLRLRIFLVRLRTRVKNRIHGTLARHNVQVPGADLFGVAARLELVARLPELPVHSREAVEQELTTLDFLETQIESAERRLESIMKVSVEADLLKTLPCVGKILGMVLMLEIGRIDRFPTAAHLASYAGLVPRVRSSGGRTHMGQVCGNVNRNLKWAFVETGNLIVINQRRFAGTHVVRLYQRIKRAKNHQKAVVAMARHLAEAAWWVLTKQEVYREPPGPRRQALSSTHG

SEQ ID NO: 227838 - protein, 376 aa, unidentified
MTKLRFVGLDVHAETIAVAVAEPGGEVRSIGTIPNRVESIRKMIGKLGPAKELRVCYEAGPTGYVLYWQLTTLGVECEVVAPTLVPVKTGERVKTDRRDAEKLARCHRAGDLTAVWVPDEAHEALRDLVRAREAGKKDQLRARHRLSKFLLRHGRRKPEGMQAWTKKYLEWVKSHVHFEQPALEAALQDYFHEVEHAAARIERLEKSLDEAISKAPEQIRAVIEALQALRGVAKLTAATIVSEIGSFSRFEPRKLMGYSGLVASEHSSGNRLKRGAITKTGNAHLRRVVVEAAWSYQRRPWIGGYLLRRQRHLNLSDEVKEIAWKAQYRLHKRYTKRTAGGQNKNQTVTAVGRELLGFIWDIAVRTERAWGQTKAA

SEQ ID NO: 227839 - protein, 326 aa, unidentified
MNLPAVVLGVDIAKLKFDVCLIKENQKVKHKVFANTKHGFEQLVAWLNSHQVGSLHICLEATGSYGEALALHLFDEGYQVSVVNPAAVKAFAASRLTRTKTDKVDAELIARFCLAQQPEAWQPPLPQVRHLQALVRRLESLVEMRVAEENRLSSGISIDAVRYSLEEHIAYLIKEIKQTELMIRGHIDNHPDLKEQSDLLDSIPGIGQTTAALLLAEIVNIKQYKSARQVAAYAGLVPRERRSGTSVRGRAQLSKIGNARLRKALYFPAMTALRCSSFFQQWASGMRERGKCKMAVIGAAMRKLIHLAFGVLKTGKPFDPNWAKTA

SEQ ID NO: 227840 - protein, 350 aa, unidentified
MSAKFNSEIAVIGIDIGKNSFHVVGLDRRGAIVLRQKWSRGQVEARFSNLPPCLIGMEACVGAHHLSRKLTSLGHDARLMPAKYVRPYSRGQKNDFRDAEAIAEAVQRPTMKFVATKTAEQLDLQALHRVRERLVSQRTVIINQIRAFLLERGVAVRQGLRFLRAELPRILARPCDALSPRMLRVIEDLAGDWRRLDERIEGLSSEIEVLARQHAGCERLMSVPGIGPIISSAIVAAIGGGDAFSKGRDFAAWLGLVPKQISTGDRTILGKISKRGNRYLRVLFVQAAWAVLIKPKSWARHGLKPWLEAAKKRLHHNVLAVALANKLARIAWSVLAHGRVFEATKIQADA

SEQ ID NO: 227841 - protein, 333 aa, unidentified
MDHCAIDLGGKKSQVCMRSPDGRVLLETRCDTLSLPDFLQQLPHSRVILETAAEAFRIADAAKAAGHEVRVVPATLVRTLGVGARSTKTDRRDAQVLSEVSCRIDLPSVHIPSARSREWKTICGMHDALISSRTKLINNLRGWLRGQGLRLSSGRAETFAGRMAEIESLPKYVASQVAMLALLTENIRTSERRIEDLAKSDELCKRLMTVPGIGPSTAARFVAAIDDIRRFESAHKVEAYLGLAPGESSSSERQQRLSITKAGPSTVRWVLVQAAWSLQARCRSMAARPLQLWTAEVAKRRGKRIATIALARRLAGILYALWRDGTTYELRQQ

SEQ ID NO: 227842 - protein, 342 aa, unidentified
MAIAIVGLDLAKHVFQVHAVDEAGRAILRRQLRRAGVEAFFKTLPPCIVGMEACASAHHWARRISALGHTVRLIAPAKVKPYVQRGKKNDANDAAAIVEALMRPHMVFVPIKNEEQQAVLMLHRTRDLLVRQRTMLVNAIRAHLAEFGIVAAQGRRKVKELITGLDNTEVPELARLALWQIADQIDECDKHIDVLERRILAWHKSDEASCNLATIPGIGPITASAIAATVPDPSAFRNGRQLAAWLGLVPRQHSSGGKDRLSGITKAGNTYIRRLLVIGATSVIRYARSKAPGTAEWLKKLLDRKSARLASVALANKMARIAWSVLTRGEVYRTTYPVPKPT

SEQ ID NO: 227843 - protein, 334 aa, unidentified
MNYTKWLGVDVSKDKLDVAVYDGKRHHNYEIVNEIKSITKFFKKNAPVTCTHVIMEATGIYHMVLFTRLSELGYSVSVVNPLVIKRYSQMRLIRAKTDKVDARLIAEYGYNQKPELSKLPSEEQVNITSRLKAINSFQNLNLMLSNKIHALKSSGTNDKLVIKEYMLSIKANKRSIERLENQIMEIVRENFQDEYDLLVKIPGVGFKTASLTIGFFSRFEDFETAKQVVGFVGLNPNPRESGSSVMRGSNISKKGNPLVRKILYEASLSASQYNPDCKELYVRLLSKGMPKTKCRVAVAHKLLRQIFAVLKYERDWCPSYHKQRNYCHSQNFRY

SEQ ID NO: 227844 - protein, 355 aa, unidentified
MNTIYIGVDFHARQQTICYLTTEGGELLCCELKHQDKNEVRAFYAQFHGRVIIGLEASGYSPWFEQLLEELGHEVWLGDATEIRRRARWRQKNDRRDAELILDLMVHDEFPRLYRPCLQSREILRMLRYRQKLIKIRTMGKNSLQALALQSGLAKRSHLFTKAGRQELCRATMSPAMQWQREQWFQLLEPLNERLVETMLWLKQQSCDDPRIKLLRTHPGIGLLTSLCVVHSLWPVRRFRNQRKVSAYGGFDPMERSSAERKHFLGISKAGSRVLRYLLVEAAHTAVKKDDDLKRFYQRLVVRRGKAKAKTAVARKLLVRSYIMLRDEIDYAEFRRRAVAARLARQSSRPNVPEV

SEQ ID NO: 227845 - protein, 387 aa, unidentified
MTKKRGRVVGLDVHPDSFAGAVVEGTDPAQARVLSTSTRVELKQLEQWALRHTSTQDRLVLEASGNAFAVAARLRAIGRKVEILDSHRAGKVGKVYCANDRVDAVKIARIYLSALSPIVWQPDAKTLERREIFSAYQAVVKESTRAKQQLRSMLNEHCVRLEKGFRLCHPNAIRRLVALREWTPARTMLLQQLHGTLVAARRRRTLLRRHMAQEIVAEEALLRLTRLCGINLVTLYGVVAAVGDVRRFNHSKKLVAYFGLNPSVSQSGNFEGGGALKRHGRGALRALLIQSGKKLLEVNNPLQKWGLAVAARRGRNKAAVAVARKLCVALWHVLMGHAIGALERLDTLETKLSKFATEIGTAALTAFGYNNKADFVEKKLYVLRSYP

SEQ ID NO: 227846 - protein, 355 aa, unidentified
MNDTKYIGMDVHRESISIAALNSAGKIVLECVVETKASIILQFIDGLRGELHVTFEEGTWAAWLYDLLKPHVTKLVVCDPRKNASMKQGNKSDKIDARQLAELLRLDHLNPVYHGEHGLRSLKELVRSYLTITKDVGRVMSRVKAIYRSWGIACSGKQVYAPQHRVEWLAKITEPGVRRRAEFYYQQLDALRSLRREVRRELLEESKKHQAWKRLCQIPSIGPIRAAVLLGILQTPHRFRTKRQLWSFGGLGIETYSSADHRYVEGQLKRSKKPASIRGLNENCNHDVKNLLKGAAIIASTKPGPFQEFYTALLAKGMRPEMARLTLARKIATIVLIVWKKGVSFDAQHLKPQTA

SEQ ID NO: 227847 - protein, 350 aa, unidentified
MLIIGCDYHPSFQQIAFVDTSSGELSERRLFHREEAEQFYGKLKEQSVPVRVGMEASGHARWFERMLRDLQFELWIGNAAEIRAKRVRRQKTDRQDAQLLLRLLMEDCFPRIWVADAENRDLRQLLWHRHRLVQMRTRVMNQLHVVALNEGLRRKKALWRQAGRQELESLALAPWANRRRQDLLDLLDQLTRKIQQLTQALEEEVEKRPVTRRLMTHPGVGPLTALAFELVIGTPERFHCGKQIASYVGLVPSEESSGNRRRLGHISKQGNALLRYLLVEAAQVTFRTQAQWRSRFFHLAMRRGRKIAKVAMARKLAVHLYWMWRQGCDYGHLQKLGSHAGEPGNPYGVR

SEQ ID NO: 227848 - protein, 437 aa, unidentified
MTSPCQFYDYKFQEVILLSFKIFRKNCCGLDVHKTWIYACIGITDANGRTDYKQARFSSFSKGLKELCDWLAKYNCSEVCMESTGKYWIPVFNILEKADNSIILAHPKYTKPQKGTKTDRKDAKWICDLFMCDMIKPSFIPPADIRHLRDLVRYRFKLTCMITGEKNRAQNCLTISNLKLDDVFSDVFGKSSRSITEHMLTHPGELFDVTPFVDGRCKTPVEEIQAAVDGAISPEQAIKLRQCLDHIDELDKHLEEIEREILRLSDKYQAALDLIRTVPGFDKNPITAIQILSEIGGDMSVFPTAKHLVSWAGCCPRNDQSNKKIKSTRISRAGTYFKPILVQVANALLRSKKHPEITNRYKRIKAHRGHKKAIIAICRMLLTAIWHILSDLKPYTAEGFLESRPVNESKVLTTSQALNLLKQRGYIIKDDVIPAMN

SEQ ID NO: 227849 - protein, 408 aa, unidentified
METVTWVGMDVHARSTHAAAVIAAAGELRRARFGGGAEAVVAWLGGLPAPVRACYEAGSTGYGLARAAQSAGVAVGVIAPSKTPRAPGERIKTDRRDAELLVRLLMAGQLHPVAVPTPRVEALRDLTRARDRIRGDLLRARHRVSKLLLRYGRVWSSDRGTWTQEHHHWLRRQRFDDPNLELAYLDALAAVDALMRRRDLLDQRLLVAAQDADVAAAVARLRAFRGINTLTALALHAEIHDWHRFGRPGRLAAWIGLVPSLYQSGESAQSGAITKSGSRHARRLLVEAAWHYRRRPGRGVTLKRRQEGVDQHTIDIAWRCQHRLYRVHTRLRDRGKPANVATVAAARELACFLWDAMREYQPPTTTAARASAEPSRLAGTPAATMRRRLRPRAFLDPRRPATKQGHLG

SEQ ID NO: 227850 - protein, 356 aa, unidentified
MSKVKQPNFEGQTIFCGIDVHKKTWRINVRNDEFELEDYSQDPREELLLNHLRKRYPGASYQVAYEAGFCGFSIQRSLKKSGLNCIIINPSDVPSSDKDKKRKSDKIDARKISRELSNGAIEGIYVPAVEMEHARTLVRQRGRLVQDQTRCKNRIWHLLMFSGLKLDAEKSHQYWSRRFMETLRQMPCETQSLRHALDIAVEEYLQVRKLLSLTTKQVRVLSEQVSFVAIQKLLRSIPGIGVVNAMIIMTELQDMRRFKTLDKLCSYVGIVPDTGSSGDNEKVNGITHRSNHYLRPAIVESSWVIIRKDPAMLMLYKKYCSKMVANKAIIKIARHLLSRIRYVWMKQVEYEIGIVG

SEQ ID NO: 227851 - protein, 410 aa, unidentified
MSVLGIALDSATVIVAVDPGKAFNRVWISDGSGLLTDPMSLPVSREGVCRLESELVERGRGEPVIAVEATGSLHRAWASELERRHPGSVRVFAPSETKAARVQLGSGRFKTDDRDCAALTYLTRQGLGRRYREQAAVEALRAAVRHRRSLVADRKAAQQRLHDQLNVLCPGLSAPAGHGRTLALETPTGLAVLACAAAFEGRAPKPRSLICRAPGRLSTATADYWVARWRACLPPPADAAARARRLGRDLVRYRRLLADVGDLDAEIGELLAGTDGQVLTTLPGVAENRAAAFAAHSLPIERFPDAEHLYSATGLAPALYQSATLNRRGRISRQGLAEHRDALMGIAWGLSQRSLSFAERYAELRARGMAPIQARVALARHACRLAYRLLRTQQPFDEQRYRRGRLSRER

SEQ ID NO: 227852 - protein, 356 aa, unidentified
MVDRHTLVEVEVTGGVDTHKDTHVAAAKDRLGRVLGTQAFPATVAGYTALLEWLGSQGTVVAVGVEGTGSYGAGLARYLTGQDVRVVEVNRPDRAKRRQKGKSDPQDAINAAAAVQSGDATAVPKTGIGVVEAIRVLRTTRVSAVKSRTVAFNQLESLIVTAPAALRETLTGLTGMTLVSRCARLRPGSDLADPTHATKTALHRLAHRVQLFTDEINDADTELRALTTQAAPRTLARFGVGPDTTAQLLTTAGDNPHRLSSHAAFAHLCGTAPIAASSGRTTRHRLNRGGDRHANAALHRIVIVRLRYCERTQTYLTKRTAQGLSKRDIIRCLKRYVAREIYNTIRADLANLTNTH

SEQ ID NO: 227853 - protein, 402 aa, unidentified
MNPVIGLDISKEESHGQAFLARGKPFRGTFHFEHTRDGLANLHQVLKDVESASKQRPLLILEATGHYQSPVVQFLEEHHYVYIVINPLISNRLRKSQLRKVKTDAADAYLLGELYYKEEFEPFKKRGVQLLNLRYLTRQYDSLSKMCVQTKLQFQAVLDQVFPAYKGVFGAMYSGVSLRFLSEFPTSYSVLQTDENTLKAKMKELLSSKRGRSEDWINQRIQRLLDAAIQNPFQQTMYASHLINLKVLITLILQYQEHLTELEQNIDALAEEIEEYELIQSIPGIGHKIAATILSEIGEVDRFDHPKKLVAFAGIDPSVFASGKFTATRNRITKRGSRQLRYALVMAVQCGLIRSRNTRLKEFYERKRSEGKPHKVALVACANKLVHWLHAILKSKKAFRLA

SEQ ID NO: 227854 - protein, 318 aa, unidentified
MIAQDAPLARAQVAGIDVAKDWLDVFFAGRVERIANRTADIVRLARRLLKAGVMVVGLEPTGGFERLAAELLYAAGLDVRMVDSWRLRQFAKSRGTRTKTDPIDARMIAEFVLAGLSRAFPRPSARQAALACWAREASRADADLLRLKARVKSCALAEIGRLLQLQIQALKQTIVEAEQAIARIIAADEDFARKARRLGSIPGVGAKTIRVLLAEMPELGAIEPKSAAGLAGLAPYQRQSGKRRARGAVEGGRAAVKRAAYLAACAMRLHNPWARAIHDQLLARGKPFRLATVALARRFIHIANAIVRDDRDWAPASH

SEQ ID NO: 227855 - protein, 358 aa, unidentified
MAQINQLDFSGSIIYCGIDVHKKNWRVNIQSEEFELEDFSQDANPVTLYRHLIRRYPGATYRMCYEAGFSGFSSARWLNSQASAECLVVHPADVSTTDKEKRQKNDKSDARKLCWQIQGKQVKSVHIPDPHWEHARSLTRMRDRLVSNQTRCKNRIWQFLYFHGLSLGEQMSADQYWSKQMVCRLQSLDCGSEELKASLGIYIKDFLQTRSLLLEATKMVRKACVNPLYASDIALLRSIPGVGPIIAAILLFEIQDINRFKGTDKLKSYVGLVPDTSDSGDKKSSKGITKRRNNFLRTALVEASWTVIRKDPAMLMLYKDYCKRMEKNKAIIRIAKHLLARIYFVLKNKEPYIVGLVR

SEQ ID NO: 227856 - protein, 438 aa, unidentified
MADPNERCEPDFAAFIGIDWADQRHAWALQTTIKGAIEHGDLDHTPEAVDAWATELGRRFGGRPVAIALEQSRGALLFMLTKYAHFVLYPIHPTTLANYRLGFRPSGAKSDPSDAGLLLDLLVRHREKLRRLNPDTVETRTLQFLVEGRRKLVNDKTRYSNRLTACLKMYFPQVLDWFAEVSSKIAGDFLERWPTLPKLQKARLDTLRTFFIEHHSGRPESIQRRLEEIRRGVPATHDQAVIESCVAAVTALVPLLRELRRAIQSYDEQIETTARQHADFVIFDSLPGAGAALVPRLIAALGTQRDRYSSASELQCYSGIAPVLASSGKQSWVHWRWACPKFVRQTFHEWAAHSIGSSAWASAYYTQQRAKGKTRNTAVRALAFKWIRILFRCWKDHTPYQEELYGQALARRAARTNGAVNVQWKTGEGLSKISGFIS

SEQ ID NO: 227857 - protein, 315 aa, unidentified
MNACAAGIDVGKSFFDVGMAPSGHNFRVPNAPKGVAVVIGRLRRSRVRRVVLEAIGPYGAALIAALRTNGFEVGVVNPRRIKAFRDAEGHRAKTDRLDAGLIARFALTMTDIIRPLPSAEQLTLKALATRRRQIVEIVAMEKTRLKQAVEPLILDSHRAAIAALTLERRKIERELEQRIARDPAMSRRKEILISIPGIGPQVATVLLTELPELGGIDRRAIASLAGLAPHPHQSGAFRGRPQITGGRPCVRTALYMAALASCRANPLARENYLAMRQAGKPAKVAIIAAARKLLIVANTLAKSDQTFQPNHLLHA

SEQ ID NO: 227858 - protein, 355 aa, unidentified
MKYYTSTTEFNCGIDLHARQMYVCVMDRQGKKRVHTNVKDNDFSFFLKLIEPYKHDLTVCCECMFGWYWLADACQAAGLTFVLAHALYVKAIHGGKNKNDRVDSEKLTHLLRSNLIPPAYVYPADKRPLRALLRQRIFYVWRRSELLARIHSHQLAHNRIPARQTRRTRDPWEEQLLGAEDHPLRQIALKNDLAMIRHFDQQIFALEEELQRQTKKVAGRDYALLQSVPGIGENLGLTILYEIGDINRFPTVKDFLSYGRLVKGTVASAGKIKGLRGAKLGNPYLRWAFGEAAVIAKRDHFRIRPLAQRLEEQMNGNKFKANTVVAIKLARAVYFMLKNKTVFDPDRLVAALARN

SEQ ID NO: 227859 - protein, 322 aa, unidentified
MNKYKETFGVDISKDVYDVFGSLVGHNQFKNDEKGFRSFFKSIPKDSLVVMEATGYYHYRLAQFLYKNGIAVSVVNPLSVKRFLQMKLAKVKTDKSDSKAICEYAQMNEVPLYTALTDVQSECLQLFRLLDSFLKKRTVTKNKLHGEETLGVPSKYVYRSLKRNLKHLDKEVEGIESRLLELVKKEQQKQLTLLKSIPGIGVKTALFLIVVTDGFTKFENASQLCSYVGITPTIRVSGSSVRGRSRISKVGNRKLRNLLFLCAFSACKHNKACREIYERITNKAKSKKLALIAVSNKLLKQAFAIAKSGRPYDEMHVSVLSK

SEQ ID NO: 227860 - protein, 341 aa, unidentified
MSLIAPVFSFGLNGYTGSGLALQDKAEKSLMRITIGIDISKETLDAYRFPDNQHIQVANGRAGHKTLVRWIGKQNGSLVVFEATGAYHRNLEAALAANGTAFAKVNPRQARRFAEATGRLAKTDRVDAVMLATMGAILSLTAHEPKTEALPILRELITARRALMKDKVAAKTRLQTTRQTLLKNQINARLNQIKIQIRQVDAAIAEKVTQDEALSNKLAILISIPGIAETTAFSMLIEMPELGTLEGKQAASLAGLAPMSRQSGKWQGKERIQGGRAFLRRAIYMPALVATRYNPCLKAKYDQLIRAGKSGKVALTAIMRKLVVMANALLRDGRTWSELRP

SEQ ID NO: 227861 - protein, 376 aa, unidentified
MLLPRQQVTLARGAKDKEHAISSKLNTAIAVAGIDIGKNSFHVIGLDKRGAIVLRQKWSRGQVEARLANTPPCLIGMEACVGAHHLSRKLQALGHDARLMPAKYVRPYSKGQKNDFRDAEAIAEAVQRPTMRFVATKTGDQLDLQALHRVRERLVGQRTGIINQIRAFLLDRGVAVRQGLRFLRIELPGILAKRTDVLSPRMLHLIEGLADDWHRLDERIEVLSSEIGALACGDPACDRLMTVPGIGPIISSATVAAIGNGAAFSKGRDFGAWLGLVPKQISTGDRTILGKISRRGNRYLRSLFVQAAWVVLVRVGPKHWDRYGLKSWIEAAKKRLHHNVLAIALANKLARIAWAVLNKERKFECIRTNKMSPRAA

SEQ ID NO: 227862 - protein, 394 aa, unidentified
MYSLFVGIDVSKDSFSAAGLNEKAKLVFSAVPEMNDQGFSAFFTTIMAHGKEPSSIVVALESTGPYHLNLYSFLIAKGITTIVVNPLIIANFAKLSLRKTKTDKKDALTIARFLFLNRESIEKLPSSQTTTDLRDLARERESILKMIASMKNDIKRILQSTFPELEQFVDVLGVTMLGFLKVFPSARLITQASPEAVAQGFKQGDGRRRISVHYTKIIDCAKTSVATTSPSKELILPGKIETLLHLKERADAITRMLVKLCSSMQQKELTILTSIRGIATKTAAPFLAELGDWRNFNSYKKVLAFAGLDPTIHQSGKYEGMSMISRRGNRHLRKVIYNMTFCVVRYAGPFRDYFFRRKREGLPFRKALLATAHKLIRTIFAMLNHGALYREEVA

SEQ ID NO: 227863 - protein, 351 aa, unidentified
MDYFAGLDVSLETANICIVDADGDILSEKKVEAEPAAIIAGLKQFGQAFKRIGLEAGPTSSWLYSELHRSGYPAICLECRHVKAGLSAMRNKTDRNDARGIAQLVRLGWFRQVHVKSEEAQRVRMLLVNRQQLLTKALDLENSVRGSLKVFGLRVGTVTRRTFEGRVLQLIAEDRSLLASTEPMLRVRRALIAEFEQLDRLCRQLARRDPLCHRLMTVPGVGTVVALTYRTGIDAPERFSKSRDVGAHFGLTPRRYSSGQTDYDGHISRCGDAMVRTALYQAANVLLHHGRWSSLRSWAMRIAKRSSVKVAKVALARRLAVVMHRMWVDGTDFRWSAIATAAAPVSTAIAR

SEQ ID NO: 227864 - protein, 344 aa, unidentified
MKITRVGLDIAKQVFQLHGVDERGKTRVGRQLARAKVLEFFAQLPPCLIGIEACGSAHYWGREFTKLGHTVKLMAAQFVIPYRTRGKNDANDAEAICEAVGRPNMRFVAIKSEEQQSVLMVHRARTLVVANRTAQVNQIRGLLGEFGLVVPKGVARLRRELPGILEDAENGLPALARQVLAGLLEQFHEFDARVAAYDRQIRALAEASEPARRLMKVEAIGPQTATALVASMGDPHVYKSGRGYAASLGITPRQHSSGGKERLGQITRQGDRYLRTLLVHGARAYLRVVDKKTDAKSAWARRLKERRHVNVVAVALAAKHARIAWAILAHGTEYRPAGPEVVAA

SEQ ID NO: 227865 - protein, 406 aa, unidentified
MSYYYVGIDWADVNHAIHITDNSAEKIDAFSVKHSLSGMETILKHVYRLTMDKNRILFALETDKGLLVNFLLDNGFTVFAINPKSVDRFRDRYDPSRNKTDPIDAMLLADILRTDRHRFRAILPESDNLRELKILTRDHKALITTRTRLVNQLIACLKSYYPLGLELFCDVKQQISLDFLLSFPNPTTAQKLTLHQLKAFLSEHHYSHPRRIKTILEKLKTPQIPVEPFIIKAKSKRMLQLLANIKAANTHINEYEKEITAILKSHPDSKTFLSLPGADTTLAARILSELGDNRDRYKNYNDVQCEAGTAPVTKQSGKYRHVVFRRACKKLFRDAMQQFAFSSTRQCQWASSYYTSQRQRGKTHSQATRALANKWLKIIYTMWQSRQPYDEQLHIKMLKNHVMRQL

SEQ ID NO: 227866 - protein, 391 aa, unidentified
MDKAWIGLDVGKEFHWAHALDSSGAKLLCRRVENDEGSLSVLIDEALCVAEEIVWAIDQPGGGAALLLALLWERDQRVLYVPGLAVDRARDAYRGESKTDQRDARLIADQARMRGDFSELAPQEVDLAELQLLLARRRDLVTDQTRAVTRLREALLALFPALERTLDLGAKGPLVLLSRYQSPARIRRVGYKRIAAYLKGRSVKGADGLARKALAAAKSQSVELPAQEVASRICAEIAAEILALKERLRALDEEIASRFFVRPEARILSSLPGMGPILGSEFLVAAGDLSVFESADQLAAYAGLVPATRDSGKRVGNNRRMRGGNKVLKRVFFLSAFSSLRSTPHSRAFYDRKRREGKRHTQALIALARRRVNVLWAMLRDETTFEPPLRA

SEQ ID NO: 227867 - protein, 345 aa, unidentified
MKHPLYFIGVDISSERFTVCASTKPGVPLQAPEDYDNDIDGFKSLEVWFESFKMKPADLLICMEATGVYGEQLCHYLYEHGYRVTIESPLKVKRAFKIDGHKTDAVDSRQIAEYAIRFYDSLNTWEPREAIVEKVKVMLTTRELLVRHRTAEKNAKTALKRKKVVPISAILVLEKGIESLTDNILTLEKNMCNLITSHPQIRQIVDILKTVPGVQELLAANILVLTNGFKQEKTGKQLASYLRLAPLRYESGKSVYRKPKSPKHGPAIPRKLLHLAARSITTHNPRFRKYYLQKETEGKDKYLIYNNVANKLLKMMCAMIRDQKPYSDDYISINPKYLNYGLQRS

SEQ ID NO: 227868 - protein, 401 aa, unidentified
MNAVGIDVSKGKSMVCVMRPFGEVVLEPFEVLHTAQNLHDLAEKLKALDGETRVVLEATGNYHKPVAFVLHDAGLFVSVVNPVLIHDYDNNSLRRVKTDKKDAVKIANYTLDKWTRLRQYLPEDDTRLALKNSYRQYQQAVAIRTMLKNNLISSLDLTFPDANKLFSSPVKNNGCEKWVDFIGDFWHSECVSSLSANAFAKKYLKWCQKHGYVFTRSKSDEIYACAVNSASLPKSPTSKLLIQQQVAQLKAVSQSVAAFRQEMLRLSQQLPEFDTVMEMYGVGPSLGPQLMAEIGDVRRFSSKKSLIAFAGIEPQPNDSGKVVGNDKGISKVGSAVLRRTLFLIMTVILQTQPQDEPVFQFMNKKRSEGKPYKVYMMASANKFLRIYYAKVKAVMDSERSQ

SEQ ID NO: 227869 - protein, 320 aa, unidentified
MSGKKKTASIGIDVSKKLLEVAVFNSDRHFRCPNDPKKFPELIAELLVLRPKRIVLEATGGLEKPIVRALGALGLPVVLVNPRQVRDFAKAMGLLAKTDRLDAKVLAHFAATIAPPLRPLKTVDDEELDALMGRRNQLSDILIAEKNRRSSAATESARADIEAHIDWLEERLKALDKTLKDQVKRSVAWQQKDKILQSVKGIGFVVSLSLLADCPELGQLNRHQIAKLAGVAPLNRDSGKQRGTRHIFAGRAQVRSKLYMATLTAIRCNPVIKPFYQRLIAKNKLKKVALVACMRKLLTIINVMVRDNKPWNVAADPIAA

SEQ ID NO: 227870 - protein, 338 aa, unidentified
MAILNVGIDLAKNVFALHGVNERGQVDLRRPSVPRAKLHALVAALPPCTIGMEACSGAHHWARLFAQHGHTVKLMAPKFVAPYRMSGKRGKTDAADAAAICEAVQRPNMRFVPVKTAEQQSRLMVHRARQGYVEARTALFNRIRGLLAEFGVVLPQKAEVVRREAARHMDTLPGYGKTVIEDLLAEVRHLDERVAQYDVHVRAMARDSASAQQLMQIVGIGEVTATAIVATVGNAREFSSSRQFAAWLGLVPGQYSSGGTTRLGRITKAGDAYLRGLLVMGARAVLNAAGNKTDSISRWATNIALRRGYWRAVVAVAAKNARLAWAALTKGESFTLPA

SEQ ID NO: 227871 - protein, 353 aa, unidentified
MLTIGVDAHKETHVAVAVDAAGQECGQWAGPNSAEGWAAIRAWAQGLGTERRWGIEGAWNYGRGLAQSLVTAGELVHEVNARWTAKERRRARNRSKTDQRDAQAIALYVWREGKMLPPVASEDDSAVLEVLVSQRDAAVAEATRLRNQAHHLLLQCDPSYRKHVPALTTEEGIAALEQYQAPETSVLAQTRAAAVRMLGQRLRLAVAQAEDLKTQIEARARAGFAPLIQLKGINALTAGMLAAILGPGRRFRSDADLALYAGVAPLEVSSAGRVRHRLNRGGHRQLNAIVHRIALTQLRAWPDAKAYVARRMSEGKTKREAIRALKRYLIRAIWRLWQECVPPSQSTPIAVVA

SEQ ID NO: 227872 - protein, 455 aa, unidentified
MAKVRRKIGITNDREFKVVNFNAAGVDVSPKELQVCVPSDRDEKCNRTFGVYTKDLHAISSWLRKCGIDTVVMESTGVYWLPLFRVLKADGFEVMLVNPKDAKNYAGKKTDEADAHWLMVLHTYGLLKPCFQPENITRQIRTLSRHRDNLIRSSSREVLHLQKEMEQMNLKIDNAFSDILGKSGQAIIKAILEGERNPEKLAALADRRCKKSKEEIMHSLEATWDEDHLFVMRQCQDLYEYYKKQIAEVEAEIDRLVSQYTAQVDTEKAGKMDRSKKQKQLHNEVSFDIEQHAFGLWGVNVMRMPAMSKNSLLRLVAELGADFTEKFPDARHFQSWANLVPDNKISGGQLLSSRVPKRKNPVGQVFRQCANALCRSKEPLGDRFRQIKSRSGHKQAMVAVGKTLAGIFYTMVKEKKEYDATIYSKHRKQVLDRSIERLQAKILRLQNESAVCTLH

SEQ ID NO: 227873 - protein, 428 aa, unidentified
MSRQDCSKQAEKRQRIKRTTLVVGVDIGSEFNAVALMSKEGEVFGEYPKVYNSRQGFEYFVRIIEEAKKRKGLKEVLIGMEPTGHYWRKIAYFAKERGYQVKFVRTTALKHQRELDESSSAKSDIKDALTIANITREGKYIDTVIEGGIFSQLRTLAKVREKTLRYSVSTQNTLGAVLDDYFPELKKIFSSMKTRSLWAILQSCPFPQDVLRFELSTIREIISKSSYRKASAAKKARDLYGAAQESIGLKEVSEAARYRLKRCLEEVMRSEILLKEVGIQMKSLLKQIPCSEYLLSIPGVGPVSAAVFLGELGNPVHFSHPKQIIKYAGYDPQERDSGNRMGRKRISKKGRWLLRKILFFMTMKVVQECKFFRDYYQRKLENENRFGQLLKKKEALCAVTIKLIKVMFALLRDKRGYQEEAPALSLAA

SEQ ID NO: 227874 - protein, 367 aa, unidentified
MEGGSALEMDVSSQQPPMTAGLDLGDRYSYLCLLDQHSGEVIEEGRLRTSPEALRRRFASERPMRIAIETGTHSPWVSRLLEEYGHEVLVANSRKLRLIYSNKRKTDEVDAENLARLARVDPKLLYPLKHRGEESQAHMAIIRSREALVSCPTQLVNHVRGAVKSFGARLPKCPARSFHKRAKEHIPEALRPALGPVLEQIASLTERIRGYDRKLETVRQERYPETELLRQVEGIGALTALTFVLTLEDPHRFEKSRSVGAYLGLVPATDRSGERDPQRRISKEGDEMLRKLLVSSAHYILGPFGSDSDLRRHGEKIASRGAKNAKKRAVVAVARKLAVLLHSLWVSGEVYEPLRNARRSEGREEAA

SEQ ID NO: 227875 - protein, 478 aa, unidentified
MEQEDGQRRPRRLVGIDLGIASRHSVRVLEADGQAVCRSSCVPTVESLAGVERAALAGAPVGTRLAVVFEPTGPAWMPIAVFFAGRGHAVFRVSSARAADLRKFLHRHAKSNGIDAETLARMPIADPDGLQQLELPGPAAAALDRRVRACERLTRAASEHKVRIKDLVRQLMPMTPLTGDLGKADLAVLERHADPRALLAFSEAELTRLITTASNKQQGTGRARQWRDAAAAAVELYGDHPAVPYEELAAEVGTEVRLLRAIQDELAAHAAAREQYYRQVDPAQLARSLPGFAEISAPVLVAVMGRPGRFRDGTRFKSYAGLAPRASETGDTDRKGQPMSKAGPSLLRATLFRAADTARHQDPQLARIYYLQMTERGATHLKACCVVAGHLAERAWTVLHRGTPYVICDTNGSPVTAAEAKKIIAEKWTVPEDVRKRRRSRKTAGKAPQAAATGPHRRGDPPRPRSSRPRHQAVKPAT

SEQ ID NO: 227876 - protein, 402 aa, unidentified
MEKSKKYLRFCGIDMAKQKHVACIIDRNGQYLLRPKSFRNDIAGYQQILNCLKQSGRAKSILAGMEATGHYWYSLHDFLTRQGYTVAVLNPIQTAQQAKQAIRKCKTDKYDAFHIANLLRTGQYKTAVVPGELAMTCRQLTRLRYRIVKQAAMTKQLVNSRLHPVWPEYEGLFSNKFGTTSMKLLQKAPTPKELVEFDYDDLCELIRKASRGRFGPAQIQRILHTAKSSVGMQRGHYGISTGIKLLLEQIKALEPVRKKLDAEIAKLSAKLPQYLFTLPGSTELTVVSLYGEVDPVEAFKKPSQLVAFAGLDPKVFQTGQYDAPRRQVSKRGSPYLRRTLWQMAYRAVCNEGDLRDFWRRKHRQNKHHLVAVTAAANKLCHIVWRIMTDRRDYIPKSYNPKS

SEQ ID NO: 227877 - protein, 361 aa, unidentified
MAQVRSWVGLDVHARKVVAAVVDRETGELAVRRLSGETAEVVGFCAGLPGPVRVAYEAGPTGFALARALELAGVACVIAAPGKIERPAQDRVKTDRRDAERLVRLLMVGGLHAVRVPSVEEEALRDLVRAREDVRGDLMRARHRLSKLLLRHDVRFDGTAGAWTTRHRDWLGRVVLAGPAQLTLLDYLGAIDALIVRRDTLEAHIERLVPVSPWAQPVARLRCLRGIDTLSAVGLCAEIGDWHRFAHAARVMSYLGLVVSEDSTGERRRQGQITKTGSRHARRLLVEAAWHYRRPPRRGKTLAARQAGQDAHVLALSWKAQQRLHQRWQRLDTERGKRRTIVAVAVARELAGFCWAIATAD

SEQ ID NO: 227878 - protein, 338 aa, unidentified
MKKYIGIDLHSNNSVVVVTDEEDRILYQKRLANNLNEILTALAPHRDETVGVVVESTYNWYWLIDGLMDAGYQAHLAHPSAMKKYEGLKYSGDFADAAYLAQMLRLGLLPEGYIFPRELRATRDLARKRMQLVRCCTMQILSIENTLARETGGRMDKRQIKRMTTEGIEALGLKSDVTLAMESNRVVCQALQQQIAALEKRLEAQVKLQPGYQLVKTIPGIGQILATTIMLETGTISRFADVGNFSSYCRCVDSLHESNGKKKGSGNTKNGNKYLAWAFLEAANFALRFCPEAKRFYERKKNRTNRVVALKSVAHKLARACYYILRDQKPFEVTRCFV

SEQ ID NO: 227879 - protein, 313 aa, unidentified
MICGVDVSSQFLDVRVGRDGVSAHFDNDAEGIVQLAEFCQLHQVHLVVMEATGGYEQLVFGLLWARGIEVAIVNARSVRKFAQAMNILEKTDQIDSGVIAWYAETKKVVAMRPASVEQQRLKALVTRLRQLTETRAVQRNQLVTETEVLGYFHQLMVFLNQQIKTLEKTIAGLIGSDPIWQKLDQTFRSIKGVADRTVARLMAELPEIGTLSNKKISKLAGLAPLADDSGKSKGKRKIYGGRHGVRDILYVVATCVSRYNADFSAFQARLTQAGKPKKVIRIALAHKLLVRLNAKARDVRQLHQPAAAAISAP

SEQ ID NO: 227880 - protein, 355 aa, unidentified
MNSVRYIGMDVHRDTISVAVLDEHGRLMMQSVLATRAAAILDFIHGVRGTLHVTCEEGTHSAWLYDLLVRRVAKLVVCNPRKNALLKSGSKSDAIDARKLAELLRADMLSAVYHGETSALEVQHVARSYTMLTEDTTRVMGRLKAVFRGQAVACAGKKLYGKRHREDYLGQLGTGGLRRRAECLYQELDALQQLRREARRGLLVECRKHAAAEWLQSVPFLGPIRAGLLIGRVQTPHRFRTKRQFWTYCGLALETRDSGEYRVVNGQVERKRKAALIRGLNWNHNHEMKNLFKAAATTASMREGVLREFYLGLLAKGMRPEMARLTLARKIAAITLKIWKKGEAFDAEHLKLQAA

SEQ ID NO: 227881 - protein, 400 aa, unidentified
MRTVFGIDVSKASSEVAILVNGEKIHGYTMLNDAIGFNHLLNDLKTVHNPEIIFEATGVYSRRLRAFLEEYGYAYTQLNPLEAKKQLDSLRVRKTDKIDAEKLAHSQFILNRKPTYAQEEVYQHLRDLSRFYQNLTEDIVRAKNRLHKVLQVTFPELENLLSTPTGEQYWNLVMAFPCKEFVLNLSQNELCEIIRQSTSKRISEKRIAYLTDKLIKLAKQSFCAIKKISPMLEEVRYYAQELLRLSEHRQVVLDDMVALAQPLPEYDILRSIPGIAEITATSIIGELGDIRRFQSTNQINAFIGIDLRHYESGNFLAKEHITKRGNPYARKILFKCIHNIASASHTNPCHIADFYEKRKRQSTIASTKPHAIASIHRLIRTMYYLITHNKLYDYSLTQNR

SEQ ID NO: 227882 - protein, 392 aa, unidentified
MVCVGIDVAKDKHDCFILSSEGKVLADVFTIANNREGFETLLQRIRSCACPTDNIKVGLEATGHYSYNILGFLLEKGLATFLINPLHTNLYRKSLSLRQTKTDRIDARTIASILMSDVDLKSYTDTAYHNEELKSLTRYRFDKVKERAQLKQSISRLVNILFPELETLVPTLHMASVYAMLSEFPGAKQVASAHLTHFKAILLDASKGRYDRDKAVELREAARHSIGSAMPAKSLELQHTIRLICELDKEIDEIETAIKAIIDEMAPPILTIPGISYRMGAMILAEIGDFSRFDSPDKLLAYAGLSPSTYESGKLKATGAYAHMEKRGSRYLRYALFNAAKYVCHWEPSFAAYLAKKRAEGKHYNVAISHAAKKLVRLIFALQTSSKAFQPA

SEQ ID NO: 227883 - protein, 391 aa, unidentified
MIYIGIDVAKDKHDCFITNSDSEVLFKPFTISNNLDGFNDLYQKIESVMDDVTKVKVGLEATGHYSYNLLGYLIDKGLPTYVINPLHTNLYRKSLSLRQTKTDKVDARTIASMLMSDVNLKSYSDTSYHNEELKSLTRYRFDKVKERAKLKTSVSRLVCILFPELEKLVPTLHMASVYALLSEFPSAKHVATAHLTRLTNLLSESSKGRYGKDTAVTFRDSARASIGSNMPAKSLELKHTIKLIQELDSEIDEIENEIKIIMDEINSPILSIPGINYRMGAMIIAEIGDFNRFDSPDKILAYAGFSPSTYQSGQLDGAYAHMEKRGSRYLRYALYNATKYVCRWDPTFAAYLAKKRAEGKHYNVAISHAVKKLVRVIYHLEKTKQQYIKAA

SEQ ID NO: 227884 - protein, 366 aa, unidentified
MEKKVAYVGIDYHLNSLSIAVVIDGQKKLYDTIRLKNVDKIISKYMKKLSRDFQIRACYEASTNGYAFQRKMTQWGYSCDVIAPSLIPKKAGNRRKNDFRDARDLAQNFAAGMLSIVHPPSEDEEAVRSLVRCRTSFKADAKRIKFKINSLLLSQDLRWPRSKWTFAHKKWLSEIQLSNPYLQEVLDEHLGHLHYMETRLKHLESQIEEIARSQIYSASVKKLRAFKGIGTLAAMILISEITDFRRFATPRALMAFLGLIPSENSSGDKQRGGSITKAGNRRCRTQLIESMQHYVKSAHISLQMRCDLSQVDAVTANRAIKCLKRLHKRYWALTMKGKNRPVAITAIAREFVGFIWAVMQPEPLPA

SEQ ID NO: 227885 - protein, 416 aa, unidentified
MSFALSEALFFTGIDWAAETHAICVMDAGGKIAAEFTIEHSADGIAAVIRRLARYGDPGDMPVAIERPDGRLVDLLLEAGHPVVPVKPNAIKTWRDGEVLSGAKSDAGDAAVIAEYLRLRAHRLRVVAPYSDETRALRTVVRSRGDLVDMRVAATNQLSALLDAHWPGARAIFADVESPISLEFLTRYPTPAAAAHLGEKRMAAFCVKHGYCGRRTAAELLTRLRSAPAGTSREALTEALRDAVLAAVGVLTALNASVKNLDRSVAAHLGEHPDGAIFTSLPRSGQVNAAQVLAEWGDARQAYEHPDSVAALAGCTPVTRASGKHRAVHFRWACNKRFRVAVTTFADNSRHASPWAAKIYNDARASGKDHPHATRILARAWIRVIYRCWIDGVPYDPAIHGAAAALASQATEQIAA

SEQ ID NO: 227886 - protein, 418 aa, unidentified
MHPAHFILKEVLIWQKVPLASLDWIFTKSTSLRWGSTPSASEVVFGPQRVSNYQLDDWVERHLTPQDAVVLEMTTNTYLFYDTLLPHVHSVIAVHPPNVPLVTNVQVKTDKKAALALAQLHAAGMLTGVWIPPHPVRDRRSLIARREKMVQLSTVAKNRMHAMLHRKHLVLSDTSQPFSPERREWWESLPLSATEQFLVRSDLDTLEFARKQLEQVEECLKQESAQDKRIPLLVQLPGVAMLTAITILAAIGDIGRFPTAKELVGYAGLGTRVHDSGMTHTSGRITKAGRRDLRRAMVNAANHAVEHHVHWKKEFERLKPHLGRSKAIVAIARKLLVAVWHVLNEEGADRFADPRDVACSFLRHAYQVGVNNLPDGQSALAFTRDQLDRLGIGKDLKEIPWGSTRRKLPLSKLLAEKE

SEQ ID NO: 227887 - protein, 387 aa, unidentified
MSQVDDLSRSLAAFDQNTTLTVVVELSEASWLVAGLVPAVDRQPLKKQEPDPRALLRLLERWRAEATKTGRMIERIVLAFEAGRDGFWLARWLRARGIEVYVIHSTSVAVSREHRRAKTDRLDTGMLMRVFLGWLRGERGHCRMVAIPTLEEEDAKRPSRERESLVGERTRIINRMKSALARLGIRGFKPALRKAPQRLEALRTPEDRPIPPNMLDEVRRDMIRLAVVREQIDAIERARLVRLEQAPARGSHPMVRLLARVIGVGIETADMLVQEVLSRKLRDRRAVARSVGLTGSPDESGKRRREKGLAKAGNARVRRGLIQLAWRFLRFQKDSALAQWYRARTEGPKGVRKTTRIVALARKLLIALWRLVMTGEIPVGVVLRAAA

SEQ ID NO: 227888 - protein, 393 aa, unidentified
MRFAGIDIASETHVLAVVAADGGVALKATPFTEDDLGYQKVLTLLGTPGEVLIAMEATGHYWKNLFVVLAAAGHRVALLNPLRTHRFAGVDLERTKTDAIDALGIARFAAQKHPAATPLPDALTEELRELVHLRARLLQDFGDRVRQLHRLVDLGFPEFTRYVRTLDSELASAILRDYPTAAAFRGVSVRRLAALRYDGRHHVGLDLARLLIDAARRSVGQHHSATYRLQIRYACDDLDTLRHRLRDLDRDLDGKLREHEVGRLLTTIDGIGTHTAARVIAALGDPAHFRSGSALAAYVGTIPTLKQSGKRQSVRGAVTPIGNAQLRAALWMPTLCAVRNNPWLRAYYQRLRARGKLPKVALVACMHKLLLAIYSVAKHRRPFVPHIAIESAP

SEQ ID NO: 227889 - protein, 333 aa, unidentified
MPEVVVGLDLHLKRTQGTVMTADGKIVKQERFPTTRRDLAEFLHGLPEGTEVALEAQGFCWPWIDLIEELGYRPLLVNPVKAKQRAEDVKTDRVDSEVLAHLTRMNWLPTVYVPGRELRQLRNLVHHRIFLQRLSTVLKNRTWSEFRKRGIEFSAGLSSQRGREIARLTGVQEICQNVEILDFIEAQRKRIDAVLMERYGRLKPVRLLQTIPGIGFVTALGMYAEICDIRRFPSPDRLAHYAGLVPRVMQSGEGTRFGREAKGNRWLKWLFIEAAWSHVNWCREGWLANVFRDACRRKRDSKKAIKIVARKLVNVVWAVLTHEEEFKVIPDKA

SEQ ID NO: 227890 - protein, 385 aa, unidentified
MPMPNDLSRSFTAFEQDSTLIAVIEMSLTSWLIAGILPGIERHPLKKLNVDEEGLLQLLHRWREEAINAGREISRIVLAFEAGRDGFWLARWLRARNIEAYVIHPNSVAVSREHRRAKTDRLDTELLKRAFLGWLRGESDHCSMAAIPTLEEEDARRPNRERENLLGERTRIVNRMKACLVRFGVRNFKPTLRKAPERLKTLRTPEGGPLPPNSFAELRRDMARLRFVMDQIREIEEARLQRLEHSPNEGLHPMVRLLARVIGVGIETADMLVHEILSRNLRDQRAVARYAGLTGSADESGKRRREKGLARAGNARVRRGMIQLAWRFLMFQKESALVQWYRSVTNEVRGARKIMIVALARKLLIALWRLVRTGEVPQGVALRTA

SEQ ID NO: 227891 - protein, 428 aa, unidentified
MNCNTQNAKIASITEKTLIVGIDVGSETHYARAFDWRNYEYTRKPLEFSNTEAGFLMFKAWIEEIAEKYGKDVVIPGMEPTGHYWFALGKFLQDNGMKPVHVNPHHVKKSKELDDNNPNKNDRKDPKTIAALVNEGRFSYPYIPTGIYAEIRSLSNLRFQTQEELTRIKNRIARWFSIYFPEYKDVYGDLKAVSGRMVLKAAPLPEDIRKLGAEGVNQIWRDAKLRGAGMKRAKTLVSAAEHSIGSKEAPEAARIELRNLLNDMDVYVARLEELLHSIEEKLKEIPYVDKLMGIKGIGLVTVSGFIAEVGDIGRFDNPKQLQKLAGYAIVSNDSGKHNGESRISYRGRKRLRYVLYEGAISLIGKNREFKEIHEYYRTREKNPLKRMQSVIAVACKIIRVFYTILTKGVDYDGNKLLGDIRRPQMQAA

SEQ ID NO: 227892 - protein, 389 aa, unidentified
MTESSDYESVQVFIGVDVGKDTHHAVAINRSGKRLFDKALPNDENKLRSLISDLKQHGQILLVVDQPATIGALPVAVARSEGVLVGYLPGLAMRRIADLHAGEAKTDARDAAIIAEAARTLADEQIAELSMLCGFDDDLAAQTTQASNRIRGLLTQIHPALERVLGPRLDHPAVLDLLQRYPSPEKLASLGEKKLAAQLCKLAPRLGKRLAADIAQALAEQTVVVPGTNAAAVVLPRLALQLITLRKQRDEVALAVEQRVLAHPLYPVLTSMPGVGVRTAARLLTEVACRAFASVAHLAAYAGLAPVTRRSGSSIRGEHPSRRGNKALKRALFLSAFAALRDPLSRAYYTRKMSQGKRHNQALIALARRRCDVLFAMMRDGTFYTPQAS

SEQ ID NO: 227893 - protein, 337 aa, unidentified
MLRYKVMEKNVFIGIDVSKSKLDVTFILKGHIENARHFQVSNNTKGFQTLIQRIRNISTEQSSWLFCFENTGIYSISLACFLSDKAIDFCHESALRIKRSLGIKRGKNDKLDSREIAEYVYVQREKIKLTTMAQQELQELKLLISYRERLLRQKNALLVAAKEGYECFENDTTKFILDDSKEIIAQYEGKLKNVEREMKKLIEKDEELNNNFKLATSVIGISLIVGSYMLVQTNNFTQFNQRQYACHAGIAPYENSSGTDIPQQKRTSKMADKRIKALLTNAALNARMHDPQIKLYYNRKINEGKNKFCVLNAVRFKLVSRVFATVKRGTPYIKMAH

SEQ ID NO: 227894 - protein, 336 aa, unidentified
MFQLGIDVSKNTLDLCLLREGVKGRVKTRRLKNDVNAASSVITWLGKQQCAPADVHIIMEATGVYHEPLAYGLYKAGAKVSLANPHRSREFARGMDILTKNDQIDAYMLACYGALKEPEPWVPPPESIRYLSALLRRRDALVTDRSREKNRLEKCRATDIPPVIAESIENVLRNLSAEIERLDELLLTHLNQHPELKKDFDLLTSIKSVGFQLGLNMLVILRGHRFDTAGQLAAFLGVVPVEKSSGTSIRGKPKLSKNGPPEIRAKLYLASMCGLRFNPVMKAMYERLCLSGKAKMCAIGALMRKLVHLCYGVLKTQKPFDAEHLSSDAPSACKAA

SEQ ID NO: 227895 - protein, 386 aa, unidentified
MAASVTSRIEQDTLAQPTLSLAFELGQDTWKLGFTIGVAQQPRERTIPAGDIVRVQQEIAPAKQRFGLPADARVVSCYEAGRDGFWLHRCLVAHGVQNYVIDSASIEVNRRQRRAKTDRLDVRKLLTMLLRHLAGERKVWSVVRVPSVEEEDRRQLHRELTTAKQDRTRIINRIKGLLAGHGVQLVLQGDVETQLDQVHQWDGEPLPSALRTRLKRAWQQVGFLTTQMQTLEAERRALLRRRDDPVIAQVRQLFTLRGIGVNSAWLYVMEFFAWRDFQTPKQVGALAGLTPTPYQSGQARRELGIAKAGNRHIRAMAIEIAWAWRRFQPASALAQWYERRFGAGSARLRKLGIVALARKLLIALWRFVKTGVLPEGAALKTETPSR

SEQ ID NO: 227896 - protein, 448 aa, unidentified
MEEEPAVFVGVDWASEEHDACAIDVNGKVLGERRFKHGGTGLAELAGWLAKIGAGESRVAVAIEVPRGPIVETLLERGFRVFSINPKQMDRFRDRFTVAGAKDDRFDARVLADSLRTDRPCFRPLRIDDPLVIELREWSRMADDLQQERTRLSNRVREQLWRYFPQMLDLTDDVSVDWFLDLWMVVQTPARAKQLKTKVVERVLQQHRVRRVDATTVLTKLKERPLVVAPGTIEAAAAHVALAAQRLKLVNAQLRTTHKQLEQLCERMADEGQKGEQRDVAILQSLPGVGRIVLATLLAEASEPLRNRDYHALRTLCGAAPVTRRSGKSHVVSMRQACAGRLRSAVYHWARVASQHDLKTGDQYASLRARGHSHGRALRSIADRLLELACAMLRNGTTYDPSRRRALQPLQKSAPSTRNLPRKNGQSKPIPTPFARQGSGQPRVTARG

SEQ ID NO: 227897 - protein, 403 aa, unidentified
MNAVGIDVSKGKSMVAIMRPFGEIVSTPFEIKHTSSDINSLVKLIKSIEGESRIVMEHTGRYYEVLAHQLSEANLFVSAINPKLIKDFDNDSLRKVKTDKADSVKIARYALDKWQNLKQYSVMDELRNQLKTMNRQFGFYMKHKTAMKNNLIGILDQTYPGVNTYFDSPARSDGSQKWVDFASTYWHVDCVRKMSLNAFIDHYQNWCKRKKYNFSKSKSEEIYGKAKELVPVLPKDDITKLIIKQAVDQLNSASITVESLRTLMNETASKLPEYPVVMAMKGVGTSLGPQLMAEIGDVSRFTHKGAITAFAGVDPGVNESGSYEQKSVPTSKRGSSDLRKTLFQVMDVLIKTHPQDDPVYQFLDKKRAQKKPYYVYMTAGANKFLRIYYGRVKEYLSVLPDPS

SEQ ID NO: 227898 - protein, 489 aa, unidentified
MCPVFSVVRGLANLSLVKHVLSRSEESRIRQLPFPALPITISEVGMMKRKRLGEGSIKLPKHLQHINQCAAGIDIGSRSHFVAVPEGTDEQPVREFSTFTGDLERLAEWLIGCGVTTVAMESTGVYWIPVFEILESHGLEVKLVNARHVKNVPGRKSDVLDCQWLQQLHTYGLLRGAFRPVEQVCTLRAYVRQRAMLVRSAASYIQRMQKALAQMNLQLHNVVTDITGVTGMRIIKAILSGERNPKVLAAMRDQRCKNSEATIARSLKGNYRPEHLFSLGQAVEFYEFYQSKIADCDRQILEQLKSFDAQDFPHDTPPSNVGEALLRMAGVDLTSIDGIDTNTALKIISEIGIDMSRWKSAKHFASWLGLSPGSKISGGKVLSSATKPVANKAAAALRMAAFTLFNSKSALGAYLRRLRSRVGAPKAITATAHKLARLVYTMLKHGTEYVDAGQEYYEQQYRSRVLQNLKRKAHDVGFELVSMQKTASA

SEQ ID NO: 227899 - protein, 421 aa, unidentified
MKPQVSEAFAAFVGLDWADAKHTICLQAAGTVQRECLSLAHSPEAVHTWVQTLRMRFNGQPVAVGLELNKGPIVSALRHYDCLVLFPVNPLTVAKYREAFTPSRAKDDPTDAELLVDILLKHRDKLAPLNPQSPAMRALAQLVEHRRRLVGDKVRLTNRLTSALKNYFPQVLQWFSEKDTAIFCDFLSRWPTLKTAQLARRTTLEGFFRTHHVRSPDLIATRIEAIKSARALTTDDGVITPNVLLVHALVAQLRVTLQGIADFDRVIVQRAQAHPDFPLFDALPGAGAVFAPRLLVAFGEQRERFTSAEELQKYAGIAPVTERSGKKAWVHWRLQCPKFLRQTFVEWAAESTRHSFWAQVYYQQQRDKGKAHQAAVRALAFKWIRILYRCWQERTPYDEAIYLQALKRRNAPLLHNLAKVS

SEQ ID NO: 227900 - protein, 341 aa, unidentified
MTDVITTIGLDLAKSVFQVHGANASGKAVLKKRLRRGQMRSFFAALPPCKIGMEACGSAHFWARELSGFGHEVKLIAPQFVKPFVKTNKNDSADAEAICEAMMRPTMRFAPVKSADQQSVLMLHRARQLLVRQKTQLLNALRGHCGEFGIIAPQGACRVGELIAIIQDDDDKRLPLVARQALGFLIGQLRSVKEQLALLGKQLKTWHKNNEASRRLETIPGIGVITATALVATVGDASQFKSGRELAAWLGLVPRQNSSGNKHRLGRISKRGDKYLRTLLVHGARTVLRWSKAKKETRSPQLEGLLKRRPTNVVQVAMANKTARVVWALLSREETYQPRVA

SEQ ID NO: 227901 - protein, 412 aa, unidentified
MNQDKLYVGIDVSSKNNVCYLMYADGSKHSSFSVPNNRNGAKLIVDRVISVLLSQDIPQVVIGMEATSVYGDNLMRFLRESGSLGRFERNLHMLNPKQVKKFRDAYSDLPKNDHVDSYVIADHLRFGRINKEVYMDDYKYQALKMYTRAHHQLVQELTREKQRLLNTVFISFSGLTQEKIFSDKFGATSMALIEEFSSLDELAYMSTDELVDYIRNKGKTHFENPEEIAEAVQRAAKNSYRPPQVIADAAKQMLAISMNTIRLLQKQIKEYDKAIEKMLEAFPQTLTSIKGIGNIYAAGIIAEIGDINRFPSQAGLAKYAGLVWTQHQSSDFEAEDKRMIQGGNHHLKYYLCEAANALRRCDPEFKHFYALKYKEANKHNHKRALALTARKLVRLVYTLLKTNRLYIPPEEY

SEQ ID NO: 227902 - protein, 315 aa, unidentified
MQVGKLIVGADVAKAELVIHHDDRDEIIKVKNTKPEIKKWLKQQPLNTAIAVEATNVYHLDLVELAHSLGFEVYVIDGFQLSNYRKSVGVRVKTDPSDARLLSRFLKNEGEDLRPWTPPPAVYGKLQSLLRRRAALVTARTAMTQSWANEALLKAAFTTFVKSIDRLDLLIQKKIKEVLREAGLHEQVARCQAVEGIGFLTATALVMAFMRGEFKSSDSYIAFLGMDLRVIDSGQKNGRRRLTKRGCSEIRRLLHNAAMSASRTATWKGIYEQHRNAGKATTQALVVLARKLARVAFALMKNQDEYVTKGGKAAC

SEQ ID NO: 227903 - protein, 393 aa, unidentified
MICVGIDVAKDKHDCFILNSEGEVLADVFTIPNNAEGFDRLLQTIRRCARPEDKMKVGLEATGHYSYNILGFLLNEGLPTYLINPLHTNLYRKSLSLRKTKTDRVDARTIAAMLMSDVDLKPYTDTAYHNEELKSLTRYRFDKVCERAKLKQSVSRLVTILFPELEKLVPTLHMASVYALLSEFPGAKQVAGAHLTHLKAVLYDASRGRYGRDMATTLREAARCSVGSVMPAKSLELQHTIRLIRELDAEIEDIETAIQSMMDEIQSPITTIPGIGVRMGAMILAEIGDFSRFDSPDKILAYAGMSPSTYQSGQLSLSGTYSHMEKRGSRYLRYALYNATKYVCLWNPTFAAYLAKKRAEGKHYNVALSHAAKKLVRLIYAIEKSQKPYCSAA

SEQ ID NO: 227904 - protein, 386 aa, unidentified
MVTPIRPRIEQETPPQSTLFLAFELGKNTWKLGFTIGVAQQPRERTIPAGALETLQQEIRRAKQRFGLPEDACVVSCYEAGRDGFWLHRHLVAHGIQNHVIDSASIEVNRRQRRAKTDRLDVRKLLTMLLRHSAGETKVWSVVRVPSVEEEDRRQLHRELTTAKQDRTRVINRIQGLLAGHGVQLTLQGDVDAQLDQGQQWDGSPLPSALRTRLKRAWQQVCFLTAHIQTLEAERRALLRRHEDPVIAQVRQLFTLRGIGVNSAWLYVMEFFAWRDFQTPKQVGALAGLTPTPYQSGQARREQGIAKAGNRHIRAMAIEIAWAWRRFQPASALAQWYERRFGHGSARLRKLGIVALARKLLIALWRFLKTGVLPEGAVLKAETPSR

SEQ ID NO: 227905 - protein, 355 aa, unidentified
MAHMKQINKLDFSGQDIYVGIDTGKKSWKVTILTKEYEHKTFNQNPNPEELVTYLHKNFPNANYLCAYEAGYFGFWICHLLNQMGVKCIVVHPADIPTKDKEKHNRNDSSDARKIARTLRSGELTPLYVPSLSEQQARSLVRMRLEMKRKETRCKNQIKAMLTFYGVNIPDEMANSHWAKRFILWLENLDSDNQALSALLMELSGLREILVKLTKQIRSLANQEPYIRPVKNLCSVPGISTLTAMVLLTELSDISRFSNSDHLASYVGLSPGEDSSGDKEKTTGLSRRRNGYLRSVLIESSWVAVRKDPALLMSFTELTKRMSKNEAIIRIAHKLLNRIRHVLMHNECYELGIVS

SEQ ID NO: 227906 - protein, 387 aa, unidentified
MPQLNDLSRSLVALDQDSTIIAVVELSQSSWLVAGVLPGIERQPQKKLEPSAERLLGLLHRWRDEAVRAGKKITRIALAFEAGRDGFWLARWLNARGVEAHVIHPSSVAVSREHRRAKTDRLDTELLKRGFLGWLRGERGHCSMARVPTIAEEDAKRPNRERECLVGERTRIVNRMKATLARLGVRNFKPTLRKAAERLATVHTPEGTPLPRNVLAELQRDMARLGFVVSQIREIEQARQKRLEQETETGSHAMVRQVARVIGIGIETADMLVHEVLSRPMRDRKAVARYAGLTGSPDESGARRREQGLARAGNARVRRGMIQLAWRFLRFQKQSALAQWYRARTADSRLGTRKTMIVALARKLLIALWRFVTTGETLEGVILRPAS

SEQ ID NO: 227907 - protein, 392 aa, unidentified
MVVSVGIDVSKDKHDCFIVSSDGDVLADVFTISNTLDGFHDLLQRIQDCATPQDKIKVGLEATGHYSYNLLGFLLDNGLTTYVLNPLRTNLYRKSLSLRKTKTDRVDARTIASMLLSDAGLKPYTNTAYHNEELKSLTRYRFDKVKERAKLKSSIARLVCILFPELEKLVPSLHIASVYALLEEFPGAKQVAAAHLTRLKALLVTASKGHYKRDMALEIRDAARNSIGSRMPAKSLELQHTIRLIRELNREIDEIEEQIQSIMDELHSPITTIPGLGFRMAAMILAEVGDFTRFDSPDKLLAYAGMSPSTYQSGQLKNCYPHMEKRGSRYLRYALYNAAKYVCHWAPAFADYLAKKRAEGKHYNIAISHAAKKLVRLIFAMEKSRQPYCSAA

SEQ ID NO: 227908 - protein, 401 aa, unidentified
MVSDFKKGRYNLMKIFVGIDIAKLNHFAAAISSDGEILLEPFKFTNDADGFQLLVSKLESFDKNSIIIGLESTAHYGDNLVRYLVAEFYQVCVLNPIKTCQMRKNNVRKTKTDKVDTFVIAKTLMMQDDLRFITFFDLDMMDLKALGRFRQKTIKQRTRLKIQLTTYVDQVFPEIQYFFKSGLHQHAVYALLKEAPSPNEIASMHMTHLANLLKVNSHGHFTKELAKELRVLAQKSVGANDSAISIQITQTIQQIELLDSQLEKTEAEMTDIMKFNDSVIMTIPGIGYINGGMILGEIGDIHRFSNPNKLLAFAGLDPSVYQSGNFQAKTTRMSKRGSRVLRYALVNAAWNVVRNNATFKAYYDAKRAEGRSHYNALGHCAGKLVRVIWKMLTDEVEFNLE

SEQ ID NO: 227909 - protein, 342 aa, unidentified
MEWTVAVGIDTHKDGHVAVALDRFGGQLDSFELPATSAGYLAFCQWAHELGEPAFVVEGVGSYGAGLARFLASAGCVVYECERPRRGERWRGKNDLIDALLAARRLLSGERLARPRGHGGRREDLRLLLLERRSAVRARTATLNQLQAIVVTAPDRLRARLGRGNGEQLSRKAARLRAAGGDEAVVRSVLRRLGRRVLNLDAELAQLDRELEAIVSALAPELLAECGVGPVCAAQLVVSSGDPARMVSEASFAALAGTSPVDASSGRQRRHRLNRGGDRQLNRALHMIALSRIRGHDETAAYYQRLLTSGKTSREARRCVKRMLARYFHRKLKALPALALTT

SEQ ID NO: 227910 - protein, 345 aa, unidentified
MPIVGGLDIHRKQITFDYLDTATGQVQRGQIVPADRVHLRAWLARFAGREDVAFAVEACTGWRYIAEELAGAGIAVHLAEPADTAFARGRKRHAKTDKTDSRHLRQLLAEARLPECWIPPGHILEARALLELYHDLRAEHTAWVQRIHAVLFHHGTPALGQGTLRTERGLAALRAAAAGCLSPAGQLQVATALEVLEALETRMHVVRHQLLAVARHLTGAKVLAARLYGVGPVTGLAMTCWLGGEGRFSSSRKAVRFAGLDVTVWSSDRKGPPGRLSRQGPPVLRWAVYEAGKTHARPSAPVHGYYATVKDREGGKRAALSEARKILRQACHILAELGDDALSAA

SEQ ID NO: 227911 - protein, 340 aa, unidentified
MTSYVGLDVSLAETSVCVLNSDGKVRYEGKAKSLPDDLVACIHQHAADAERVAIETGQTTALLFKAMKTAGIPVVCLETRHAHKVLSARRNKTDRNDARGLADLVRVGWYREAWVRGASAHAIRSLLLARRMLLVTRRTLENTLRGAVKRFGLIITKTAGGTFTRRAVAAMELDPAYAAFAQPILAVLETVAAQIRVYERQLQSVVRGNATIARLMTVPGIGYLSALAFYSTIEDPARFKRSDDVGPYLGLTPRTHQSGEVDWSGRITKTGDNMTRAYLFEAANVILTRVTKPTPLRAWGLRLKERSGMKKAQVAVARKLAVMMHAIWSDGTEFEWRAAA

SEQ ID NO: 227912 - protein, 429 aa, unidentified
MNKAEDTRLAEFRQLKKEIRGSEEYLIVGIDIAKDKHKAFFGTATGKTLLKRLVFENTSEGFKRLLTQTEALKVQQGLTKTVFGLEPTANYHKPLGEFLIKGGHQVVLVSAVAVNKNRELLDGRWDKHDTKDSANVADLISQAKCLYYDYPSAPLRDLRSLLSVKRRVKKQEHSAKVRIRNHLVAHYFPEFDRHFAKGCSEGLAIVKWCLHPSLIAGMRYDEFTTLVAPCIKTLGQEKRLKSIWELAKDSIGCDGGHAVGFEAKLMVEALEQIRDTLRAVDERIEKICLHFPEYRYLLSIPGFGPDVSSKVLGAIGNPFRFNTGKEVLKLTGYDLSAHRSGKASDSAVPVISKRGKASLRYALYQAAFVASTSNPHFIAYYTNTLRGREREKGIKTKMRVKLAAKMMIIAWTLMKKKQPFNPEYLNTDE

SEQ ID NO: 227913 - protein, 373 aa, unidentified
MYGLKHQKEKRSMDHFAGLDVSVKETSVCIVDDTGKIVREVKVASEPEALLQVLKNPTYRFKRIGLEAGPLSQWLYTALAEAGLPVICVETRHMRAVLKAQINKTDRNDARGMAQMMRVGLYRPVHVKTLRSQKLRMLLTHRKLLQSKAIAIDNDLRGTLRNFGLKVGMVGTARFEARVKELLKVGMVGTARFEARVKELIENLPDLAMLVEPLLIVRRVVREQLGILHRRLLAVVRDDDVCRRLMTVPGVGPVVALTYRATVDVPARFRKSKSVGAVFGLTCAKYQSGESERTGAISRCGDEMMRTMLYEAAQSMLFRSTKWSWLKAWAMKIARHRGMKKAIVALARRLAVIMHRIWIDGTEFRWTREAVTA

SEQ ID NO: 227914 - protein, 373 aa, unidentified
MDCTSTAAPAGSILHCALELSKNTWLLGIQFSDRPQPSLYPIRGGNTEDLMAKLTAARDRCAKLSGRTPSIVLCYEAGYDAFWLARFLKARGFECLVIDSASMQVNRRARRSKTDRIDVGKLLRGLIAWHRGDRQVWSVVRIPSVDEEDLRRSHRERDYLVHERTAHINRIKGLLFAQGIRGINVKRQYKTLHVDKLVTGDGHPIPPRLASEIVREIARLALLQEQIATLERERDEAPTPCTATEKKRAQLMFLNGIGPAISAVMTREVYYRQFDNRRQVAGFLGLAPSPYDSGEVERSQGISRAGKEWVTRKEKGSKRRRPLDNGPAHIIPIASAEPGAHSPRLRSLAVFERRPSVRGEASALGRHPKTVAA

SEQ ID NO: 227915 - protein, 355 aa, unidentified
MNVNVNHYIGFDVHKKSISYCVKLADGRIVEEGKLAARRVTLCQWASKRAEPWHGAMEATLFSGWIYDTLKPFAAKLEMGHPGRMKAIGASKKKNDKLDARTICDLIRANLLPACWVAPSEMRELRRILRYRNLVLEQAVRMKNKISGLLMESGVEYNKKRLHGEKYFHELLENLAAEVPESVKDLLKLSRGWLESFQATQQQLLVKLQKHPILMERLKRLKSIRSVGEVTALTWALEIGDPHRFSSIGDAVSYCGLTSALVESADKQKRGPISKQRNAHLQTVLIEAAKLAPRWNPRLAELHQAEIDNGRHRNRATLEVARKLVAYLLAVDKSGKDFAVRTPSGKSEGEVKPAA

SEQ ID NO: 227916 - protein, 341 aa, unidentified
MKHEMHVLGIDIAKRVFHAVGMDDRGNIVYRKRLSRHDLMPFIATLRPVLIGMEACGGAHYWARRFREHGHEVKLMAPQFVKPSIKSNKNDMRDAEGIGEAVTRPTMRFVPTKDVDQQDIQALHRVRERLIGARTALVNEIHGLLHEYGIVVPKGVAKFRQTVVGKLEADKAKLTPLSQEMFGKLIDEFAALERQLAYYQEKLATMATTHPECQRLMTIPGIGPLTATALVAAVSDASAFKNGRQFAAWLGLVPRQHSTGGKERLLGISKRGDSYLRKLLVHGARTTIRWVGRKMDRRSQWIRHLVERRGKNRTAVAVANKNARIVWALLTSHQNYQLATG

SEQ ID NO: 227917 - protein, 392 aa, unidentified
MGRVVIGMDPHKRSATIEVIDEHEQVLAQGRYGTDTDGYQTMLAAGRQFPDRVWAVEGCAGIGRHIAQRLVADGETVLDVPAKLSARVRVFDTGQGRKTDPVDAHSVAAAGLRSPGLRQIQIDDTTVALRLMVDRRAELGRARTEVVNRIHQMLLEILPGGAKRFLTRGQASYLLRTAPAPVGIVAQTRHQLAGELIDELTIIDAKIRAADKHLRQLVTATGSSLDELNGIGPSGAARLIGDIGNIARFRTAAHFASWNGTAPIEASSGDQRRHRLSRAGNRRINRVLHIMAVVQLRHDTPGRAYYRRRLAEGKTTMEALRALKRHLSDVVYKRMVQDAKRARPSGTGPGGQSGATLQSSADGPIPTAASSDKSQPGPATTKRKQSSPRPLD

SEQ ID NO: 227918 - protein, 404 aa, unidentified
MESPIVSIDVSNGNSHYMCFIKNNKRFGKVKKIDHDIEGFKRLLEDIQKLEAETNEKVCAVFEATGVYTKPLERFLSKNSIKTYIINPLESARKRKEEIHNKKTDKLDPISISKVYYDKEEMMELKKKDETHNWLRKKNRLYEDQLNHLRKYKVTFQNQLSICFPGYLDLFKDGYSDIPMTILKKYPHPDLLKNKKAETVARYLEKNTCHTHKVSLEYALKIIEFAKKTYPGCEKDDVEVEIFKILLDKVIETQRECEKTLNEMITVASTLEEYRYISSIDGIGPNLAARIIAEIGDIEEFKSREALVAYAGLDPHIYQSGDQDGKHLKISKKGNKYLRCLLFLAVGCSIRGAKDNPVNRFYQKKKQQSNPLNSKAAKTACTAKLLKIIYGICCLLYTSPSPRD

SEQ ID NO: 227919 - protein, 413 aa, unidentified
MKRIRERVAGLDVHRDTVTAAAWGLERETGEVVEVQERFSTTSAGVADLGRWLLDQGVSSVGMEATGDYWKPVYYGLEGMFAELSVYNAQHVKNVPGRKSDLSDAMWLADVVAHGMVRASFVPPEPIRELRDLSRYRKTQVDTRAKEIQRLEKVLQDACVKISSVASTVWSKSARRMIEALIAGERDPVVLAELALGKMRPKIRQLTEALAANWRPHHSLVATQIIAHIDHLDASIDALSVEIGRRCDPFGDLIERMCEIPGVSRTIAEIVIAETGADMTRFPTPQQLCAWAGVAPANHESAGKRRPAGTRKGQRWLRRALLEAAKSLSCSNNRFLAARYRRLARRRGPNTAAVAVAHCLLSILWHLMADPTVRYVDLGADFYQRRQDPKREAARLVNKLAALGYTATLHPAA

SEQ ID NO: 227920 - protein, 421 aa, unidentified
MNQLADTLFTAYVGIDWADAKHDICVRSPDGELVEFDCISSRPEAIADWALGLYQRFGGPIAVAVELTKGPIVTALMKYDFIVMFPVNPLMLARYREAFTPSRAKDDPTDAELAVDLITRHPQRFEPLQPQSVEMRKLMALVEHRYKVLCDQRRISNRLSHALKQYYPQVLEWFRQHNTVLFCDFVVQWPTLQQVKRARASRLERFFGAHNMRRKGVIERRLTAIKESTPLTEDTAVIDPYRLQVEVLIDQMRVTITALKRYDNDIDAITEQLPDYDLLFSPLPGAGHILAPRLLAALGEDRERYQRADELQMHSGIAPVTERSGKKTWVRWRWQCPTFMRQTFVEWAAQTINKSAWAGAYYRQQRAKGASYEVAVRALAFKWIRILYRCWKDRKPYDELKYLETLRRKGSPLLKYLADPA

SEQ ID NO: 227921 - protein, 387 aa, unidentified
MARKRTLSTLDTSIAYEAIGLDLAKEDVAIAAFGPDHEEPYLIDRMPYEKLYELLADMAPTLVAMEPCSGAHQIAEQIQELGHEVMMISGRHVQAWVKDHCNGQKTDLNDAFAILNLAFDRWLTPIRGKTREECRLLALQASYRQLQGQRTKTLVHVKATLHAWGFPIRTGSFNQKVLHELIDANRKDFGDEVAETLHLMINRVRDLDHDIATVLKLLTEATKRDPRASLLRSIPGFGILTTSRWCAVIGDIARFDSPKQTMAFVGLVPNNRITGHHTETSSGREARGQGRMSKRGDKMLRSLSIRGAASLCLMVRNDRLPDCPFVASIKERLASPRPWFKVLVYVAAKLVRIATALLKYGETFSYEKAGISKAVLKQWELEQAKAA

SEQ ID NO: 227922 - protein, 397 aa, unidentified
MDGSLALTGPARSTRCAWSTRTGRIAEGRRFRQDEAGLRALCARLVRLQVRLVALERPDGLLIERLLDASLPVVAVHPNQVKPSQPRYSVAGGKSDVFDSFVLAELARTDSHRFRVLVPDSDRTKALRAATRAREIGLANQLRDQLGCFWPGATKVFWPVDSAITLAFLRRYPSPIDARGLGEQRLAAFLTRHGYTGRKPARELLGRLRSGAEGRADVLEMAARRQIVLALVSALEPIVARISELTIEIRHAIEAHPDGLTFRSLVDQNSWLCAATMLAEIGDCRERYPNYRALAADAGQAPVAVESGKSKQAKFRWACDHRLRDAFDTLSDASRRHNPWATDIYDRARARGASNAHAARILGRASCKIIWRLWHDHDTYDPARHTARQRLISSRAA

SEQ ID NO: 227923 - protein, 338 aa, unidentified
MNIVFLGIDLAKNVFQLCGLNQAGKPVYTKRTGRKELLQTLANIPACLIGIEASTGAFYWQREFEKLGHKVKVISPQYVKPFVRGQKNDGNDAQAIAVALMQPTMQFVPPKSPEQQDIQALHRARQRIVNHRTATVCQIRGLLLDRGIPIGSAVSRARRAIPLILEDAENGLSSRMRRTIAELYDLFNDPERRIHFFDKEIETVFRQSEACQRIAKVKGIGPETATAVVAAIGKGTEFKNGRHFVAWLGLVPRQHSSGDRQVLMNMTKKGDKHLRTLFIHGARAVVRVATNNNDGHMNQWVNQLKERRGFNKTTVAVANKNARIIWSMLRNETGYQVV

SEQ ID NO: 227924 - protein, 416 aa, unidentified
MDRRRYNVCCGADIHKKFLIATILFLDGTKLTQRFSMGLKSLIEFRDWVIANGCEAVAVESTASYWVPIYRILEGHVELIVANAYKIKNVPGRKTDTIDSEWIAELCRNGQIKPSRIFPKDARDLRSLTRARERYVDDKTRVKNRIHHILDSNCIKLSSALSNIFGKAGRYILNCLLERIDIDEIIEGIPVTRIKKKGDQIREAISGQLSESDIILIRGYLEQIDAIQKNIEELESEIRKRIAPLRKDMAIVMSVPGIGFISAAVILAEIGNYNDFDKAEKLAAWCGLVPSVYNSADKNYTGSITKQGSRHIRRILVEVAHVIARTKGRSKLKSFFLRIQAKKGTNIAAVALARKVLCIVHHLLTMQEMYQEEERNMDAEVEDLRILSLSGSLDHMIRYLTKAGYEVRKRTPGAGG

SEQ ID NO: 227925 - protein, 402 aa, unidentified
MKTSEQYLRFCGIDMAKDKHVACIVDRDGRYLLKPRSIRNNAEGFGQILNCLKQTGEAESVLTGMEATGHYWYSLHDFLTRNGYYVAVLNPIQTALQAKQAIRKCKTDKHDAFHIASLLRTNLYKPAFVPDELAMTCRQLTRTRYQIVKKISMTKQLTHSKLHPVWPEYEALFWSIFSATSMELLKKAPTPKEFMGLGLDNLSEIIRKTSRGKLGSVQAQRIMQSAENSVGMKRGHYGISTVIKFLIEQIEALTAVRKKLDDKIEELAAQLPQYLFTLPGASDLSIVSLYGEINPVEAFKNPSQLTAFAGLDPKVFQTGQYDAPRRHISKRGSPYLRKTIWQMAYRATCQEGDLRDFWCRKRSQNKHQLVAVTAAANKLCHIIWRIMTDRRDYIQKDYNKKS

SEQ ID NO: 227926 - protein, 350 aa, unidentified
MWIIGCDYHPRFQQIAFVNTEGGECGNHPLEHKQEAERFYRSLQGQAVRVGMEASGQARWFERLLAELGHELWIGDPAQIRATDPRKQKNNARDAANILRLLQDGGFERLRIRVPTAEERDVRQLVLHRHRLVEMRTRVKNQLRAIALNEGLGPRPGLWSRKGQEQFRALPLPPWTAQRRQDNLELLSNLLERTTPLDIAVEQQARQRPEVVRLMTHPGVGPITALAFVLTIGEPTRFESSKKLGSYLGLIPGEYSSGNKQRLGHISKQGNALLRGLLVEAAHSAARQDPELRRCYCRLGMKKNRSIAAVAVARKLAIRLWWMWKCELTYAQLRASGSHAGSARITTGVQ

SEQ ID NO: 227927 - protein, 417 aa, unidentified
MFKIFRKICCGLDVHKTWIYACIGITDPNGRTEYKQARFSSFSKGLRELAEWLAKYHCTEVCMESAGKYWIPVFNILEKTCFVTLAHPKYTKPQKGNKTDRKDAKWICDLFMCDMIKPSFIPSPEIRHLRDLMRYRFKLTNMITGEKNRAQNCLTVSNLKLDDVFSDVFGKSARSITNYILDHPGETFDVAPFVDKRCKTPMEEIQAAVDGAISQEQAVKLRQCLSHIDELEAHKRAIEQEIFRIADPFSAVLDLLHTLPGLDKNPMTAIAILSEIGPDMSVFPSSKHLVSWAGCCPRNDQSNGKMKSTRISRAGSYLKPLLVQIANALIKSKKHPEFKERYHRIKSHRGHKKAIIAVCKMLLTAIWNMLSKLEPYNPDGFLEHRPVNESKVLTKAQAFELLRKRGYTITDDAAVTA

SEQ ID NO: 227928 - protein, 393 aa, unidentified
MNKISYFCGVDVAKDSFVASIKNGRFLAKEKTFTMDRVGLKNFEQTIKRFKEDITVGMEPTGIYHNNLLNFLKARDYNSMVVNPYMLHQFFKFTNSKPTKTDKKDSRTIAEFLEFKKDKVGKNPGVMDERYSMRYFVREKERITQTIAKTKTEIKRMLSLVFPEAEAVSGVFNKEFLGILLEVGPASKIKSISKVKFIRKTEQLLNKGRGRKSKLCPDKIYELACCSIAADYPDYEELLKIKIRRLNSLLEEREYITKLIAEKAQRLFKKEIEILCSIPGVGQESSIYLMAELVDIKRFSEWRKLIGFCGLDPIIKQSGKFKINCRISKRGNSHARRIAWIMAGCAKRSCPYFREYYLKKRTEGKSYKEAVIATSTKLLRTIYALLNENRCFR

SEQ ID NO: 227929 - protein, 399 aa, unidentified
MAQPVWAGVDAGKADHYCMVINDDAQRLLSQRVANDEAALLELIAAVTTLADGGEVTWAIDLNAGGAALLIALLIAAGQRLLYIPGRTVHHAAGSYRGEGKTDAKDAAIIADQARMRHDLQPLRAGDDIAVELRILTSRRSDLVADRTRAINRMRAQLLEYFPALERAFDYNKSRAALILLTGYQTPDALRSAGGARVAAFLRKRKARNADTVAATALQAANAQHSIVPGQQLAATVVARLAKEVMALDTEIGDTDAMIEERFRRHRHAEIILSMPGFGVILGAEFLAATGGDMAAFASADRLAGVAGLAPVPRDSGRISGNLKRPRRYDRRLLRACYLSALVSIRTDPSSRTYYDRKRTEGKRHTQAVLALARRRLNVLWAMLRDHAVYHPATTTAAA

SEQ ID NO: 227930 - protein, 415 aa, unidentified
MYYVGIDIAKSFHVVSVINDEEIKVINKPFKINNDAKGFEKLLTILDSISLEKKEFTIGLEATGIYGENLQEFLKSKGYSVKLLNPFQTTRYREQITLKKVKNDEIDSLVIALLLKSGKFSSGYITDDEYQSLRTLYRNRATIQADMKDVKKRILTQITVTFPELEGFMKPFSVTGLVLLDKYPTAHHYKHSSVDRIMKLFRHIQGNNFTQSKALQLLELSKESIYSGKAKDARAIAIRSSIRLLQMYLSELDIIEAEILSLLQNSSAEVTVNEAGQEIERTDSLLANLKTIPGVAEKTIAALISECGDLTRFPTIPKFIGYLGLFPTENSSGNSKHIGHLSKRGSPLAKHALYMSAVSCLIHNTQLKQLYDTKRSQGKSKKEALIAVSRKIAVIIYSIVKYNVPYDPNRVFAKS

SEQ ID NO: 227931 - protein, 316 aa, unidentified
MSESMSFVGIDVSKNVLDVHVLSTGEHWQVGNDQAGCASLVERLKPLGETMLVVMEATNVFWRMAAAALAAAGLACAVVNPRQVRDFAKSMGILAKTDAIDAQVLAQFAQRVKPAVRALPDAQCQVAAELLARRAQLMGMRVAEKNRLGTANAKKVRKDIEATIAFLEKRLAALDEEIDRWLKSTPIDQSRADLLQSFTGIGQNAARSLLITLPELGRLSGKQIGALAGLAPFAKDSGGKRGQRHIAGGRAVVRAALYMPALSAITHNPVIRALYQRLVQAGKHHYVAITACMRKMLVILNAMLRSGKPWKASYHA

SEQ ID NO: 227932 - protein, 374 aa, unidentified
MVDRITYVGLDVHKEGIVVAVAAGGLRGEVREHGRIANTPTALDRLLRKLGGDGMNLRFCYEAGPCGYGIQRHVTAQGHDCDVVAPSLIPKRAGDRIKTDRRDAVSLAKLHRAGELTAVWVPDTRHEAMRDLVRARLDAVHSLRRVRQQLSGFLLRQGRHYSRPAWTKLHRRWLAGLKFEHAVHHIVLEDYIAAVEAAETRRDRLTAQIEAMLADWTLAPVVAAVQAMRGMALVNAATLIAELGDLSRFTNPRQLMAYLGLVPSEHSSGASIKRGGITKAGNSAARRLLIEAAWSYRFPARLSRELLLRQENQPKPIRDIAWKGQVRLCARYRKLARTGKPANIVTTAIARELAGFVWAIARQVGHARLIGENA

SEQ ID NO: 227933 - protein, 401 aa, unidentified
MNAVGIDVSKGTSTVCVMRSFGEVVASPFEVTHTVSELGKLAHLLRSLNGETKVVMECTGSYHLPVARTLHAAGFFVSAVNPVLIHGFGNNTIRKRHNDKADSVKIANYALSNWLALPKYAPEEEIRQSLKSFSRQYTKYNKVKTMLTNNLISLLDQTFPGLNELFTSPARESDGHEKWLDFAVRFWHCECVGGSSLNTFTEAYRKWCKRSGYYCVGADEIHAVSRQCAAVMPKNEATKALITYAVAQVNAVVESLAAVAREMKRLAESLPEYPAVLAFRGVGEILGPQLIAEIGDVRRFPKKSSLVCFAGLEPTDNQSGKFQGDEKISKKGSPHLRKALFQVMSCLLQHSPVGDPVYQLLDRKRAENKHYYCYMNAGSAKLLRIYYARVKQHLNELELAA

SEQ ID NO: 227934 - protein, 342 aa, unidentified
MDEYDGRQFVGIDLHRQRSVIVRQSESGEQLSAVRIVNDPVALALQLEQAGSDPEVVLEATYGWYWAVDVLQDCGARVHLAHPLGVKGFRYRRVKNDVRDAGDLADLLRMGRLPEAWIAPPETRELRELVRYRAKLVAIRSGLKAQIHAVLAKAGVLIAVSDLFGVTGRQRLAKVPLGPAYAQRIRSLLELIDILDSHEARFAAMIAERLDTHRGYQAIQQVPGIGPTLAAVFVAEIGDVHRFTDPAHLCSWAGLTPRHRESDTVVHRGHITKQGSKAVRWAAIEAVQRHPTTAKIAADKQRIEARRGKNIAKVAAARKLLTLVYYGLRDGQIRALDRARAA

SEQ ID NO: 227935 - protein, 328 aa, unidentified
MYSLGIDVAKNKLDSCLLNPENDQRRAKTVPNTPEGFAELQDWLIRQKVPDLGQVHLILEATGVYHEAVALWFAAAGAVVSVVNPAQTKAFGQGLAVRTKTDARDSQVLARYGALINPPRWQPPPPAIRDLNALMARLDAVEADRRRERNRQEKAEAIPLPAPVAESLQQHIDFLEQEATRLQTAIQSHIDQHPDLRRDRDLLQSIPAVGEKTAQRLVAVLHGHHFTCADQVTAFLGLVPVECQSGSSLHRRPRLSKAGAPRIRAALYMAAVVATRHNPHIQALYQRLLARGKAKMAALGAAMRKLVQLAFGVLKHQQPYQANWTPVP

SEQ ID NO: 227936 - protein, 407 aa, unidentified
MEVVYRCCCGIDVHKKVIVACLVNGGGQELREFGTTTSEIKSLANWLTESGCEMIAMESTGVFWKPLYNLFELMDLNAIIVNAAHMKALPGRKTDVKDAEWIADLLRHGLLKASYIPGREQRELREITRYRKSLTEERCREVNRLQKILEGANIKLDSVVKDITGKSARKLLQRIIDDDIPDSEEVSKLVHGRMRPKLDQIVASIEGITTPLQRKLLAQIIDHIDDLNRRISELDKLVQEYMTEYVAAIEAIDEIPGIARRSAEVILAEIGTDMSRFPSAAHLCSWAGVCPGNYQSAGRRKHGKTTKGNKALKTILTQCAKSAKTVKSSYFSVQYQRIAARRGKNRATLAVAHSMLIAIYHILKNKTAFHDLGSDYYDAFNRDRKINSYLKRLKSLGWEPDAIPSSA

SEQ ID NO: 227937 - protein, 347 aa, unidentified
MKITTVGIDLAKNVFQVHGIDEHGKAVIKKQLKRDQIAPFFVNLPVCLIGMEACGSAHHWARKLQAMGHTVRLMAPQFVKPYVKTNKNDAADAEAICEAVGRPNMRFVPIKNVEQQAVLAVHRARQSLVKARTAQANQIRGLLAEFGLIIPQGIGYIAKRVPELLEDASNELPGAFRVLVQRLLDHLKELDAQVDELESQIQAWHRSSELSSKLAQVPGIGPITASALVASVGDAKNFDGGRQLAAWLGLVPRQHSSGGKSNLLSISKRGDTYLRTLLIHGARAVIYHSERKAKAGDACNWICNVAHRRNKNVAAVALANKNARIAWALLAHDRRYEVGYMRTVGTT

SEQ ID NO: 227938 - protein, 422 aa, unidentified
MHKERRWFVGIDWGSQEHVVSLCDDVGKRIGQRKFAHGGTGLTDMIAWLLKESGGKPGEIHVAIETPHGPIVEVLLERSCNVYSINPKQLDRFRDRFTVAGAKDDSRDADVLADSLRTDMRAFRKLSSVDPTIVELREWSRIDEELKAEHVRLTNRLKHQLWRYYPQIYELANDVGAGWFLDLLEALPTPEKAAKTREKTVARILKQYRIRRFDAAYVLGELRKPALTVAPGTIEAATAGIRILIARLRLINSQLVDAEQQLDRLCKKIVGPVAGEEGENTPGQKNEPRDAAILDSTPGIGRTVLASLLTEASDALQRRDYHALRALCGTAPVTKRSGKSCLVSRRRACNRRLRNAVHYWAHNAVQHDATSRAKYEALRAKGHGHARALRSVADRLLNVVCAMLRSGTSFDSSLASKKQAGA

SEQ ID NO: 227939 - protein, 322 aa, unidentified
MSVRVLGIDIAKQKFDVALLLDGKTKHKTCKNTAEGFEILMIWLEKQGIQKVHACLEATGNYGEDLAVYLHEAGHTVSIVNPARIKGFAQSELIRTKTDKIDAGVIARFCLAMKPDVWIPPSPEIRSLRALVRRVDSLIDMRSQEKNRISTAHESVVFLIKEHIAYLDQEIEKISKQIADLIGRNPQLKQRKELLDSIPGLGKATIPHILAELNDLDKFTHVREMVAFIGLAPKETLSGSSIKGKPRLCKIGHARLRKALYMPALVSIQCNPVMIAFYNRLKEKGKNGKVIVCAIMRKLIHVIFGVLKSGKKYDPNYKPAFA

SEQ ID NO: 227940 - protein, 388 aa, unidentified
METRTVNNLPPAASHDETVRCLLAIELSKKSWIIAVNTPLSDKISRHGLEGCDWKGLLELIERIRTRVARELNRPVEVISCYEAGYDGFWLHRLLEAHGVRNLVIDPASLQVDRRARRAKTDKIDAERLLRSLMAYLRGEPKVWSVVRVPSVAEEDDRRLHRERDRLINERVQHVNRIKGLCAVHGIYDYEPLQSNRLARLKQLRTGDGRELPQRLTAEVVRELQRLELVLKMIKTIEAERDAIAVSKISTHTHAKKIQDLVKLKSIGPEIATALVGEVFYRRFNGRHQVASYVGLTPSPFQSGSLNHDQGISKAGNPKARTIMIELAWLWLRHQRNSPLSVWFRERVGTARGRIRRISIVAVARKLLIALWRYLETGMVPTDAVLKG

SEQ ID NO: 227941 - protein, 410 aa, unidentified
MDEQQTTSAAGIDWAKDYHALCVVEQTGRVLLERRFSHEEGAIAKLCRVLVEMGVSSVAIERPEGVLVERLLDCGLVVLAIHPNQLKAARPRFRASGARAKSDSFDAFCLAELARTDWHRFRALVPDSDETKALRALSRSREELVGTRVALANRLRAELEAFWPGAAIVFAQIDSAISLAFLARYPSPKEASSLGEKRLSGFLSRHGYPGRKGASELLGRLREAPKGLAGEAETLARRQTVLALVETLETLVGQIRLFEERIAKAVRAHPDGDLFLSLFRSPNSTLTAACLLAEIGDCRESYPTNEALAADAGMSPVAIESGKRKVAGFRRACDKRLRKAVATVAESTRHHNPWAKDIYRRARARGCDHAHAIRILGRAWVRVIFRMWRDGVPYDRARHGGLRRLQSAGG

SEQ ID NO: 227942 - protein, 366 aa, unidentified
MDSVVLAAGPIHLGLDVSKDKIAVGILRWEERVPDTEMIFNDEASVRRLVNRFGDPGGLRVCYEAGPTGFGLYRLLRSMGVACDVIAPALIPKAPGDRVKTDRRDCRRLARLHRAGELVVIRVPTSSEEAVRDLCRARAAVVGDRTRIRHRLSKFLLRHDRIWRQTAWTLAHEQWLTGQRFDEPALRTTYAHYRAMLCAREAELAALEADLAYWYTHGPFVEAVARLAAYRGVALVGALSIASEVGDWRRFPAARTFMGFTGLVPSEYSSGAAVRRGHITKAGNTHLRTQLIESAWAYQHRPNLGVTLRRRQEHVDAATIARSWTAQQRLCGRFRRLAAHKNNRNVVAVAIARELAGFLWAEMTAA

SEQ ID NO: 227943 - protein, 351 aa, unidentified
MEEYIAFDSHKRYTWVEHQEANTGKTRAYRLEHGTGAIRQALAGCAPGTAVAIEATANWYWIIDEIEQAGCFARLVHPRKAKLMMGLINKTDKLDAHGFNTLQRNGTLPTVWIPPGVLRELRELTRTRLVLVAQRTRWKNRITATLAKWGLPPSEYSDPYGKKARAELEQQLERLPEQTRWATQQMLAQLDSLSEQAQQFEKRLEELVEVTPMMQWLMTLPGVGVILGATIALEIGEIERFANAERLASYSGTTPRVHSSGNRTRYGRTRPDVNRYLKWAFAEAANSVAVNHRRNPERHVSRLYARLRASKGHARAVGAVAPHLAEAAFHVLQRKEVYRDPSLNPRPEKGV

SEQ ID NO: 227944 - protein, 400 aa, unidentified
MRTVFGIDVSKASSEVAILVNGEKIHGYTMLNDAIGFNRLLNDLKTVHNPEIIFEATGVYSRRLRAFLEEYGYAYTQLNPLEAKKQLDSLRVRKTDKIDAEKLAHSQFILNRKPTYAQEEVYQHLRDLSRFYQNLTEDIVRAKNRLHKVLQVTFPELENLLSTPTGEQYWNLVMAFPCKEFVLNLSQNELCKIIRQSTSKRISEKRIAYLTDKLIKLAKQSFCAVKKISPMLEEVRYYAQELLRLSEHRQVVLDDMVALAQPLPEYDILRSIPGIAETTATSIIGELGDIRRFQSTNQINAFIGIDLRHYESGNFLAKEHITKRGNPYARKILFKCIHNIASASHTNPCHIADFYEKRKRQSTIASTKPHAIASIHRLIRTMYYLITHNKLYDYSLTQNR

SEQ ID NO: 227945 - protein, 415 aa, unidentified
MALKIVYQICCGIDVHKTFVVACIASTNKQGVTIYKRHRFSTFTQGLKELLQWLLDNHCKDVCMESTGKYWIPIYNVLEKDCNIVLAHPKYVKAIRGKKTDKKDAKWIADLFKHDLVAGSFMPPADIRQLRDLMRYRFKLTCFKSSEKNRLQNCLTVSNIQLGNVVSDTFGKSAQAILDKLLENPADTSFDLEPLVYKSLKKKLPELRDAIDGYITPEQAGKLKVIKAHYENLESRKAELEELILALAAPYQQELTILQTAPGISSPFTAIGIISEIGTNMEAFPSAKHLCSWAGLTPTNNESAGKKKSVRVSKAGCYIKPLLVQCANAVVKSTKHPEMRNRYLRLKKRRGHKKAIIAIARMLLTALYHMLKNGENYNAELYQKSDLLPVDREITVEQALMIARNQGYKIKSATA

SEQ ID NO: 227946 - protein, 465 aa, unidentified
MARKSKNVKSKGHKRLPRSLKTIYANAAGIDLGSREHWVCGPPREDGTPNVQRFGTTTPELFRLADWLEEQGVKTVAMESTGVYWIPLFELLDSRGLEVLLVNARHISNVPGRKTDMLDCQWIQLLHSCGLLRGSFRPSDDICRLRALIRERNTMVEQRSDWVRRMQKALDQMNICVHHAVSDITGVTGMAIIRAIVEGERDPLALARLRDARCRKSEKQIAEELTGHWRPEHLFNLRQALKMYDQLCAVIEDYDTEILTYITKHQPEQAASHPAPAHNSKSKARTLAKRGQEPLRQALYAFSGFDLTTIDGIGVDTASVILSELGLNFSMFPDESHFVSYLRLAPNLSISAGKKVPSKFKPTTCTRVSTALRMAALTLRNSKSALGGLYRRIAWRKGASVAIFSTARKLAQLIYRLVRYGQAYVDTGTEAYDARFNQRRLKFYTKALKEMGYTLQPLTENTLAA

SEQ ID NO: 227947 - protein, 427 aa, unidentified
MKFKQTDGQNQRIERITTSHLIIGIDMAKETHVAQATNYRGIVLTSQHLSFKNTLQGFEKLQRWIEGLLLKHRLKSILIGMEPTGHYWYNLANWLLKKNIEVVLVNPATTKRNKENRDNSPSKNDPKDALVIADVVSRGYYYEYTRQAPQFQRLRTIMSDREFWSGNSIRLQNRLTRWLDIYFPEYTSVFKDWSCPRSMATLKEFPSPLDLQGKSTEEVITGWRNHMRRAAGTTGIQKAAELLAKAAQSVGEQSVSLQEAKQDLQRLIEEYERITAMLDQIEQDVATLLGEIPLANQLRSVKGLGTIYIAAILSGAGDLKQYAHGRQLLRKAGLNLAESKSGMRTGQIILSKRGDAALRKYMYMATLTLVGTNPVFRHLHENNVQVKHMSKRQSVFKLIGKLARILVGMVQQDELFTPEKVVHMNAA

SEQ ID NO: 227948 - protein, 343 aa, unidentified
MYYIGLDVHKKTISYCVKNAAGQVLSEGKIGSTRRELDAWVRTLPEPRMMAMEATIFTGWIYDHLLPHAEKVKVAHPLMLRAIAAAKRKNDKIDASKIADCLRCDFLPESYMIPTEMRDRRRFLRYRNLVLRQSVQMKNRISGMLMGTGVSYEKLRLHRKGYFDQLMATNEEVSDSIRPLLKLCREQIDRSILLDATLLRTLERDPLLSGRLERLRTIPGVGPITALTWVLEIGDVSRFRSIKQAISYCGLCGEEVRSADKVMRTPISKQRNKHIQSMLVEAARLAPRYSPELAELYDRERQRGDGNRATLAVARKLVAHMVAVERRQSSFLPAGEFKQTAAA

SEQ ID NO: 227949 - protein, 356 aa, unidentified
MTDPTSPVTGGVDTHKDTHVAAVLNPLGVVLGTSEFPATPAGYRRLLAWMRDFGQLTEVGVEGTGAWGAGLARHLTGQDVRVVEVQRPNRQYRRRHGKSDTADAIGAARAVQSGEASGAPKSADGAVEAIRMLSVARRSAMKARTQAANQIHAVVTTAPDQLRSDLTGLDTKGLVARCARFHTTSAMTPLGAARRTLRMLARRWQSLTAEINEVDVELDNLTTQVAPSLRELPSIGTRNAAALLLAAGDNPDRLERERSFAALCGTSPIDASSGRQRRHRLNRGGDRHANAALYMIVVSRLRWHQPTRDYMQRRLAEGRTKKEIIRCLKRYVARQAHHAILHDLTQTKQRPPTLAA

SEQ ID NO: 227950 - protein, 443 aa, unidentified
MVGKSYTNREVFQMKSNTQNKKIEAVTEKTLVVGIDVGSEFHYARAFDWRGIEFSKKPFKFSNTEPGFKEFKAWILHIQTEHDKDTVVPGMEPTGHYWFNLGKFLQDNGMKPVLVNPHHVKKSKELDDNNPTKNDRKDPKVIAGLIKDGRYSYPYLPDGVYADLRTASNLRFQMQSELTRIQNRISRWLCIYFPEYKDVYGNPDAKSGMMILKAAPLPEDIVTLGVEGVNRIWREAKLKAVGLKRAKTLYEAAEHSIGSREGATAARMEIRMLLEDYESRAARLQEIMTLIESLVQQIPMAEKLMEIKGVGIKTVSGFLAEVGDISRFDNPKQLQKLAGLAIKENSSGKHKGETTITKRGRKRLRYLLFEVAMSLVSKNEEFAQLHLYYTTRRINPLKKMQSLMAVACKLIRIFYAMLTKQVDYDPQKMISDIRRPEVYLQAA

SEQ ID NO: 227951 - protein, 403 aa, unidentified
MTDRPLVWVGIDVGKATHHACAMDPAGKVVFSQKFSNDQAAIEQLVARANQAAGEVRWAIDLTSNAAALLMAVLVATGQQVIYVPGRVVNRMTGVFRGETKSDAKDAKVIAETARMRSELSPVTATDELVVELTRLTAHREDLMADWVRGVNRLRDLLTGIFPALERAFDYSARSPLILLTGFQTPEAIRAAGHDGVASYLRKQGAWPKGIPSMVDKALAAAQAQTVRLPGETTTAVLIARLAAQLLDLDRQIKDTDKLITSRFHAHPQAEIIESLPGLGPILGAEFLVITGGNLTGFATAGRLASYAGLVPVTQDSGRVTGNLRRPKRYNRRLRRVFYMAALSSLKINGPSRVFYDRKRGERLIHTQALLALARRLVDVLWALLRDGRKYTPTAPQPATTAA

SEQ ID NO: 227952 - protein, 388 aa, unidentified
MTYYVGVDIAKYTHFASIIDSNGTVIEHPFSFANNEIGFKLLLAKLQNYPKSEIVIGYESTAHYHLNLHHFLDDSGYKTALINPILTKRLRSISIRNVKNDKVDSLTIALFLYSNYSKLKLSDNGIQELRVICNQVHELKQTKAKLYIQLTACLDLTFPEIKAAFFKGNLKSNAAHNLLKKYNTAKEISAITPTKLVKIISKNSKRFNKNRVESLVDLAKHSVGINSKSISIKIRQIIEQVELIERQIEDLLDVICNDEIVRDCALLQIPGMGYLQAANILSVIYSIERFDSPEQVLAYAGLDPIIRQSGLFNAKSTRMSKRGNSLLRYTLIWSALNCSKNSKTMSEYYLKKRNEGKSHYNALGHCARKLTNYIFWILTHPNDKFNLD

SEQ ID NO: 227953 - protein, 387 aa, unidentified
MQKPHDNSKVCPAAFVQDSTVIAVIEMGLSSWLVAGMIPRVSREPLKKINPNAEMLLQLLYRWRDEAIAAGKEINRIAVAYETGRDSFWLARWLRARGIDAHVIHATSVAISREHRRAKTDRIDTAMLRRSFLGWLRGEPGHCSMAIVPTVAEEDAKRPHRERDSLVHERTSTVNRMKSILIQFGVRNFKPVLRKASEKLDAVRTPEGIALPPNAVAALRRHMERLRIINEQIKAIERARLQRLERDPADKMNAMVFLLVRIIGMGVETAEQLVHEILFRDLRDRKAVARYSGLTGSPDESGSKRREKGLSRSGNRRVRNILIQLSWRMLMFQPESALVLWYKKRTESARGSRKPMIVALARKLIIALWRYVNTGVVPEGFALRPAA

SEQ ID NO: 227954 - protein, 298 aa, unidentified
MSCATHVFPNAKLLNRRAVLLAWLKRLPAGTRIGMEATATYHELLASLAHRLGLVVYVLNAKDVHHYAKATAQRAKTDRVDAALIARYVAKEHNQLHVWYPACPAQRQLQRLMRRRGKLTRTRASLRSSLQGVPSLRSDLRALLKHFDSLIAKLDTQARALVSRNVEREQAFGRLDDIPAVGNAVGIALLATLERWALPRANSFVAFLGLDPRADESGTRHGRRRLSKRGDPELRRLLYTAAMSASRTRVWAPLYQRAIARGLSRVQALVVLARHIARTAWSIYTHKTQFEPARVQNS

SEQ ID NO: 227955 - protein, 379 aa, unidentified
MNGPIYEQSVIVGVDAHKYSHTAAAVDAWGQEKGRLNFTNDSLTDCLAWLKTLGRREDVIVAVEDANSYGCHLVSALAEQQFAVRSVPAVLTERDRQHSTQRDKSDFRDAKRVAKVILAKYEETLPVIASLATSAELAAATELNLLLNERRDVVKQGTAIKNQLHSLLHQYYGDHYADGFSKAFNKQAIIFYQANLAQAISANSSSADQAGKALIAESILRRIRRLKLLQEQSAAILKQITKIGKTSEQVAALHENIHGCGLLTAGAIMAELVTIRRFGGRDKLAKYAGIAPTLKSSGSHHRLYTNPFGNRLLNKALHTIALSQIAVKGDDRGKIYYRKKLKEGKTKLWALRCLKRRLINLVFRVLKQAEMGSAETAIS

SEQ ID NO: 227956 - protein, 315 aa, unidentified
MTSAGIYVGVDVAKDWLDVAQRPEGATWRVSNDERGIADLVERLVQLRPALIVLEATGGIEMPLVGALVAAHLPTVVVNPRQARQFAGATGRLAKTDVIDAQVLAQFGEAVKPEIRSLPDAATQQLSALLLRRRQLVDMLTAEKNRLRTAAPSVRPDIQDHIRWLERRLSELDGQLAQAIRSSPNWRERDNLLKSTPGVGPVLSVTLLAELPELGTLNRKEIAALVGVAPLNWDSGHFRGKRSVWGGRSKVRAVLYMAALVAARHNPVIQAFYQRLVAAGKPKKVALTACMRKLLTILNAMIRHQTPWSVDHHAS

SEQ ID NO: 227957 - protein, 332 aa, unidentified
MEFTSFAGIDISKKDYDVALLNQQGVVIGSRKFTNKRSGFNVMMKWLKSISFAGKPLFCLEHSGIYCLGICIFFEELGLKYSLQPGLQIKRSMGIRRGKNDKADALMIAKYAYLNRNEIEFYQLPSKTILQLKQLVSYRERLVKTKVALKNASKELKAYTDRDLHEYVCADSKEHVARINKSILEIDKTLKQLIASDPTLNDLFNLIVSVKGVGLQIAVNMIIVTHGFTKFKNWRKFSCYCGLAPFEFKSGTSIRGKTKTSYLGNKKMKAIIGNGIASAIQHDPEITSYYNRKISEGKHKMVVMNAIKNKLIARVFAVVKRKTPFVPLHQHL

SEQ ID NO: 227958 - protein, 412 aa, unidentified
MADVVAYVGLDWADERHSVHLQTPEGRIEHVEFEQKPAVLHAWIAELQQRFGAGKIAVALEQRKGAVIHALLMYDCFVLYPINPKALARYREAFTTSGAKDDPLDSALLLDLVVRHRDQLRAWVPDTVESRTLQALCEQRRKLVNQRVALTNRLTSLLKQYFPQALDWVGDLPSVQACDFLTQWPTLAAVQRARPSTLRQFYRAHNCRKAAVIEARLAAIADARPLTTDAAVIEPLSLSVQTYATQLRALIAAIQTFDDRIAEVFATHADHDVFTSFPGAGDVCAPRLAAALGTDRSRWNSAAELQAHSGIAPVTERSGKTVWVHHRLACPKFVKQTFHEFADQSIRFSRWARVYYDQQRARGNTHHAALRALAYKWIRILFRCWKARRPYDEHTYVDALRRHGSPLAKHLA

SEQ ID NO: 227959 - protein, 462 aa, unidentified
MREESARESVAVVGTATEAATGTGGDLRGNTGGVTAPSPPEKGWTKLKGATDLPPLAKAIDAPAWSKPQGMGAQGRSIMRSVGLDLGARHIAYCEVKDGKVIDRTSVKRLEQLKSRIGPDCPPARIAFDSSREGWHVHDTLASWGHEPKMIDTTRVRAMGVGQHKRKNDALDAEVAARAVEQGRIPEAHVLSPERRALRVKLSVRGALVETRSQYVTTIRGLCRAAGVLLATCATENFVNKLSDAELEPATRALIQPLIAVLVGIEDALRQVESELSEMAKRDPIIALLATAPGVGLIVASTFVSVIDEARRFRNAQAVGAYLGLVPAESTTGGPDKRRLGSITKQGNTYARKMLVQAGWLILRSRDKDDPVRQWGERIAKTRGKRIAVVALARKLSGVLWAMWRDGTAYDPVGQAKASARGTRKAARSKSVHAEALERAVNKLQRRATARRDQASESTTMT

SEQ ID NO: 227960 - protein, 405 aa, unidentified
MDVLYTHCCGLDVHKKNVVACTITPEGKEIRTFSTMTDDLISLVDWLKSKGCTHVAMESTASYWKPIYNLLELEEINVMVVNAKHIKNVPGRKTDVKDAEWIAGLLQHGLLQGSYIPSREQRELRELIRYRRSLIEERAREINRIQKVLEGANIKLSSVARDVLGKSGRDMIEAMIQGQEDPEILAELAKGKLKKKKEELQRALNGLIGSHQKLMLAKQLKHIDFLDKTIAELDEEVKARMLPFEEDLELLDTIPGVGRRTAEQILAEAGTNMDQFPSAAHLCSWAGVAPGNNESAGKRKSGKAKKGNQKLRSALVEAARAASRTKDTYLASQYHRIAARRGANRASLAVAHSILIIAYHILKKRQPYIELGPNYYEERKRQTVVKQSIKKLESLGYKVTVEEVA

SEQ ID NO: 227961 - protein, 371 aa, unidentified
MKSILSVGMDVHKNSFSLCAYDGYTGEIVSESTFASDVKLVIKFIETLKSRYENDVEIKCGYEAGCLGYSLYKSLTARGVDCVILAPTTMQVSAKNKMVKNDRMDALNIAKNLASGSYKSVYAPDEEDVEIKEYIRMIHDFKKELKRVKQEICAFVLRHGYQYDGKSKWTIRYMNWIRELEMSEIQRETLNEYIAEMENLNDKINRFMNRIDEMYQSERYHEKVSKLRCFKGIETFAAMTIQVETADFERFPSAKAYASYTGLTTGEHSSGDKNNRIGITKQGNTVIRKTLVECAQSLVKGNVYAKKSQGLKSRQKGMDVNIIAYADKATERLKKKYQKLIERNVPRNKAIVAVARELACFIWGMETGNIH

SEQ ID NO: 227962 - protein, 343 aa, unidentified
MEPYAGIDVSLERSSVCVVDASGRMVREAKVASEPEALVGFLRRLGLPLARVGLEAGPLSQWLHAGLTGAGFEAVLLETRQVKAALSAMIVKTDRKDARGIARLLRMGWYRPVHRKSPPAQEVRALLVGRKLLQGKLLDVELSIRGLLRGFGLKLGEVSKGRFAARVRELVAGQPTLERVIGPMLRAREALRSEYLALHRAVLAIVREDAVCRRLMSVPGVGALVALTFASAVDDPARFRRSRDVGAHFGLTPKRYQSGETDVTGGISKVGDAMVRAALYEAANVMLTRAGRFSTLKRWALEVAKRRGARRAKVALARKLATVLHRLWADGSEFRFGKEAAAA

SEQ ID NO: 227963 - protein, 372 aa, unidentified
MKIAVGVDLHSKMAVAFAVLASNRESKKMEEEFLDGFNKEFSNVPSTPEEMKRLAVALRGHETNVLIENSTKTHETYWVLTNAGCKVTVAFAADLYRITKSVKKTDRNDAMELAAYMRRRMNGECEFSECYMPSLDWMMRREICRTVFWEKRHLADLKRRVRAHLLLHGITLSREYSDIFSKKAIADMKRTKDPCLLIAICEAESIKKRADEEVRLVKHLFSNDKMYELIYSIPGFGSISAAYLTSLIVDMSRFENKSKFSAYFGIVPKVRNSADSNPRCSTTHRGDEDARRLLCQSAMVHIRTVEDSVVTKMYHRLKKNGKAHKEALVACARKLTTVVWSVVKNNLPFTNDTGLLARVEGEIEKVEEEMDE

SEQ ID NO: 227964 - protein, 431 aa, unidentified
MRAAPPAGARCPIGIQGQRPRTHKLGYPRRHRGEPERTSEEEGVRTAGIDIGSEHHVLAVLDDLGATLVRPTKLSEDAAGYERLFTLLGHPAEVAVAMEATGHYWQNLFAALVGRGFAVAVINPLRTARYAEEQLQRTKTDAIDALGIARFALEKRPPPARLRDETLAELRELVSLRLRAVQDLGDRVRALHRLVDLAFPELTRLIKTLDSERATALLSRYPTATAIAAAPVRTLADLRYDGRHTLGPALAQRLQDSARTTVGAHQGAAYARGVRYACEDITRLRERITELDAEIGRTLGGSDLAPLLRSIRGFGPTTTAHLLAVLGDPADFDSGKAIAAFVGTVPGLRESGKRRPGHARLHPLGHAALRHALWMPTLTAIRCNPWIRAFYLRLIAAGKPKKVAIIACMRKLLDAVHYVARTRTAFVPRAA

SEQ ID NO: 227965 - protein, 347 aa, unidentified
MDVHKEAIVIAVLNESGKLVMESVIETKASSILQFLHGLRGELHVTWEEGTWAAWLYDLLEPQVQHIVVCNPRRNALLKEGNKSDKVDASKLADLLRTGMLRPVYHGENGLRTLRELGRSYQTISKDLTRVMNRLKALYRGWGIPCAGTQVYAARSREEWLSKLPQAGVRRRAELLYQQLDGLQALRREVRPEFLAESRKHKAAKLLRQIPCIGPIRAARLIALMQTPHRFRSKRQLWTYSGLGIETHDSAQYRFVRGQLHRSKKPQQLRGLNRNHNHEMKEIFKSAATRASCGRGPFHDFYAALLAKGMKPEMARLTLARKIAAITLTLWKKEERFDVEQLKTQAA

SEQ ID NO: 227966 - protein, 338 aa, unidentified
MNKKSDKQFQVGVDVSQETLDVAARTDSGVEQRTAQFANTSAGHRQLIKWATKGGRPARVVLEATGVYSLDLALALKAAPRCEVMVVNPRAARKFAEACLQRSSTDATMAIALQEYAARMEFVAWTPPSLAVRELRAIARRIAALTVEKTRELNRQHAAGASEDTPAVVANDVAVNVRHLERRIAELERHAVTLISETAELKQAYECLLSVCGIAQTSAIQLLGELLVLPADMSVRQWVAHSGLDVRHVQSGTSVHKVPRISKQGNAHLRRALYMPALVATQYEPHVRAFYEQLLAAGKKPLQAVVAVMRKLLHAIYGMLKTNTHFDGSKFRRLPQVA

SEQ ID NO: 227967 - protein, 403 aa, unidentified
MAAICGIDWADQWHDVHVSDEHGRVLCQRRFCHDEAGIEALIALLTEHRVTRVAIERPDGLLVGRLLAAGVTVVAIHPNRLAAARDRFRAAAGKDDRFDAMVLCELCRTDGHRFPALAPCGDQTLALRALVRTREDLVSARVSLANQLRAQLDAAWPGAARIFAAIDSPIALAFLARYPSAAAARGLGPKRLQAFLARHAYSGRRAPEALLDRLRSAPTAAIGEHETQARRAAILGLVGALEPIVGHISQLTSQIRAAIHRHPDGPIFLSFFRDPNSVITAAGLLCEIGDNRARYPHSDTLAADGGQAPVTKQSGKHRAVSFRWACDKRLRNHLGVLADSTRHHHPWARDVYQRAIDRGCDHPHAIRILGRAWTRILWRCWQNGAAYDPTQHRALTRQLAQQG

SEQ ID NO: 227968 - protein, 334 aa, unidentified
MEKITTVGIDLAKSVFSLHGGDSAGRVVLRRTVRRDQLVEVVAGLSPCLIGMEACSGAHEWGRRFQEHGHTVRLMAPKFVAPYRKSGKNDGNDAEAICEAVTRPSMRFVPVKSIEQQALLTLHRVRQGFVVERTATINRLRGLLSEFGVVLPLRSVSVRRQAAAAAESLPDLARRAIGDLLEQLRVLDERIDAYDREIEAQAKLCEPAQRLMKIRGIGPTTALAIVATVGNAREFKNGRQFAAWIGLVPGQYSTGGKTRLGHISKRGDAYLRNLLVQGARSVLHTAAAHLDPVSRWALELRPRRGYYRTLVAIANKNARIAWALLAKNETLRSA

SEQ ID NO: 227969 - protein, 353 aa, unidentified
MERIYIGVDFHARQQTICYLKIETGELVFCELGHENKEQVRAFYAAFPSQVIVGLEASGYSPWFERMLEELGCEVWLGHATEIRRRARWRQKNDRRDAELILDLMLHEEFPRLHRPAVQSREVMRMLRYRQKLIKMRTMSKNSLQALALQSGLARRSRLFTREGKHELSIALMSPAMQWQRDHWWQLLQSLNEQLQETMGWLKTHAQGDVKVARLRTHPGIGLLTALCLVHTLQPVDRFRNTRKVAAYGGFDPVERSSAERKCFLGISKAGSRILRHLVVEAANVAVRSDEDLKRFYKRLAERRGRPKAKVAVARKLLIRAYIMLRDEIDYAEFRHRAVAARLAREITKASSA

SEQ ID NO: 227970 - protein, 343 aa, unidentified
MQTITTVGLDIAKSVFQVHGVDAAGQVVVRRQLKRRYVLAFFQKLPPCLVGIEACASAHHWARELQALGHTAKLMPPAYVKPYVKRHKNDAIDAEAICEAVTRGNMRFVPTKTPEQQSCLTLHRTRHLLMRQQTSVINAIRSHLAEFGIVAPVGRNGVEQLLGVVADPNDKRLPEIARACVAALGAQLRVLKLQILEFDRMITAWHRSSEASKRLDQVPGVGPLLATALVASVAEPKAFRSGRDFSAWIGLVPKQNSSGGKERLGNISKRGDRYLRSLFTTGALAVIRYAKIHGTKHRPWLTALLARRPTKVAAIALANKLARMAWAMMARGERYKEPAALAA

SEQ ID NO: 227971 - protein, 398 aa, unidentified
MICVGIDIAKGKSTVCFLKPGGEVLKAPYDIEHTAEEVGKLIRDIRSYGEEVRVVLEATGHYHLPVIAQLLEADIFVCVVNALRMKKFCSQDIRKAKTDKIDAVKIAAFGLTYWQDLHRAKPTDEVYRELRLLSRQYFQLTSMLVKAKISLGNLLDNVMPGITDVLQDRDPHHKLTDFVLKYLHFDKITAMGEKKFVSGYCSWAKKQGYRMYERQAEEIFALVQNSIPALPMTPSTTIVVKEAIRVVREIETSRSSILSQMQAFAKSLPEYFLIREMACVGDTLTPLVIAEIGDVRNFHSKHALIAYAGIDAPPYQSGGFNGTERHISKRGNGYLRHVGFEIMQCKLRLKPEGDPVYEFIQKKRSEGKCGKGAMVAGINKFLRIYYGKVTELYRELEA

SEQ ID NO: 227972 - protein, 319 aa, unidentified
MQSKLTFGMDIGKNEVVVACHEGAFAILKMANAVAGLRRWLGSVPAGSRLGLEATGGYHEPVAELAYSLGFTVYILNPKDVHFYARALGARGKTDRLDAQIIAAYVAEHCARLHPFTPLSADEKLLRELARRRATLVNAKSMLQQSLRVLPGFEREGRELLRAMGSFADRLERKLAQIAARSSERATLVKRLQTIDGVGTLTSIRCATLFTRVPFHSSDAVVAFFGLDPRPNDSGQHRGRRRLSKRGPSEDRRLLYNAAMSAIRTPAWRPLYLHLRNRGLASTEAIIIIARRIVRIAFAMYRNHSNFNPRLGPRPYCPA

SEQ ID NO: 227973 - protein, 418 aa, unidentified
MATSLSEKLARFKPGLLYVGVDLALDSNVIKVKDERAKLLASLEFPHTRAGYDYFHRRMQALVERHRATGFVVGMEPTNYFWTLLATDLEQRQVGYVLVNPYTVRKHREGDQLDRSRDDARDASMITDLLREGKYTETRLLHGGYANLRQYATLHYRLERDMARQKILVRNIAGQLFPELSSVFKDLCCASAVALLQNHAAAIRIKEMTEEDLIAAVRADLAGKRLAVSKLRRIHKLAATSVGVQDGVEALQLALRLHLETLRTLQTQELVVRQAMLKAFKALPEARYLQSLRGLGSLTGAMILAEIGDPSRYKHGHQLIKLAGTQPAPDVSGRKRRSQTPFSRKGRSRLRTILYFACLRLIQVDDAFARLYQHYQQRDKNPLTKMQALGVLMNKLLLVLWSLMRHSKDYDPARVYSA

SEQ ID NO: 227974 - protein, 357 aa, unidentified
MKIYKIASQRAKVQGSPDLYVGIDVHLKMWHVTILHDGVILFSSGIPGQWEVLRKLLDRYKGYRIHTAYEAGYFGYGLYDQLREYGASCLVAAPSLLPQQHGNRVKTDRRDSKKLALWLSQGALVGVVVPTMEKRSHIAVIRRRHQLVKDCVRIQLRIKAEFRFHDLPFPDVKGKWSKRFVENLHKFQFKDRWLHESFQRLLAQYDLLIEEIARQTTLIEELAKTDCYRENVTILRTIPGIGLLIAMEFLVELQDIHRFRTADQLAAYVGLTPAQYSSGEHIRMGNITHIGKGRLRAFLVEASWTLISKDPAMAQKYQALKYRRGSKRAIVAIARKLLVRARRVLLDRTPYVIGKAA

SEQ ID NO: 227975 - protein, 368 aa, unidentified
MSNYATAIGLDVHARSIKACALNPMTGEVERASFGYDPVSVAEWVLGFEEPRAVYESGVTGFHLCRALRALGVDCVVGAVSKMQRPAADRGRKTDRRDAEWLARLLATRNVVEVWVPDGRTEAARDLSRALADARDDLQRAKQRMSKFLLRHGHVFDERTPTGRRKGNWTRAFWRWADVISFDEPDDAAAYEHYRDCVRRCQEARDELARKVAESAGRPEWKPIVDALRCVKGIDVATAFLLACEAGDFSRFPTAPSFASWCGLTPSEHSSGESASRGGITRAGNAHVRWALVEASWHVPMSSREPKPLAPGQEASSAVRRHATKCNRRLQDRREAMEASGKRPVVANCATAREMACWVWAIARMAGA

SEQ ID NO: 227976 - protein, 340 aa, unidentified
METTATFYVGIDVSKPYFDASIMQVIDHKKGELQTEQFPNSKEGLLLFQKWCKSAGAKKMQQLFVVIENTGLYHRPIWQFCSKQNIALHIGNAAQIKWSLGITRGKNDKIDSKRLCNYAFKNHDDLQATAALNPVFLQLKDLMTARTNLLCHYTATKSYLKELSPSNAKATQALLEQAHKAALEGLKKSIEKIEAAIAQIINEEASIKNNYDLIKTIPGIGHITAVYIICCTNNFAGKISGKQLASYAGVVPFEHTSGISVKGKNRVHKMANKDLKKLLHLCALAAIKYDTEMKAYYDRKKAEGKNGMLVLNAIRNKLILRVAAVVNNQTPFVSNYKHAC

SEQ ID NO: 227977 - protein, 316 aa, unidentified
MLYVGIDIAKNKHDVTALNVPGKTVLKPLTFSNNKAGFELLDLSLRQLNQDCLIALEDTGHYAFNLLNFLHEQGYKVYTYTPLLIKEFAKSLSLRKTKTDKKDAHGIALKLLSDPNREQFQHDNRQVDLKILARHIHRLKKKQSDWKVQYTRCLDIIFPELDKIVGKHSEYTYQLLTRYPNPQKRIEAGFDKLIEIKRLTASKIQDILSVAPRSIGTTSPAREFEIIEIIKHYKRLIDKAETCVNDLMAEFNSVITTVTGIGGRLGAVILAEIRNIHAFDNPAQLQAFAGLDSSIYQSGQIDLAGRMIKRGSPHLR

SEQ ID NO: 227978 - protein, 405 aa, unidentified
MDRVFGMDVHKDVLVTTIITEESEETRWSGVGAKDLQSLMEWLKEKNCHKGVMESSGIYWVPIYVTLADNGFQITVANAHQVKAIPGRKTDELDSQWLARVFSAGLVKPSYIPEKKIMELRSLTRLRVSLLEAQTAFKNRAHKTLQICNIRLASKLSNIFGRDGQMLLNALMKGESIDEVIEKYGSKRLKKKREEVKESILGALGEADIIELKICLDNINRLEEQIRQLNAKIAAQVNKKDVERISKVPGLGEISASAVIAEIADPKRFQNEKKLYSWSGLAPSTYQTAGKTAKTGHITKKGNKWLRRILVQCAMVAIKARNSQIRQFYLRIRGRRGHNIAIVATARKLLGIIWHLLITGEEYIDRHYVKKTITKSRKETFKLALEEAIPLLRQAGYIIIAPNPT

SEQ ID NO: 227979 - protein, 355 aa, unidentified
MSSEKYIGLDVHQATISVAVVDSQGKVVMESILETKASTILEFFAGLRGSLFVTFEEGTWAAWLYDLLKPHVTEVLVCNPRKIPLLKQGNKSDKIDARKLAERLRLHDLKPVYHGETGVRMLRELARSYLTVVKDLSRVMNRLKALYRSWAIPCAGRDVYYRRHRSQWLEKIPEAGARRRAEQLYEQLDMLQHLRQQARRELLAESRKHTITAKLRQIPALGPIRSALAVALIQTPHRFRSKRQPWTYSGLGLKTRDSGEYHFVGGQVRRRKKQATIRGLNKDYNHDLKGLFKGAATRASVQPGPFQEFYQRSLAKGIKPTMVRLTLARKIAAITLTLWKKGEDFDIDKLNSQAT

SEQ ID NO: 227980 - protein, 356 aa, unidentified
MSKASIIRRRVTIGLDVSDRYSHLCVLDARGRVEREDRIRTTPDAVRVWFAGYRSARVVLEVGPHSPWLSRLLKGQGHEAVVANPRRVRLIAEAERKSDRIDAETLARLGRVDPKLLRPIEHRGEAAQQDLALLRVREALVRSRTKLIQCARGLAKAFGARLPASSAPSFAKRVREGELETLFPGLARLLQQCDELTASIRTLDREVERLGRERYPETRRLRQVPSIGPITSLAYVLTIEDPNRFAKSRSVGAYLGLTPKQRDSGDARPELAISKRGDDFMRRLLIEAAHYTLGPFGPDSDLRRFGLRLLGQGGKRAKKRAVVAVARKLATLLHRLWITGEAYHALGAPSAEVRAA

SEQ ID NO: 227981 - protein, 444 aa, unidentified
MVCSGMILIREVADAPVIMGISKPAGLKSPCGEVKIANPLFVGIDVSSRSNVAYLMKPDGSKHSSFSVQNNLGGAKMLSERIVSALSSMRLSDVVIGLEATSIYGNNLVYALREDGSLSRFQRKIHVLNPKQVKKFKEAYPDLPKNDFVDAFVIADHLRFGRIAKEVYMDDYRYQALRTLTRARFDVIQNLTREKQRFANYLFLKCSGIAQEKDIQNTSATTIALMEHFETVDDLANTDLDELTDFIAQAGRGRFVDPDATARAVRAAAKGSYRLPKTVNDTVNQAMSVSIASMRALKEQVKVLDKAIEQQFEIIPNTLTSIPGIGKVYSAGIIAEIGDIHRFDSQASVAKFAGLVWTQHQSGEFEAEHSRMIKSGNRYLRYYLLEAANSVRRCDSEFRRYYDLKFKEVNKYQHKRALALTARKLVRLVFRLLKDNRLYIPSEG

SEQ ID NO: 227982 - protein, 333 aa, unidentified
MSQMRFAGIDVSAKSLAVSYEPQPGKTQPLEVPNTPQGHRELCEKLSGSSTPIQVCLEATGNYSLDVALALHQHGIPVMILNPRAARDFAKALQNRSKTDATDAQVLLEYAKRMEFRPWQPPAQSLLQLRDLSRRIKALTKQVTQEKNRLEAASCCQGFSSAVRKDIEAHLRYLERSIDKLLRQAVKLIDQEPALSQTCQRLISIKGVGQLSAVHLMAELLVLPSDMTARQWVAYAGLDPRHHESGSSVQKPTQISRTGNAQLRESLFMPALTASWAEPHVKAFYEKLQQRGKTRMQALVAIMRKLLHSIHGMLKNQENFQGPKFFALETKTP

SEQ ID NO: 227983 - protein, 342 aa, unidentified
MQVTTIGLDIAKNVFQVHGIDAKEKVVVRKQLRRSQVMAFFAALAPCLIGMEACATAHYWARELTKLGHKVRLMPAKDVKAYVKRNKNDAADAEAICEAVRRPTMRFVQIKSAEQQGQLMQHRTRDVLIRQRTQIINALRAHLAELGIVAAQGDAGVNELRAIVADDRDERLPIDARASVIVLAAQLEALQTLIGSIEKRIKMQHRSNETSQRVETIPGIGVLGATAIVATVADPTIFRSGRDFAAWIGLVPRQDSTGGKQKLGPISKQGDRYLRRILVVGAIAVLRRAQENPGKYPWLTQLLARRPFKVVAVALANKMARTAWALMAHGGTYRAPELAEAA

SEQ ID NO: 227984 - protein, 425 aa, unidentified
MSASTGADATSHPLTNKLSRNKSPLFVGIDLGRWLHVASVVDGNGEFVAERGFAHSVEGISDTIDWLIELAEQDAQRISVAIEKPHGAVVETLLLRGIAVFAINPKQVDRFRDRHSMSGAKDDRRDAFVLADALRTDGHRFQQLISPPPDIVALRERLRSRSQLVKQHVAFSSQLRELMVGCWPHMLVLAPKNRTLDAFFCELLLLFFDHDNANIDSVHTLIRKHHIRRVSVDDVLRTFQAPPLYVAPGTLDATAAHVDLLVQQLLLVIRLHRDADQFLERWFKQTSRDSLPTTDTAILASLPGVGAFVLASLLAHAYDAVRLRNLDALRSVGGVAPVTKQSGRRRQVLLRRARSQPLNFALHHWAQAAVLRDSKSEEHYRRLRNKGHRHARALRGVSDRLLSVAVAMLRNRTLYDADKRKKLPS

SEQ ID NO: 227985 - protein, 359 aa, unidentified
MFIERTSVGLDVHARSISAAAIDGLTGELVKERLVPVPDLVLEWLARRPGPVAVVYEAGPTGYGLARTIRAAGIRCEVAAPSKVRRAAGDRVKTDARDALLLARLLRMDEITPVRVPTVTEEAARDLVRAREDTRVDLLRARHRVSKLLLRHGHVYYGGNAWTGKHDRWLRSIRFDQPATRAAYEADLEAVGFAVARRDRLEQMIGQLAADSEFTPVVQRICCLRGVSTLTGFALAVEVGDWTRFTGASIGAYLGLVPTEHSSGGSRRQGGITKTGNSHARRLLIEAAWHHKARYVAGATMRRRWDDAPPAARARGHEGNQRLHHRWTQLAARSKPHTVANTAIARELAGWCWSLATLT

SEQ ID NO: 227986 - protein, 332 aa, unidentified
MNMNLQGGVANREHDLNAGVDVSKSHLDACWGVEQLRVTNDAVGWDALIATFKAAKVNLIALEATGGYERGVVSALQGAGFDVARLNARQARDFAKSLGLLAKTDQVDARALRDFADVLARHKDRHKFITPVPDPQREQLNALMIRRRQLVNIRVEEGNRLDTAHRVARRSILALLKSLDKQIESIDKDIGDRLDKHFNEQCKFLDSVKGVGPVTILTLTAALPELGQLDRRAISKLVGLAPLCDDSGPRKGKRRTWGGRNQVRSVLYMAAQSAIKHNAVIKVFHSRLIAAGKPKKVVIVACMRKLLTILNAMLRDHALWNPTKYVEPTKTA

SEQ ID NO: 227987 - protein, 410 aa, unidentified
MRVLHRRCAGLDVHKAEVVACARVFAGRKVVHEVRRFGTTTRALMALAAWLKSLKVTHVAMEATGVYWKPVWHILEADLTLILANAQHVRNVPGRKSDVNDATWIADLLAHGLIASSFVPPQPIRELRDLTRTRRQAVGEAVRHQHRIEKILQDANIKLSSVLSDPMGVSGRRMLAAMAAGETDAGKIAELGSPRLECGRGALIEALSGRVSEHHRYLIGWHLRLLDEIEAKIAELDQRIEAQIAPFRAAIERLTGIPGIKQVAASAIIAEIGADMSIFPTAGHLLSWARIVPRLDESAGKKRSRRVKKGGAWLKPVLVQCARAAARKRDSYYGAQYRRLKARIGDQKAIIAVAASILTAIYHMLRDGTEHADLGAAYLSRREGDSKAIAHQLARRIRALGYQVDLREAA

SEQ ID NO: 227988 - protein, 343 aa, unidentified
MQTVTTIGFDIAKSVFQVHGVDAGGQVIIRRQLKRRHVLAFFQKLPPCLVGIEACASSHHWSRELQALGHTVRLMPPAYVKPYVKRQKNDMADAEAICEAVTRANMRFVPTKTPEQQSCLMLHRTRHLFIRQQTAVINSIRGHLAEFGIVAPVGRKGVTELLHVVADPSDKRVPEVARACLAALGTQLLSLKQQILEFDRMIMAWHRSNQTSKRLHCIPGVGPMLATALVASVADPRTFRSGRNFSAWIGLVPKQHSSGGKDRLGSISKQGDRYLRSLFVAGALAVIRYAKIHGTGHRPWLTALLGRRPTKVAAIALANKIARMAWAMMAKGERYKQPVALAR

SEQ ID NO: 227989 - protein, 379 aa, unidentified
MDHAITDTPAETILHGALELSKNSWLLALQFPDRAQPSLYPISGGDTVGLMAKLTAARDRWAKMSGKAPSIVLCYEAGYDAFWLARFLKARGIECLVVDAASMQVNRRARRAKTDRIDVGMLLRALIAWGQGDRHVWSVVRVPNVDEEDLRRSHRERDRLVRERTAHINRIKGLLFGQGIRGINVKSKYKTLQIDKLVTGDGRPLPPRLASEITREIARLALIQEQIATLERERDQAPTPCKTTEKKRLQLVSLNGIGPAIAAVMTREVYYRQFDNRRQVAGFLGLATSPHDSGDVVRSQGISRAGRGQVRGTMIQAAWLWLKHQPKSAITRWFVQRTAGQSGRIRRIMIIAVARKLAIALWRFLEQGLVPQGAMLANR

SEQ ID NO: 227990 - protein, 349 aa, unidentified
MQFYTKTHQHYCGIDLHARTMYVCIMNQAGDILLHRNIRTDQDRFLNLIAPYQDDLVVCVECIFTWYWIADVCAREQIPFVLGHALYMKAIHGGKAKNDKIDSHKIALLLKGGMLPQAYVYPAHMRATRDLLRRRMHLSRQRAHLIAHIQNTVHQYNLPALGVRLGKPSEREGVVEQFPDGDTRRMVQLDMDLINYYDQQLSKLEWQLVKQAKGHDQQMVHLLSSIRGIGKILTLVLLYEIQDITRFPTKGQFLSYSRLVRCAKESAGKKVGKSNKKIGNSYLRWAFGEAAVLFLKGNPDAQKWIEKQTSKHGKGKALAILAKKLGQTVYVMLQKNQCFDEERFMRNLH

SEQ ID NO: 227991 - protein, 343 aa, unidentified
MAIVNRIALDLAKDFIQVLALDENEQEVFNKKLRSNKVLAKLATLKRTDDCEVAVESCGMSHYWRRECEKLGYKTVALPPRFVKAYLQGEKNDANDARAIAEAASRPNRQTVRLKSIEQQDLALMVNQREGFVQTRTQFSNRLRGQLAEYGIILPKRVSTILQRVPEILEDDSNALTLQSRDLINRLYQMLRTVDEEVKALDKRLAAQADNNEDSRRLMTIPGIGPITATSLLALIGDVNEFKRGRNLSEYLGLVPRQNSSGGKDRLGGITKKGNTKLRTLLVHGARSALRVAQQRDDRLSLWAQDVAKRRGNNVAAVALANKHARIIWAMLKNQEDYRMTAA

SEQ ID NO: 227992 - protein, 326 aa, unidentified
MKIIGIDVSKAKLHSSLLVDPNLKKAKAKSSENTLAGFRALFEWACRHGKCEAADLHFVMEATGVYHEALAEFLFEAGCKVSVVNPYRVKKFAESHGFRSKNDRHDGLVLALYGNERNPTAWCPPPPEASHLKALLARLTALETDIRRELNRLEKAQVGRAPLEVMTSLDNSLAFLEEQKSRLQKEIEDHLSRYPKLKEERDLLLTIPGGGDILAVKFLALFESKQFTRAPEAAAFLGLIPVEHDSGTSVHKRPRLSKAGDGRFRAALFMPAIVATKYNPDVRELYQRLTKAGKTKMAAIGAAMRKLVHIAFGVFKNHTPYQQQIA

SEQ ID NO: 227993 - protein, 355 aa, unidentified
MTSTKYIGMDVHKESISIAVMNAAGKLVMECVIETKASTILQFIHGLRGDLHVTFEEGTWAAWLYDLLKPHVTEVVVCNPRKNALLKDGSKSDRIDARKLAEQLYMNKIKSVYHGEHGLRTLKELARSYLTITKDLTRVMNRLKALYRSWGIPCAGNEVYAPRHRSEWLSKITEAGVRRRAEHYYQQLDVLRMLRQEVRRDLLAESRKHKAWKLLRLIPGIGPIRAALLVALIQTPHRFRTKRQLWTYSGLGLETHDSAQYRVVDGQLNRSKKSVTLRGLNKDHNHDLKDIFKGAATRVSSSSGPLRDFYEALLAKGRKPTMARLTLARKIAAITLIVWKKEVRFDANYLKPQAA

SEQ ID NO: 227994 - protein, 434 aa, unidentified
MDTDYANRLGWFRQFKENINASANTLVVGIDIGKDKHHAFLGTPAGRTIHRRLIFENSIYGFDRLLFLIKRYLSDEQLADVVIGVEPTSVYHKPLAEYLISRGYSVVYVTNSAIKKNRAILDGRWDKNDTKDAANVADLVSRGRCHFYDLPDINLRDIRNLLSFRKRLKKQEHRLITRIRNNLVAQYFPELDGAWYRCQQENLAIVRFCLSPQKIAGLSFDDFCRMVTRRRRGIRQYQRLLHIHEVAEDSIGCRVGSSVTFEAQLLVENLQRSREQIAEVEQQLDLICGSYKEYELLQTIPGFGPYVSAVVLGAIGYAHRFENTKQLLRLAGLDLNASRSGKKSQTAVPVISKAGKADLRYALYQAAKVATSLTAEFKAYFERLLKGREKERGIKTKMRVKVSAKMLVIAWTLMKTRQRYKAGLLLTDEPVQPR

SEQ ID NO: 227995 - protein, 427 aa, unidentified
MKKRIKIDHLSTLCVGLDIGSRNNYITALDFDSNRLINMKPVPNAASGVEQMESMILAVLEANAQFKYLLIAMESTSFYGVHVANYLSTSDRLKPYDVKVFCLNPKEVANYKKSFTGLGKNDGLDSFIVADYVRVGRVDIDPWRGAQYLALQRLTRQRRHVTEAITREKNYVLNNIFLKFSEFALLGGEESPLTNKFSATAEAILTEYKTTEDIANTSLEDLVAFVSSSGRGRFSDPEQVAKLLQKAARDSYRLDKSLYEPITTSIACSFNCIRAFEHEQKVLNKAIAETVVGLNPVEYQILKSIPGIGPVYAAGILAEMGSIRCFPSNDSLAKYSGIVWRDNQSGEFDSDDTPMIKAGNRYLRYYLIEAAGSVATYCPEYTAFYEKKFAEVSKHQHKRALALTARKLIRLIFGLLDKNQLYSAAKG

SEQ ID NO: 227996 - protein, 405 aa, unidentified
MPYILALDVSMGHSYSVLYKDDTCLFEDEIEHTQRGFHALLEEIQHLPERPLIVFEATGIYSRPVEKFFQDHHFSYCLLNPLEAKKQMEENTLRSWKTDKSDAHRLAQTHLKNQRQPKEVQSNFYLEMRDLARFYQEIEKKITRLRMDLHNCLQLTFPELEQFFSNRLTPYALTLIRLFPHPDFVLASTRTKIKNKLINETRKKISANRAEQKADQIIHYAQCAYPAVEKDSIHCQKTIYYAELLQDLLEQKEALATQMIKKAEGSPCFLLYQTFPGIGALTAALLLGELGDITRFKTHKQLNAFVGIDIRRYHSGKYTGQDRINKRGNPKARKIIFFTIRNMIRQQRAAPNHIVDYYYKLKKQPIPKKDKVATVACMNKLLKCMHAMVRAHTEYDYAYEVSVDH

SEQ ID NO: 227997 - protein, 355 aa, unidentified
MNDAKYIGLDVHQATISATVLDCTGKLVMESILETKAATILQFIHGLRGSLHVTFEEGTCAAWLHDLLKPHVTRVLVCDPRKNALLKVGNKSDRIDSRKLVELLRSNLLRSVYHEQTGVRTVKELARSYLTITKDLTRVMTRLKAIYRSWAIPCAGQQVYAPRYRAEWLAKISEAGVRRRAELYYQQLDALRPLHQEARRGLLAEGRKHNALKLLRQIPSIGPIRAVLLLALIQTPHRFRSKRQLWAYSGLALETRNSGEYCMVRGQLKRSKKVIAIRGLNKNHNHDLKNIFKGAAIRAAAVDGPFQEFYAALLAKGMKSAMARLTLARKIAAITLIVWKKGVRFDAEHLKQQAA

SEQ ID NO: 227998 - protein, 410 aa, unidentified
MQTEQIPKRFIGLDIHKKYFVAVGVDKKLNQVLGPYEAPMIHLQKWAKKNLNSEDAMVVEMTTNTYVVYDTLKPLVHSVTVVHPPHVALIVRAQVKTDKKAALTLAQLHAARLLPGVWIPPVEVRELRALVAHRRKMVKLASIAKCRLHAVLHRHDIGLPEGWEPFSEEMRPWWEHLKVSPLERHCLMSDLATLDFAKGQVTFIENAIKEIAAQDERTPLLVQITGIGLLTSITILAAIGDIKRFPSAKQLVGYAGLGARVHASGESFSTGRITKAGRKDLRSAMVEAAHHAVQDHPHFKIEYERLSGTIGKKKAMVAIARKLLVVVWHLLTKGAADKFANPTQVACGLFAFAHRVRVKNLPNGMSALQFTRTQMDKLGIGQEVLVVPWGTKRYKLPPSKLKQDETSVPA

SEQ ID NO: 227999 - protein, 341 aa, unidentified
METTRHIGIDLHRNKFTCCMRVENGRSYLSEWILEDLPRFVKKLRPTDEVAVEVTGNTRLFYDAVAPHVARVVAVDPNQFRVISHSVKKTDPNDARSLALYLSKGLLPEVRMKEKTQAQIASLTQTRDTLVKLRTALKNKVNNILSAHGINLEREALSSEKKLNEVLALRFDPMIRIELKVIVEQIRSLNQSIAELEKTITEEGQKLQGHKNLTSIKGIGPLTGSILLSVIGDIHDFADEGKLAAYFGIVPRVSNSNETERSGRITKRGSKLGRTALVQCALIAQRYSPYLKRFYEKTKARRGTGKAIIALARKLLGIVYRTLKNNWVFEDFPNFVLAEES

SEQ ID NO: 228000 - protein, 480 aa, unidentified
MAKTQKSTSQKSTSQKSRAQKSTSRSRSKQKNRAKLKSQDWTLGLQVVHPKAAGIDVGNAEHWVAVPPHMDPEPVRQFGCYTVDLVALADWLQGLGIQTVAMQSTGVYHIPLADILAERGIRVFVVNPWETKNLPGRKSDIQECQWLLKLHVYGLLRNSFRPEEEILRMRTYWRQRQQHIGDAACHIQHMQKALTQMNVQLANAIGDISGWTGQAIIEAILEGERDPQKLAELRDPGVKASAEEVAQSLVGNWREELLFVLRQEYESYQALQGKIGACDEQLKKHYQTMEEKADPQQLPPCRREKRPHGNVPKCFDLRSELYRATGVDLTAIDGINVLTAQTVVSEMGYKMDRFETEAQFVSFMNLSPNNKISGGKIIGRDKRKVRNRAGQALRFAAMSLLRSETYLGAQYRRLRTKLGTPKAQKAMANKLARIVYRMLKYKEAYVDKGRDFYAQKYRQQQVRMLQRKAAELGLQLVEAA

SEQ ID NO: 228001 - protein, 419 aa, unidentified
MNKLNVGMDVSQDDVKVYILDQDGNEATKRFAVDNNPIGAETIATNILECCRMLSVNKVFIGLESTSVYGWHLQFYLADHQGLKPYDPMIVSFNAKIVEAFKKSLGNLEKNDWIDAFTIAERLRFGRLPKTCPVDFRYLALQRLTRHRFHIVDNIVREKNYYLSNLFLKFSGLCQNKVFGTNFCATATDLFDEFLTLDDIAARPLDELVDFMVEHGKNLFSDPKATAIALKDAVRKSYRMNASVDSSLNFVIKSCLDNIQALEKQKKAAEKAIALDVAGFNNQYLCLTSVKGIGPTIAAGLISEIGGISRFEDDNALAKFSGLYWSEHQSADFTAEDTFVKRTGNEYLRYYFTQAADQLRKYNPEYSQFYSRKYKEARTHKHKRALVLTARKAVRLIFALLREEKLYKPPAPKGGITEK

SEQ ID NO: 228002 - protein, 391 aa, unidentified
MSMYFIGIDISKYKHDCCIISAADQQIVSKFTVKNDKDGFEHLLTTLNSLSNPEDIKIGFESTAHYALNLELFLENAHHSFMEVNPVLIKEYKKSTTLRRTKTDSVDCESIARWLMTVEYKPHSKGFYHSYSLKSLTRLRDRLIRQRSFYLVKITNVLDHTFPEFKPFFNERLSKTAIYLLENYGSAEKMAHMNSASYDKLRCASRGKFSIQQFLRLKELAANTVGVNNSIFDIELNSLLTLYNSLCKEIKTLEAEITKLIEEVHPHYMSIPGIGPISAAVIYAEYGDISNFSNPGQMLAFAGIEPGINDSGTESHGGRMVKHGSSQLRYVLLNACLPLIRFDITFATYYAKKRAEGKKHRVAITHVAKKLIRVIYALERQDVNFNVQKLR

SEQ ID NO: 228003 - protein, 346 aa, unidentified
MLYAGLDLSRKRLDFELLAGDGERVLAGACPPDADGLAGLAERLGGLGEPISAAIESMNGARFVHDRLEEAGWRVEIADALKVKGLAPLACKTDRIDAHVLAELARRDLVPALWLPDPAVRAERERARFRLHLVRQRTRLKARIHATLLAFGHPCPVSDLFGARGRALLAGLALPEPWAGNVRASLQLIDQLDAQTEALERELRRLGAEHPYVALLTSMPGVAWILGYTIAAEIGDIGRFSAPRKLVGYTGLTPRVMQSGERDRRGPLTKNGPRYLRWAYIEAAQHACRYPPYHDLYVRTKRRLGRNRGAKVAAITVARRLAEATWWMLTRNQPFAPAGAAPVLAA

SEQ ID NO: 228004 - protein, 419 aa, unidentified
MERLIERVCGLDVGSKTVHACAIIDEGGRKPRVERIELPTHAEGLRALRAWLVERDVTHVGLEATGVYWMPIYAALEEVVTVIIANARHIKQVPGRKTDVTDAQWLATLLQHGLLKASFVPPKEIRPIRDLTRYRRNLIHARTRLCNQVLKLLDQVGIKLGSVASNAFGRSGMDMLRALAEGTTSPQELAQYARARMKKKRAELELAFGAEMGDQHRFILKQQLARLAAFNEDVANVEAEIRGRLRPYEKELALLMSIPGVHETAAIDILAEIGPDVSAFDNEAKFASWGGMCPGNNITGGKSRRARRRSGNPYLQSILFECALAATRTKGSYFQAKHARLSRGRPKKSSIFAIAHKLARAVHRVLGQRVGFADLGEHYLDRRDKEATARHLVKRLAGLGLTTEAVNALFATCATSPAA

SEQ ID NO: 228005 - protein, 347 aa, unidentified
MQHYVGLDVSLKQTAVCIVDEAGKIKREGMVASDPDAIAHFVERHAPHAVRIGLETGATSTWLWTELNKRGLPVICIDARHAKAALKMQINKSDRNDAAGIARIMQCGWYKEVRVKDLDSHAIRALLGSRALLVELKRDLENQIRGLLKNLGLVIGRAKLNTFTTRAKELIDGQPALAAAVEPLLKAREALARQIADLDRKVLRLARSEPQVRRFMTVPGIGPITALCYLATIDDPARFRKSRSVGAYVGLTTRRYASGETDRTGRISKCGDGMLRSYLYEAANVLLTRVARWSALKAWGMRIAKRRSLSKARVAVARKLAVILHRMWVDGTEFCWSSQEPAMQPAS

SEQ ID NO: 228006 - protein, 357 aa, unidentified
MDTISDDEPEVTVGIDTHLDQHAVAAIDAVGRLLGTISVPATAAGYEQLLTWASVFGLVTRAGVEGTGCYGAGVARFLQAAGVEVIEVTRAARADRRHHGKSDSLDAQAAARVVLAGTATATPKQRSGIVESIRLLRVARQTAVKARSQALIQIKAILVSAPDELRQELRPLKAKQLVDRCANARPGAGRDPLTVTKRVLRSVARRHRLLDAEIAALETELDELVALAAPRLLAEHSVGRETAAKLLTLAGDNADRLRNHSALAALCGASPVEASSGQTVRHRLNRGGDRQANNALYTIAMVRMQHHPETKAYVTRRTREGKTRREIRRCIMRNLARRFFPLLMADLRDARTIPLLT

SEQ ID NO: 228007 - protein, 355 aa, unidentified
MTSTKYIGMDVHKESISIAVRNAAGKIVMECVIETKASTILQFFDGLRGDVHVTFEEGTWAAWLYDLLKPHVTKVVVCDPRRNALLQEGNQNDRVDARKLAELLHNNQLRSVYHGDHGLRTLKELVRSYLTITQDLSRVMTRVKAIYRSWAILCTGKQVYASRHRAEWLAKISEPGVRRRAEFYYQQLDALRCLRQEVRRDLLAESKKHKAWKLLCQIPSIGPIRAAALLGILQTPHRFRTKRQLWTYGGVGIETSSSADHHLVKGQLERNRKQVEIRGLNRNYNHDLKNLFKGAAVVAATKPGPFAEFYAELLARGMRPEMARLTLARKIATIVLIVWKRGVCFDAQHLKPQTA

SEQ ID NO: 228008 - protein, 456 aa, unidentified
MPRARRRPTRVATPPVVHPHAAGIDVGATELYVCVPMERDPQPIRRFGTFTADLLALAAWLGEVGVTSVAMESTGVYWIPLFQILETRGFEVCLVNARHVKNVPGRKTDVQDCQWLQYLHSVGLLRGSFRPPDAVCAVRTVLRHRERLVQLAAVHTQHMQKALTQMNLQLHHVLSDLTGVTGLAILDAILAGERDPAVLAQHRDPRLKASPETLAKALVGDYRPEHLFTLRQALASFRHYQRLVAECDTEVQTLLDAFPSTVDPAAAPLPPDPRPHRRRSAAQVELRTELYRILGVDLTRVEGFATIPLALFAELGPTLAAFPSSKHFASWLGLCPDNRISGGKLLAVQTRHVKHRVAQALRTAAQSLHRSQSALGAYFRRMRARLGAPKAITATAHRLARILYHLLTTRQPYDETQVAAAEERYHRRSEARLRAHARALGYHLVPAAPSSAGGVS

SEQ ID NO: 228009 - protein, 318 aa, unidentified
MGNSPSIFVGIDVSKKKLDVALLPSGEYFHVSNSPEGLLELLEKLKGHPIAAIVVEATGGYEQPCVAALADAKLPIAVINPRRARELASGLGKLAKTDRIDASVLAYYAQHGEIHKALQTPEKQAQLEALVTRRRQLVAMRAIEQTRLEHTTFKKARADIEEMLAFLSRHIEQIEEQIAKVIDSDDHWSDLSGRLQTVPGIGKVTAQILLAELPELGQLNRQEIAALSGVAPYHRDSGQRKGKRVIRGGRSALRTTLYMAALTARTWNAKIKTFFERLRAAGKPFKVALVACIRKLLTILNQIAKTGHAWNEHLPKTS

SEQ ID NO: 228010 - protein, 405 aa, unidentified
MWYVGINWADDHHDAVVIDDAGKRVAATRVPHTFDGLAELIAFLRGIGDVDAHPAHLACIVETNRGLLIAALLEAGVPVYPVNPTTVDRQRKPSGAKTDAIDAYLLARTGRSDLADLRRLTPDGPLVAELKLLTRDQDSLIQGQTRLVNQLTACLKAYYPVALELFGKLHQGATLAFLRAFPTPDEARAATMEQIASVLTAARYATAQAKAHEIQQRAQLPQLIADPVVTRAKARLMLTLAAQLQVLVAEIAAYDREISRVFAQHADSAAFASLPRAGKRLAPRLLAEWGDDRGRYAAAANVQALAGTSPVVFQSGNYASVHKRYACSKPLRNALHQFAWQSTLQDDWANAYYRRKRREGKSHTKAVRALANQWVRIIYALWRKRETYDPMVFVAAQQAHAPRAA

SEQ ID NO: 228011 - protein, 341 aa, unidentified
MEKATIIGIDLAKRVFQVHAAAKDGRPVLRKKVSRAQLLGLLAKQPRAIVAMEACATAHEWGRAISGLGHDVRLIPPIYVKPFVRRQKNDAADAEAIAEAASRPTMRFVAVKTEEQQARSMIFRTRDLLVRQRTQLVNALRGHLAEHGIVAAQGLAKVKVLATAMQDTGSLHPLVRELGQRYLDHIARLDVEIAELDKRLRRPSQDDETAKRLQSMPGMGPITAAAIEAFAPPMATFKRGRDFAAWLGLVPRQHTTGGKPRLGRTSKMGQRDIRRLLIIGAMSVVRWAVRKGAAKGSWLARMLAKKPRLVVAVALANKMARSVWAMLSKGEDYRGSALAPA

SEQ ID NO: 228012 - protein, 352 aa, unidentified
MDNGNKLDFTGQHIYVGMDVHKKSWSVSIYAEHFEHRTFTQPPEVKKLVNYLQRTFPGATYHSVYEAGFSGFWIHDRLREEGVHCMVVNPADVPTMHKEKAGKSDKVDCRKLARSLRSGDIKGIYIPSSVQAEDRHLIRTRQSMVRKQTRCKNQIKSILFFFGIQITEEGHWSRNFINWLETIRMERASGDCALKAHLEELKHLRQIIAGLNKAILALSRTDAYRDQVLLLRSVPGISTLTAMTLLTELYDISRFSSLDRLASYTGLVPDIRSSGEVEYTAGITCRRNPILRTVLIEASWVAARKDPALMMAFNKYSLRMRKTAAIVHVARKLLNRIHFVLMNQERYVPAVV

SEQ ID NO: 228013 - protein, 340 aa, unidentified
MRFYTQQHTYYCGVDLHTKMMYLCIISQDGEIVLHRNLSTDATAFLTAIAPYRDGLVVGVECIFCWYWLADVCAREGIAFVLGHALYMKAIHGGKVKNDKVDSHKIAGLLRGGMFPQAYVYPAQMRATRDLMRRRQYLVQRRAELLAHIQNTNSQYNLSALDKKLDRWSNRVDVPQHFSDVAVRKSIEVDLALLDELDVLIKQLEAHIVREVKVHDPRSWYRLRSVPGIGQVLGLVILYEIQAIERFPSAQDFCSYARLVKCAKQSAGKNYGYSGKKIGNAHLKWAFSEAVCLMMRELPQAKAFVNTQAKKHGKGKAMSTLAHKLGRGSITCSSARRLST

SEQ ID NO: 228014 - protein, 356 aa, unidentified
MSKTNPVKIIIGVDTHKDIHVAVAINGIGAHLGTLTIPVSPKGYQNLETWARAFGSIHAFGIEGTGSYGAGLARFLQAKGHTVVEVNRPNRQLRHQNGKSDPLDAESAARAVLGGQANARPKSADSSVEMIRHLKVARDTAVKSRTQAMVTLKTIIINAPAALRQALDRIIGKMALIRHLAALRPGPILSVTASAKGALRAIARRWLTLDAEIRAHDADLEALTASCVPAMLEAHGISTGTAAEMLILVGDNPERIRSEAAFAKLCGVCPVPASSGKTNRHRLNRGGNRQANAALYRVVIVRMRNHQPTLDYVKKRKADGKGKMEIIRCLKRFVAREIFGYLCGAQRSVPSISKAT

SEQ ID NO: 228015 - protein, 313 aa, unidentified
MKAVPSNVFIGVDVSKDRLDVAVAPSGESMSFANSEDGIALLADFVKPRNPELVLFEATGGWEMNAVNQLATHRLPLVVLNPRHVRDFAKATGQLAKTDAIDARILARFGQAVRPEVRSLKPLELRKLDALNTRRRQIVEMLTAEQNRLVSAPEWVRPDIEELIAILKKRLAAINRDLNKLIRKSPLWREKDKILQSFPGVGPVTASTIIAALPELGSLNRRQIATLVGVAPLNCDSGTHKGKRKIWGGRADIRSVLYMCAMTAARCNPVIRPFYQKLLRAGKPNKVARTACMRRVLVILNAMMRSHTCWQPT

SEQ ID NO: 228016 - protein, 343 aa, unidentified
MKYIGLDLHKKKIFATVLGEDGKILSRTKIRSKRQDIKYYLKSQGDRGKLSVAMEASYNWPYFYRAVEEAADNIVLAHPLKTRIIGEAKIKTDKIDSKALAYMLRADMLPRAYVPKKDTMENKILLRSRMSLVKIRTQIKNKIHAIVDRNIDSYTGLENLTDIFGKTGKRILRDTKINTIDYKVLTGYLDLIDEIGKKIKDLEAQIDKKSLGDRDIALLKTIPGIGTFTAFLVKSEIDNISRFSSKEKLCSYAGLVPSTHGSADRLYHGRITKQGNKFLRWSLTEAAQVSIRYSEYFRYYYNKVRSRKNANTATIAVARRMLEVIYCILKEGREYIEKPINLK

SEQ ID NO: 228017 - protein, 338 aa, unidentified
MFYSGIDQHKLFSYITTVDSDGKIIKEAKLNNNQFEIVNYFTSLGKDHIATVETTGGWYWLNNLLFSNGISLKLAHAKYVKAIAYAKVKTDKVDSHILAQLLRMNFIPEAYKISDDLCPLRDTLRARLRLSQKRTSCLNFMNRMLEKFNINDPSCLSDFYKLQYQQFDNQVHLLKKQMLTLEKSLYPSMIPNEDIQRLLWIPGIGKMNAFTLLLEVGDINRFESEKNFLSYCRLVPSARNSAGKTKQRSSKDGNKYLKLVFSDAAVHALQYYPVIKKYHDSKLRKKKKQVAHAIIAKEIARIVFYVLKYKSDFNNHFKGVYLENKKSLQWPRITSPDV

SEQ ID NO: 228018 - protein, 402 aa, unidentified
MNAVGIDVSKGKSMVAIMRPFGEIVSAPFEIKHTASDINSLVELINSVEGESRIVMEHTGRYYEALAHQLSEANLFVSAINPKLIKDFDNDSLRKVKSDKADAIKIARYALDKWQNLKQYNVMDELRNQLKTMNRQFGFYMKHKTAMKNNLIGILDQTYPGVNTYFDSPARSDGSQKWVDFASTYWHVDCVRKMSLNAFIDHYQNWCKRKKYNFSQSKAEEIYGKAKELVPVLPKDDITKLIIKQAVNQLNSASTTVESLRTLMNETASKLPEYPIVMAMKGVGASLGPQLMAEIGDVSRFTHKGAITAFAGVDPGVNESGSYEQKSVPTSKRGSSDLRKTLFQVMDVLIKTHPQDDPVYQFLDKKRAQGKPYYVYMTAGANKFLRIYYGQVKEYLSSLPES

SEQ ID NO: 228019 - protein, 415 aa, unidentified
MKVVFPTCCGVDVHKRFLVATIITSPADSLQPHYQKKRFSTFNSDLNRFADWLHENACLDVCMESTGKYWVPVFNILEKRGIRVVIANPKWVKAVKGNKDDTKDSKWIGDLFRIGLVKSSFIPDKNIRILREFTRYRYKLTSMRSSEKNRFQNAFTVCNVALDSVVSDMFGKSATAITDYLASNEPFDAEYCVSLLQRSLKRKADAVLESIEGYSITDEQKLRIGIIREHLNHIVGLIDKVDACINTLVSEYESQINLLCTIPGVRRDTAITIISEIGVDMSQFGSSKRLCCWAGLTPGNNESAGKKKSVRISRAGVYLKPALVEVAHAAVKDKANPYYALKYERIAKRRGKKRAIIAIARMILTAIYEMFSTGEVWNPVDLYKVDMPEHLKEKQLAKAVKQAIRFLESQGLNVS

SEQ ID NO: 228020 - protein, 376 aa, unidentified
MLKYSLGIDVSADSLACCFSCINHQQQVQVISTRTVTNSPAGFKSLIPWIGKHHKQPQLPLVCLLEATGVYYENCALALSKAEFYVSVILPNKSKKYMESLGIKSKNDKIDAKGLARMGAEQALPRWQPMSAFFFTLRTMTRQLESLQKTKTSLSNQLHATQHSIYEVGVVTRQLKSLIRTMENQMVGLEKAITNHLNSDPEIAEKVTHLCSIKGIGLTTVAVLLGETNGFALMENIPQLVSYSGYDVVEDQSGNRIGKTKISKKGNAHIRRALYFPAITAVSCQVKPLYNLFHRTYSKHNIKMKSYVAVQKKLLILIYTLWKKNEPYKEVESEYERLGSFLDSESNTITKKKFPTKGREPQGKPLVEKTVSFSLE

SEQ ID NO: 228021 - protein, 344 aa, unidentified
MNITTIGIDLAKNVFQVHGVDARGNAVLKRQLRRDQMVLFFVNLPACVIGMEACASSHHWARKLQGFGHTVRLMAPQFVKPYVKTNKNDMADAEAICEAVGRPNMRFVPVKSLEQQAVLSLHRVRQGFVKARTAQANQIRGLLGEFGLVMPRGIANVAKRVPGLLEKVSDQLPATLRELIARLLCHMRELDRQVGELEAQIKAWHRTSTLSQRVAQIPGIGPLGASALVASIADARSFANGRQTSAWLGLVPRQNSSGGKSKLLGMSKRGDTYLRTLLIHGARSAILAAQRKTKVDPWLAGLLERRHPNIAAVALANKNVRTVWALLAHDREFRPEYVPVPPAA

SEQ ID NO: 228022 - protein, 403 aa, unidentified
MELSEIGVFVGVDMAKTDHFAQATTTDGVELFARSVLNDQTAIEKLIDDAAGRGAVAVVIDMTASNAQLLLAVAAGREVPVAYVTGLQMRRAADLYAGSAKTDPRDAWVLADFARRNADRLAWLDVGDELLLELRVLNGRDVDLATDANRIINRTRDALTALSPGLERAVGQRLVQAGVRDLIAKWSTPTALRAAGKIKIRNAIKKRSTRLANKITDEIWAALDAQTVVLPAEETSGQVVGELLADLDRIQTQRARLAAQIEEAFLAHPLGQVLVTLCGFGPRTGARTLAEIGDPTRFANGSRLASYAGLSPTDWRSGSSIKGAFQHRGGNHRLKNAMFLAAFVATQHDPDARAYYQRKRAEGKKHNAAVICVARRRCDLIHAMLTTTTPYDPSRSKKLAEAA

SEQ ID NO: 228023 - protein, 320 aa, unidentified
MMAQNDLVVVGIDVAKEKVDACIRSLSQRHAFPNTAQGHRKMTAWLHKHKVNKAVMEASGGYERGWAKVLRQAGIEVRIVDPKRVRSFALSAGRLAKNDAIDAEMIAWFAETFSSAPGQPHDAAREELLALVKARKRLLDLQTRLKSQNEHAAPEAVQKAHARILKSLATEIARLEAAISAKVKATPDFAERADIIESVPGFAETTSANLIAGMPELGQVSDEIAAALIGLAPYDDDSGKRRGERHIKGERRWVRNAIYMPCLGAATQNNPVLKVFYQRLIAKGKEPKVALVACMRKLIIILNTMIARQQKWDPSRYALN

SEQ ID NO: 228024 - protein, 472 aa, unidentified
MKYALVRVLPEVPPGGVCAGIDWASADHAVCVVDLAGQVADRFAAAHDRAGIAGLIARLRGRGAAEVAIERGDGVLVDALLAAGLTVVVIGSRQVKNLRSRYGSSGAKDDRFDAFVLADTLRTDRARLRPLVPDSPATLALRAAVRARRDLVAHRVSACNQLRAHLQVAFPGAVGLFSELDSPLSLAFLAAFPGQQAAARLDEQALAAWLATVPRRGNTAPAGVLAARLAAAPRGAAGADAAQAAVTTQLAAATAGLAGRVRALEAEIAAQLAAHPDQHIFTSLPRAGTLRAARLLAETGDCRARYPDPWSLAGLAGVAPVTRRSGTYISHEFRWNVNRQLRDAICDFADGSRHASPWAATVYAAARDRGKDHPHAVRITARAWVLIIWRCWQDGTSYDPANTAPCKTSSPARPPPAPRSRTGNREQPPGRTGHRPPSPPGGGLSHPPPARSLPKIHTGQPDPARPVGVVTQ

SEQ ID NO: 228025 - protein, 392 aa, unidentified
MYIVGIDIGKNHHEASIVSPEGKQIGRSLRFATTHKGADSLMSFIFKNIGNSPCVFGMEATGHYWYPIYSFLKAKGYTIYVINPIQSDSLRKMYIRQTKNDSIDSFLIAEVIRFGQFGTTSMADENILAMRQLCRYRDSVISSRTEIKLRIGTIMEQIFPEYEKQFSSLWVSTSMGILEKYLTPENIENAPIDELFAIIKDKSHNRLTKAKAISIKEAAADTFGIKIAQDAFSFQLKQLIDRMNFLDKQIEALDIEIMKYYEQFDCYLHTIPGIGIIGAATILAEIGDISRFKNSSALVAFAGIDPTVRQSGEFNSTHNHMSKRGSPYLRHAIFLAATTCSFHNSPLNAYYKKKRDQGKHHLTATGAVARKLTTVIYAVLQYSKHYEPKSFC

SEQ ID NO: 228026 - protein, 409 aa, unidentified
MELLIPRCAGMDVHQATVVITVRLPGDDGGRRSLTETFGTMTPDLLALRDWLQAHGVTHVAMESTGVYWKPVYYVLEEAFTLLLINMHDLKRVPGRKTDVKDSEWLAQLLECGLLKASFVPPPPIRELRDLTRYRVQQVRDHAQETNRLHKVLEDAGVKLSTVVSDVMGVSGRAMLAALVEGKTDAVALADLARGRLRTKLPALQRALQGRFRAHHAFLLRQILSKIDFLEETIAQLTEEIDARIRPFEATLTALDTIPGVDRIAAISIVAETGGDMQRFPSAGHLCSWGAMCPGQNESAGKRRSGKTRKGNVYLRRTLIQAALAATRKRDCALQTRYHRVKRQRGHKKAVVAVGHQILEIAYYIMRDGVTYHELGADYFTRRDRERTMRRSIKQLEALGYRVSIEDAA

SEQ ID NO: 228027 - protein, 343 aa, unidentified
MRAITTIGLDIAKSVFQVHGIDAEGNVLVRRQLKRRYVLTFFEKLQPCLVGIEACATSHHWSRELKALGHTVRLMPPAYVKPYVKRQKNDAADAEAICEAVTRANMRFVETKTPEQQSCLILHRARQLFIRQQTSVINAIRAHMAEFGIVAPVGRKGVEQLLAIVMDAGDQRVPEVARACLAALGAQLRMVKAQILEFDRRIMAWHRSNETSRRLDAIPGIGPALATALVASVADPKAFRSGRNFSAWIGLVPKQHSSGGKDKLGSISKQGDRYLRSLFTAGALAVIRYAKIHGTQHRPWLTALLARRPTKVAAIALANKIARMAWAMMAKGERYKEPVALAA

SEQ ID NO: 228028 - protein, 418 aa, unidentified
MKSMEITAVGIDVSKRKSTVAIRRPGGVIVARPFDISHSNHDLEKLVSVLKTTGGDIRVVMEHTSNYWKPIALTLKNAGFYVSVVNAMLIHDFSDNSIRKLKTDRADSLKIANYALTFWNQLPPFNDEDETRLVLKEQSRMYERLASTATSLRNGLIALADQTFPSIDQAFGHAIKNADGHEKWVDFFSIYWHRDCVLRLSIEKFTESYRKWCLRRNYKFRTNTAHKLYALAQDAVPTLPKNNGTKALVLQACKSLNAVCEAKQSTQEEMNRLASLLPEYEVVMQMEGTGPITGPALMAEIGDVRRFKNKKALVAFAGIDAPPFQSGNFESKSRHVSKRGSPHLRRTVFLVANIILTLSHKDNSVFCFMDKKRAEGKHYYVYTIAGSAKFLRIYYARVSEYLRTQEPPAAAICLDCKD

SEQ ID NO: 228029 - protein, 440 aa, unidentified
MKALPILDERATGIDVGSERLHVSIGGEAPKVFGTMTRDVQSLVAWLSEQQVRTVALEATGVYWMYLYEALQAAQIEVVVVNGRHVRNVPGRKTDMVDCQWLATLHAHGLLRSGFVPPEHVRRLQDYVRLRDDHVAMAASHVQHMQKAMERMNVKLHDVISDLTGVSGMKVMRAILDGQRDPAKLLELCDAQIRRRKSERVVESLRGTWKREHLFALRQAINAWDFYQGQIRECDQAIEQVLHEMAGPPDDGDAPAVQRGKAANANTPDVRGLHRVLVQVCGGQDPTTMPGMADHSLLRVISEVGTDLTKWPTEKHFTAWTGLAPGTAQSGKRRKNQARQRNRVGLFFSAMARSAGNSIDTAFGGMYRRLKARRGGLVANKALARKLAAMFWRVMVHGVDYVEQGLQKYQARATLSEQRVLNKLARKHGMQLVPTTQPAT

SEQ ID NO: 228030 - protein, 367 aa, unidentified
MEVTTIGIDLAKSVFAVSCADRRGKVVMRKQLRRGQVLELMGKLEPCVVGLEACGGAHHWARAIGRLGHEVRLMSPALVRPYRTGPNKHDRNDADAICEAVGRPSMRYVAVKSVAQQDQLALHRVRAQLMKQRIALSNHIRALLHERGVAARLGAAGLRQALTDALAEEGNEVSGAMGALLLELSGWLRESEQRIAAITKRIEGAVKDDERCMRLREVPGVGPLSASALVATVGNAREFKSGRELSAYLGLTPRQHSSGGKTVLLGISKHGDRYLRTLLIHGARSLLYRNRRGGVHPRAAWATRLCARRGANVAAVALANHNARLLWALLSRGSNYRPAPPPSSFPSRPSTVVKRAREGKLLMAKGA

SEQ ID NO: 228031 - protein, 459 aa, unidentified
MKTKKQKVGKRSQFKPKAKTTRKAVLERIKLNAAGVDIGSEKIYVAIIDEPVMEFDTYTSGIKRAAEYILAKNSDSIAMEATGIYWFPIFEMFEEYGLECYVVNACHAKNVPGRKTDVLDSEWLRELHTFGLLSSSFIPNEMTRKLRTIVRLRDDHIEMGSTHIQHMHKSFDAMNIKLHNVISQTTGMSGLRVIKAILSGEQNPEKLANLCSQQILKNKRQDVIKSLEGNYKKEYLFALRQALDLWEFYQEKIVECDKEIEKILNEMGIGQSVPKNISKAKPINNHEPLIDDFHKKLLTITGGRDASQLTGLTDYTVMRLIAETGTDMSPWQTEKHFASWCNLAPWDKSSGKKKGTRKRKINNRTGQIFREVVPSVGKSKYLALGGFYRRIKSRHGAKVANKATARKIAVLYYRLMKYGFDYVEQGLEEYEKKYKEKMIQSITKKAKQYGMEMIKIDAA

SEQ ID NO: 228032 - protein, 384 aa, unidentified
MSKSGKVIGLPIVNARAAGIDIGSRIQVAAIPPELSDNPVRTFQSFTADIEQMANWLVSIGITTVAMESTGVYWIPVYEILEAHGLTVVLANARDCKAVPGRKSDVNDAQWLQRLHACGLLRASFQPAREIAALRAYMRIRDRHLEYASAHMQHMQKALTLMNLQLHHVISDISGVTGLKIIRAIVAGEQDPDVLASMRDIRCHESLQTIRCALVGNYQPEHVFALSQALALFDAYQARIADCDKQIENSLRVLNADRPKLETPLPAPRTKTKQANAPKFDVRSMLCQLTGNDLTLIHGIGPSIALSLVAECGTDMSKWPTEKHFASWLCLSPGCKISGGKVLSARTRKSSSRLASQLRLAASNVGRTETALGAFYGVSSFSVQ

SEQ ID NO: 228033 - protein, 420 aa, unidentified
MRLRAEKIVDIVHERAAGMDISKTDAKVCVRVPSLRQGFFTKTVTTYGATTNEVLRLRADLEVAGVTVVVMEATGDYWKPFFFVLAETLNVELVNAKQARNIPGRKTDVSDATWLAELAAHGLLRASFVPPEPVRELRDLTRARTNLTEERTREFSRMEKGLEASGIKLSSVVSTLATVSSRRILDALVAGERDPRVLAGLAHVSMVKKSAQLVEALTGRFNDHHAFMVRLHLGRIDHIESTIAEIDARIEDIIGPFRIARELLATIPGISEATAIKILAEIGTDMSAFPTSGHLASWAGVCPGQNESAGRVKSTATRPGNRHLKAALGIAALSVSRSKTTYLAVKYRRIRSRTGALKAVVALEHTLLVIIWNMLKNGVAYEELGPDHYAQKNPDRTRNKALNQLKSLGYDVQLTPRAAA

SEQ ID NO: 228034 - protein, 330 aa, unidentified
MKTWNVVLGADVSKKTVDICWAERKVFIRIDNNSQGFAKFKKWCKSNYINLQKTFVVLEYTGGYEYRFIQFCQSQSIDYCRVAGLEIKKSMGMVRGKSDKADAFRISLYGEEKIRRLEPSKPIDEKILELKSQLSFRKRLVRESAGYKSTVKERKHMYEVDNEDLIISVANEKIEANETYINKIESRIIGLITSEESMYLNYRILTSIKGIGPINAWMTIAYTENFTSFPDGRHYAVYVGVIPFEHTSGTSIKGRRRTSHLAQKELKQELNQAAKIAIQHDPELRAYAERKMKSKEYGLVLNNVKFKLILRMFSLVKRGEMYVENYRKSA

SEQ ID NO: 228035 - protein, 341 aa, unidentified
MLSDTVFTRGMQEMTYKVYVGIDVSKFNFDVAWVNKGSKKPKTKQFTNDVKGFDIFHRWIIKQSKKEAKDILVLMEATGVYHENLAYALYDMGFGVSIINPTYVKQFAGAIGNHSKTDKQDAKVLAQYASIKEVRLWEPEPEDVRYLKQLIARLDALEMDKQREKNRLEKLLSSKNNDAFLLESLQDMLKNFDEAIEKIQAKINEHIDNNPDLKSGFEHLISIPGIGEKVAPRVLNLLKSKQFQSASECAAFVGLTPVQRQSGLMKGKPRISKKGNSTIRSKLYMCAMSAIKYNPDIKVQYERLLANGKCKKAALIAAMRKLLQICYGVIKHNSNYQPQIN

SEQ ID NO: 228036 - protein, 411 aa, unidentified
MPTIVYPVCCGIDVHKSFVVACIATTDKNLVTTYSKPKRFSTFTNDLRRFAQWLSENNCRDVCMESTGKYWIPIWNILEPTCNLVLAHPKYLKAIKGKKTDKRDAKWIADIFKFDMLNGSFIPPAEIRQLRDLMRYHTKLTGYTTGEKNRAQNCLTVSNIKLDDVFSDVFGKSASAITARMLENNEPFDVSEFVDKRCKKPIDEIQAAVDGVMCANQAEKLRIIRSHIQSLDFCKANLESEILSIAENFLPQINFVSTVPGFQAFSSMFAIGEIGVDMSVFETSRHLCSWAGLAPQNDNSAGKKKTTRISRAGVYIKPLLVQCANAAIHSKNNPEITNRYIAIKKRRGHKKAIIAIARMLLTAIYNILKKNEPYNPELYFQSNKPPVQREVTVDQAIFILQRQGYLVSKPL

SEQ ID NO: 228037 - protein, 350 aa, unidentified
MSIIGCDLHTRYQQIALLESATGEVVTRRLEHENGEARRFYASLPERALVGIEATGCTQWFERMLAELGHELWVGDPAEIRARAVRRQKTDSRDAEHLLDLLVANRFPRIWVPSLEERDWRQLLKHRGKVVQMRTSVKNQLHYLAMSQGVCRKRKLWSARGRQELEGLALGRWASRRRQELLELLDGLEPRIEELNQAVEAEAERRPDVVRLMKQKGVGPVTALAFVLTLGPVERFRNSRKVVSYLGLNPSEHSSGGRQRLGHISKQGNEMMRWLLVEAGQSAAQFDPELRRKYLRLKFRRGAKVAKVALARQLAVRLYWTLRQASETTPPVRMPSSPAQTLVDASPSSF

SEQ ID NO: 228038 - protein, 377 aa, unidentified
MQMEVTMNSLIHIGIDVHKDTYSLCSYSFQTNQAFGQTKIGSDNKLVIKYVEKLLKSHPEAEVLCGYEAGPTGFGLYRDLCKANIPCVVMAPTSLPRAVGNRVKTDRLDALEMAKHLAYGTYSAVRVPTSEDEAVKDFTRLRNTRQQALKKAKQNLLSFLLRRQRRYTEGSSYWTLTHHRWLKQQQFTDPLDQETYNEYLQELYDQEEKVERYDARIEELSRLDAYRERVEKLRCFKGIDTHTALSLVCEIGDFSRFATAAQFSAYLGLVPREDSSGQRERRGGITKGGNTRLRTLLTEGANAATRGSLYGTKSKKLKARQAGNPAQVIAYADRAQRRLHRTYNKLVLNSVPRNKAIVAVARELSCFIWGMMNDRID

SEQ ID NO: 228039 - protein, 355 aa, unidentified
MKYFVGLDVSLDETHICIVDDDGKIIKQTKAVTDPKIIAEALAPYAGDVRRVGIEASSLGAWLHDELTDRGLPAVVIEAQHARAAMDAQRNKTDKNDALGLAQIMRTGWFRAVHVKSPGSQRLRMLLANRKLLKRKLVDMENHIRGTLRAFGLRMGKVSRGNFEARAYELLEDNDKGLEAFISTMLSVRRNLIDGYNTLHKFVLAIVKKDPVCRRLMTVPGVGPVTALSFRAGIDNPHRFSHSRTVGAYFGLTSRRWQSGTIDREGRITKQGDREVREALCEAAASLLLRTRKWISLKAWGLRLAKRTTMMNAIVAVARKLAVILHRMWVDGTDFSVGKGADVIEKVRLAKPQAA

SEQ ID NO: 228040 - protein, 375 aa, unidentified
MNQFIKYVGLDTHKETIAVAIADSTGGKPRYYGEITNTPKALTKLIKDVSPHGEVVSFCYEAGPCGYGIYRQISSTGHNCCVVAPSLIPTKPGDRVKTDRRDSENLARLHRAGELTPVWVPDQEQEAIRDLTRAREDMKHLERQARQRLCAFLLRHGQRYTSGKSKWTQAYWRWLERIKFDHRVQQAVLQEYIDSVKQQQRRVADMEQAMHEAMTEWTLAPVVTGLMALRGIRLITAMTVVAELGDITRFDSPRQLMSYLGLVPSESSSGPKTRRGGITKTGNGHVRRVLVEAAWCYRFPARKTAQIQRRAEQTSVEAQAIAWKAQKRLCGRYQTLTKRGLLSQKTCTAIARELSGFIWAIACELMPMNTTQTNA

SEQ ID NO: 228041 - protein, 343 aa, unidentified
MERELYIGVDVSKRWLDLAYYDGVTVDWRQGHIRVDNKESGFLLIGRWLKKIGADKDSVLFCMEYTGLYCQDLRMWLEKEEFVYGMVNPRKMHRFEPDLGAGERALDRIKTDEMDSFRIAMYCEKHCRKIRSQPSRLPAPAYFKLKRLIAERRQYVVQSAIYKQQLHDVCDYDTDGSVCRKKEELKSLMSHVHQTDAEILSVMEEDAAIKKNYDLLRSVTGIGIVVATETIILTENFTSITNPRTYACYIGIAPAKKESGDSVRGGEHVSKKGFTQAKADLSMACLKAIQTDANIKSYWQRRKTEGKKGGVVLNAIKFKLVLRMFAVIKRQKPYVEIDGYKKN

SEQ ID NO: 228042 - protein, 418 aa, unidentified
MKSASTTPSSKLSARPANGVTGGVDWASEDHAISVVDHDGRQVARKTIDHSAPGLRAMVKFLAQHGVTEVAIERGDGPVVDALIDAGLTVVVISPNRLKNLRSRYGSAGNKDDRFDAFVLADTLRTDRTRLRPLTHDSEATKTLRATVRARRDLVKHRVALANQLRAHLQAALPGAVGLFRDLDSPISLAFLARFDCQERADWLSPKRLRAWLSSVGYSGRKDPAELYARLQAAPRGPVGADGAARAHVTRALLTVLHELVDQIKSLEAQIAEQLALHADAHIFCSLPRGGTVRAARLLAEIGDVRGRFPDASSLACLAGVAPSTRQSGKHRAVTYRWAVNKELRDAVCDFAGDSRRANPWAAKIYNDAIARGKDHPHATRILARAWLGVIWRCWQDHSVYDPAQHGALQALLTTEAA

SEQ ID NO: 228043 - protein, 412 aa, unidentified
MDQLYRVFVGIDWGNEAHQVWATDPDGTLVGERQVAHRGEALFQMADWLVTLADGNAAAVAVAIETPHGPVVDTLLDRGCHVFAINPKQLDRFRDRFSPAGAKDDRRDAEVLSSAVRTDRQYLRPLRLGDPLTLQLREASRQDAELQEDFRRLANRLRDHLLRVWPELLALVPAANEPWLWTLLELAPTLTAGQSVRPARVRQLLRDHHIRRVRAEQVVEILRTPSVYLATGVREGVAPRIADLIEQIRIVYAQRRRAERWLETALQTLASDAPAERHREHQDVEILQSLPGIGTRIAATMLAEAAQPLRERDYHALRVLGGCAPVTKRSGKSRVVQIRYACHARVRFALRCWAMGAIQRDPHSRAHYDRLRLAGHHHDRALRGVIDRLIPVLIAMLRDGTLYNANRRCTAA

SEQ ID NO: 228044 - protein, 394 aa, unidentified
MIYVGIDVASTKHDIVILNELGEIFKKAFSIKNDLDGYKKLLSEISFAKEFFNDQNVRIGLESTGHYSRNILHFLILARFEVMFINPLLTNMDRKANSVRKTKTDAIDAKAICMFLIRNQNDFKPYTLSSYHIDELKTLVRQRKSLKTQINKDMNLLHAYVIQAFPEYYKIFKKINSKASMEVLSRHASLSEFKRVRLETLKELIRKSSKGHHGLKEAQMLKELHSSSIGMDSSALSFSIKQTIERILMIDHQVHDIEREIVHHVDDSKTTLLSAPGVGYTTGAIILAEIGDIHRFKTDDQLLAYAGLDPSVYQSGNFEGNYKISKRGSSILRWAVYQAAQAAVKFDPVFKAYYLKKKSEGKRHRVIIGHVTKKLLRVIRSILKNNTTYSLNTH

SEQ ID NO: 228045 - protein, 296 aa, unidentified
MKYYTSTTEFNCGIDLHARQMYVCVMDRQGKKLVHTNVKDNDFQYFLKLIEPYKHSLTVCCECMFGWYWLADACQAAGLTFVLAHALYVRAIHGGKNKNDRIDSEKLTHLLRSNLIPPAYVYPAQQRPLRALLRQRIFYVWRRAQLLARIHCHQLAHNRIPAKQSRWTRDDWEEQLLKAEIHPLRQLALSNDLAMIGHFDHQIFEVEKELYRQTKQVAGREYALLQSVPGIGENLGLTILYEIGDIQRFPTVKDFLSYCRLVKGTVASAGKIKGLRGAKLGNPYLRWAFGGSGRDC

SEQ ID NO: 228046 - protein, 430 aa, unidentified
MSDMKTPVPLSKFAAFIGIDWADERHAVCLSTGAQKQLSSVAQKAADLEAWAAELRQRFGGRPIAVCLEQSRGALIYALLKYEFLILFPINPKQLARYREALVPCGAKDDPSDARLLCDFVRLHHAQLRAWKTDDQSTRTLRLLVEDRRTCVDERTALKNRLKQRLKEFFPLALELAGDRLDADWFLRLLGKFPSHAELRRAAPATLLGILPKLRRLSDSDEDPRIAAIRSARPLVTDAAVIAAHRLAVSYVVKLIAELNDAVQGYDQEIEAQFANHPDAELFQSFPGAGQALAPRLAAAFGTDRERLESAVDMQQLSGTSPVLIRSGKSCAIRRRRACPKFLHQTFHEFADHSRKKSTWARAYYDMMRARGAGHHAAIRSLAFKWLRVIYRCWSTRKLYVEETHLANLRRRNSPLLQFLEETAPLPQTT

SEQ ID NO: 228047 - protein, 344 aa, unidentified
MSEITTVGLDLAKRVVSLCGEDATGRVVVQRTVRREAVLTWFVQRPPCLVGMEACASAHWFARELTALGHTARIIAPEFVRPFRLSGKNDANDAAAICAAVRRPQLRFVAVKSAEQQARLVVHRLRQGWQEERTAGLNRLRGLLAEFGRVYPNSATAALAEARAALADETLPAALRHGVARQLAHLSELEGHLAKCDRAIAQQARDDPRAVRVARLSGVGALTASAVVATVVDPNQFRCGRQFAAWLGLTPRQYSTGGKTRLGRITRRGDTYLRGLLVQGARSALQAAMRAAPERRTRLAAWMVATQQRIGYHKTLVAIANKHARLIWVLLTRDEPLRAHAAMN

SEQ ID NO: 228048 - protein, 341 aa, unidentified
MGLDLGDRFTEGCVLDEQGDVIERFRVRTRTGDLSKVLGAYGPSRVVLEVGTNSPWISRLVTSCGHGTIVANPRRVRLIAENDSKNDSVDAELLARLARINPGLLKPIVHRGEQAQRDRILIQARDGFVRARTQLVNQVRGFAKSLGTRLSSCSTVTFTKKVRASEDEDLFPGLSTMLEMIDSLWEQIRGVNREIEKLSKERYPETQLLRQVPGVGPLTALCFFLTIEDPGRFAKSRSVEAYLGLRPRQRDSGDSHSQLRITKAGDRLLRRLLVTSAHYVLGPFGPDTDLRRAGLRLAERGGKAAKKRAVEAIARRLAVLLHRLWVTGEDYVSLLEERVAA

SEQ ID NO: 228049 - protein, 409 aa, unidentified
MEVLYPRCCGIDVHDAFVVACFSRVEQGQRKKEVQRFRAVTGDLIALRNWLLERGCTHVAMESTGVYWRPVYDRLFGFFELTVANAQHMKAVPGRKTDKQDAEWIADLLQHGLLKKSFVPHREQQDLRGLTRLRTTLVQERARLVNRLHKTLQEANIKLSGVLSDIVGVSGKAILHALAAGETDGHRLARLAHPSVRCTHDQLADALESEIGAQHQFLIHELLTLIDGLDHSITHLEHKIEEQLQPFEKTLERLEEITGVSRRILHVLLAEVGTDMSRFPDDAHLASWAGMCPGQHESAGKRLSGRTRKGNRWLRAALIQAAHAAGRTQTYLGEQYRRIAKRRGKKRAAVAVGHSILVIYYHMMLTGEHYQEKGVEFFQQRDKQRHERRLIQRLERMGYQVTLRSGPAA

SEQ ID NO: 228050 - protein, 357 aa, unidentified
MGKSINNFSSVTAIGLDIAKNVFQVHAIDAKGAVVVARAVRRGGLLGFFSSLPRCLVAMEACSSAHHWGRALTELGFAVKLIPPAYVKPYVRRGKNDAADAAAICEASRRPNMRFVPVRSVENQAQLMRHRARELLAGDRTRMLNALRGHLAEIGVVAAQGAQHAYALKRLVADGFDDNGEVVVPDCVRQALAPLVHQIDALDAEIEAIDDEIKTLVKADETARRLMTIPGVGPITASAIVATVRETSAFSNGREFAAYLGLTPRQSSSGGKERLGRITKMGDRYLRKLLVVGAYATLIHRKGHHDALRVWASSLLARKAVKHKFKLTAVALANKVARIVFALMTRGGDYNERPVAA

SEQ ID NO: 228051 - protein, 316 aa, unidentified
MNSKTQVEINVGIDTSQSQLDIYVRPTGDYFSVENTREGAKQAAKIIRKYQPTRVLIEATGRLEMNLVCAAHSAGLPVVVCNAGQVRQFARSTGRLAKTDKLDAQDIAHFGEALQPALTIIKPDKLRQISDLITVRRQCLDMSTMQKNRLLRMPKSVQPPIQRILKAIQKEIERIDQKLDKLVDAIPQWREQRDLLMSAKGVGKVVAYTLMSELPELGKLNRKEIAALVGVAPMNRDSGSYRGKRRVSGGRSKVRTVLYMSMWSAIQYDPKIKATYARLLAAGKPKKVALVACMRKQLTILNTMMKNGTHWNEKLA

SEQ ID NO: 228052 - protein, 351 aa, unidentified
MYIDNSLGHQHPQSKEIPMYYSGIDLHSDNCYITTVDDTGAVIKRQRIDNNNELILDYFHSLPGPHQAVVESTTGWYWLNDLLSDHGIDLVLAHAKYLKAISYAKVKTDKVDSQTLAILLRQDLIPRAHKISRELRGFRDTMRIRLRLVQQRTACLLRLYSIHAKFNGTVPDPYRFQLAVLEHTRDMFTSQILALEKSLHPVLIPNDDIQLLLYIPGIGKLTAFTVYLEIDGIERFVSDKHFVSYCRLVPAADNSNRSVHHRSSKDGNKYLKIAFSDAAVHAIQFYPEYKRLFQKLARRSNEATARTVVAKEIAKIVYYVLKNKTHYKGLKGQPISRQKSQQWPRLSSPLS

SEQ ID NO: 228053 - protein, 386 aa, unidentified
MQRNDLSRSLVAFEQNSTLVSVVELSLKTWLVAGLVPGLTRQPLKKQGADADALLALLHRWRAEAIKAGRKIDRIVVAFEAGRDGFWLARWLRARGIEAYVIHPTSIPVSREHRRAKSDRLDTELLMRSVLGWLRGEAKHCSMAAIPTLAEEDARRPNREHQTLVKECGRIVNRMKATMARLGVSNFNIKLRKALEKLDGLRTPEGVPLPANTLDELRRDMARLRLIREQTKEIEKARLVRLKKAPQEGAHPMLLMLAKVLGIGVETADMLVHEVLSRELRDDKAVGRYGGMTGAPDESGGKRREKGLARAGNARVRRGMIQLAWRWLMFQKDSPLTQWYLARTAGAGRNVRKTMIVALARKLLIALWRYVRTGEAPAGARLRAAI

SEQ ID NO: 228054 - protein, 342 aa, unidentified
MEKASMIGIDTSKNLFELHGRNDRGEVVLRRRLKRAQVESFFAEHPAATIGMEACGAAHHWARVLSGLGHQVRLMSPAYVKPYVKRNKNDALDAEACCEAMSRPGMRFVPIKTVEQQAALALHRSRELLVRQRTQISNALRALLAELGIVAAKGREGLGRLIADLRADVLGVPPAVQSAALVLADRRAELEAGIDALERHIVAEAKADPAARLLQTAPGVGPLTAHALLATVPDPARFDCGRDFAAWLGLTPRENSTAGKRRSGPITKKGDRTLRRLLVLGATAWLRQVAARPDKGSPWLLALMARNRTKKKIVAVAQAARTARILWAMLTHNQPYRAPAAG

SEQ ID NO: 228055 - protein, 336 aa, unidentified
MYYLGIDVSKDSFATHLILDDGRSSRSASFKISKRGFNSLYAWLRKSGVVFDELKVVMEATGVYWQRLFYFLNSKGVSVAVLNPAQIKDFIKSYLRRGKTDPMDARMIALYALERGPESSFVPEEALVDLKLLVAERDHIVKLITKERNRLHAHNYRQSCPKALLRLINKRLRALKSQLIDVELLIHTCIKSSEHLKRVYDLLISLPGVAFITAIVIIAQSNALIGFVSAKQLAAYAGIAPSPNQSGAFKGYSRISKIGNPRLREALYMAALSAVRASEHFANFKARLEAKHKPKKLIYTAVARKLLVTAWAVVKSDTAFDPEYYKKYSFVNSQAF

SEQ ID NO: 228056 - protein, 359 aa, unidentified
MESKIKKLNFNGQKIFIGLDVHLTSWKVTIMLEDTPFKTFSQNPDAKTLKDYLDKNFPGGEYFSAYEAGFCGFSVHRKLVALGINNIVVNPADIPTTDKERKQKEDQRDSRKIALSLKNGQLVPIYVPSRSLEEFRGLVRYRKSIVKEISRNKTRIKAFLHYNGIDIPPELYGASQHWSSNFTKWLETISLTTDFGHIVLQKTIETINHLRKTLLSVSKDLKRIVNQNEKYSSVVRNLISIPGIGFIVALTLLTELEDIYRFKSLDRLCSFIGLVPTTNSTSDQDRVGNITRRSNKPLRGVLIESAWVAIRNDSSMSLAYSNLCKRMKPTKAIIRITKKLLNRIRFVMVNNKDYEYKTV

SEQ ID NO: 228057 - protein, 434 aa, unidentified
MSSLSNIYPNSAGIDIGSEKVFVSVEEQPVRNFRTFTSSYRELSVYLRAHKITHVAMEATGIYWITLYDILEEEGFDVTLVNPADSKNLPGRKTDVQDCQWIQQLFSYGLLRKSFGPQDIVRKLRVYTRMREDKLQMASSHIQHMQKALIQMNIRLPEVLSQTHGASGMAMIKAILQGERSAEILLSYCTSSLIKTKGKDILQALEGNYKEEYIFELQQAYDGYMFYLQQVKSCDNETAKILEEYNHKSDKDYKDNYPIKPIRHNKPEIKDLHNLLLGIHGANPTVLPGLTDYSLLKLTAELGNNIGQWPTIKQFISWLGLAPGKHQSGKMNKRSKKKPITRAGQIFKQAAQSLLISKQPGLGAFARRLKSRKGSGIAIKATARKIAELYYRMFDQGMDYVEQGVKKYEEKLKRQQLNFVIKKANELNLQLIEN

SEQ ID NO: 228058 - protein, 333 aa, unidentified
MTYIGIDVSKATFVVAYSSAKDSKTKTFANTATGIHKFIQTLPSDAHCVMEATGNYSMLLLYLLNKANIMVSMENPLKIKNFARVMLSVVKTDDIDAKLIALYGERMQPKPFKMRSDSLMLLKQKRTVLRQLKKQLVANTNLQESMEALPFVDSISKKVLEKTTKFLQKQIKQMEEELASLANIEYKKQMSLLTSIKGIGVTLAAALIVATGGFTYFDNAKQLTRYLGLSPTYQQSGTSVNVKGRINHNGDSYLRSQLYVAAFSSLRCNKECKACFDRLRSNGKPGKLAVVAVANKLVRQAFAVVTKNKPYIDGYKSVKPENNHAEGAPAVRG

SEQ ID NO: 228059 - protein, 309 aa, unidentified
MEIENSLQAFKSLYSKLKRIYKKEIDKITFVFESTGSYSVLLYKFCADKNIKIFMINPKQARNFARAIAQRNKSDVIDARVLSQSIVVARTNEIKIPAIDPIIEEMKELMVYYRLKIKQRVQLSNHLESLVSRGGSKVLIRTVKSEIKSLKKSKDYIIEQVYSIISKSKYLSDKYDAITSLDGIGKIGGIVLLHLFIKYPHANQRQIVSLAGLEPIIKESGSSVRGKSRISKAGSRLYRGTLFMAAMASTLHNAQMKAFYERLKAKGKHTTLAQIAVMRKLVVVAHSLYKSGETYNKELYKTTTGIQSE

SEQ ID NO: 228060 - protein, 359 aa, unidentified
MKYYAMKYYTSTTKFNCGIDLHARQMYVCVMDRDGKKLVHTNIRNNDFEFFLKLVAPYRHDLTVCAECMFGWYWLADACQAAGLHFVLAHALYLKAIHGGKNKNDRIDSEKLAHLLRTNLIPPAYVYPAAKRPLRALLRQRILYVWRRSELLSRIQSHQLAYNRPTCRQNHYNRDAWTEQLLASEPDPVRQLALQNDLALIGHYDAQLASLEKALLKLTKQTASRDFNLLQTTPGIGDYLGLTLLHEIGDIARFPTVKDFLSYCRLVKGTVASAGKLKGLRGAKLGNPYLRWAFGEAAVIAKRDPAIIGPLAQRLEARLGNKFKANTVLAIKLARAVYFMLKNKTAFDPDRLVAVLSKN

SEQ ID NO: 228061 - protein, 361 aa, unidentified
MKEKKTRYIGIDLGKRTYEMAVVVKGKVAMSNGKTTAEGRQKLYGKLHPTDKIAMEAGTLAFIMAKEMETAVGCKVYVLNPYRLSIIYKSMKKTDKEDALKLAHIIEDFQEERLPLVTVPSDKEIERRKILAGYRRVQQGRNREINRLHALFVNQGITSVVRKDLAEDEKRKESIKVLNGLEREEAQYLIEILELHEKRIEVLEKKMKKEAEGNETIQRLQEIPGVGPMVSFAFSAHVGAERFENAGQLSNYLGLVPRVYMSGDTVRYGSITKRGNSYLRALLVQASWALIRTKKGGKLKARYEYMTIEKAIGKKKSIVAIARRLAELMYVLMRDGTRYEAKPFIRNDEVVRDISGIKFCA

SEQ ID NO: 228062 - protein, 373 aa, unidentified
MNGINFVGLDVHKESITVALLKSGERGVIEWKVGNTVAEVRKLGRRLLRESGRQVKACYEAGPCGYGVQRQLQALGVDCVVVAPSLIPVKPGERVKTDRRDARKLATYLRDGLLTEVCPPTPAQEAVRDLCRARGDAREDLMRSRHRLSKMLLRRGLRYPGRNTWGAAHRRWLTTICWEHEAERVVFADYRFAVEQLEERLKGLDAALAAQAEQEPYRERVGWLLCFRGIQIVTAMTILAELHGFERFTTARELMAYLGLVPSEHSSGERMQRGAITKTGNQHVRRILVECAWHYRGEPSARRTLARRRAGQPAWVISIADRAQQRLHRRFWHLVLAGKKVPQKAVVAVARELVGWIWAVLQGPSTAEDRMAA

SEQ ID NO: 228063 - protein, 489 aa, unidentified
MATAAQQPRAKNGSNAQRSAPKRKARGRHCPTGKGDRRSSKLTITNPEAAGIDVGAQAHYVAVPEGRAEVSVRSFGAYTAQLQELVHWLKDCGIKTVAMESTGVYWIPLFQMLEEAGFEVLLVDARQAKHVPGRKSDVQDCQWLQQLHSYGLLRAAFRPEDSICRLRSLQRHRKSLVECAAMWIEHMQKALNEMNLHLHHVLSDISGQSGLAILEAMVAGERDPRKLASLAHYRVQKSQAQIEAALTGDYRPELLFVLSQSLSNYRQMQQQIAQCDLSIEKQLASMADCTNPSQHAEPTTPGPASVAGKPRKRKPKGGLELTLAAHLKRILGVDLTTIPGLNVLAVLTLLSEIGTNMAKWRSEKAFVSWLGLCPNNSISGQRVLNSRTRKVVNRAATTLRLAAMLVGKTNTPLGSFYRRKRAQLGAPKAITATARKLGCLIYRLIKNGQPYQEPDIRTYELKYKDQILYSLRKRANSFGFDLVELPKAA

SEQ ID NO: 228064 - protein, 342 aa, unidentified
MEQVSVVGLDLAKSVFQVHGVNAQGEAVLRRRLTRGQLLKLFEKLPPCLVGMEACASAHHWARELTSLGHEVKLMPPQYVKPYVKRGKNDAADAEAICEAVTRPTMRFVGAKSPDQQATMMLHRVRKILTRQRTQISNALRAHMAEFGITAAIGRAGLERLIAVIADQDDARLPDEARACLGVLCTQLEMVKEQILDNDRRILADARKTEAGRRLMKIPGIGPLLASAIVACVPDPSTFGGGRSMSAWIGLTPRQNSSGGKERLGSITKAGNTYLRELLVVGAMAVVRRAKQGSTKRSWLTQLLARKKPKVAAVALANKNARIIWAMLATGEAYRDPELAAA

SEQ ID NO: 228065 - protein, 326 aa, unidentified
MEHELHYIGIDTAKEKLDVDVLRPDGRHRTKKFANTTKGHDELVSWLKGHKIDHAHICIEATGTYMEPVAECLYDAGYIVSVINPALGKAFAQSEGLRNKTDTVDARMLAEFCRQKRPAAWEAPHPLERALRALVVRHHALTDMHTQELNRTETAREVQRPSIDAHLLWLEAELKRLEKQIKDLTDDDPDMKHRRKLLESIPGIGEKTSAVLLAYIGLKDRFAHARQFAAFAGLTPRRYESGSSVRGASRMSKAGHVSLRRALYMPAMVATSKTEWGRAFRDRLAANGKKGKVILGAMMRKLAQVAYGVLKSGVAFDASRHNPVAA

SEQ ID NO: 228066 - protein, 344 aa, unidentified
MGEVNTIGLDIAKSVFQVHGVDVAGEVVIRKRVSRARVLEYFSDLPRCLVGIEACPSAHHWGRELRALGHVVRLIPPSYVKAYLKRSKNDANDAAAICEAVTRPSMRFVPIKTKEQQAALMLHRTRQLLVRQRTMLSNALRGHLAELGIVSAKGRNGTADLLNIIKDGSDSRVSSAVRGILDVLARQYGAIGAEIASVDKNIMALHRACEASRRLAEIPGVGPIGATALVAEIGDWKTFSSGRSLAAWIGLVPKQYSTGGKDRLGSITKQGNRYLLWLLVVGAMAVIRYARKHGTEKRPWLGQLMERRPTKVAAVALANKIARMAWAIMVRGERYKEPKLLLAA

SEQ ID NO: 228067 - protein, 339 aa, unidentified
MKEVTTIGLDLAKNVFQVHGVDHAGAVVVRRALRRSQVLAWFAKLPPCLVGMEACATAHYWGRALRKLGHEVRLIPPAYAKAYVRRNKNDAADAAAICEAVSRPAMRFVAIKTEQQQAMAGIHRVRDLLIKQRTMLRNQLRGLLAEFGVVAAQGRRGLNELLAILSDPEEQRIPSPLREGLTAVMETWRGIERKLEAIDRQMVAAGRADATYRHLVTAPGYGPILSSAMAALVIDPGAFKRGCDFAASLGLVPRQDGTGGKVRLGPISKRGNGYLRRLLVNGATALIKCQRARQDPWVAKLLASKPRKVVAVALANKLARIGWALMTRQEDFRSRPAAA

SEQ ID NO: 228068 - protein, 344 aa, unidentified
MDYYVGLDVSLRSVAVCVIDGDGRALLERSIACEIENITRCLAHLSAFDLRIGFEAGAMSQHLYFGLRAAGFDVVCMEARQVNAALSAMRNKTDKTDARGIANVLRSGWFSPVHMKSREAHAVRALLSSRKAVQRKCIDLANEIRGLFRIFGLRLPSRIDQSSFDEQVRPIIEADPDLSHALLPLLDARAVLFTTYRELDRRVKRAASHDETCLRFMAIPGVGPIAALTFKAAVDDPSRFTSSRTVAAHFGLTPRRYQSGEMDNPGRISKAGDADVRSALYAAANAMMMRSVASSEIKSWGLRLMRRKGRRRAVVAVARKLAVVMHRMWADNTEFRQRPLEGAA

SEQ ID NO: 228069 - protein, 342 aa, unidentified
MKITTVGVDLAKNVFQVHGVDSRGKPALQRRLRRAQMSAFFAQLPVCLVGMEACASAHYWARKLRGQGHTVRLIAPQFVKPYVKANKTDAADAEAICEAVSRPNMRFVAIKEVHQQTVLSLHRARQGFVKARTAQANQIRGLLGEFGLIVPPGIRHVSKRLPEILEDGQNELPDEFRALLARLRQHFLELNRQVTELDDQITTWHRSNEHSQRLAQIPGIGPLTATAMVASIGDARAFKNGREFAAWLGLVPRQHSSGGKVWLQGISKRGDSYLRMLMVHGARSATRVCERKATPTNEWSTALLRRRHPNVVSVARANKNARIAWALLAHGRHYDDDYQMVG

SEQ ID NO: 228070 - protein, 391 aa, unidentified
MTKLKTKTVNDFSRCLDPLDMDATVIAVIEMSQSSWLVAGIVPGVERQPLKKLAIDEHALLNLLNRWRAEAEKQGRRITRIAVAFEAGHDGFWLARWLAAHGVEAHVIHASSVAVTREHRRAKTDRLDTELLKRGFLGWLRGERGHCKMVAVPTLAEEDAKRPSRDRATLVGEASRIITRVKSAFVRLGIRGFNPKLKAAPARLATLRTPEGEPIPPNTLAALKRDLERHQIVKKQIRELERTRLESLAQAPAKGPNVMVLLLARVIGIGIETADMLVQEVLSRTMRDRRAVARYAGLTGSPDESGAKRREKGLARSGNARVRHGMIQLAWRFLLFQKDSALARWYRQRTADAPSTRKTLIVALARKLLIALWRLARDGVVPEGVRLRPAA

SEQ ID NO: 228071 - protein, 483 aa, unidentified
MREVYPRCAGMDVHKASINVCVRIGKGRKIEIRRGMFGTFTQDLERLAEFLREHKVRRVVMESTGVYWMPVWNVLERSQWQFDLVLVNPQHVRALKGEKTDDKDCRRLAELGQYDLVRGSFIPDQEFRELRDLTRQRSHMQGDRNRIINRVGRLLETRNFKLGSVASNIVGKTGWLILNAIAQGQTDPDALADFAQGSLQLKKVELAEALRGYSSEHFRWLPRQLIDELARLDAKLNELDERIRSRIKPHEDLVRRLSTIPGVKEIAAWTIIAELGTNMEQFADAAHAASWAGLCPGNCESAGKRQSGHTRKGDRYLRRMLIQNSWAVSHKKDCFLTALFYRIAAHRGTKRAAMAVAHRVLIIAYHIIRDGTEYRELGGNHFDGTNPQETARRLTRRLERIGYQVTLTKPAESSSSEPVKPILNGTTRWDTRAIRFAPLIRDPNAAIATPDVCRKCAKWNIPCIHKGKQFRKTQNENAERSTT

SEQ ID NO: 228072 - protein, 343 aa, unidentified
MGVFAALDVSQDQTAVCVVDADGTIVCEAKVDTCPDAILAWLERWSGELENVGMETGPLAVWLWNTLSARGLPIVCIDARHASGVLKMMPNKTDRHDARGLAQIIRTGWYKSVQIKSHGAYVVKSLLASRDALVCIRVKLENEIRGLLKTFGVMFGKRVGGFMRRAEEIISGDLALTPELLPIFEALVSARCAIRERIRTLDAEVRAIVRRSETARLMMTVPGVGPITALAVMSAFDDASRFQRSSSAGAYLGLTPRRYESGEISRNGRISKRGDKMTRTYLFEAANAILTRKIGGSRLRDWARAIAERTGPRKAKVALARKLAVTLHAMWRSGIPFKEEPMT

SEQ ID NO: 228073 - protein, 377 aa, unidentified
MEAYDGPQIVGMDLHRRRSVLVRMRPDGQKLATARIENSPAGLRAEIAKAGLCPKVVLEATYGWYWAADALEAVGAEVHLAHPLGVKGFAYRRVKNDEKDAADLADLLRMGRLPEAWIAPPEIRELRELTRYRIKLVHIRTSCKDQVHAVLAKLGVTVTCTDIFGVWGSTWLDELRLPQPYAGKLASLRKLASELTAEITLLDKVIADLLEHHDGYHALQQLPGIGKVLAAVIVAEIGDISRFHHPGQLCSWTGLTPRHRESDTKIARGHITKQGSRVLRLGDGRGHPAAARRYPGPRYQGPHHRPPRQGGPQHRQGRHGPPAAHLRLLRDARRSRQVTDRPRRSEGGRVSRPGHGQRVIAPRSGPCLPRRRGRASD

SEQ ID NO: 228074 - protein, 316 aa, unidentified
MENPQPFVGIDVSSQRLDVDTVPLSQPFSEPNNEDGIASLTAHLKALNPQIVLLEATGGYEIPVAYALYEAGLPVVITNPKNVRHFAKALGRLAKTDKLDAQVLALYAQRVRPQVQPLRDQEQLELANLMTRRRQLQGMIVMEENRRRTCTPKVRANIDLSLAHLRRLLKDLDREIHDSIRRTPLWHEKAEILQSFTGVGPKVSASLIADLPELGLLPANKASALAGLAPMNQDSGKHRGKRMIKGGRPAVRRALYMAALVASRHNPVIREFYQRLRQAGKPAKVALTACMRKLLVILNAMLKNHTHWEDRLPVAA

SEQ ID NO: 228075 - protein, 343 aa, unidentified
MTNFVGLDVSQKMTAICVIDNDGRTLWRGQCSTVPEQIAAMVRRRVGDDVRIGIETGAMTPWLVHELRALGLDVICLDARHARAALKMQINKTDQNDAEGLAQIVRTGWFRSVHVKSFDSHRARALLGARAQLVGMTTRFSNHIRGVLKTFGLLPGAMRGLTFDRKVEALLQDRSDVAPIIGPMLFAWRQLREQISAFDKTIRVLVRSSSACRLLMSVPGVGVLSALAYVSTVEDPARFSQSRSVAAHLGLTPRQYQSGEIDRSGHISRCGDSLARTLLYEAAVVIMTRVKKDSQLKDWALAIAKRSGIGKARVALARKLAVILHSVWRSGTPFRWSERAIVA

SEQ ID NO: 228076 - protein, 343 aa, unidentified
MSIVGAFDVHRRQITFDYLDTDTGQLLRGRIAPACRAVLRRWLVERFAGRADVAFAVEACTGWRFVVEECERAGIEVSLAEPADTAAARGRKRRAKTDPADAAHLRELLAGGRLPTSWIPPQQVREIRAILELYKDLRDEHTAWVQRIHATLFHQGVPGLGTGGVASPAGRARLEAGEGLSAAGRQATTVALRVLDALDTELDALHRQIRAFANRQPGCAALQAQYGVGAITSAAIWAMMGDTRRFTASRQAVRHTGLDVTVYSSDGKRAPGHLAKQGPPLLRWALYEAACLASHTRAPDHDFYTSVKDRIDHKRATISVARKIARRSHHILRELGDQAYAAA

SEQ ID NO: 228077 - protein, 342 aa, unidentified
MNREIYIGVDVSKNWLDIAYYDGVVVDWKSGHIRVDNNKSSYKKILLWLKNHQIAKESTIFCMEYTGLYCHNFRLWLEKEGIVYGMINPRKMHRFEPDLGEEEPALDRIKTDEMDSFRIAMYCEKHSRKIKSSPSKLPSHAFFKLKRLLAERRQYVKHSVLYKQQLNDISAYDTEDSRKRKQLGLKSISVLQHQTDMEIKKIIKDDESIYKNFKLLCSVIGVGLVIASETIVLTENFTAITNPRKYACYIGIAPERKESGISIRGGDHVSKKGFTNAKANLSLVALQAIRNDSNIRAYWLRKKAEGKHSGVVLNAIKFKMLLRMFAVIKRQKPYIEMDTFKK

SEQ ID NO: 228078 - protein, 339 aa, unidentified
MKLYSGIDLHSSSSYLAIVDETGKRIFKETAPNDIRAIVRSFEPFRNDLVGIVVESTYNWYWLVDGLMAEGFAVHLANPSAIQKYSGMKYADDKHDAFWLAEMLRLNILPTGYIYPKNTRPIRDLLRKRGHLVSIRSSLLISLQNIITRNCGFKLKTNDIKRLRENRAHPYLADNEDLALAGQVSKDSIDFFTRQIYAIESFLEKKLELTDTYKKLVTIPGIGKILGLTIMLETGPIERFEKVGNYASYCRAVSTQWVSNGKSKGKGNKKNGNKYLSWAFSEAAEFARRYDDKARAYYNRKLRKTNFMIAHAALAHKLARAAYHVMKDRVDFMPEKIFT

SEQ ID NO: 228079 - protein, 335 aa, unidentified
MNNVPLLLGLDYSDAFVQVCAMDEQANVVMNRACGNDWRELVAAVAGKGVVKRVAIEACSGAADLAEELVTHAGWHVELAHPHYVAKLKGSPDKSDFSDGRLLADLTRVGYLPVTWLPPAPVRELRQLVNYRQQLADQRRAAKLRVGALLREQRVKAPRELSRWSRGWIEFARTTTQLSEHARWIVNQLLEQLGELNKRIAQAEQRLRGATANDKIVERLLEQEGVGEVTAWVMRAFIGVFDRFKSGKQLSRYCGMSPKNASSGTRQADGGLIKSSNKILRATIVQAAHRLIRTRPRWATLAQSLRDRGKPPCVIAAAVGNRWMRRMFHEMKQAS

SEQ ID NO: 228080 - protein, 320 aa, unidentified
MNSIIVGIDISKETFDAAVLINHKVQTRKFNNNSEGFNKLVTWLKSRETGHVCMEATCIYWKSLAKYLYDYGYKVSVVNPARIKGFAMSKLSRTKTDKADSVLIADFCKAMKQEAWYPQPHYIQELQQLVNRLNVLIKHKTQETNRLEGASKAIANNIQMHIEFLETQIKEIEQLINDHIKNNKDLHNKAMLLESIPGIGAKTQAIVLAFLADIEKFSSAKQVVAFVGLNPKHRQSGSSVRGASRISRTGNSDLRKSFYMPAMSALRHNCIIKHFSQRLSNTGKPKMLILTAAMRKLLHIIYGVLKHNSPFNPNVSIQQK

SEQ ID NO: 228081 - protein, 428 aa, unidentified
MNTTNTTRFAATIGLDWADRKHDLWICPAGQSKAEHRRLDQTPEALHEWVAQLRQRFPTGRVAIAVETSRGPVISALMAYDFIVLFPINPKALKDYRAAFCVSGAKDDRTDAMLLEELIRLHRDKLHALEPDTELTRKLAGLVENRRHLVDERTRLVNQQHSTLKTYFPLALDLLEDQMNTLLAAEFLARWPSLQALQKEKPKVLRAFFYQHNSRNARRIEQRLQALAAAQPLTTDPAIIEPACALVSARAGMLRPLLKAIQRLEKSIAQAMDQHPDAPIFRSFPGAGPALAPRILVAFGTNRERFGSAAEVAQFYGIAPVVEQSGNSKTVHVRYRCPKFGRQSFHENAACALKKEPWARSYYEAHKKKHNDKHHPACRALAFKLTRIYFACWRDKTTYQPDLYIRALQKNGSPLHKTLKTQSTPSCE

SEQ ID NO: 228082 - protein, 412 aa, unidentified
MIKREKIELVKGSDIYAGIDVSSDIHRVRFIDNLGQEVIKGISFSNDREGFRELEEHIKKFGIDHNIIFGLEPTGDYWKPIGYYLRRKGYKVVLVNPYHIKRTKEIIDNSQQKDDRKDSYLIADLVKQGKYFFPIIPEGIYGEMRELSISWKRTKQQITRLKCYLSNFLAKYFPEYKSIFSDILGKSSFYILSHYPLPEDIKRIGKKRLTRIIKRISKGKIREEKIDRLYERARDTVGIKEGREAARMFLKEVLKELERLMGRRKKIKEKMKELLKISGYGDYLLSIKGVGVVNACLFLGDIGDPRRYKRASQIEKLAGYNLVEESSGKKKGEKQISKRGRKTLRYVGYLVANVAIAKNKEIRELYRYKVDVLKRNRIKVMVGIAAKMLRIMFAVCKNKEYYNSEKVRANFI

SEQ ID NO: 228083 - protein, 334 aa, unidentified
MDVLHPRCCGLDVHKNSVSACILVQVAGRAQKHQRRFGAMTQDLQELANCLRQFEVTQLAMESSGVYWKPVWNILEGEFTVVLANAQHIKNVPGRKTDQKDAEWIAQLLQHGLLRPSYVPCEVIRDLRDLTRMRASLSQEASRISSRVQKVLEDANVKLSSVATNTLGKSGRAMLEEIIAGQNDPEYLASLALGHLRAKTPQLKLALEGKIRPHHRFLLRRLLDQLRFVEHEIELLEERLEDIGRERPELSQAVARWDTIPGIDRVAGWTLLAEVGHNMAQFPTAEQLASWASLCPGNHESAGKRLGGATRKYSPWLRRIACQCNWAAAQTKNT

SEQ ID NO: 228084 - protein, 383 aa, unidentified
MISTEDAKKSAHKEVDAIYVSIELSRKTWLVTSVSPGAGEKLSRHSVPGGDIAGLLERLNRLAQKTLQRTGQLYPLTVIQEAGLDGFWVHRVLQAEGHESHLVDAASIATSRRRRRIKTDRLDGETLIRALLAFRRGEPRVCSMLRVPSPAEEDRRRIARERKVLMQERIQHSNRIKGLLFSQGIRGFEPLRRDRRERLDGLRTGDGRELPEHLSRQVRRELDRLEMVLDQIKAIEVERDAMLAAERETSREVEMLSKIVGIGPEFAAVLWTEGLFRRFDNRRQIAAYAGLAPTPWQSGSIDREQGIGKSGNPRLRSTLLEVAWLWLRHQPGSDLSRWFNERVAQNGGRLKKVMITALARKLVVALWKYVSAGVVIEGAAMRA

SEQ ID NO: 228085 - protein, 413 aa, unidentified
MRNLLEVCCGIDVHKEILVACMLKGGIEEEPEPIIKEFSTLLRGLDEFKSWLIEHNCHDVAMESTGVYWFPIYNVLESIFYEDGHMNIIVANPHHMKNVPGKKTDIKDSHWIATLLRAGLLAPSYIPPKEIRELRDWTRYRDVLIKELVGHKNRIEKHLQQCGFKLSTILSDIFGMSGYELIRKLCEKGKLTALEVESCLHGTLRAKSGEVQQAVAGRLSAHDRLFLTNLVKVMEHCREEIEEAECHITVYAQQYEPTLQLLETIPVLQRRASTIIVSELGVDFSMFPTAGHLCKWAGLCPGDNESAKKKKTMRITKGNPRIKSVMVQCAWAATRCKNFFLRDWFYRLRARRGTKKALIAVARKLLAMVWYILTTGENYEETRYEETKKNQEDRRKQRLKTEAAKLGFKLVPA

SEQ ID NO: 228086 - protein, 408 aa, unidentified
MESCFHYFAGIDWGSEKHRVCLMDHEGRTLEERWIDHSGSSLAELTGWLRQRTAESPAALAAAIEVPRGAIVETLLEQGFAVFSINPKQLDRFRDRYSPAGAKDDRRDAFVLADSLRTDRHCFRAVRIDEPAMIRLRELSRLEDELGEELNRAVNRLREQLHRFFPQLLQVCASADEPWLWALFEAAPSAARATRLSQAKIAGILREHRIRRLDAAQVQAALKGKPLTLAPGAAEAAAEHALLLLPRLRLLDQQRVDLARRIDAILKELASAPEGRTEHRDAAILLSLPGLGRKVAATMLSEASQAIAERDYHALRCYSGVAPITRQSGKKKAVVMRQGCNERLRNALYHWARTSVVWNPVSKNTYAQMRSRGHSHGRALRGMADRWLKVLVCMLRNNTLYDLQRRPA

SEQ ID NO: 228087 - protein, 369 aa, unidentified
MDDITYVGLDVHKATVCVAVAESGRGGEVRQAGVFENRPEILRRMVARLGKNGRRLSFCYEAGPCGYWLHRLLTGCGHSCIVAAPSLIPMKAGDRVKTDRRDATMLAKLHRAGELTPIWIPDAAHEAMRDLVRARATAARVLSKARQHLQGFLLRHDRIYRGARTWTLAYRRWLTTVRFDHPAQQIVLQDYIHAVQDAEARRDRLTRQIEELLPNWSMAPVAAALQAMRGVALVVAVTIVAEVGDFRRFTNARQLMAYLGLVPSEHSSGSSVRRGGITRAGNSLARRVLIEGAWTYRMPARVSRKIHDRLEPLSETIRDLGWKAQVRLCARYRRLAATGKPKVVVTTAIAREMVGFIWAIARVAQPVLV

SEQ ID NO: 228088 - protein, 342 aa, unidentified
MYYIGLDVHKKTISYCVKDAAGHVHREGKVGSTRRELDAWIPTLPQPRTIAMEATIFSGWIYDHLLPHAVAIKVAHPLMLRAIAAAKKKNDTIDASKIADCLRCDFLPECHMASTEIRNRRRVLRYRHLLVRQMVQTKNRVSGLLLETGVEHNKSRLHKVGYFRGLLATSNDIDDSIRPLLRLSRDTIERCQKTDYALVSLLQRDPLLADRIRRLRTVPGVGPITALTWALEMGDISRFRTIKQAISYCGLCGDEHSSADKVMRMPLSKQRNKHIQRVLVEAAKLAPRLSAELALIHQKAMEKGNRNRATLAVARKMVAWLLAVDRENREFIPAEQGEIRAA

SEQ ID NO: 228089 - protein, 332 aa, unidentified
MYSIGLDVSKSSINIFISREELDLGIENNSKALNSLYSKLKKIYKKEIDKVVFVFEPTGSYSELLHQFCASKNIQIFMINPKQARNFSKAIAQRNKSDVIDARVLAQAISIARKNAIRIPTINPIVEEIKELMSYYKLKVKQRVQISNHLEALSVKNSNKTLVKSIQKELKALKKQEETIIETINSIINKDEVLLKKYNAIVSIKGIGNIAAIVLLHLFIKYPNANQRQIVSLTGLDPVVRESGTSVRGRSKISKAGARIYRGTLFMAAIVATIHNKQMKSFYERLKEKGKHTTVAQIAVIRKLVIIAHSLYKNEEMYDEDKYMKSTGVSNV

SEQ ID NO: 228090 - protein, 344 aa, unidentified
MDHFAGLDVSVKETSVCIVDDTGKIVREVKVASEPEALLAVLKNPAYHFKRIGLEAGPLSQWLYSALAEAGLPVICVETRHMRAVLKAQINKTDRNDARGMAQMMRVGLYRPVHVKTLRSQKLRMLLTHRKLLQSKAIAIENDLRGTLRNFGLKVGMVGTVKFEARIKELVETLPDLAVLVEPMLVVRRALREQFVIMHRRLLAIVRDDEVCRRLITTPGVGPVVALTYRATVDVPARFRKSKSVGAVFGLTCAKYQSGEVDWDGRISRCGDEMMRTMLYEAAQAMMRSKKWSWLKAWAMQIARRRGMKKAIVALARRLAVIMHRIWVDGTEFRWTREQAAAAA

SEQ ID NO: 228091 - protein, 358 aa, unidentified
MEHYVGLDVSLKLTAICIVDRTGKIEREGVVASDPETIAAFIKSHAPHVARVGLETGATSTWLWTELNKMGLPVICIDARHAKAALKLQINKSDRNDAVGIARIMQCGWYKEVRVKDLDSHALKALLVSRALLVKIKRDIENQIRGLLKNLGLVIGQAKMNVFAVRAAELAEARPELTAAIEPLLKAREAIGRQIADLDRKVMRLARNDAQVRRFMTAPGVGPITALCFLATIDDPSRFKRSRSVGAYAGLTTRRYASGEIDWTGRISKCGYKMLRCYLYEAANVLLTRVAKSSALKAWGVRLAKRSGIRKAKVPWLESLPSFCVACGSKAPNSTGHQRGLPINLHSRTTEFPPISGN

SEQ ID NO: 228092 - protein, 314 aa, unidentified
MDFIIVGIDVAKDKLDIALLPSGESFVAARDADGLEALSQRLLALDPHVVAIEATGGYETIVAATLSELGLPVVVVNPAQVRAYAKALGKRAKTDPLDALVIARFAEATRPDVRPLPDAAARLLSDLVTRRRQIVAMMAAERQRQKRLLEKRLQKSIEQLLEALQKALSAIEIDIDEAVRGSPLWLAQEDLLQSVPGIGPQIARALIADLPEIGTLDRRQIAALAGLAPWTRQSGQWKGKSMIGGGRGAIRSALFIGAMSASRFNPPLAAFYQRLIAAGKPKLVALIAVARKLLTILNAMIKSKKPWDEEHAHA

SEQ ID NO: 228093 - protein, 406 aa, unidentified
MELVPIYKRVIGLDVHQAQITACAVIEEADGNTRVQFRQFGTFKKDRRALAEWAVSLQPELVVMESTGIYWKSPFAALELAGLRPLVVNSKHVKNVPGRKTDIGDAQWLATLARAGLLRNSFVPPAQLRELRLISRQRQKLVGLLASEKNRLHKVLTDGGIRLGVVVSDVHGQSARAMVKALIDNRPTQDVLSHASRRLKASREELFDSLQGELTDCHRFVLAELMAHIEETEARIARFDKRLLAGLTLHQHQLALLQTIPGVDLIGAAMLLVEIGTDMDAFGSAERLASWTGLCPGNNESAGKRKSGKIRRGNPYVRRLFCEFAQAASRSTSVFKLKFQALVIRRGHKRSIIAIAHKMLRTIFVMLKRNEYYRDSSVDYEALSVKRNMPRWIKAMAKFGMTPASL

SEQ ID NO: 228094 - protein, 398 aa, unidentified
MTESSDYESVQVFIGVDVGKDTHHAVAINRSGKRLFDKALPNDENKLRSLISDLKQHGQILLVVDQPATIGALPVAVARSEGVLVGYLPGLAMRRIADLHAGEAKTDARDAAIIAEAARTLPHALRTLKLADEQIAELSMLCGFDDDLAAQTTQASNRIRGLLTQIHPAPERVLGPRLEHPAVLDLLQRYPSPEKLASLGEKKLAAQLCKLAPRLGKRLAADIAQALAEQTVVVPGTNAAAVVLPRLALQLITLRKQRDEVALEVEQRVLAHPLYPVLTSMPGVGVRTAARLLTEVACRAFASAAHLAAYAGLAPVTRRSGSSIRGEHPSRRGNKALKRALFLSAFTALRDPLSRAYYTRKMSQGKRHNQALIALARRRCDVLFAMMRDGTFYTPQGS

SEQ ID NO: 228095 - protein, 348 aa, unidentified
MALTIVETRAVTGGVDTHADVHVAAALDPVGGLLGVGEFPATPAGYARLLDWLGGFGTVCLVGIEGTGSYGAGLSRHVTGAGVRVVEVDRSDRQDRRRQGKSDPLDAVSAARAAQSGRARGAPKGRDGTVEAVRALMVAKRSARSERTQTINQARALVLTGPADLRTRFAQHSVAALVAETAALRPRPGDVVGYATRVALRELGRRAEFLDSQLGRLDELIAPLVTVHAPGLLALYGIGPDTAALLLIAAGDHPERLRSEAAWAHLCAAAPIPASSGKVTRHRLNPGGDREANHALWRIVITRMSSHPPTRAYVERRTGEGLSKKEIIRCLKRYVAREVYPHLRPPAG

SEQ ID NO: 228096 - protein, 339 aa, unidentified
MLYVGIDIAKNKHDVTALNVPGKTVLKPLTFSNNKAGFELLDLSLRQLNQDCLIALENTGHYAFNLLNFLHEQGYKVYTYTPLLIKEFAKSLSLRKTKTDKKDAHGIALKLLSDPNREQFQHDNRQVELKILTRHIHRLKKKQSDWKVQYTRCLDIIFPELDKIVEKHSEYTYQLLTCYPNPQKRLEAGFDKLIEIKRLTASKIQDILSVAPRSIGTTSPAREFEIIKHYKRLIDKAETCVNDLMAEFNSVITTVTGIGDRLGAVILAEIRNIHAFDNPAQLQAFAGLDSSIYQSGQIDLAGRMIKRGSPHLRWALIQAAKACPRFSPAFKAYLKTKLE

SEQ ID NO: 228097 - protein, 389 aa, unidentified
MPSVSERPEAPTAIQTHLAASFVSLELSRSIWLITSLSPGSGEKMSKHSVRAGDVAALLARFLELKRKASERTGKSFPIVVIQEAGLDGFWLHRVLQSEGVESHVVDPSSIATSRRRRRAKTDRIDGEALLRALLAYKRGEPRVCAMVKAPTPEEEDRRRLCRERKVLIAERVKHVNRVKGLLFSQGISGYEPLRRDRRQRLDELTTGDGRPLPVHLKTQIRRELDRLELLLDQIKEAEAERDALLAAPQPAAPAPAGRMLLEFKGIGAELAAVLWLEALFRHFDNRRQLASYAGLAPTPWQSGSVDHEQGVSKAGNPRLRTSLIQLAWLWLRHQPQSALTLWFKERVSGNGGHFKKSTIVALARKLLVALWKYVTAGVVIDGAVMKDA

SEQ ID NO: 228098 - protein, 367 aa, unidentified
MKKRIYRATELTRLNIEQLAEKVKGKRVVFGVDIAKQDNYGAVMLWAEKEPVMTIKWRHPERSRQMVQVLKDLGASTVEVAMEPSGTYGDPVRKLFWEEGIAVYRVSAKRSHDAAEVYDGVPSWHDAKSGAVIGKLHMDGASTLWEMESFCRRDLTAVVNTMDMIQQQYQQNTHRIEALMARYWPEAGEIVDLGRATFLELLGAFGSPQAIANSQDKARQLLRRIGGCFLGQEKIERLIASAQTTIGVPMTDIEAEEAGFLARRTRQLQQELRQAKKRVEVQGAQRKSIVAMSKVTGKATAAVLVASGGDPTEYPTPTQWVKGLGLNLKERSSGRHKGRLKITKRGSGRARRWLYLWCCVSYSMMLL

SEQ ID NO: 228099 - protein, 391 aa, unidentified
MILVGIDVAKDKHDCIISNSEGEVLFEPFTIPNNMDGFEDLFQKITSVSDDLTNVKVGLEATGHYSYNILGFILSKGLTTYVINPLHTNLLRKAQSLRKTKTDRIDSRTIASMLLFDQSLKPYSNESYHNEELKSLTRYRFTKVRERAKLKTSVSRLVNILFPELEHLVPNLHMNSVYALLSEYPGASFIASCHLTKLTNLLDKASKGRYKRDKALEIRDAARRSVGSVMPARSLELKHTIALIQLLDSEIDEIENQIDEVMSTVNSNITSIPGMGATMAAMIIAEIGDFSKFDSPDQILAYAGLSPSTYQSGQLTSTYAHMEKRGSRYLRYALFNATKYVCIWDPVFREYLAKKRAEGKHYNVAISHAAKKLVRVIFALRRSGEEYRIAA

SEQ ID NO: 228100 - protein, 319 aa, unidentified
MTQNDLVVVGIDVAKDKVDARIRTVTERRTFPTTASGRRSLIAWLRKRQVGNAVMEASGGYERVWAKALRQAGLEVRIVDPKRVRSFAESAGRLAKNDKIDAEMIAWFAETFSAAPSQVEDPAHEEIKALVKGRKSLIDLRARLEMQKEHETPPLVQKAHARLLKKLADEITTIETVIGAKIKATPAFAARAEIIQSVPGFAEATALTLLAGLPELGQVSNEVAAALVGVAPYDDDSGKRHGQRCIKGGRRWVRNALYMPCVGAATLNNPVFKAFYRRLIAKGKAPKAALVACMRKLIVILNTMITRGEKWDPKRYQVA

SEQ ID NO: 228101 - protein, 389 aa, unidentified
MKIFVGIDIAKLNHFAAAISSDGEILLEPFKFTNDADGFQLLVSKLESFDKNSIIIGLESTAHYGDNLVRYLVAEFYQVCVLNPIKTCQIRKNNVRKTKTDKVDTFVIVKTLMMQDDLRFITFFDLDMMDLKALGRFRQKTIKQRTRLKIQLTTYVDQVFPEIQYFFKSGLHQHAIYALLKEAPSPKEIASMHMTHLANLLKVNSHGHFTKELAKELRVLAQKSVGANDNSISIQITQTIQQIELLDSQLEKIEAEMTDIMRFNDSVIMTIPGIGYINVGMILGEIGDIHRFSNPNKLLAFAGLDPSVYQSGNFQAKTTRMSKRGSRVLRYALVNAAWNVVRNNATFKAYYDAKRAEGRSHYNALGHCAGKLVRVIWKMLTDKVEFNLE

SEQ ID NO: 228102 - protein, 403 aa, unidentified
MKQVIAFDVSMGKSYMVIYNAQKQCVFESEIKHSKPDFKKLQEKIHKLTDETGESPEIVFEATGIYSRQLERFMQNNQYTYCLLNPLEAKIQCDSLRIHKTDRSDAHRLALTHFTVTRRVSTGTDNLFYQLKSLSRLYSELDDELSIIRGRMHKVIQLTFPELERIFTSKSDLFLNFVQLFPHPDCVLGLSKTIIKNRIRANTNKKISNITAEKKAIQILEIAKICYPAVSQNDVLCDQLKLYARRYQELLHQKESCISKMVYVAEQRAEYDIIRSLPGIGPNTAVRLMAEIGDITRFNNNKQLNAFAGIDIRRFQSGKTFFKDKINKRGNKHLRKLLFLIIQNMIKQRRYGQNHIVEYYDKLKTQPYNKCHKVASIACVNKLLKLLFYLITHNMHYDYRLAA

SEQ ID NO: 228103 - protein, 372 aa, unidentified
MKEDSVIFIGLDTSKLKISVAVAEGERNGEVRFFGDISFEPASVAWLVNKLSKRGAKLHFCYEAGPTGYGLYRQIVELGHDCVVVAPSLVPKRAGDRVKTNRRDAVSLARLHRAGELTAVWVPDEAHEAIRDLVRAREAASDALKQAHQQLQSFLLHHGRIYTGRKPWTRAHTRWLTCQAFDHPAHHILLAEYCQAIEDAGVRLDRLTQLVVETAASWSMAPVVAAYQAMRGVAFMTAVTFVVEIGDVRRFDNPRQLMAYLSLVPSESSTGERVKRGGITKAGNTRVRRVLIEGAWTYRFPARVSPTIQARLEGLPRIVREIAWKGQVRLCARYRKLMAAGKPKVVAVTAIAREMAAFLWAIGQEVAPTAKI

SEQ ID NO: 228104 - protein, 452 aa, unidentified
MTRQRKKSTAQAALPVMRPDAAGIDVGATEVYAAVPVDRDRERPVRCFPTFTENLHALADWLEHCGIKTVAMESTSVYWIPLFQILEARGLEVCLVNARHVKNVPGRKTDVSDCQWLQYLHAVGLLRASFRPEQAVCAVRSLLRHRESLVQMTGTHVHHMQKALDQMNLQLHHVISDITGVTGLAIIEAVLEGERDPKVLAKLRNHRIKASEETIAKSLVGDYRREHLFTLRQSLTAYRSYQKLIGDCDSEIHRSLEEIDSKNDSPPSPPVNGGSEPPETVPFQLSEQRDRILGVDLTKVPSLGTLNVQILVGEIGPDLSKFRSASAFASWLGLCPANDISGGTVLRTGTRKVNSRAAKVLRLAAQTLYRSKTPLGDFYRRMRAKLGGPKAVTATAHKLARIIYHLVTTGQEYDPTTFIKQQLRFQKHQEAKLRGKARELGFQLVPLGVSPA

SEQ ID NO: 228105 - protein, 434 aa, unidentified
MQDVEDEPLFTERVAGLDIAKAEVEVTIRVPSDTGTGRRQQETRAFGTTRRELLALADWLRCWGVTKIGMEGTGDYWKPVFFVLESRGFDCDLYNAAQVKALPGRPKTDRADSIWLAKITERGMISSSFVPPEPIRVLRTHTRYRRHLTQARTAEKQRVEKLLEDGHLKLSSVISDIHGVSGRDMLNGLAAGQRDPRALAQLARGTMRGKIRRLEEALECSFFTDQHAAVLAMMLVTIDHYTAQIEALTARIEKLAEPYLQQVRQLDEIDGVGTICAQDIIAEIGADMTVFPTASHLVSWARWSPQVKQSAGKRKGSNAAGRGNPYLSAALGEVSISAGRTQSFLGARYRRLAKRMPKKKALVATGNSVLTIMHVLLADPGARYTDLGADYYEQRMHVRRQARNHVRSLERLGYKVTIQASTTGPDDQPLTAAG

SEQ ID NO: 228106 - protein, 349 aa, unidentified
MSLTQPAAWAGIDTAKATFDASIAHPSQALVFDLALLHVMPVRTFARTRDGVNEFVAWARKQTQEVGTGLRVVMESTGNYSIELAAWITEIDDALLPAIANPKRTANYIKSLGLRNKTDKLEARALALYGLQRSPAPYEALTTERVELRSLLRYRDALVAERVAERQRADETRACKAVSAMQERRLEQLDRDIKSIEKSMRVLLTKTPTLKRDYELLTSIYGVAFVTASVILAEIGDLRRFTRARQLSAFAGLCPRLVHSGTSRRGSHLSKDGNRRVREALYMAVSTALRGDNQIAHFHRTLVRKGKRPMAAHAAAMRKLLTIMRAILITNTPYDSQYGISGKLCGKSS

SEQ ID NO: 228107 - protein, 418 aa, unidentified
MKKHSKSSQRSEPTLKRRKARGPVQRDAKEVLAEVLGKLTGKLDAPAVSTSAKENRRGNTVGPNRDRLTVGVDLGDRWSQYCILGLEGETLAEGQLRTTQEDVREFFQALTVARVVIEVGTHSAWVQEVITEWGHEVLVANPRLMEGSKRRKRKSDRIDAHKLARLGRVDPQSLYPIRHRSREVRQDLVVLRARDALVSVRTELINTARGLVKSMGTRLPRCSSPSFADKVKDAIPVEVGEALLPLVQLTETVNDCIARYDQKIEELGQKKYGHTTLLRQVKGVGPITSLAYVLTLEDPQRFSSSREVGPYLGLVPKQEDSGDSQPQLGISKAGDRMLRRLLVGSSQYMLGAFGPDTDLRRYGLRLCERGGKNAKKRAVVAVARKLAVLLHHLWVTGDVYEPLHHTGAETKTAQATAA

SEQ ID NO: 228108 - protein, 402 aa, unidentified
MRYVGWDWASRTHDVTVLEDSGAVVERWSFAHTEAGWAATLHRLRRHGDPDQLPVIIEKSSGLVVDRLLGARHPVVPVHPTAFYAARPRWGAAGAKSDPGDSYKLADYLRTDGHRLRRLEPTDAGLRELQALVRLRDDQVRTRTATINQLTATLEAHWPGPRDLFTSLGSPIARAFLTDYPTPDSAARLGEARMAAFCRRHGYRGSKTPEQLLTRLRAAPVAPVGLPAATLTAIISAQIQLLNTVQATIAQIEKRIAGCVAAHPRARLLAALPGVGTINLAQLLAELGPILDRVESAEQAATECGAAPVTKASGKSSGVYFRHAANSRARQALTTFAHNARLQCPWAGELYANARRRGKRNPHAVRIVARAWLRVIWACWHTGNPYDPASHAARRDRPTSAT

SEQ ID NO: 228109 - protein, 369 aa, unidentified
MEKTVYVGLDVHADTIAVALADEGRGGEMRFYGTIANSGDAVLRLTKTLSRDGQAPTFCYEAGPCGYGLHRHLTRLGFECAVVAPALIPRKAGDRVKTDRRDAEMLARLWRAGELTPIWTPDEEQEAMRDLIRTRKQTVDALKVGKQQLLSFLLRHGLRYRNGSYWTKRHRRWLAELRKFPYPHQQIAFEELKRAIDQIEARIVTLDQTIETAIKSWHFAPVVDALRALRGINTTIAATVVAEIGDITRFENPRQLMAWLGLVPSEHSSGPTIRRGRLTKTGNALARTMLVEAGWSYRHPPKEGHPYLKRSEHLPQQIKDIGWKAQTRLCKRYRHLSRAGKPQPRVIAAIARELAGFVWDIARKTPLPA

SEQ ID NO: 228110 - protein, 322 aa, unidentified
MATVSFCGIDVAKDRLDVVVLPEQRCWSVCNDAAGWAELAKQLGSFSIAAIGLEASGGYERGVMRVLLAADMPVHQINPFKLRQFAKASGVLAKSDRLDARVIASFIAIMPPRRAQRPSPAIERLTEILSVRRQLTDQKIAAQNASAMLQDAMLLRLSRRRIGRLAADIEMLDRSLVEIVRTDAALAHRYRLLTSMPGVGPALACTLIALLPELGSMSRKQVAALVGVAPYTFESGKLKGKRCIWGGRAPVRHVLYLAAMSASNWNPVLKAFHSRLKIAGKLHKVAIVAVMRKMITMLNAMVRDDVAWAGHLGGRQILPTAR

SEQ ID NO: 228111 - protein, 320 aa, unidentified
MNSHYKIEKIQTEINHVGIDVSKQHLDVSIAGSKTQRLANTQAGLRVLHQKLGRLAHPRVTCEATGGYEKLLVDSMLDAEIEVCVAAPGRVRYLAHAEGLLAKTDSIDAELIRRFAEKIPLPRQIKQDPAAQKLRQMSDYRRMLSEDIVKTSNRLELAQGYLREQLQSQLTHLQGLMKKVEVDIKAHIRNCEELAQKAARLQELKGVGPVLAATLLAHVPELGKVGDKTLACLVGVAPHPKQSGNFKGKSSIRGGRANVRHVLYMAAVTAARSNPILAAFYQRLRTQSGKTAKVALVAVMRKMLSVLNKMIAQPNFSLAH

SEQ ID NO: 228112 - protein, 355 aa, unidentified
MESTKFIGMDVHKETISIAVLTSTGKLIMESIIETKAITIVQFIQGLRGDLNVTFEEGTWAAWLYDLLKPHVTKVLVCNPRKSALLRDGNKGDKIDARKMADLLRGDHLKSVYHGDNGIRTLRELSRSYLTISKDLTRVMNRIKALYRSWAIPCGGTQVYALCHRSIWLSKITETGVRCRAVHFYRQLDALQPLRREVRRDLLAESRKHSATKLLRQIPCIGPVRAAQLIALIQTPHRFRTKRQLWTYSGLGLETHDSAQYRYVEGQLRRSKKPPQLRGLNQDHNRDLKNIFKGAATKASISAGPFQDFYQALLAKGIEPTMARLTLARKIAAITLVIWKKGINFDAKQLKQQTA

SEQ ID NO: 228113 - protein, 329 aa, unidentified
MGFRYFLGIDVAKAKLDCLLLDSVKDRRRSKVVTNTAEGWLALVNWLAKQGAALEDVHAILEPTGTYHEGVLFSLAQSGIAISVVNPAQLRRFAEGLGVRTKTDASDSAVLARFGAMVAPETWQPAPLKARELRALLARRDAVAQDLQRERNRAEQLSVDTPERVRQSLREAISFLEDELRALQEAIDQHIDDDPGLKRIWDLLQSIPGVGQRVADHFTALLAGRDFASAEQLAAYIGLVPTEWQSGSSIKGRPRMSKAGSASLRQLLYMPAVVATRHNPHVHALYNRLLSKGKAKMSALGAAMHMLARLCFGVVRSGQPYRADWLVKT

SEQ ID NO: 228114 - protein, 389 aa, unidentified
MLLDHPSDGLTAIRTHIGAIFVSLELSRSNWLVTSLSPGKGEKMSKHSVAAGSVAELLVLFAELKRKTEVRTGRSYPIITIQEAGLDGFWLHRVLQQERIESHVVDPASIATPRRRRRAKTDRLDGETLLRALLAYKRGEPRVCAMVVAPSPEEEDRRRLCRERRTLIEERITHVNRIKGLLFAQGISGYAPMRRDRRARLEALRTGDGRELPSHLRAQIDRELDRIELLLGQIKAVEAAQDALLAAARKPASEEAAPDPVTMLLALKGMGANFAAVLWSEAFYRQFANRRQVAAYAGLAATPWQSGGIRHEQGVSKAGNPRLRTTMIQLAWLWIRHQPQSALTRWFKERSQQGRKRAIVALARKLLVALWKYVTQGVVIEGAVMKPAA

SEQ ID NO: 228115 - protein, 375 aa, unidentified
MKEKLRFLGMDVHAETIAAAIAEPDGEVRSLGTIPNRMESVRKLIKKLGPAEKLRVCYEAGPTGYVLYWQLAELGVQCEVIAPSLVPVKAGDRVKTDRRDAEKLARSYRSGDLTAVWVPDAGSEALRDLVRAREAAKQDELRARHRLGKFLLRSGQRPPSGVRAWTHLHLIWVSQIRFTQMAQESTRLDYLHEVEHMRERVLRLEQAIAEAVKLASPALQEVITDLQALRGIAQISAVTIAAELGQVSRFAGARELMGYCGAVPSENSSGTRTRRGSITKTGNAHLRRIVVEAAWSYQRPPAIWAGLRKRQQSASEEAKEIAWKAQHRLHKRYARLAAKGKDKRKIVTAVGRELLGFIWAIGTKAEATVSQRIAA

SEQ ID NO: 228116 - protein, 458 aa, unidentified
MYRELLPLRQALSAELKANLSPAVPGIDSEHLLQSYLDRLTMYVGCDVADQILTLFAVDAAGDKLGHLSTANDPQGFEQLWDWLEDLCSRHSLRIMLLAMETTGVYYWACWDFLAQRPNLARVLYNPRTTEHMTEVLSKKVRNELVDAYALAEQVHLGGTPEVVLSEDADLLTARFCSRAARDLAGQVNRKKNQLRALLRAYNPAIGQVFPGAKFHHQAVYALLQQYVFPDECVDAGVEVITAILTAHCRTAFDRQHAERLVALCRDTLSRPIGREQIRQRVHHLVDDITTCQKRKTFFNKTGYRLIENRPETPLLRDATGAGISNTLALVSEVGDVQRFKSGEHLASFLGLTTSKHISGTTIFVSKHITKQGSPNGRYAAVNVAQHLSLRVPKYQQMYERIKNRKPPRKGHYVALVAVARDFVTNVLYDMWRYKRPFFRKVEDYRAYRRKNPRTDEE

SEQ ID NO: 228117 - protein, 320 aa, unidentified
MQTPTKILDIGGDVAKDEIVVACSEGSFPTRPLANQRTALRAFLKKLPAGSRIGMESTGIYHELFANLAHQLGFIVFILNPKDARNYAKGVGTRGKTDRVDAELLARMVAHEHTKLHAWIPPTPEQYEIAQLLKRRAKLTSLRAALGMSLKGVDGFGTDLKSLKKHFNQVIAHIDQRVKELVEANPDRKQHDANLRTIDGVGPVVSAALVNALDRVPVKNADAFVAFTGLDPRPDDSGQHRGKRRLSKRGPSELRRLLFLAALSAAKTKVWHPLYVHYRDKGLPSTAALVILARRIARTAWSIYTHKTVFDPKRLINALT

SEQ ID NO: 228118 - protein, 346 aa, unidentified
MQNNTLAAVDIAKEIFEVGVSDRPGRVMLRKRLPRATFLEFFAQLPRATVVMEACGSAHHWARRIEELGHVVVLLPPQYVRPYVMRNKTDRTDVDALLEAFRNEQIRPVPIKTVTQQVIATLHRLRSGWLADRVRSINALRGLLRELGFFIPEGRRHVLPEAWEIIQDHRRGLPDALKPSLAALCEEIAALSTRIEDVEAQLEALARQIPLIARLRSVPGIGLLSATALYAFIGDPSRFPSGRHMASFVGLTPREYSSGLRRFLGRISKRGDAYLRMLLIHGARSVLWHAKRMKHRDRLRSWALNLERKVGHNKAAAALANKLARITWAVWKNDRDFEIAPEPQAA

SEQ ID NO: 228119 - protein, 401 aa, unidentified
MISVGIDVSKETSTVCIIKPYGEVVASPYNIEHTETAVNELTTRILAADGEVRIVMEATGVYHLPLLVTLKQAGLFVSVINPLAMKRYASTALRKGKTDKMDSVRIANYGIDNWFKLTDYSPPEEIYTQLKLLGRQYAHYITMRVESKLALTSLLDRTMPGIKKLFGGTRSKAPTKDKLSDFIEEYWHYDLITKKSEARFVNDYSRWAKKKGYRASESKAKSIYALACNGIPTLSSSAASTKMLTLEAVRVLKEVNQTLETILTQMQELASTLPEYGIVRGMSGVGEVLAPRLIAEIGDVRRFHSGSALIAFAGIDSPPYQSGSFTGTQRKISKRGSSLLRKTGYEVMKCLKTVKPTVDSAVYLYMLKKEAEGKAKKVAKIAALNKFLRIYYARVMEVYSS

SEQ ID NO: 228120 - protein, 312 aa, unidentified
MPESNSTVYVGLDISKASLQLHLQDRQIQLPNTTEGHAQLVERLRVLPLIHVVCEATGGYERALVDALHTAKLLVSVVNPAQVRHFARAQGRRAKSDPLDAQVLTAYGYALQPAPTPQPDPLLRELRALVQWRDQLKEQLSRARQHGELATLPFVRKQQAKLLKHLQAQLKSVDKELAQALSRSPHLLQQVQALTQLDGIGNITAVSVLAQMPELGHLNRQQAAALAGLAPWTRQSGPWEGQRHIGGGRAVIRRALYMSAVVVARQVHSTLGKFYQRLRLAGKPAKVALTAVMRKLLLQMNHVLKNHALKTT

SEQ ID NO: 228121 - protein, 447 aa, unidentified
MTQRNRSSTRASPLALTHPNAAGIDIGSASHFVAVPPDRDDQPVREFRSFTAELDRLADWLGECGIDTVAMESTGVYWIPLFELLDARGFTVLLVNARHVKNVTGRKSDVLDCQWLQQLMSYGLLRGAFRPGDAVCALRALVRQRASILRTQARCVQHMQRALVQMNIQLATVIADVVGASGQAILRAIVAGERDGRELAALCDVRVKASADEIAASLQGHWRAEHLFALKQALDAFDFCGRQLAECDGQIEAQLQRLQAHEGEPAKGKKRSKARNAPKFDLRARLFQMCGVDLTRIDGIDVTTALVVVSEVGADMRKFPSDKHFASWLGLCPGTKITGGKVMSGKTTRVANRASQALKLAAAALRTSQSALGAYYRRLCARMDKPKAVTAAAHKLARLIYAMLTRGEEYTDRGQAYYEERYRQRVVANLNRRAQQLGLQLVPVTVA

SEQ ID NO: 228122 - protein, 339 aa, unidentified
MKNTKYFIGLDVHKKKTTYVVKDRIGNIVLEGETATLYSELYERLEPYLKSSIIGLESCTSYYTLYQNFLKNNYNIKVANTIQLRQLIAKNDKLDAKRLAEMLRLGTFPTSYIPDEEIQRLRSLLQVRHSMMEEKVRCNNRIQAFLDRNGIVMPDQEAFGKKWRQKLLQYIGSGEVSLELRYEYDHFVYLEKKSEHLGQEISGYTMKYWKKEYKLIQSITGFGPVLSCYVIAHILPISRFSSNRKLRRYAGVVPTFHESGDKRSKGHIPKTSSRKHLRWALIQAANAAGRTNTKLGRYYRKKKKQKNNAGIAHVAVASSMIDIIYKVLTTKKPYNPKIC

SEQ ID NO: 228123 - protein, 461 aa, unidentified
MSKKESPQESLNSNLPLINPNAAGIDIGADRHWVSVPVNRDQDPVRSFGCFTAELYAMADWLKQCHIETVAMESTGVYWIPVFQILESRGFEVKLVNAHYVKTVPGRKTDVLDCQWLQQLHTYGLLAGSFRPDDQICALRSYIRQRDNLIKSACIHVQRMQKALTEMNVQLHRVISDITGTTGMAIIHAIVSGERNPTKLAALKDQHIKASCTNIAAALTGDYRSELVFVLSQELALYKFYQAQITECDAQIEQCLARFPDKIDVKSNPLGKPKRRGKKQPGNAPQFDLRTHLYRITGVDFTQINGFGALTVLIILSEVGLDPSRFPTVKHFVSWLGLCPGSRITGGKVKSSKTRPVINRAANAFRMAAQTLCRSNSALGGFYRRMQSRMGAPKAITAAAHKLARIFYRLWTSGAAYADPGIDAYEQNYHERMVNNLKKKAHALGFDLIPQPTLGEEQYAL

SEQ ID NO: 228124 - protein, 335 aa, unidentified
MALYCGIDLHSNNHVVVIIDDEDRRIVEERLPNNLTSTLKLLEPYRELLAGIVVESTFNWYWLVDGLMDAGYAVKLANTAAIQQYQGLKHTEDRYDAFFLAHLLRLGILPTGYIYPREGRAVRDLLRRRLQLVHTRAQQLITVQSQIWRSTGIRVPSRLIRQRAFVPVLPDAHERLAAASHLAVLQVVSREIEHLEEAALKVAQLKPEFKILQTIKGVGPILGLTIMLETGDIRRFPTVGDYSSYCRCVKAERLSNGKKKGNGNRKAGNKYLSWAFSEAAHFCVRFEPAAQRFFERKKARTNGIVAIRATAHKLARASYYMLRNQEPFDAKRLFV

SEQ ID NO: 228125 - protein, 416 aa, unidentified
MLFVGDDWAEDHHDLVVIDNSQKVLARARVPEGPAGITAFTDVVARAALTTVTSDDDLDDDALEVMVGIELNHGPWVQALVAAGYYVFGVDPLQAKRFRESWSNSKAKSDSGDALGLAELVRSRHRTLTKIGADSEGSAAIRILTREHQRAVWDRTRQTNRLRSTLREYHPAIVAIAAKYDLPLHDKTILGLVTLVPTPAAGARITVRQVLPLLARRHDKDAKAAWIVQALRQRQLPIGPEIAEAYAITVRAATRVIASASSHIAELEEQVNAHFSRHPDAEIYLSQPGIGQVIGARLCGEYGDDSTRFQTAKDRRNFAQTSPLTRQSGKLRIVCARKAGNDWALDAAVRQANAAIMHDKYAYAYYRKQRDRGINHNAALRQLANKLTGILHGCLARHHPYDPAIAWANADLKIAA

SEQ ID NO: 228126 - protein, 341 aa, unidentified
MTIVMGLDQHRAQVTAEWLDAETGEVSRGRVAPADRRSVRRFLERFRGMELEAALEATIGWRFVVEELRRIGAGAHLAEPAETSALRGPKKHAKSDRADAKHLRELLMTGRLPECWIAPDHILDLRAQVRLRHSLVDERGEWQQRIRAVLYHHGFPRRSDLDLLTAAGRDWLTALALPATAREQITIALRMIGALDSEIPALDKQLRAYARRQVGCRALITAHYGIGELTSVAILAELGDCRRFSSSRYAVRYGGLDITVHASDRRRAPGHLSRQGPPVLRWALYEAAQAATRPSSPDHAYYRQAAQRLGHNRACLAIARNLLKRSYHTLKDLGDQALAPA

SEQ ID NO: 228127 - protein, 395 aa, unidentified
MIHVGIDIGKLKHCFCIIDYSTGEELVTPTFFENNQSGFRVLSRALAAFPKDSLLIGMEDTGHYHFALLRSLIAQGFNVALMNPTTTDFERKRQGSATKNDKLDTITICDVLACAPHKKKLYRLVTPANFSMYEMKQLTRQHHNLKEQLNTYSNRLQRSIDLTFPEFNSFFKSKYGEVYMNILKNYGSAEKMAQADIRSLRKCFNIKGKGKRIALTAEQLKETAKVSVGYGSLAEEMNIRHLVDQIELLHAQIAEIDKKIEEFSLESNSPILTIPGISHFSGTSILAELGDIRNYDKVSKVIKMAGVAPREYESSQFRAEHTAITKKGSKYLRKTLYQIIVPVIRFNPVFKAFYDLKISQGKGHRCAQGHCVRKLLRVIYHLLTTGQQFDPALLK

SEQ ID NO: 228128 - protein, 367 aa, unidentified
MEETITYVGLDVHKETISVALADGGKRGEVRTFGQIVNTPTALARLLAKLSQPGRTLKFCYEAGPCGYGIQRQLSAAGHDCVVVAPSLIPKKPGDRIKTDRRDASNLARLHRAGELSAVWIPDPAHEAMRDLVRARLAAVRSLRQARQQLSGFLLRHGCHYSRPAWTQMHRRWLAGLCFEQPIHHIVLQDHIATIEAATDRRDRLTKHIEIMLSDWSLAPVVHALQSLRGMALVTAATMVAELGDISRFTNPRQLMAYLGLVPSEHSSGGTRRQGGITKAGNGTARRMLIEAAWSYRFPARISREQLLRQEQLPKPIRDTAWKAQVRLCSRYRKLTKAGKPATTVTTAIARELSGFVWSIACQVSLR

SEQ ID NO: 228129 - protein, 406 aa, unidentified
MQGPVITVDVSKGSCHYQPYVSNGHPMRKPKVLHDTVEGFQSLSDLIDTMKDRYECETIPVIFEATGVYHRCLQKYLDDHQIPYYIISPLMSASYRKTTPNSNKTDDLDCSHIAKAYYGECNLFPYDKPSKSFHNLRELNRYYECELNHLRMRKNTFRKYLDIVYPRLDKCFKGHSSLYDEIPMEVIKQYPHPSLLLKHKEETIVKKIEKKTSHNASFIQNIVHEMYKCSMHCYSGADVTDVESMILPELVDDLQSQEERCDEILKQLVSEAQKTPYFTSIVSIVGIGDNLAARIIAELGDMSRFSCRRAITAYAGLNPKIRQSGDMDGIHLAISKKGNKHLRCLMYLAVSCNYRLKKCDVLYEFNQKKRQQSFSPLKPKAATIATAHKLLLIIYALCTNGTVYHS

SEQ ID NO: 228130 - protein, 350 aa, unidentified
MIIIGCDYHPGFQQIAFVDTDTGELNERKLGHREEAEQFYRQLKVRGKKVRVGMEASGHARWFERLLTEVQFELWIGDAAEIRTKRVRKQKTDRQDAELLLRLLIEDRFPRIWVADGENRDLRQLLWHRHRLVQMRTRIMNQLHVLALNEGVRRKKALWRPAGRAQLQSLVLARWASRRRQDLLELLDQLTPKIQELTRALEQEVEKRPVARRLMTHPGVGPLTALAFELVIGTPERFGCGKQIASYVGLVPSEESSGDRRRLGHISKQGNSLLRFLLVEAAQVTVRTDPDWRRRFLHLAMRRERRIAKVAMARKLAVRLYWMWRKEWDYEQMRKYGSHVGEPVHRQGAS

SEQ ID NO: 228131 - protein, 312 aa, unidentified
MTNDTIGVDISKDHLDAHRMSDGASRRFANDEHGHRALLKWLGGKTGTRIVYEPTGAYHRAFERRLAEADLALVKVNPRQARRFAEATGRLAKTDPMDAAMLARMGALLDLQARPPRSPILNDLKDLHMAREALVKNRTAAKNRAKNLTLAILKRHNGAQLRQIERQIAAIETAIMALIKADSDLARRFAILVSIPGVSAITAFTLLIDMPELGSLENGQAASLAGLAPVARQSGKWTGRAFIRAARANVRRALYMPALVAMRCNDQIKAKYDRLKAAGKAPKVAIVAIMRNLLVLANALLRDCRKWTPKMP

SEQ ID NO: 228132 - protein, 394 aa, unidentified
MILVGIDIGKNQHTFSIVDMNTGEILSNPSLFNNNQEGFLFLIKKLNIYSKSDLLIGMEDTGHYHFALLKYLLDIRYTVALINPTTTDLTRKLQGGITKNDPLDSLTICDVIGSNQRKKPYRVTKVNCFDLYEQKQLTRHHHNLKEELNTYKNRLQKCIDIVFPEFNSLFRSKYGIVYMNVLKTFASAQKIANSDIRTIRKCFEYDGRGKRITLSADQLKAAAKTSIGIPSVAEEIQIRHLVCQIEMIEEQLSEIDKKIEEFSLQNNSPILSIPGISHFSGTSILAELGDICNYTKASQIIKFAGVAPYHYESSQFTAQHTAITKKGSRYLRKTLYQIILPVINHNTVFTAYYNKKLAEGKGHRCAQGHCIRKLLRIIYHLLSTEQTFDPALLI

SEQ ID NO: 228133 - protein, 342 aa, unidentified
MYYIGLDVHKKTISYCVKDASGQVHQEGKVGATRWELDDWMKTLPQPWTVAMEATIFTGWIYDHLLPHAQQVKVAHPLMLRAIAAAKKKNDRIDAGKIADCLRCDFLPECHMASTAIRDRRRTLRYRHLLVRQMVQMKNRISGLLMETGVSHNKQRLHKVGYFRELLASNEEVNESIRPLLRVSRDSIVRLQKTEYALVSSLQRDPLLAERIKRLRTVPGVGPITALTWALEMGEVSRFPSIRQALSYCGLCGDEKSSADKVTRTPLSKQRNKHIQHVLVEAAKLAPRQDHNLALVYEREKQKGNANRATLAVARKMVAYLLAVDRGQRDFVPFADSQSAAA

SEQ ID NO: 228134 - protein, 460 aa, unidentified
MLRHPVPYSRKEECIPGTRTILIMRLYCASPKGICSVGSLLCVEGEVRFMNNTLFVGIDISKRSNVATFMNCEGKVVGRLTFSNNGSGADRLVAKILSYYEKEDFEAIRIGMENTSVYSKNLVWFLYEHEALNEHKLSIIPLNAIMVANYKKSFLDMDKDDITDSFAIADFIRIRPGLLPFKLDDRQEALKIMTRSRYNYVQALSRMKSQFLTRLFLSFSEMEAGKPFYSIFSKTSLSLLEEEFTLDELAEKPIPKLVEFLQEKGGGKFQNPEEIAKVLKKAASSSYRVPAMVRESLNRTMASDMEIMRILENEIHNCDKNIEKLMKSVPAILVSIPGIGPVLAAGIMSEIGDISRFQKQESLGKMAGFKWKRNQSGKKESEDKAAVLSGNKKLRYYLVEAANRVRIHDPVFEAYYRKKYAESKTHAHKRALILTARKLVRVIFYLLKENKLYKPDVGIS

SEQ ID NO: 228135 - protein, 429 aa, unidentified
MTRTKDTTVVTVLHPICCGLDIHKQFVTACLMTTDPLGKERSVLESFGTFTDDLVRLREWLLEHECPVVALESTGVYWRPVHNILEGYLTVVLVNARHIKNLPGRKTDLSDCQWIATLLRVGFLKASFIPPKIVRHWRELTRYRRSLVEALGDVKRQIHKLLESSNIKIDSVVSVLFGQTGRNLMDLLAKDHSELTLQAVQTCLRGRLKSKATELFRAVQGFFEDHHRWMLREMLDRIDQQEANLARVESRLRDLLQPHDELIERITQIPGIGPTSAYAILSETGTTLESFPNAGALCSWAGVCPANNESAGKRRSTRSPVRRNHLRTHLVEAAWGAVKKKATYLRSKYFSLKSRLGPKKAIMAIAHRILKALYYIIKHGDSFRDLGEDYLIELRSQSITSYLERQAKKLGMVLIPESLWNQMIDRSPA

SEQ ID NO: 228136 - protein, 378 aa, unidentified
MQSMKQEDTLVVGGVDAHADTHHAAALDERGVLLATKSFPTTTPGYAELLGWLRAFGAVAVVAVESTGAYAAALVRYLREHDVRVVEVNQPHAHTRRRVGKSDPIDAEMAARLFLAGKAKAIPKQTDGIVESIRLLRAARHSAAKSRSAAMVQLGGLIVTAPQELRDQLSSPRTIRGKAALCRRLRPSIGELRRPTHAAKFALRSIAGRIDALDDEIAVLDRQLEQLVRAAAPRTIQLLGISTGHAGQLLVTAGQNIERLRGEAAFAALCGANPIPASSGKTTRHRLNYGGDRQANRTLHLIAVCRLRYCARTRAYTQRRTAEGKTKPEIMRCLKRYIAREAYNALRADLAALQHPAPSATVTISCSAGPIGTTRRRT

SEQ ID NO: 228137 - protein, 367 aa, unidentified
MKKGSTTAKQQSRNFSQRQLTIGLDLGDRNSCYCALDEAGQIQLEQRVRTTAKALCEVFGAMPRSRIALETGTHSPWISRLLSELGHEVIVAHARKVRLIGESRKKDDRLDAQTLARLARIDPQLLCPVKHRSAQAQADLTVIRARAGLVRARTGLVNTARSLAKSYGERLRGCNVRNMNPEKAEALSPELQRALQPLLSAIEELSERICQYNERIESLAQQSYPQVALLKQIKGVGTLIALTFLLTLEDPHRFRKSRDVGCYLGLQPGRRNSGQSEPQMHISKEGDPYLRTLLVQGAQHILGPFGVDCDLRRWGLKLAERGGRNGKKRAIVATARKLAVLLHHLWVSGEVYEPLHNSSRATVAAAA

SEQ ID NO: 228138 - protein, 371 aa, unidentified
MESIIYVGMDVHKDSYSVCCYKSKEDRYYYEKKILAESKRVIKYLESVKKELGEETLFICGYEAGPTGFGLYRDLQKAGYSCVVMAPTSLKHSVNHKVKNDKVDARFLAKTLFTKDYSSVHVTTEHEEAINEYCRMRLSIKKELTKAKLVLQSFLLRHDKKYTEGDTWTLKHRAWLKNIHFEEEYLNEAFNEYMISVNTLEQRLKTIENRLKEISQDPDVKEKVDRLVCFCGIETVSAVTIVSRFGDFNRFAKAYHFSNYLGLTCGEDSSGQKEKHLGTKKTGDKEIRRLLTECAKSIKKTNLKGKKSKRLLDRQKDKDPLVIAYADKCRYRLRSKIAHLELKGKSPNVAATAAARELACFIWGMMTNHIA

SEQ ID NO: 228139 - protein, 457 aa, unidentified
MTKHRKTTKSRSFKLTKLPKQLQHINLNAAGIDVGSERHLVAVPEGRDEISVREFGTFTADLEALAAWLKKCGVTTVAMESTGVYWIPLFELLERRGFEVKLVDARHVKNVSGRKSDVLDCQWIQQLHTYGLLAGAFRPPDEVCVLRSYLRQREMLTQAASMHIQHMQKALQQMNLLLHNVVSDITGATGMKIIKAILAGERDPRVLARHRHELCKNSSATIAKSLVGNYREEHLFALRQAVDLYETYQAKIADCDQAIIKHLENRPDVSDDGPPPTDKPLKARDRVRNGVDVRELLFKKSGVDLFTVPGLGADTLLTLASEVGFDLTPWKTEKHFASWLGICPGTKRSGGKVLDAKTKRNPNRAAQAFRMAASSLHHSQTALGAFYRRIKARTGGQQAVTATAHKIARIYYAMLTKGTSYVELGQQAYEQRYKERRLDHLKMQAKSFGFQLVPCAS

SEQ ID NO: 228140 - protein, 343 aa, unidentified
MDYFAGLDVSVKDTSVCIVDDTGKITREVRVASEPEALLAVLRNPTYRFKRIGLEAGPLSQWLFSALAEADLPVICVETRHMRAVLKAQINKTDRNDARGIAQMMRVGLYRPVHVKTLRSQKLRMLLTHRKLLQSKAIAVDNDLRATLRNFGLKVGMVGTAKFETRIKELIENLPDLILLVEPLLVVRRVLREQLDLLHRRLLAVVRDDAICRRLMTVPGVGPVVALTYRATVDVPARFRKSKSVGAVFGLTCSRDQSGERDRPGAISRCGDEMMRAMLYEAAQAMLLRSAKWSWLKAWAMQIARRRGMKRAIVALARRLAVILHRIWIDGTEFRWTREAAAA

SEQ ID NO: 228141 - protein, 347 aa, unidentified
MSTTQTNETPQYFVGFDIASESFTLAVGTMPWQLLHQPVTFPNTQEGFRQCLDWLTQRQCTPDTSLLCLEATGVYGEAMTYFFTSKGYPLVLEHPLKVKRAFDPSGRKTDAVDSKQIAEYAVRFLDELHFWKPPTECLEQMDTLLATRERYVTQRTATQNALTALLRKHVRTPLAEQLHQQTLEHLKDSIQAIDAEMARLIDQDQGFREKVALLRSIPGVGLLLAAHLCVHTEGFTQALQPKPMAAYLGICPLEHTSGTSVYRPAQSRHFGPSRMRKLLYLASLSLRTHQATFKHYFLRKVAEGKSKRLVLNNIANKLVRLICAVLRDGKPFVPNYVSVNPNLLTNA

SEQ ID NO: 228142 - protein, 344 aa, unidentified
MKITTVGLDLAKNVIQVHGVDERGKTVLKRQLKRDQVASFFANMPACLVGMEACGSAHHWARKLQSLGHEVKLMAPQFVKPYVKTNKNDVADAEAICEAVARPNMRFVPIKTAEQQSVLSLHRARQAFVKARTAQGNQIRGLLNEYGIVIPQGIGHVTRRLAEIVEDGENELPGRFRRLLQRLADNLKEMDRQVGELEREIKTWHRESEASRKLEKIPGIGALTASALTASIGDASCFTSGRQMAAWLGLVPRQRSTGGKATLLGISKRGDTYLRMLLIHGARAVIRVCERKPDPDRWLKGLMGRRNKNVAAVALANKNARIAWALLRYDKEYASDYAPAFAAE

SEQ ID NO: 228143 - protein, 338 aa, unidentified
MHITTLGIDLAKNLFQLHGVDDRGRVVLSRRVKRSQLAEAVASLPPCVIGMEACASAHHWGRAFEKFGHTVKLMSPKYVKPYVKTNKNDCRDAEAICEAVSRPTMRFVSIKTVEQADMQALHRTRSLLVKHRTAVINQIRGLLAEYGLVIAPSPEKVRPTLVRFLDDAESGLTAFARDTFSELYEQLKDLESRIARVTERVERVFRAHPVCRKLAAVPGIGPLTATALLAAVGRPEAFRNGRHLAAWLGLVPRQYSSGGKEILGGLSKRGSRYVRTLLIHGARAVVHRAQGRSDPQGRWLWTLKCRKGTNVAAAALANKNARVVWALLARDDVYRQPA

SEQ ID NO: 228144 - protein, 450 aa, unidentified
MQKKESKSKSKKSVSMPMVNPNAAGIDVGDLLLSVSVPVDRDAQSTKEFGAFTSDLHLIANWLKKCRIETVALESTGVYWKNIYTILTQYGFDVCLVNAKYTKNVTGRKTDESDAQWIQRLHSCGLLRTCFLPDDLTQTLRALVRQRRSLTQDSTRYVLRMQKAMELMNLKIHAVISDITGTTGTKIIEAIISGERSAETFLPLMSVRIKADKDTLLKSLQGNWRNEYLFLLEQSYHMYLYLLNQIALCDRQIEQALQSFSAYETEGELIEQENKTPKAKHRKQPKFNTQAYLHKIHRVDVMEIYGISAIAALEILSETGTNLEKWHSEKHFVSWLNLCPNNKISGGKLISSEILKKKQNAAAIAFKAAANGLQRSDHWLGDYFRRMKSKGGNKYAIVATARKLAIIYYKMVRYKQAFQPFDNDEYKKKYQQVKIAYLERALARLKNTAA

SEQ ID NO: 228145 - protein, 463 aa, unidentified
MRTKRSKGKRRTRRSSKQGLQVIRPNVAGIDLGSREHYVCCPPSSHGEPNVRHFGTTTPELNRLADWLKEQAIESVAMESTGVYWIPIYEILERRGFEVLLVNARALSSVPGRKTDTQDCQWIQLLHSCGLLNGSFRPGDDICVLRSLVREKTVMESQRSDWLRRIQKSLDQMNVCVHHAVSDISGVTGMGIIRAIVAGERDPSKLATLRDRHCRNSEKQIAEELTGNWRAEHLFSLKQALQMYDHICAAIADYQAEIHRTLAALQPPENRTLKAPELLNKTKRKNFRARGQEPMREALFRLTGHDMTAIDGIGVETAETVLSELGTDLTSFPSENHFVSYIKLAPKLAISGGKPLPAKRSGSTTTRLGAAFRMAALTLRNSNTALGAEYRRIARRKGASVAVFAMARKLARLVYRLLRYGQPYVDAGMAAYEQRFKAARIRTCKQIAKEFGLTVLEPGQLQA

SEQ ID NO: 228146 - protein, 389 aa, unidentified
MLLDHPSDGPTAIRTQFGAIFASLELSRSNWLITSLSPGKGEKMSKHSVTASDVAGLMKQFADLRRKAEARTGESYPIITIQEAGLDGFWLHRVLQQNGIESHVVDPASIATPRRRRRAKTDRLDGEALLRALLAYKRGEPRVCAMVVAPSPEEEDRRRICRERQSLIAERITHVNRIKGLLFAQGISGYEPLRRDRRARLEALRTGDGRELPVHLKAQIGRELDRTELLLEQIGAVEAARDALLAAAARPADNKAAPDPVAMLLALKGLGANFAAVLWSEAFYRQFSNRRQVAAYAGLAATPWQSGGIRHEQGVSKAGNPRLRTTMIQLAWLWIRHQPQSALTRWFKERSPQGRKRAIVALARKLLVALWKYVTQGVVIEGAVMKPAA

SEQ ID NO: 228147 - protein, 338 aa, unidentified
MFYVGLDIHAKQITVCVLDGSGRVWQRCQVRRVDQLMQVLEGLPDRCEVCYEASTGYGMYFELFSKVARRVVVAHPGLLRLIFRSKRKNDRRDAEKLAKLLYVGEVPAVHVPSANVRAWRELITFRRRLIDKRTRAKNGMRGLLRSLGIEAPQRAGLWSKRGRAWLRQLDFANPMHALKRDLLVEEIETLSAQVLRVERELARYSADSVAVQILRSIPGVGLRTAEAVAAFIDDPHRFANSKRIGAYFGLVPSQDQSGASNHLGHITRQGSGTVRKLLVEAVWQARRRSPTVRAYLERVQRGDQDRRKIAVVATSHYLVRVMWSMLKNGTLWQETVAA

SEQ ID NO: 228148 - protein, 390 aa, unidentified
MGRVVIGMDPHKRSATIEVIDEREQVLAQGRYGTDTEGYRQMLAAGRLFPHRVWAVEGCAGIGRHIAQRLVADGETVVDVPAKLSARVRVFDTGQGRKTDPVDAHSVAVAGLRTASLRTVAADDVTVALRLLVDRRDELGRARTEVVSRIHHLLLEIVPGGAKKYLTRGQASYLLRTAPAPVGIVAETRHTLARELIEEMTIIDLKVRAADKQLRQFVTTTGSRLSDLNGIGPSGAARLLGDIGDIHRFRTAAHFASWNGTAPIEASSGDQKRHRLSRLGNRRINRVLHIMAIVQLRYDTPGRSYYRRRLTEGKTTMEALRALKRHLSDVIYKQMTRDAQARLTGTGPGGQPGATLQSSAASPIPTADTSDKSLPGPAATKRRTILAVTP

SEQ ID NO: 228149 - protein, 322 aa, unidentified
MSKSQSQIYIGIDVGKQFLDVFASPSNQHRQFENNPKGHNKILKWFAAFQDPIALICLEASGGYEKKILNRLADSPFPVARVNPKWVHHYAKSMGYLTKTDKIDAYLIAHYAEKMSPAIYQKLEKTKALLRELYTRKMQLTQIRAAEKNRLEKYSDTQAVRASINRFIRQIDKEILNMDTLIEKWFEKNPDTKQLLDLIVTVKGIGKTSAVALLALLPEIGKLNRQEIAALAGVAPMNHDSGKMHGKRFTQGGRITVRTALYMAALVASRFNDKIRVFYERLLAAGKLKKVALTACMRKLLIYVNTLVRTYYQQLSVMDKSV

SEQ ID NO: 228150 - protein, 370 aa, unidentified
MEERSKVHVGLDVHKDSISVASAEPGRSPARLVGKIGHDVGKLSKLLERLGQASQLHLVYEAGPTGYGLQRALASRGYACEVIAPSQMPRRPGDRVKTDGRDCVQLAECSRAGQLRAVWVPEPADEAIRDLARAREDAVNARTQARLQLKSFLLRHDVRYPGKTAWCGAHERWLARLSFDGAATQTAFTEYCLAVKAADERVHRLGQALLASVRGWRFEPVVEALQALRGVAAVTAIGLVCEIGDLDRFEHPRRLMGYLGLVPSERSSGERTRRGSITKAGNAHARRLLTEAAWNYRFKPRIGKEMLARQDGLSEAVRTLAWKAQLRLTQRFKALTERGVQANKACIAVARELAGFIWAIARQARVEQAP

SEQ ID NO: 228151 - protein, 318 aa, unidentified
MHDAVVMWIGIDVAKASLDVAWGNGEDARHLSAENSASGWASLIHQLPPASESRVVVEATGGYERALVTALVEDGYRVAVVNPRQVRDFAKALGILAKTDRIDALVLARFGEQVQPRILEADPTERVELAQLVARRRQLIDLRTMELNRSQQTSVRAAQKSIQHVLKLLAKEVEKIEAEIARLLQSDDDWRAKIELLSTTPGVAKVTSSTLVAELPELGRLNRQAIAALVGIAPFNDDSGRHRGSRRVAGGRASVRRVLYMATLAARRCNPVIRAFSERLAAQGKKPKVIITACMRKLLVILNTMLKNNTPWKDLHAC

SEQ ID NO: 228152 - protein, 307 aa, unidentified
MSQVYIGVDISKNWIDISHPVHGSTRHTMDDLDGFAACASAEQAIVIFEATGRYDRPLALALRTAGARFVRLTPTAPKDLARVLGIKAKSDRADAVLLRRYGELLQPAPQDAAPQDTATLREYIVRRRQLVSLRQIERTRAAEHIPAQIAASGQRIIAVLSDEIAAIDTLIAAEIKRSEPLARKARRLQTAPGVGPVTAATLLAELPELGQLNAHKLAALTGLAPMDNESGQWHGRRRIKGGRSTVRRVLYSAGMHASRGAGALRPFRDNLIGRGKPTKVAITAAARKLLTILNAMIRDEKDFSYPT

SEQ ID NO: 228153 - protein, 326 aa, unidentified
MSTILGIDVSKDKLDLVILSEEGKFHKVIGNDPAGFKTLDKWLISRHADRVHVCLEATGQYGDEVSEYLYGQGHDVSVVNPARIKRYGESKLHRNKTDKADAELIAEFCLKEKPVLWEPLSPDLKHLRALVRRLRDLQANYQQEESRLSSGEKDAWVIQDLTVHTEYLKASIEAIEAEIQNFTNQTPGLKEKQELLVSIPGVGKKTSARLLGELGEISRFENAPQLAAYAGLNPKGFSSGSSVHKKTRISKQGRSELRACLYMPAIVAMTHNPVIRALKERLQERKLPNMAIVAACMRKLLHIVYGVLKSQMPFDPEYDRQFNYSN

SEQ ID NO: 228154 - protein, 359 aa, unidentified
MKDATTKGQVLTVGLDLGDRYIQVCILDEAGAILEESRLPNKRVALERRFSGSEPLRIVLEAGTHSPWVSRLLEEFGHDVLVANPRKLRLIYMNDSKSDRVDAEYLARVGRLDPQLLAPLRHRSAQTQEDLALLRSRTCLVRARTRLISHARGTVKSFGGRLPRCGADAFVKKAELHIPEKLRPALLPVLATIAQLTEQIKGLDEAIKKMAGERYRETGLLDQVSGVGTLTAQCFLLTIEDPSRFPKARSVASYVGLRPRQAESGSLSPQLRITKAGDVELRRLLVTAAHYILGPFGPDSDLRRWGLALAARGGKNGKKRAVVAVARKLAVLLLRLWQTGEVYEPLRNTNRRKAALAGT

SEQ ID NO: 228155 - protein, 340 aa, unidentified
MSKRSVAGQAVMFCGIDVSAATLAAAVQPESQEGFQQREFANSATGHKALIAWLYKLGATARVSLEATGIYSLDLALALDGAEGIEVAVLNPRRVHQFAQTLGRSKTDRADALALAEYSRRMPLVGWRRPNRGALELRALSRYIATLTEEHARLHNRLHAAEGSRTTPRCVREDLKRSMSGLRKRLLRLRRQAVSLIGQDPELERKFRSLTGITGIAETSAVQLLGELASLDPEMSVRQWVAHSGLDPAHRISGASVHLPSRISRHGNRYLRRALYMPALVGVRFDRHMKAFYQQLQTRHKTKLQALMAVARKLLHAIFGIFKTNTPYDGSKLFPTLLPI

SEQ ID NO: 228156 - protein, 345 aa, unidentified
MLFAGLDISLRNTAFCVVDELGAIVAEGSTLSDPGALAAKLEGWRTDLALVGLEACPLSEWIYAGLVDAGIEARCIETRHAQRFLSTRPNKTDRNDARGIAAMMRLGHFKPVHVKSKAAQLQRAVLVGRAQIVSTMLQIENTIRGLMRVQGLKIGKVHRNRYSERVRELCQRAPLLLPAVEPLLEARDTMRAQQVKMDRALVRTIREDPICRLLMTVPGVGPITALAFKVTVDDPARFSSSKAVAAHLGLTPRVYQSGEIDRSGHISKIGDKLMRHLLTEAATALLTRSRKWCALKAWGTRLARKVGMAKAIVAVARKLAVTLHSMWLSNEPFRFGAADAAPNAP

SEQ ID NO: 228157 - protein, 344 aa, unidentified
MSEAFIIGLDIAKYVFHAHGVDERGRAIFSKRISRKKLLDFFAAQPSCTVALEACGGAHHWARQLSQLGHEVRLIPPAYVKPFVKRQKNDAIDAEAICEAAQRPNMRFVVVKSEQQQAAGLVFRTRDLLVRQRTQLINAIRGHLTEFGWIAPKGPSHVAMLAGLIEEEEMASSLPEAARAMLRLMLDLLADLDGKIADLDKEIARRAREDEVSRRLMTVPGIGPISATAIAALAPPAETFAKGRDFAAWLGLTPLQRSTGGKHKLGSTSKMGERTLRRLLIIGSSAVVLQASKRGAPKGSWLEQMLARKPRMLVTVALANKTARIIWALLVKKENYRAPVVAKA

SEQ ID NO: 228158 - protein, 360 aa, unidentified
MYGNVQDYQLRQINMSKLYVGVDWHKRTSTWVAINEQREKVYERVWDCTPHAVQEAITSLPADPAETTLAVEPVCGWRWMSDLCEQTGIVVQIANTIKLRQIADSGQKTDKNDALTLAELLRADYLPQAYKVPDDIYELRMLVRERAHFISQSTATKCRIQSVCTARGSHITAEQPLHKAGWDTLYNQESGLYDMFLSLEEIKAHVTNLEGKIVKTITGTDTYTILLSVPGIGPVTAAAIYAEVGDFKRFHTPANLISYAGIYPKERSSGDNKRYGSISKAGSRVLRYSIIEAAMRIRDTEKSHNLHTHYLSAKEDRHKTPKQARIVVAHKLLTIVWYLIERGMMYDDHMVKPAQREMIS

SEQ ID NO: 228159 - protein, 345 aa, unidentified
MEQISRIGMDTSKHVFQLHGVNAAEAPVLRKKLRRKEMVAFFETLAPTVIAIEACGASHQWARLLQSFGHTVRLIAPQLVKPYVKRGKNDAADAAALCEAMSRPTMRFVPVKTAEQQAALMLVGIRDQLIRHRTQLANAIRGYAAEFGLTAARGMAHLVPLIERIQADESLPALARELFALQAKEYTQLQAQIAEVDAKLMAWHRTNECSRRLARIPGVGPIGAVLLTMKTPDPELFQSGRQFAAWIGLTPKDHSTAGKVRPGVITRAGDEGLRSVLVVGATAVIQQAQRRGTASPWLAELLKRKPPKLAAVALANKMARIAWKLMRTGESYAVTAVPVATAGTA

SEQ ID NO: 228160 - protein, 270 aa, unidentified
MEQVIGIDLAKRVFQLHIASPLGKMMKNTVVSRDKLTAFLAQQPPSKIVMETCGSAYYWSCQFKRFGHEVKQISPQYVAPFRMGSKNDKNDAAAIVEADSRPGMRYVPEKTQEQQDIQCLHRVRQRLMKNRTALINQIRGLGLEYGIAIPESAHKVEQCLPDHLENAENDLTPLSRELFQELLLELKEQQQRLMELNKRLDHLNAQQEDIGRLLTLPGIGPLSASALMVALGDSKDFKNGRHFASYLGLVPREHSSGGKVRLLGITKRGG

SEQ ID NO: 228161 - protein, 349 aa, unidentified
MILVGCDLHTRKQQVALLNTDTGELWDQELSHDGDAIERFYATLPPPVTVGIESTGYSLWFHALLQRLGHTLLVGEAAKIRAMVVRKIKTDRRDARHLWDLLKDDRFPVVWIPDPATRDLRALIKHRLRLVRIRTMVKNGLHAIALNQRLALGPSLWSRAGLAQLHALVLPPHTRRRRDDSLELLQWLNGHINELDLHVATAAAADPDACRLMSHPGVGPLTALTTVLVLGPVGRFPNSKHVVSYIGLAPAVSASADKYRLGHISKQGSALLRWVLGQAAPLATRGDAALKRIYFAVLRRRGRPKAKVALARRLLIRLYVMLRDQIDYDEFCRRGRTQRPGLEPARIPM

SEQ ID NO: 228162 - protein, 341 aa, unidentified
MITYSYFVGLDLGSEKFSAAVGTTPWKLVVRATEFANTPEGFEQLLAWWQKQNLPREQTLWCMEATGVYGEALAYFLVAHGYAVAVEPPLKIKRAFAPHGHKTDAVDSQQIAEYACRFQDEVKLWQPRSAILEQIKVLLTTREQITIQRTGHQNALHALKRKPVRTPIAEQIHEQVLTELRAYLQAIDAEMARLIDQDPPFRQLVGLLLTIPGVGLQLAAHLLILLYTTAQPLDAKRLAAFLGICPYARQSGSSVYATPTSRHYGPSAPRKLLHLAARSVSTHKPAFRDYYQRKLAEGKPKKVALNNVANKLLKVICAVVTSQTPYDADYRSVKPKFANAT

SEQ ID NO: 228163 - protein, 355 aa, unidentified
MNSRKYIGMDVHKESISIAVRNAAGKIVMECVIETKASMILDFIAGLRGDLQVTFEEGTSAAWLYDLLKPHVAKVVVCDPRKNASMREGNQSDKIDARRLAELLRLNHLSPVYHGEHGLRSLKELVRSYLTITKDLGRVMSRVKAIYRSWAIACTGKQVYAPRHRAEWLGKITEPGVRRRAEFYYQQLDALRTVRQQVRRELLAEGKKHTAWKRFRQIPSIGPIRAAVLLGILQTPHRFRTKRQLWSYSGFGIETQSSADHRRVHGQLQRAKKQSSIRGLNRNCNHDLKNLFKGAAIVASSKPGPFQEFYTALLTKGMRPEMARLTLARKIATIVLIVWKRGVSFDAQHLKPQTA

SEQ ID NO: 228164 - protein, 403 aa, unidentified
MFYLGIDVSKKTSSCLVLNPEGRKVKAFTFENSPEAFQGLVQRLEEQSIPKQDLLIGLEATGNFWENLYVYLKEKGFAVVLLNPFHVKRYREALAKKAKTDHIDALVIAQFLRTREYVQSQVAEEIIQSLREMTRLRYELLKEKKNYQRQVCSLLTVVFPEYDQTILKNPFTISALAVLQKFPTAKDLAQAKPKQIEKIIRSIPGNSFGPQEIDTLISGAQRSMYSGRAKEARGISLRIILTHIAHLVRSIQELEEEIEKVLSPQRPDDPFPGENLLTLPGVGQNTVAAVLSYLGEDGANFSSSTRAVGYVGYYPKIYQSGESKRDNIISKRGPKMLRWALYMAAVASLRHNPEMKTLYHRKRSQGKTKKQAIICVAKKLLQIMLAMLKSGEPYKPQMVFVQS

SEQ ID NO: 228165 - protein, 399 aa, unidentified
MTPDDIDVWVGLDVGKSAHHAHALDHDGNTLYDKPLKQDEKAIRTMLGKLSKHGRVLLVVDQPNTIGSLPLTVAGSMGIAVAYLPGGAMRRTAQLLPGDAKTDRRDAHVIAWAALKLPETLRDAGPDDETLAALKLLAGHDEDLAHESTRHVNRLRSLLLQTHPAFERALKGERITRDATLALLERYGGPMGVKRAGIEDVKDWAKSNGLRAGRIIDDMFKAIGEQTVTVPGTLMAETIIPSIAHDIKTIRDRRREVGRQVEKLLEDHPLLTVLTSMPGIGVRTASNILLGIGGDIANFKSSAHLAAYAGISPVTGQSGTSIKGERPSRRGNKRLKNALWQTAFVASTKHPPSVAYYKRKREQGKHHNAAIICLARRRCDVIYSMLKNGTLYQEPALVA

SEQ ID NO: 228166 - protein, 330 aa, unidentified
MPFDFFLGIDVAKQTLDYAFIDQQGNLKAQGQIPNAQRPIELLLEELHQRFNMEPVTTLICLEHTGIYSNHLLEVLTRPDYRVWLESGKQIRYSMRVHRVKTDSADALNIVRYAQRHQAQARLWKPEPKLLTSLRSRLLLAVNTLKQPLKEAKPFVDKGIVRSLEKASANSLKALEKDLEAVNCQIETLIKRDPELNRLFHLLTSIVGIGAVTATSLILATKAFTDGKTAKQFACYAGVAPFPYQSGSSIRGRTRVSPMADKHMKTLLHLSAITAIRAKGEVQDYYQQKVKEGKNKMAVLNAVRNKLILRAYAVVSKNQEYDKTYTYTLA

SEQ ID NO: 228167 - protein, 370 aa, unidentified
MDQNIKFFVGLDVHKDTISISVCEAGREASQFRGTIRHDVAALLKVLRKVGPPARQLVAYEAGPTGYGLHRRLIAEGFACQVVAPSLIPQRAGDRIKTDRRDSARLAELLRAGELKPIWVPDLEHEALRNLWRAREDALQMRMRARQHLKAFLLRQGRIYASKRSWSKTHERWLANQRFELATDQLAFTEYVLAVQASQAQLQRLDLALVQATEHWRFAAVVSALRTLRGIDTVSAIGLVAEIGDIQRFAHPRHLMSYLGLVPSERSSGQSVRRGGITKTGNAHARRLLTEASWHYRYPARLSRVLQSRQEGQPESICRHAWKAQVRLCGRFAHLRRRGVHINKVCIATARELTGFIWAIARQASTTCAA

SEQ ID NO: 228168 - protein, 353 aa, unidentified
MEKVAEFTLGVDLGDRQSVICVLDASGDVIEQSKVNTNKKAFKKYFDNYAGQLVAIENGTHSPWVSCLLKELGCQVLVGNARKLPSIWRSPIKTDFRDAEMLARIARFDPKLLYPIVHRDEQAQADLAIIKARDMLVQSRSGLINHVRGAVKSMGGRIPASSADSMHKKAMDHVPEILKPALLPVIEQLEKLTKTIKEYDRQIKNLSEEKYTETQVLRQVTGVGPITALAFILTLEDPARFRKSREVGPVLGLVPRKDQSGEVDKQLPITKCGNIYLRQLLVNCAHYVLGPFGPDCELKRFGERLSQRGGKIAKKRAIVAVARKLAVLLHRLWVTGEVYEPFYNQRTPMKKTA

SEQ ID NO: 228169 - protein, 368 aa, unidentified
MNDIIRIGVDTSKSVFQLHGVDAAEQPVLRKKLRRRDLLAFFERLPATKVGMEACGGTYYWARELTALGHEVKLMPAQHVKPYVRRGKNDRNDADAICEAMSRPRMSFVAIKTAEQQAAQMLMTTRERLVAYRTQLINTIRGHAAEFGLTAAKGPAHVEPLLARVAEDGRVPEFAKELFAIHGQELNRLKIELREIEAKLKAWHRQNEMSRRLAEVDSIGPIGGCLLAIKAPDPKAFHCGRDFAAWMGLTPKDHSTAGKVRLGVITRAGDEALRRTLVVGATSVIKQVSKGKGNPSPWLRGLVARKPPKLAAVALANKVARVAWKLMVSGERYNAARAGIVSPIASIAPCSRRQGRCAPPAAVASGQP

SEQ ID NO: 228170 - protein, 414 aa, unidentified
MKLFIGLDVSLAKTAVCVINEHGKIAKEAQVPSDPQAIVDFANTLEGVVAIIGLEAGPLSQWLHRGLADARLDVVLMETRQVKGALKAMPIKTDRRDAEGIARLLHLGWFRPVHCKSVSAQEVRALLAARKAIQQGMIALELSLRGLLRNFGLKVGAISRGQFDARIRQLVEGNSMLQAASGPMLRARTSLRHELAGLERQVRLLAKDDAVCRLLMTMPGIGAVVALTFRSAVDDPARFSSSKKVGPWVGLTPSRNQSGERDVIGGITRAGDANLRRALCQAATVMIHRGRSTWLRSWAAQVAKRRGAKRAMVALARRIGTILHRMWKDGTESPRSRCSPSRPKPPHQNHIVDVCLTADLRGPNRDAAPMMPWSGLSPASAEHANEMGTSELPFTFAAAAYDLVRLPKLMAALP

SEQ ID NO: 228171 - protein, 351 aa, unidentified
MLIIGVDYHPSFQEIAFLNQETGECGERQLNHSEGEAEKFYRELKQRGVSVRVGMEATGYARWFERLLAELGFELWIGDPAVIKTKRVRKKKTDREDARLLLRLQLEKHFPIIWVPTPENRDLRQLLWHRHRLVQMRTRIMNQLQAVAMNEGKRWKKKLFSEQGRAQLEKLQLAPWASRRRKELVELLDRLNPTIAELTAAIEQEAKRRPEVLRLMTHPGVGPITALAFVLIIGTWERFHCGKQIGSYVGLIPCEDSSARRQRLGHISKQGNTLLRFLLVEAAQAAVRWDPDWRRRYLHLAMRRDRRIAKVAMARRLGVRLYWMWRNGREYSQSVEFGSHAGQPVIVHDVR

SEQ ID NO: 228172 - protein, 346 aa, unidentified
MGKSIADLSSVTTVGLDLAKHVFQVHGVDASGRVVVAKAIRRNKLLEFFASLPPCLVGLEASGSAHHWARELITLGHEARMMPPAYVKPYIRRQKNDASDAAAICEAVTRPSMRFVGVRSLENQAALMRHKTREMLVSQRTQLLNGLRGHLTEVGVIAPQGPRYARELAELIEACDETIPFEVCEALAPLVVQLRNLDDAIARLDRTIAKMAQQDETARRLMSIPGFGPITASAMAATIQDASSFAGPREFAAYLGLTPKQNSSGGKPKLGRISKMGNRYLRKLLVVGAHAVLFHRKLHTDPLRMWAKKLIEKKPFKLVAVALANKMARIAFAILRGKTVYREIPA

SEQ ID NO: 228173 - protein, 392 aa, unidentified
MSYIGIDVSKDKHDCFCCNDNLQPVFQFQFNNDSIGFNQLFEAIKSLDSPFDNIKIALEATGHYSYNITSFILDNSLPLAIINPLHSNLFRKSLSLRKTKTDKVDACVLARMLIAYPDLKFSTSLDDNDIILSELKSLTRFRLSLVKDLSKLKTSLSRIINIVFPEIEKVFSSTNSLYELLYNFPSAKEIANAHLTKLTNVLIKASKGHFSKEKAVQIKELAQNTVGNSSYALTLELKHTIKLINEYNSSIDKIDKEITTIMDKIASPITSIPGIGITLASIIIAEIGNFDNFDSPDKILAFAGMSPTIYQSGKYVASSAKMEKRGSKALRYALYNAARLTSIYCPVFKEHLARKRSQGKHFNVAMSHVVKKLVRVIYHLQTKNELFKNVIN

SEQ ID NO: 228174 - protein, 348 aa, unidentified
MKFYTQNHTHYCGIDLHARSLYVCILNQRGEIQVHKSIKASPKALASVIKPYRADIVIGVECMFSWYWVADWCEEQALPFVLGHALYMKAIHGGKAKNDRIDSHKIATLLRGGMFPLAYVYPRQLRSTRDLMRRRIRLMRQRAELIAHVHNTISQYNLPPHTDNLRYAQHREALREFFPDESVQKSIDLDLNRIDFYDAQLSKIEWYLKKTAKAFDPKAIILLKSIHGVGDILSLVILYEIHTIERFERVQDFVSYCRLVKCKRESAGKSYGTSGAKIGNAYLRWAFGEAATLFLRGNPKAQQWLQKKANQHNKAKALTILAHKLARAVYYMLKRKKLFDQEKFLATV

SEQ ID NO: 228175 - protein, 397 aa, unidentified
MYIVGIDIAKRKHEAAVIDGEGTVIIKPFSFTNNCSGYNRLLAMLTKAKLPLDEVSFAMEATGHYWLALFTRLQKEGFRVQVINPVQTNSIRSFYIRQAKTDPRDALLIAEVIRFGHFSESTLHPENIYELRELCRGRHAIVSMQADVKRKVVALLDQVFPEYETAFTNLFGDTSMAILQTCPTPKELSEMPFEELCHLIEVSSHKRFRMAKAQELQELARNSFGFAMAGDVFSTMIRLYAKHLIFLKQQVREMDRKIAEIMDTLDTPITTITGIGPTLGAYILSEIGDISRFSSAAKLAAYAGIDPTMRQSGEYNGVRNRMSKRGSPYLRHAIWLAASSAVLHDPALKLYFQKKRDEGKPYMASVGHACRKMVSIIYAVMRDNKAYVPCIPSEISA

SEQ ID NO: 228176 - protein, 432 aa, unidentified
MKEPITLYVGVDWAKDNHQICVVDGEAKIVSERAVEHTGPAIAALADWLNRLADGQPETMAVGIEIPRGSVVETLVERGFPVYSINPKQLDRFRDRYSPAGAKDDRRDAYVLADSLRTDVHCYRLVRTDDPDVIQLRELVRIADELKGEANRDGNRLRDLLYRYYPQMLQVSSAATEAWVLDLIELAPTPARAARIRKAQVGKVLKKHRIRRITPSEVLQLLRVPPLTLAEGSVEAASTHIGFLIPRLRLLRLQKKQVDKQIGALLEAMSAEEPQGCVDEVEGAEESSPEQRKHRDAEILLSLPGVGKVVAATMLAEATGPLAERDYLALRAHAGLAPITKASGRKRRVVMRRACNTRLRNAVYHWSRVATQHDSVAKSRYAALRARGHSHGRALRGVADRLLNVACAMLRDGTLYDPARLRSVSATAAQEA

SEQ ID NO: 228177 - protein, 406 aa, unidentified
MRCVIAFDVSRKSSTMAAYNEQGNCEFEGRLIHSKTGFSNLSKIIKDLSEKNNYTLEFVFEATGVYSAALERFLRENNLVYYSLNPLLAHLNTQSLRRNKTDISDAHQLAKNHFKNDYFQTYREDSYYEQMRTMSRRYDEIMKEKIQYKNRLHASLQLSFPDFDTAFINKSKLYYNLVQVFPHPNLILKRSKTVIKNRIKKCTKKNYSLKKLEERAILLIEIAKDSFPAVDETDYSCELVRDYAKKILEMEEEQDEIIQRMTEMSKDRKEYRILRSFPGIKDKLACRIIAELGDLTRFKNNKQLNAYAGIDIVRYQSGNMEYKDRINKRGNSRLRGILYFMIVSMLSAKGKQINHLVDYYYKLKKQPYNKHHKVAVVACMNKFLKVTFHLIQNDLLYDYEKASSQQ

SEQ ID NO: 228178 - protein, 400 aa, unidentified
MLSIGIDVSKGKSTVCGMKPGGEIVYAPFEVQHTREGMSELVSLLRGSGEEVRVVLESTGSYHCPVVTALLENGIFVSVVNSLRMKRFCSQSIRKVKTDRIDAMQIALYGLAYWQELQPTKLPEDTYRELQLLARQYYQMTSLLIKAKVDFNAICDQVLPGMQELMNDHAGRHKLSDFVLRYHHTTHILEMGETRFRKDYCKWAEKKGYRNCERMAALIFATAQNGIPVLPNAPSTQIVITEAIRVLHTVEASRDAILTQMQALAKTLPEYSLVREMPCIGDTLAPRLIAEIGDVRRFHSKRALIAYAGIDAPPYQSGKFCANNRHISKQGNRYLRKTGYEVMQSYVMHKPANDPIFTFIEKKRSEGKSGKLAMVVGLNKFLRIYYGKVTELYRSLPAIE

SEQ ID NO: 228179 - protein, 359 aa, unidentified
MEKPSKGQRMTVGLDLGDRFSHFVVLDEEGEVVEEGRVATREVALRQRFDGCPAMRIALETGTHSPWVSRVLEDCGHEVLVANSRKLRLIYENPNKDDQVDALYLARLARLEPALLSPVQHRAANTQEDLALLRSRDALVSARTQLINHVRGLVKSFGSRLPTCSTGSFPKKVSEQTPESLKPAVSPVVEEIGSLSDRIKALDRQIQVLAQESYPQTKLLRQVTGVGPITSLAFVLTLEAPERFRKSRTVPAFLGLVPGRKQSGNKDPQMRITKRGDRCLRRLLVNAAHYILGPFGPDCDLRRFGEKIAACGGMNARKRAIVAVARKLAVLLHHLWRSAEVYEPLHEQIHRAGRRTKVA

SEQ ID NO: 228180 - protein, 310 aa, unidentified
MSEEKYVGVDVAKAHLDVCVLPEGESWRTSNDESGIAELSGRLQSLEPEGIVLEATGGLEQALVASLMAADLPVVVINPRQVRDFARATGRLAKTDKIDAAVLAHFGQVVRPELRPLPDEASQALKGLVARRHQIQEMLTAEKIRRHMAKDRIRSSIDANIEWLKRLLKDIEDELDRTIRSSPVWREKDDLLRSVPGIGRVVSSVFVSRLPELGRAARRKVSALVGVAPFNRDSGLMRGRRTIWGGRADVRVALYQATLVAIRHNALIKAFYQRLLAAGKPKKVALVACMRKLLGIVNAMLRTGQPWQPA

SEQ ID NO: 228181 - protein, 346 aa, unidentified
MEHYAGIDVSLELSSVCVVDAQGKIVKEAKVASEPEAVVAFFEALGFAVKRIGLEAGPLSHWLHAGLKEAGFETVLLETRHVKAALSAMTVKTDRKDARGIAQLLRMGWFQQVHAKSMASQEVRALLVGRKQLLGRLIDVELSIRGILRGFGLKVGAVTRKGFEARIRELVTGHATLERIAEAMLSARAALKAEYEKLHKAVLAIVREDAVCRRLMTVPSVGPLVAITYKSAMDDPSRIAKSKAAGALFGLTPKKYQSGEKDVTGGITRTGDEMVRTALYEAANVLLSRITRFSKLKRWGMDVAKRRGSKRAKVALARKIAVILHRMWIDGTTYRWAEAKPFAAQA

SEQ ID NO: 228182 - protein, 338 aa, unidentified
MEAYAGIDLHSSNSYIGIIDEQDRRHFAKRLPNSLSQILVALEPFKKDLKAVVVESTYNWYWLVDGLQGDGYKVHLANPSAIKQYEGLKHTDDNWDSFWLAHMKRLNILPEGYIYPKEERPVRDILRRRLLFVRHRTAQILSLQSAIARNLSLKMSGRAIKKLKEEDTEDLFDSPFLVLTAKSNIAVIQSLTKTIKAIENAVKSQAELRKEFQLLKTIPGIGDILALTIMLEVGDIGRFPKVGNYSSYCRCVKSERLSNKKKKGENNRKNGNKYLSWAYVEAANFAIRFSQEAQKFYQRKMAKTNKIVAIKALSNKLARASYYIMRDQVAYDESKLFG

SEQ ID NO: 228183 - protein, 417 aa, unidentified
MAYSVYQKLSALKPGLLYVGVDLGLDNNVAKVVNERARVLTTARFRHTRRGYAHLAERMERCVRRHRATGIVVAMEPTNYFWMLLAAELERRHIDYYLVNAYTVRKHREGDQIDRSKDDQRDALVIADLVRTGKYTKTRLLHGQYAELRQYVLLHDRLQRDLRRQKNLLRHAVGMLFPELTSVFADLTGDTAVALLRHHASAAHIRELSVQDLIAAVRADFTGRRLMVSKLRQAHALAAESVGLVDSVEALQLRTRVHLDLLLQLQAQLACIDQALIATFHALPEAPYLLSLHALGTITSATILAEIGDPKHFRNGSQLVKLAGIQPAPNTSGCKTRSLTPMSRQGRARLRTILYFACLRLVQVDPAFARLYRELQERSRNPLTKKQALGALMNQLLRVVWALMRHQTYYEPGFGMA

SEQ ID NO: 228184 - protein, 432 aa, unidentified
MDHRLQVGIDFSQKKADCCLLFPDGRPLESHIAFDNSYLGYSLAKQLLLDALHSHSFDGVDVSGEATGYLWLPFFLQLAADPDLDPHNLNLYLLNPRWVKWFKKCFAQDNKTDEKDAYYIAERTRTHRPDATWLADPDVLALRFYTRLRFHLVQNLAREKCYFSAFLFLKASSYRRLKPFSDVFGATSRLVLTQQPSLDELAELPVEDLASQLHEISGHHLPDPLDNARKLKRVSQESFPLDERLALPVQRILDLTFEHIRFLKAQITQVEQWVSSELLAHPQICQLATIPGVGPVFSSGNGAEIGKTQRFLQAPKWDKKRKRYRARNLRDVEDAVAKIAGLWWPRSDSGDFEAEDRRMAKTGNRYLRYYLIEAANKMRQHIPEYAEFYARKYQEASKHRHKRALVLTARKSVGLVVGLLHRNEPYRSKEHR

SEQ ID NO: 228185 - protein, 360 aa, unidentified
MFTERTSVGLDVHARSVAAAAIDGVTGELVQAKLTPSHDHIRSWLQDLPGPVAVAYEAGPTGFGLSRALATAGIRCEVVAPSKLQRPSGDRVKTDARDAVHLARLLRLDEYTAVSVPTLAQENARDLVRAREDARGDLMRARHRLSKLLLRQGIVYSGGQAWTTTHDTWLRRQRFDATALQLTFESDYEAVLAVKARRDRLDEAIAVMAANSEFTPIVRRLGCLRGVSTLTGFALAVEVGDWHRFTGNTIGSFIGLVPSEYSSGTSRVQGSITKTGNTHLRRLLVEAAWHHRARYAPGKTMRDRWELASPAARARGDAGNRRLNARWDAFRARRKRHVVANVAIARELAGWCWSLAVLED

SEQ ID NO: 228186 - protein, 390 aa, unidentified
MSSVLAEKTAVPASSTIYLGMDVHKDSITVAVLPEGAKAPTRVERLSSDLQKLRRFLDRIAKEGELRSCYEASGAGYVLQRAIREWGYECEVIAPSLIPKKPGVQRKHDKRDAADLARLYRAGELTPVRIPSEAEERVRDIVRLRDTLQHEVMKSRHYVLKFLTRRGFVYREGKNWTVRHFAWLKKLQGPSSPLSPEDEFVFSEYLALLEYKLQRRDELDKVIGKLALEPYLATPVNHLQCFKGLAVHAAMVLATEIVDWRRFEKPTQLYAYLGLVPKEDSSGPRERRGSITKAGNAHCRHVLIQAAWSYRHRPKLSLELTRRQEGMPASVAAHSWRAQQRLYKRFHHLAYRKSSKIAVVAVARELAGFLWSVMRNLPAEQMLQEQPKAA

SEQ ID NO: 228187 - protein, 340 aa, unidentified
MIYVGIDIAKLNHFAAAVSSDGEILIEPFKFTNDYDGFYLLLSKLAPLDQNSIIIGLESTAHYGDNLVRFLISKDFKVCVLNPIQTSFMRKNNVRKTKTDKVDTFVIAKTLMMQDSLRFLTLEDLDYLELKELGRFRQKLVKQRTRLKIQLTSYVDQVFPELQYFFKSGLHQHSVYALLKEAPTPNAIASMHMTHLAHILEVASHGHFGKDKARDLRVLAQKSVGVNDSSLSIQITHTIEQIELLDSQLFHTELEMANLVTCLHSVIMTIPGIGFVNGGLILGEIGDIHRFSEPKKLLAFAGLDPSVHQSGNFQAKKITDVKAWLKSTTLRTHERCPQCR

SEQ ID NO: 228188 - protein, 431 aa, unidentified
MNRSVEFLSVGIDVGADFSLMAFALPAQDLLGKPYKIIHSSQRSLNGAVEKIKTLSQKYQLPARVFMESTGIYHYPLYHKMKDAGFDVFVLNPLVTHAGRDLNVRNIHNDKYDSQKIALLGLRPGLKTSLIPSDQVISMKVILREYYAVKKEISMYICRLKNQLRQAFPQFLPLFSKVNGVTAMAILCEYPNPESLLNAGEHAVADFMKSVSHNGPLKVQKKAAALIQAAQDARSFGHWNHGISILIRHYIEMIRLLDVRAKTLLAQAKALLAEQDSKTLAHQTELLQTIPGIGFLSALTLICELGDFSAFKRPKQLFSYFGLDPIVRQSGNYNGTNLKLSKRGSPFARRCIFVIALQSISLNIHKEPKNPVLRTFYEEKCMCKAKMTAIGAVMHKICNLIFAVLRNDAPFVLQTPEQHNAAYLSKTHSVA

SEQ ID NO: 228189 - protein, 354 aa, unidentified
MIIIGADYHPGFQQVAYVDTDTGELQERRLEHREDAEKFYRDLAAQEVKVRVGMEASGHARWFERLLAELQFELWIGDAAEIRTKRVRKQKTDRQDAQLILRLLLENRFPQVWVPSWENRDLRQLLWHRHRMVQARTRIMNQLQAVALNEGLRCKKKLWRDAGREQLESFRLAPWASRRRHDLLELLDRLTPTIAELTQAIEQEAEKCPAAQRLQTHPGVGALTALAFVLIIGRADRFECGKQIASYLGLVPLEDSSGQRRRLGHITKQGNSLLRFLLVEAAQVTVRSAQEWRNRYFHLVLRRGRKIAKVAMARRLAVRLYWMWRKGWDYEQLKNFGSHAGEPGHPDGVQSSTE

SEQ ID NO: 228190 - protein, 347 aa, unidentified
MEHVGIDLRMNKSQVCILTEGGELVERSIQTTSERFAAVLGGRPRARVLIEASTESEWVARSLESLGHEVIVADPNFAPMYAQRSRKVKTDRRDARALAEASRLGAYRPAHRMADDRRHMRATLAVREVLVRTRSRWVVLIRSLLRREGLRIRSGKAETFAQRAQSVDLPEHLKCEIAPLLVLLTPLNEQIEVLDQQLVGMVAQDAVTTRLTTAPGVGPVTAVCFVSTLDEVERFRGSHQVESYLGLVPREWSSSEMQRKGRITKAGNGRTRWLLIEAAWCILRRKRKPETAALRDWAEKIALRRGRTIAAVALARRLTGILYAMWRDGTDYDPATLTVEGRQKRAA

SEQ ID NO: 228191 - protein, 361 aa, unidentified
MSKDKYVGLDVDQATIVAYVTNDKGEFLMETFLETKADGIRQFLRGLEGRVHVAFEEGCLAAWLYEIVRPLVAETVVCDPRANKLIQSGSKGDRVDAKKLARLLRLGELHHVHHGEESVRGLKELVHGYDRLVRDVTRTKNRLKGLFRGQAIGCRGQAVYSQETREQWKQKLDSSALRARADLLYKEMASLKELRDDAEKAMLKEARKHGAYKLLVKLPGVGPIRAATIIAAVGTPHRFRTKRQYWAYCGFAVVTHMSSEYEIIEGRIQRRRKPLQTRGLNKNFNRMLKTAYKGATMTAIATEPFNKYYQRLIDNKMRPEMAQLTVARKIAAISLAVWKKGERFDPARVNQAEQSAGDEKR

SEQ ID NO: 228192 - protein, 422 aa, unidentified
MLEETNDTEEIIKRVAALDIGKAELVCCIRVPGAGKRGKRLQEVRTYQTMTRSLLVLADRLGELGVTRVVMEATSDYWKPVFYLLEAQGFEVWLVNARDVKHLPGRPKTDRLDAVWLCKVAERQMLRPSFVPPPEIRRLRDLTRYRADLVGVRTAEKQRVEKLLEDAQIKLSVVASDIFGVSGRAMLAALLAGERDPKVLAQLARTRLRAKLGQLEEAFTGHFTDHHGFLLATMLDRVDAVSADIATLEAKIDQEIAPFAAAADRLDEITGVGRGAAQVIIAEIGTDMGRFPTPGHLASWAKFAPGVKESAGKTKGKATTGHGNPYLARVLGEAAVAAGKTNTFLGERYRRIARRRGTKKAIVAVGRSILVIVWHLLADPTARFHDLGAGFYDTRINPERSKRNHVRQLEALGYKVILEPAA

SEQ ID NO: 228193 - protein, 351 aa, unidentified
MLIIGADYHPSFQQIAFLDQETGESGERRLKHSDGEAEKFYRDLKEQGSSVRVGMEATGYSRWFERLLAELSFELWIGHPAEIKARRVKKQKTDRKDAELLLRLMREGNFPRVWVPSPENRDLRQLLWHRHRLVQMHTRIMNQLQAIAMNEGMRRKTKLWSEQGRAELEKLALGPWTSRRRQELLELLDQIDPVIEELSKAAEQEAHKRPEVVRLMTHPGVGFLTALAYVLIIGTPERFHCGKQIGTYVGMVPSEESSGDKQRLGHISKQGNSLLRFLLVEAAQAAARSNPEWRRRFVRLAMRRHRNIAMVAMGRRLAIRLYWMWRNGCEYSPSMEFGSYAGQLGTGHSVQ

SEQ ID NO: 228194 - protein, 365 aa, unidentified
MYKRLNSTGTLIQRTTTEAPQGHMYYIGLDVHKKTISYCVKDVSGQVYREGQIGATRRELDSWMKTLPQPWMVAMEATIFTGWIYDHLLPHAQQVKVAHPLMLRAIAAAKKKNDRIDAGKIADCLRCDFLPECHMASTAIRDRRRTLRYRHLLVRQMVQMKNRISGLLMETGVSYNKQRLHKVRYFRELLSTNEEVKESIRPLLRLSRDSIVRLQKTEYALVSSLQRDPLLAERIRRLRTVPGVGPITALTWALEMGDVLRFPSNREAISYCGLCGDEKSSADKVTRTPLSKQRNKHIQRVLVEAAKLAPRQDHDLALVYETAKQKGNSNRATLAVARKMVAYLLAVDRGQRDFVPAEAYRNAAA

SEQ ID NO: 228195 - protein, 371 aa, unidentified
MVWTAPYGIDCARMRLLISQTREPSVDQIIRIGMDTSKHFFQLHGVDAAERPVLRRKLRRNEVLTFFAKQSPTVIGMEACGAGHYWARELGKLGHEVKLIAPQHVKAYVKRNKNDGRDAEGLCEAMSRPTMQFVPVKSQEQQAALMLIGVRQQLMTRRTQLSNAIRGYAAEFGLITAKGLVKVEPLLAQIARDESLPALAREMFALQGRDYARLQIELKAVEARLMAWHRANADSCRLAKIPSIGLIGATALVMKAPDPHLYPSGRHFAAWIGLTPKDHSTAGKTRIGKITRAGDEMLRSVLVAGATSVIQQAKKGRGRPSPWLVALLARKPPKLAAVALANKTARIAWKLLTTGESYDGAHMPVASKLAA

SEQ ID NO: 228196 - protein, 463 aa, unidentified
MGNVVGGPVWTMGCEPVVIRWPPLRLARVRCERVSVVVVCPLFSPMSIDEEVWVRALGRAIGLDVHRDFCEVAICEEGKVRSAERVDSSPEALEMLAASLGPDDRVALEVSGGAWAIVAILEPPVAKVVVVSPGDTGIAQARAKTDRLDARTVARLLWAGELEGVWAPDELTRLLRRRLARREQLVRARSRAKNEIHAVLLRCLAGQTAVRRPVGQERPAVAAAARAAGRGVRDGAGVHAPHRVPRHGDRRRRAGHRPLRAGVLRRSAADERPRRQCDLRRHLPAAVGDIGRFRTSRQLVGYLGLDPKVRQSGSTPAKSGRISKRGAGTVRWALVEAAASVIGQPGPMHAYYQRLRARRGHQIAVVAGARKLAVLFWCLLTRQQQYAHQQPSPTAKKLRLLEIRGGAPTLKGQRTGTFATREKMRAAERALALQAEASYVRMVRDWQAASPKKPGASVTPERA

SEQ ID NO: 228197 - protein, 350 aa, unidentified
MTTLTPNDVVVTGGVDTHQDLHVAAALDQLGRVLGTHAFPTTGSGYRQLLAWLRGHGRIERVGIEGTGSYGAALSRHLTAAGVQVIEVARPNRQVRRRHGKTDVVDAIAAARAVLSGEASGTPKSHDGPVEALRTLQAVQRSANKARTQALNQIHQLLITAPEQLRARLQPLTRTDLLATCAAFRIAADDDSLQAMTRLALRELARRVLHLDEQLALVTKRLHRITADVAPQLVATTGVGPAVASALLITAGDNPHRMRSEAAFAALCGSNPIPASSGKTNRHRLNRGGDRNANAALWRIVIVRLACDERTRKYLARRQTEGKTKIEAIRCLKRYVAREIYNAMPSTAAI

SEQ ID NO: 228198 - protein, 342 aa, unidentified
MNITTIGLDIAKNVFQIHGVDANGKVVLRKQLKRSQVLAFFANLLPCRIGLEACAGAHYWARELIKLGHDARLISPQFVKPYVKGNKNDANDAEAICEAVGRPNMRFVPVKSIEQQDIQMLHRVRSGLVKERTALANRIRGLLGEYGIIIALGLVKLRQQLPEILEDAENGLTMSARQIFADLQEQLIELDKQVSAYGEKIQVLHRSSEVSQRLGEVPGIGPITATALLASLGDGKAFASARQVAAWLGLVPRQDSSGGKPKLLGISKRGDVYLRTLLIHGARAVVKAAAKKDDAQSRWINDLVKRRNANIAAVAVANKNARIVWALLTKSETYNLPTPASV

SEQ ID NO: 228199 - protein, 335 aa, unidentified
MKHYAGIDLSMETSHVCVVNAEGRRVGAECVDSTPEAIAAVLERHGPVERAVIETGRMSPSVALGLRELGVAIVCIDARQAHQSLKAMKANKTDPHDAAGLAQLARTGFYKEVHVKSPAAHGVRSVITARGHLVEARVRLDNTIRGLCATFGIRLGAGQGERFLARMRAAATVPGLGEAVASLLRARERLVEEIGQMDRQLKAISLASPACQALMSIPGVGVQTSAAFAAAVDDASRFKRSRTAGAYFGLVPRRHQSGELDWTGRITKQGDGTVRKLLYEAANSILTRTRQSFALKTWALKIAKRRGLRKARVALARRLAVIMHAMLRDGTLFEA

SEQ ID NO: 228200 - protein, 408 aa, unidentified
MDVIVKRCAGLDVHKRTVVACVRIVSDGEVQREVRTFGTTTGELLELFDWLSDHDCTHVVMESTGVYWKPVWHILESGFELVLANAKHVRNLPGRKTDVSDAVWLADLLAHGLIRGSFVPPLPIQDLRDLTRTRKQLKQEVSRHTLRIQKILEDANVKLSGLVSDILGVSGRAVLQAIIAGESNPEALVAVTNGRLKADHDSLVAAARGTTRDHHRFLLNLHLKQIDEIRKTIASVEDHIELVVQPFREHVERLVTIPGVSLIVALVILAEIGADMSRFPTVQNLISWAGLCPRSDESAGKHRSTRLKPGDPWLKTILVQAAWAASRVKGSYLQAQFLRLKARRGPQKAIVAVAASILTAVYYMLRDHTTYVDLTANHFQKRDKQRTADRLVRQLSALGYAVKLEAAA

SEQ ID NO: 228201 - protein, 344 aa, unidentified
MIYVGMDISSKSFVVHAIDSKNKVVFKGEIKPTRQGLRCMIKRLGRQTKLIVFEAGNQLKWVALELKKIKGVHVHVVHPNEIKWINQSSAKTDKIDAGKLARLARGDMLPRKVHIVEGTVRQLRELISARHTLQSKRVALINSIRGCLKQEGYRLPEKFFSQADWRGHLERMRVEDTQKLILTSYMTSIESLLAAEAELTGKILAIEHEDIERLQSIPGIGGLSSRVIVSAVDDVRRFDSKKELSKYGALTPRIYQSGGVTHLGRINRDGRHEVRRVLLQCAHTVARMKSYEARPLRMFFERVRQRRGKKIAVVALARKLLTIAYGVLRTQTMYDPKVLTPNAI

SEQ ID NO: 228202 - protein, 403 aa, unidentified
MNPCITIDVSKETSHVQGFLDNNVPLSKPRKILHTKEGFSNILTIYNQMVYRTGIKPTVFFEYTGVYHKTLMAYLKANNLSFIPIPPLVAAKVRNSDLRNKKTDVRDCKTLSFVYYEDKVKKYYEPTKDEKRLKDLQRYYMITEKQYQEITVHLYEMIDTIYPFYKSIMSEFDCFTSLKFLQKYPHPDYVTSHREKTLIKDFMEITGHGEKYSTNVMHKLLNVINDTIPGCCNDDFEVEMLKDYATQALFYKTRLNKTLEEMNRIINQDSSKKSLVESIDSIPGIARNTAARFIAEVSNVDRFNSSKALIAFAGTDPNISQSGNIDGKHLSITKCGNKRLRTILFIMVRSMIRKRVSANPIKDFYKKKTQLGLPPKVVLVACMNKLLGIIYQLNKTGEVFVLK

SEQ ID NO: 228203 - protein, 372 aa, unidentified
MNYNTVYVGMDVHKESFTLCSCKYEDEKASHYQRTPASYKNVLRYLAFLRTIYGEDTRFVCGYEAGCLGYSLYHQLENFNVECVILAPTTMLEQRSKRRIKTDKRDAEIIARSLAQHNYSPVHIPTETDNQTKEFIRMRDDHKAELKKIKQQILSFCLRQGYQYDGSGNWTAKHVKWLRSLKPAGLYKEILDEYLLTYTILTDKLNRLDQRIEELAFKEEYKESVSKLTCFLGIKTHTALSVIVEVGDFQRFVSARKFAGYLGLVPGQHSSGDDRNGLGITKAGNTHVRRLLVESAQSYTRGKIGYKSRVLRSRQAGNSPQVINYADRANERLRRRYYKMVLKDGKKYNIAKTAIARELACFIWGMMTDNIY

SEQ ID NO: 228204 - protein, 434 aa, unidentified
MRILYERCCGLDIHKVSIAVCVVITRDGKTEEETRRFGTMTADLLELAAWLKARGIEHVAMESTGVYWKPVWNILEAEGFDLLLANAQEVKIVPGRKTDQKDSQWIADLHQHGLLRKSFVPPRLVRDLRDLTRTRATLAQDHSSTCNRIQKVLEDANIKLGAVASDVFGASGRAMLLAMMKGESNAEALTELSKGRLRTKIPELRRALEGRVTGHHRFLMDGHWRQMESLENQMRQFEAEIAERMKPTPEETARMRESLPAGAPLPPSPREEAILLWLELPGVGLTTACSMVAELGVNMEQFPTSAHVASWAALCPGNNESAGKRMSGKTRKGNVWLRRTMCEAAWAAAHSKGTYFAAQFGRIAARRGKKRALLAVAHSLLVVAYEMLKHKQHYQELGADFFDGLNKDQVKRRLVQRLAKLGFQVTVTKTSTAE

SEQ ID NO: 228205 - protein, 322 aa, unidentified
MTRIICEVDISSASLEARIGRDGAAGSFPNTAEGIAALAAFCLAHQVELVAMEATGGYEQKPFALLSEQGLPVAILNPRAVRRFAEGMGLMEKTDTIDAGIIAWFAQVKRCPAQSPGSASHQQLRALVTRLRQLTQVRTAQRNQRRLVTDAAVQAGFDELLAVVNRQIKELETAIAALISEGPLWRELDPVFRSIKGVADRTIARLMAEMPEIGTLPNKAISKLAGVAPLAHDSGKHQGKRMTRGGRAAVREILFIVAGLAGRYEPDFIAFQQRLSAAGKPGKVIRIALAHKLLVRLNAKAREIRRQLAAPYALCGPVPVTS

SEQ ID NO: 228206 - protein, 342 aa, unidentified
MEKVTIIGVDLAKNVFQLHGAAADGSVVFRKKLSRLQFCKFMAGQPTCVVAMEACAGSHYWAREMVRLGHQPKLIAPRYVKAFVKRQKNDAADAEAIVEAAQRPTMRFVEPKTEEQQSRSIMFRTREQLVNQRTELVNALRAHLYEFGHIAPQGIRYLNRLECFVEDEKANLPDLAREICRDLLDRIYQLTGRIDALKKKIDALSREAEASRRLQTMPGVGPIAALAIETFAPPMETFKCGRDFAAWLGLVPLQKSTGGKQRLGKTSKMGQCDIRRLLIIGAMAVVQWASRKGAPEGSWLARMMPKKPRMLVAIALANKMARGIWAMLTKEEDYRNPATVPA

SEQ ID NO: 228207 - protein, 352 aa, unidentified
MTINIGADVHSKTISAYAMPTFDTESEELEYCEEFNIRFGKFRNDYESLSDLANFVRDTEHGILIENTGFTNVLYWTLTNMGCTVIVALPVDLYEINQSKQKTDANDARKLANYMRRRTLGETPFAECLMVDSVWMNRRLICRNYMTESNILSDTRRQLRSYILLKNLKPGRLTNDIASATSLASLSQCADKPLLLLITRAKDCRKRMDKVLEDIEEEFSGEPMYESMKSIKGFGPVVSAYLCSMIIDVKRFRTPNQFAAYFGIVPGQRESAESSPHCKITRRGDATARHLLLRATMLHIQFDKDRESTVSQMYDRLKGRGFPTKKAYMACTNKMAHRLFSVLNGLSDGKEV

SEQ ID NO: 228208 - protein, 384 aa, unidentified
MLDPLAAFVDVGSEHMHVSVGGDTPKVFGTVTSQLHALRDWLLSEGVRSVAMEATGVYWLPLYGVLEAAGLEVRMVNGRQTRNLPGRKTYMADSQWGATLHMHGLLHAGFVPAADIRRLQDYLRLRADHVASAASCVQLMQKAFDRMNIKLHDVISSLSGVSGLAVVRAIVAGERSPEALAALCATQIRRRKKQAVIEALRGTWADEHLFLLEQALQSWDHYHKLIADCDTRIAAVLPRDDEAPPPLPKSIRQTGINAPHITRLREILAQMCGGRDLTRLPALSEYGVLQLIGEVGTDLSIWPSEKHFTAWAGLAPGSHDSGKRKKGVRRGRNRTGQLFCMMAQSLVRSKDIALGGFYRRLAARRGGLIATKALARKLAGGSGE

SEQ ID NO: 228209 - protein, 348 aa, unidentified
MYIGVDTHKTQHVLVALDAQGRSLGTRTCANTPEGWANGLAWARSWESRVWGIENSGSLGKGFAQSLLVQGEGTVHEVSPHRTAQYRRRGRTQDKTDETDALAIARLLLAEGDTLPEVQRDDLSTALRLLSDHRDNLLAEKTRLINQLHGQMLQVDPSYKEKSGRLTDTRGVTYCRSLALPPDDRLVRTRLLIVHQLAEQILRLDAEVAAVAVELTARVQESQTPILALRGVGVVVAARIIGEIGVAPRIRSAAALAALAGISPVAVSSGGQGGYRLNRGGNRQLNRAIHVIALTQRRCDPRGRAYYMKKRAEGKTPRAALRCLKRRLVDVLFRAFSQHMEPRLGVAA

SEQ ID NO: 228210 - protein, 331 aa, unidentified
MKLYTGLDLHSSNSYLGIIDETGKRVYKQKLPNDRERILAALNPYKNDIAGIVVESTYNWYWLVDLLMGEHYDVHLANPAAIKKYTGLKFADDRHDAFWLAEMLRLGILPEGYIYPKEDRPIRDLLRKRMHLVRLRTSLIVSLQNILSRNNGFKLKTSDVKALTEDRVAPYLGGSEDLALAGMASKESIDFLTRQIKKIEAVIEAKVELKPPYEKLQSVFGIGKILALTIMLETGPISRFAKVGNYVSYCRKVSSKWLSNDKVKGKGNKKSGNKYLAWAYSEAAEHARRSYQMGDPLGICSCKRAPPLQSSFNNSALRNLKSAIESPHRSP

SEQ ID NO: 228211 - protein, 432 aa, unidentified
MNKYINRPVVGIDVAAEFSMVAILAPDGEVYRKSFRINHTLDGFEYLASEIKKVEEKYDMKVASFMESTGVYHISLFHFLNDNKFDVFTINPLITNSNKNFDIRKVKNDKQDALAIAKICKFQNIKVSSNFDKELYTLKSLCREYYKLTDTKSTFKKKLSNELRVIFPGYLNIFSDTTSKSSLQILKKYPRPIDILSADKTEIIDLLLKLSRKGMKYAENKYDLLLAAAKESLITGVPSDSLFVKLKANISIIENFEVQMDLLLSEIKNLLSSGKIPSDILKNIELLQSIPGIGEVTAITIISEIGDFKNFAKSKKLVAFFGLDPSVNESGKFKGSNNHISKRGTRPGRRALYAVALASVRSKRNGLATNSVLLNYYKENMNGKSKKVGIVAVMKKLLGYIFSILKNQKSYEIRHPELHCKMYVENQYLKVA

SEQ ID NO: 228212 - protein, 394 aa, unidentified
MKLIGIDIGKNKHFFCVMDQQTGEIISQPVSFSNDKEGFDFLVQKIKSYPKDSILIGMEDTGHYHFALLKYLLDLQYTVALINPKTTDFNRKMQGGITKNDKLDTINICDVLDTPERKKQYRITKVNSFDLYEQKQLTRHHHNLKEEENVYKNRLQKCIDIVFPEFNKLFNSKYGIVYMNILKMFGSAENIANTDIRTIRKCFEIEGRGNRISLTPERLKECARSSIGISSSAEVIQIKHLTAQIELIEEQLTEIDKKIEEFSIQNNSPILSIPGISHFSGTSILAELGDIRNYSKPSQIIKFAGVAPLHYESSQFNAQHTAITKKGSKYLRKTLYQIILPVIRHNPVFNKYYQLKISQGKGHRCAQGHCVRKPLRIIYHLLKTNQQFDPQLLR

SEQ ID NO: 228213 - protein, 339 aa, unidentified
MNVIYLGIDLAKNVFQLCGLNQAGKPVYKKRTDRKTLLQTVANIPACLIGVEASTGAFYWQREFEKLGHKVKVISPQYVKPFVRGQKNDGNDAQAIAIALMQPTMQFVPPKSPEQQDIQALHRARQRIVNHRTATVCQIRGLLLDRGITIGAAVSRVRHAVPLILEDAENGLSARMRRTIAELYDLFNDLGRRINFFDKEIDTVFRQSEACQRIAKVKGIGPKTATAVVAAIGKGTEFKNGRHFSAWLGLVPRQHSSGDRQVLMNMTKKGDKHLRTLFIHGARAVVRVAANNNEGYLNQWVNQLKERRGFNKTTVAVANENARIIWSILHNETEYRPAV

SEQ ID NO: 228214 - protein, 392 aa, unidentified
MTCTDHPLPAPTAARSDDSTLFAALELSRKSWLVATNAPGEEKVSKRTIAAGDGRALLDLLAGLREKAERRIGKPVKVVVIQEAGLDGFWLHRLLEANGIESHVVDPASIAVDRRKRRCKTDALDVDALLRTLMAWARGERRVCSMVRPPSPEDEDHRRLSREREALVKERIQHTNRIKGLLAAQGITDFEPLRPGHRARLDGLTTGDGRPLPPRLTEEIRRQLARLDAVISDLKTVEAGRDALLADDTVAVSTGDGTPPAAAALSRLKGLGPEFVSILCLELLFRSFNNRREVAAYVGLTPSPFKSGGIDREQGISKSGNPRLRKMMIQLAWMWIRYQPGSAISRWFAGFAGTKRGRIRRIGIVAVARKLLVALWRFATQGVVPDGAALKS

SEQ ID NO: 228215 - protein, 355 aa, unidentified
MCAKKTGSLEDLAVVGVDIGKDTFHLVGFDRAGQLVIRKQIKRLALSATFEQLPRCIVGMEACLSAHFVSRTLRGMGFEPRIIPAIYVKPFNKGQKSDYNNAEAIAEAALRPNLRTVSEKDQDQLDLQALHRVRARLVSRRTATINQIRAFLIEQGITVRSGLRALKNSFETILEQRQDEISPRMRGILIGLYGDWLWLDKRIEDVSGEIEEISRTEENCANVMTIPGIGPMISTAMVAAVGKGEAFDRGRDFAAWVGLVPTQYSTGGRTILGRITKRGSRYLRMLFVQAAKVIMMRQIRWSTFSFGPWLTEAVKRMPRNKAAVALANKLARTAWSVLRHGTRFDAPRDMAMEAI

SEQ ID NO: 228216 - protein, 463 aa, unidentified
MSRARKEKSRKTKSTKSRGKALKVVRRQATLERVNLHAAGIDVGSTSMFVAVPPESSAEVVKEYGVTTPELHALADWLKECGVTAVAMESTGVYWIPVYEVLEARGFEVSLVDARKAQNVSGKKTDVLDCQWLQELHTYGLLAKSFRPADEIVVLRSYLRQREMLVESRASHVQHIHKALQQMNLRLDTVVSDVTGETGMSILKAILGGERDGAKLSSLRNFRCHASEEEIAEALDGNYREEHLFSLKQAVKLVESYDDRKAECETEIERYVSSLQPVTEEEMPEPPERKRSLFSFDVREHLYRQLGTDVMRIKGINAEVALVIYSETGRDLETDFGNGKRYSSWMGLSPNTKKTGGRVISSKTRQNGSRAAAAFRQAAVSVGRSDTSLGAYYRRIAAKLGKGAAVTATAHKLARIWFALVTKRELYDESGAAAYEEKQRERVLKGLSKKAQSLGYELRKVAA

SEQ ID NO: 228217 - protein, 316 aa, unidentified
MEAPVAGIDVSKDKLIMYFQGKYYEFPNDRQGYEEIIKILPKGCKVGIESTGIYHINLAKYLMGEYDVRIINPFILKKFKDFRGKKSDKNDAKKLAEIVVSMGSEFTTSDARELTSQWDFVTRSIARVKNRLRRDLILLGYKDSLSKKNLEEVLRGGDSIVLAEVRFLLEELERLEVRKREIEEKLEDLVPKDSLIFTIPGIGKTLGCIILARVGDIRRFSDKKRFVAYCGLDPVIESSGKSVVSKGISKRGDAVLRRAFYLAALTAIRVNPVIKRFYEEHKGKLKGKKLIIACARKLAVITWAVLYYNKPFDASE

SEQ ID NO: 228218 - protein, 409 aa, unidentified
MDQLIERCCGLDVHRDTVVACVRGPGPNGRRQHEVRTFGTTAVELLALRDWLEAHAVTDVAMESTGVYWKPVFYVLEEAFTCLLVNAAHIKQVPGRKTDVKDCMWIAQCLEHGLLRGSFVPPAPIRELRDLTRHRKVLIQERTRAANRLHKLLEDAGIKLASVATNILGVSGRAMLEALVHGTTDPAVLADLARGKLRKKLPALRQALAGRFRPHHAFLVGQLLAHVDYLDEAITTKSEEVEGRLAPFAAQLTQLDTIPGINTRTAEVIIAELGVDMSCFPSDRHLASWAGICPGNNESAGKHQSGKTRKGNRWLRMTLIEAAGAAIRTKDSALGARYRRVMRHRGHKKAVVAVAHAMLRAVYHLLAEGTTYREPGADYYDRHHTHRVTRRAIQLLERQGYRVVLEPAA

SEQ ID NO: 228219 - protein, 356 aa, unidentified
MQSKAISFKGQKVFIGIDVHKKTWSVTTLLEVGMPKTHSQKASAKELFDFLNRHYPEAEYHAVYEAGFSGFSTYYALKEFGIECTVVNAADVPTTQYESVMKSDPIDSDKMARALRAGMIKGIYIREKDNLDDRGLVRLRKSIQQDLTRYKNRVKHLLHANGVEIPELFDRSPNWSKAFINWLREEVVLLSSTRASLDMLIEQVETLRQNLLLVTKKVRNLRFKEEYAEKYDALTSIPGIGPICAITLLTEIYDVKRFRNERQFASYLGLVPTCHSSGEKASFGEMTFRGNKHLGPLLIEASWVAIHWDDALSVAFTNYRRKGLMPQESIIRVARKLSNIIFSMLKTGNNYAPANA

SEQ ID NO: 228220 - protein, 320 aa, unidentified
MLSFCGIDVSKDRLDVMVLPDEYSSSVPNDPAGWAILVEQLRGFSITAIGIEASGGYERGAVRSLQAAGMPVRQVNPFKLRQFAKASGVLAKNDPLDARMIASFVGIMPTRPAQRTTPAAEQLVEMLAVRRQLSAEKTAAENASRLLEDLMLQRLSRRRIARLAADIELLDKRLVEIVATDATLAHRYRLLTSMPGVGPVLACTLIALLPELGGMSRKQVAALVGVAPYAFESGTLKGRRCIWGGRANVRQVLYMAAMSASNWNPALKLFHDRLKGAGKLPKVVIVAVMRKMITTLNAMVRDDIAWADRLSGRHSVTTAR

SEQ ID NO: 228221 - protein, 376 aa, unidentified
MPIKKEMKLHKISQDGRGELNATIHGEICAVVGIDLGDKRSSYCVVDTHGADVSSGVVATTAEALRRVFVGRGKVRIAIECGTHSPWVSRLFQELGHEVIVANPRHLRLIAESNRKNDKADARTLAAVAQAAPGLLKQVHHRSERVQFDLATIKARDTAVLARSRIVAAIRGIVKSSGGRLAVCSTGAFAKKTFESCPMRLRDALVPLLRVIEQLTAEIRAYDRKIEQKMNSEYRSAAPILTIPGVGPLTAMTFVLLLDNDPRRFPKSRDLGCYFGLQPKQQDSGKHVSQLGITKTGDRLMRKLAVQCSHFMLGKFGRDSALRRWGMALCLRGGNNAKKRAVVAVARKLLVLMHRLWKTQTHFVPFPETLENVQRA

SEQ ID NO: 228222 - protein, 332 aa, unidentified
MWYSGIDQHKPYCVLTTYGPDGPQVKQARVASTPLALQQYFAALPGPHRAVVESTGGLYWLADTLATLGVELVLAHATRLKAIAAAKVKTHQVDSDILALLLRADLIPVAHMIPREKRGARDLMRARLRLVEKCVSAQNSVDRLLEKFNVPEVGALEELYQLPAACHAAQIQLLTEQIATLERALYPHLIPNADVQRLLWIPGLGKVNAFTLYTEIDGIARFPSAGQFFSYSRLVPGADNSGGRTRHRSGSKAGNRYLKLAFSHAGIRAVQYYPEIRAFFKAKARKKPIRIARTLVALELARIVYHVLTKQEDFNGQFKDRVLSRRKHAQWP

SEQ ID NO: 228223 - protein, 462 aa, unidentified
MILRMGIDIAVRAPHQASLADERGALLWSGHRFRTTGADLDQLWGRLPAGSDPSQITIVMEPTRNAWVPLAAWFRRRGANVVLVSAERSADLRAYYAKHTKSDRLDSVLLARLPMLHPEGLHPERGIGPGDPLRRATKLHSTLVKRRTTSLARLDALLETLGPEWHQAFEADLGNKTSLRFLAAGYADPHTVRRLGRARLVRFLYRHSRGAFGDALADQLLAAARASLELWGEDDLSFPDLAEDIAIEARLALGLTEEIKELDERIEVIVRERDPHGIITSAPGVGAVTGAVILGRLGDASRFSSLAAARSFSGLVPSLDSSGISGRHGGPTKRGDALLREALFLSANQARRLDPTLAAKYHRLMVETGKHHNSALCHIATTLLTRVVACWKNQTPYQLHDVEGRSIDRVEARAIIAEHYQVPEHIRRARTTTTGTGRRSKESQSAPSTGPSKNHVKRPGAA

SEQ ID NO: 228224 - protein, 403 aa, unidentified
MNAVGIDVSKKKSTVAIFQPGGKVILQPRDFLHTQSDINSLIQIIKDLDGETRVCMEHTGRYYEPVATWLSAADIFVSAVNPILIKEYGNDSLHAPKTDKADARKIARYALDRWTKLKQYGHMDETRNQLKTMNRQFGFYMDQKTAMKNNLIALLDQTYPGANAFFDSPARSDGSQKWVDFVYTYWHVDCVRGKSLKAFTEHYMNWCKRKGYNFSAAKSEEIYNSSADLIAVFPKNANTKMLVRQAVELLNVTSRTVESLREEMDHTAATLPEYPVVMAMNGVGPTLGPQLIAEIGDVTRFKKRGALTAFAGVDPGKNESGQYTQKSVPTSKKGSPHLRKTLFQIMESLIKRSPKDDPVYAFMEKKRAEGKSYYVYMTAGANKFLRIYYGRVNEYLSSLSESE

SEQ ID NO: 228225 - protein, 474 aa, unidentified
MKKHKQAEAKTKSEALKPLREQEPDAAGIDLGANEIWVAVRAERDQKAVRQFGAFTRDLMAIVQWLVQCGVRSVAMESTGVYWIPLFQLLEEAGLKVCLVNARHVKNVPGRKSDVRDCQWLQYLHSVGLLSGSFRPVQSICAVRSIYRYRQNLLSMASQHVQHMQAALDQMNIKLHHVIDDLTGVTGQAIVGAILSGQRDPVQLAKLRDKRIQAPEATIAKALEGDWRKEHLFVLAKAWAQYQQVQKQIQDCDQELWNYTRELEACTKVIKPAKVMRLKPELVGAELLSTPPTKKRARKKTSKNQPEGPWKEELERFFGVDLTAIPGISVLTGLTLMSELGHDLSTFRTEHHFASWLCLCPDNETSAGKVLRRRTRRSQNRVRQALRMAASSLHHDKSYFGDKYRRLRARLGAPKAVTAMAHQLARIIWTLITRQLPFDLSVFAYHEKVHQQRRLKHLAASARQMGYQLTPMAA

SEQ ID NO: 228226 - protein, 341 aa, unidentified
MDKELYFGVDVSKKTLDLAYYDGETIDWKNAHIKVSNDDAGFKKIGSWVAKVGKDFDTFLFCMEYTGLYNQNFRLWLESKEYIYGMVDPRKMHHFEPDLDDDQRSLDRIKTDELDAFRIAIYCEQNHKKILRNPSKLPSPVYLKLKRLLVERKQNTKQSTLCKQQLHDTCAYDTDLSVERKKLLLKNMQENQKAIDKEIDSYIQEDASISKNYELLTSIPGIGRIIALETIVLTENFTAISNPRKYACYIGIAPFKKESGTSVRKKTGVSKKGFSEAKADLSIAVLSAITYNPAIRGYWIRKKKEKCGGIVLNAIKFKLVLRMFAVIKRGTPYVETDAYKN

SEQ ID NO: 228227 - protein, 418 aa, unidentified
MKKHSNSRKKSEATTKRAKSRGPVQRDTKEVLAELVGKLKEKLDPKKAAAASAGDGHPRGELRPNLDRLTVGVDLGDQWSHYCILGLEGETLAEGQLRTTQEDFATFFQGLNAARVVVEVGTHSAWVQEVICGCGHEVLVANPRLMEGSKRRKRKNDRIDANKLARLGRVDPESLYPIQHRSREVRQDLVMLRARDALVAARTEIINTTRGLVKSMGTRLPKCSSRSFAQKGEETVPVEMREALLPLVRLAAALSADIKEYDKKIESLGREKYGHTTLLRQVKGVGPITALAYVLTLENPQRFAKSRDVGPYLGLVPKQEDSGESQPQLGISKAGDTMVRKLLVGSAQYILGPFGPDTDLRRYGLRLCERGGKNAKKRAAVAVARKLAVLLHRLWVSGEVYEPLRPGMSVTMTPAAAA

SEQ ID NO: 228228 - protein, 485 aa, unidentified
MAKRKMSTFERLQRGKWSREQRKELAQKLEAADLTIVHPDAAGIDVGNESHFVAVPAGRDAQPVQEFGSWTADLQRMAAWLKACGIRTVAMQSTGVYWIAVQEVLEQAGLKVFLVNARGTKNLPGRKSDVQECQWLMKLHTYGLLANSFRPPEEIRAVRTIWRQRDRLVQDAGRAIQQIQKALTTMNIRLANAISDVSGVTGLAIIRAILKGERDPQELAKLRHPCIQASEEEVVRSLEGHWRDDVLFELKQVVEGYDFYQRQMGACDEELQKYLAVLPDRRRESAAVGADPGPTKGTKQRHRSKAERKGKTRRKNQPGFDLQAELHRTFGVDLTRIDGIDIMTGQVILSEVGPDLSDFPDEDHFASWLELAPRRNITGGKVISQKSRESRNRVANALRLAAESLSRSDSYLGARYRRLRGRKEGKKAVKAMARHLACLVYRLLTKGQDYVDRGAAYFEKKRTEREMIGLHRKAAEHGMRLVPMA

SEQ ID NO: 228229 - protein, 347 aa, unidentified
MKIIGCDFHPSFQQIAMVDTETGEQSERRLDRSAAIMFYRGLEGRVVVGMEACGNTLWFERLLAEHGHELQLGDAAKIRAMEVRKQKTDRRDAELLLKLLLENRFPQVWIPSPEQRDVRQLLLHRHKLVNLRRAVKNQLQHLALNQGIQQKWRLWTEKGRTLLEELPLTGWTAQRRQDDLKLLDELNGSIAKLDVAVEQEAKNHPIARLLQTHPGVGPITSLAFVLTLGQIERFPHSKNVVSYVGLNPAEHSSGGRQHLGSISKQGNPMLRSLLVEAGQSAARGDTELGRAYQRLKHKKHSGVAKVMVARKLAVRLYWMWRTQQPYAATRMQGSPSHPVVAAKDRRA

SEQ ID NO: 228230 - protein, 371 aa, unidentified
MKEFSKYIGLDVHKETIAVSVAETRSGEVRYVGEIANTPEAMEKLVRQLRKGGENLSFCYEAGPCGYGIHRQLTNLGWECLVVAPSLIPKKAGDRVKTDRRDSLSLARLHRAGELTAVWVPDGAQEALRDLTRAREDMKHLQRQAKQRLLAFLLRHGRRYDGKSHWTQAHYRWLEQTKFDHPVQQIVFQEYIDTVTAMNRRVEALDKQIESAAGDSVFWPVIEGLMALRGVSLLTATTIVAEIGDLRRFASAPQLMAYLGVVPSEHSSGGTRSRGGITKTGNGHVRRVLVEAAWTYRHPARKTAVLQRRAERTPEAIQEIAWKAQKRMCGRYRLLESRGKLKVQVTTAIARELAGFIWAIGQALPPPAVNE

SEQ ID NO: 228231 - protein, 357 aa, unidentified
MIAMKYYTSTTEFNCGIDLHARQMYVCVLDRDGKKLVHTNIKNNDFAYFLKLVAPYRHDLTVCAECMFGWYWLADACAEAGIHFVLAHALYLKAIHGGKNKNDRIDSEKIAHLLRTNFIPPGYVYPAEKRPLRALLRQRILYVWNRSELLSRLQSHQLAYNRPTCRQTPYNREAWSEQMLTAEPDPVRQLALQNDLALITHYDTQLATLEKELLRLTKQTSSRDFTLLQTTPGIGDYLGLTILHEIGDIARFPTVKDFLSYCRLVKGTVASAGKIKGLRGAKLGNPYLRWAFGEAAVVAKRDPLVIGPLAQRLEARLNNKFKANTVLAIKLARAVYFMLKQKTVFDAQRLVAALSNN

SEQ ID NO: 228232 - protein, 345 aa, unidentified
MTIVDTRPVTGGVDTHLDTHVAAALDANGAVLGVESFPTTPAGYHDLHAWLAGFGQLCRVGVEGTGAYGIGLSRFLQSAGVEVLEVDRPNRQARRRDGKSDPLDAIEAARAVLSGRAQVVAKAADGPIEAMRALLVARRSARDARITFLNQIRHLAFTAPDDLRERVRPVPRGRLGATAARLRPSLENDVVTFATKLAMRHLGQRVVLIDEQLAAVDEILAELVAEVAPGLVELPGVGTLTAAILLVTAGDNAGRIRSEAAFAHLCGVAPVPASSGKVTRHRLNRGGNRQANHALWRIVFTRMSHDARTRVYVQRRLDEGLTKAEVMRVLKRYVAREVYRYLPRD

SEQ ID NO: 228233 - protein, 387 aa, unidentified
MTGQTQGSRFIPSDYDIFAGLDVDKRSIAMTFSDHQTLIKSQRLPYSSVQLLNYVRKHFPGQRVAFVYEAGPTGFGLHDELTANHHTCLVVAPSMVPTAPGQRVKTNRIDSKKLSLGLRGGELRSIHVPSRSYRELRHLVQLRDTQVQQITATKLRIKALLLCEGIAFPAAPPSSQWSARVVAELRLLPCTEEVHFKLEHLIGTLYFHFNSAAVVQKRIRLFCQNDPELSQSISLLKSLPGIGWIVAAHAVARLGDWREIENVRSIAGFLGLVSSEHSTGDKVNRGSITRAGDSRLRNKLIQSAWVAIAKDPELRAFYRRIFERHPKKVAARKAIVAVARKLTTRMYAVLKQQRPYVIRPDSSITPLTTEETVGPRVRLDAAQSDQP

SEQ ID NO: 228234 - protein, 343 aa, unidentified
MQIRSVGIDLGKTTFHLVALGDNGKVLLKKKFTQKQLIAFTANLRTCLIGMEACSGSHFLGRALREQGHDVKLIPAQFVKPFVKSNKNDFIDAEAIAEAVERENMRFVPIKTDDQLDLQALHRVRDRLMARRTSLINQIRAFLLERGIVFAKSPIRLREALPEVLENVNENLTPRMRNLVAMLWSEWKDLELQIVQMNDEVERIASSDAACRRLRQIPGIGPLVATAIVASIGNGAAFRKGREFAAWLGLLPNQHSTGGKVRLYGISKRGNSYLRKILIHGARAVVLRCKRDRIAMGAWMSSLETRAPRNVLIVATAHKLARIAWAVLSSGQAYRAVPEALTV

SEQ ID NO: 228235 - protein, 347 aa, unidentified
MNFYTQQHKHYCGIDLHAKAMYVCLLDQKGTKLVHKNLPTTPDAFLRLIAPYREDLVVAVECIFTWYWLADLCQKEGIVFVLGHALYMKASHGGKAKNDKIEAHKIAVLLRGGMIPQAYVYPAEMRATRDLLRRRCHLVRKRAELLAHIQNTNSQYNLPEIGKKLAYKANREGVEEHFPDPSVRKTIEMDVSLIDHYDQLLGEVELYLTRSAKAHDSQTYARLQSVPGIGTILALVILYEIQDIARFPRVQDFVSYCRLVKCAKESNGKRLGTSGKKIGNVHLRWAFAEAAILFLRQNHPGKEYFTKLEHKHGKAKALTVLGHKLARAVYYMLTREQPFDLQRFVSA

SEQ ID NO: 228236 - protein, 404 aa, unidentified
MKVTYQTCCGVDVHKSFLVATIVKTTGGIEPSYQKKRFSTFNNSILEFKQWLLDNDCHDVCMESTGKYWVPVFNLLEDDINVVIANPKWVKAVKGNKDDTKDSKWIGDLFRLGLVKGSYIPCKKVRILREYTRYRYKLVSCRSSEKNRYQNALTVCNVALDSVVSDIFGKSSTSIIDYLLDQSGTSINHEEIASKLLRNLKSKEDAVIESVEGYQMTDAQKYRMRLVRAHMDYITAEINDVDKMIENMISSNTDFENAVQFLCTIPGVKRDSAITIISEIGTDMSQFSSSKRLCCWAGLTPGSNESAGKKKSVRITRAGVYLKPALVQCAHAAVKSDKSPYYKKKYESLVKRRGKKRAIIAIARMILTAIYQMLSTGEQWNPSDLYKIDMPVALVEKQKAKAIK

SEQ ID NO: 228237 - protein, 411 aa, unidentified
MDVVNARCAGLDVHKATVVAGVRVPGPQPGTRRGETKTFATTTRGLSELTDWLSAHGVTDVAMESTGVYWRPVYGALEGRVQLVVVNARHVKMVPGRKTDVKDCEWLAQLLECGLLRGSFVPPRAVRDLRDLTRLRKALIRERGHHVNRIAKTLELAHLKLSCVVTDLMGKTGRAILHALSAGLDDPERLAACAQGSLRKKHAALREALVGRLTPHYAFLLQQHLSLIDAVDAHIATLDARIETAMAPFADAAALIQTMPGIATRAAQAILAETGVDMDLFPTPAHFASWARLCPGNHESAGKRQNTTTGKGATWLRATLQEAAWAAVRSKKSYYRALFHRLKARRGAKKAIVAVQHAMIVALWHMLKHGVAHHDLGADYFDRHHTARIRRHHVRRLEQLGYDVVLVEKAA

SEQ ID NO: 228238 - protein, 427 aa, unidentified
MNNTQNEKIAQVTNDTMVIGIDIGSKRHWARAFDNRGMELSKKAFSFSNTAAGFAGFESWYECQRRAAGLRRIMVGLEPTGHYWFNLNQFLSENGITVVLVAPQHVKHSKELDDNTQRKDDLKDPRVIAKLVTEGRYFQPYRPAGVYVDLRDGFNRRCGIVESMTQAKNRLHRWFCINFPEYLEAYGSVTAKTGLMVLKKAPLPKDIVALGVDGIIKIWKDAKVRGTGKKRAMALVALAEKSIGEKTANEAARLELWQLLEDYEHYAHQYEVIEEMLERKVHEVPHADKLLQIPGIGYFTVIGFFAEVGSIDRFDDPKQIQKLAGLAVVENSSGKRKGLPGISKRGRDRLRWVLFQAAMSAVKNNQEFREIHLYFTTRKDNPLKKMQSLMAVAGKIIRVFYGMVRTGASYDPERLLRDIRRPKKDAA

SEQ ID NO: 228239 - protein, 421 aa, unidentified
MIDHETFTWFAAIDWGTEKHQACVVDGRGGIAGERAFSHDGAGLALLCDWILSIAGNATVVAVAVEVPHGPVVDALLDRGLAVYAINPKQLDRLRDRFSVSGAKDDRRDAHVAADGLRTDRHLFRRLQIADPRLIQLREWSRLAEELQQERVRLSNRLYSQLWRYYPQMLGLSDDLAAGWVLDLWTMAPTPAKAMHLRKTSVAQLLKRNRIRRIDAETVLRALREPAINVADGVAEAATIHIGSLITRLRVVGRELHGAMRKLDELCACLDDPSPTAAEHGGSGRHDVKILKSMPGIGKIILAILLAEASGPLSRRDYQALRTLSGVAPVTKQSGKSRIVVRRYAAHVRLRNAVYHWARVATQHDPTSRSRYVALRQRGHSHGRAIRGVADRLLALACTLLQRQTVFERDFSRAEELTAVP

SEQ ID NO: 228240 - protein, 316 aa, unidentified
MKNYIGIDISKASLDVYDGKKSYKFKNNEEGFNSIVSLMENPKETVLIFEPTGIYSYDLNSFCAKKEIEVVLVGPKESRDFARSLKVRSKTDKIDAKILYRYQSHVEPNMPKVPQIDHNAIKIQEILNIYEGIQASKQRFVNQLESTNKKDKYLIRTLNRIIKSLDNEAVKLFNKIELLLLKDETTKKRYDAISTIPSIGQKSALYLCAFFLKYPSANAKQITALVGLDPIIRDSGTFRGKQRISKHGGQQLRNLLYLPTLCAIQHNEKIKNFYERLIAQAKTKKLAVIASMRKLILLAFSIFKSMEEYKPLTAKI

SEQ ID NO: 228241 - protein, 454 aa, unidentified
MRKPRVVPDEDHEVVYERVAAVDVAKAAGVVCMRTPDPARPGRFVNRIWEDVPAMRAQIAELGRELLRNKVQMVTLESTSDYWRIWFYVLESIGLAVQLVSASQAKNLKGRPKTDRLDAMWLARLTQWGMLRPSFVPPAAIRRVRDFTRARTDLVHERTRCLQRLEKLLEDAMVKITSVASDGLKAKSVVAMVQALIAGERDPRTLADLAKGPLRAKKDQLAEALDGMFDSHHGVIAQMLLEQAAFLDQRITQMEDQAIAALAQVEQSWGVDADGQTGPGCGTGPASPVLAAAHRLAEIPGISVWLAIVIIAEIGLNMSVFPTPAHLVSWIGLCRSAAQSGTRAGKGKQKKGNSYARAAAGQAALGAAGTDTFLGDRYRRIARRRGKAIAQVAVARSIMIIAWHLLNDPAARYRDLGPDWHARRTSRDKKIRTHLQGLKALGVTVAITGDDQAA

SEQ ID NO: 228242 - protein, 315 aa, unidentified
MNPLFLGVDVSKDRLDAATLHSAAKRQFANDPDGVAQLVEWARQLGPERIVFESTGCYQKRAVGALLAASLPAVVVNARQVRDFAKGLGVLAKTDAIDAAILARFGQVVPTTVRPLPLPQIQEFQAVYDRRSQLVRMLAVEKNHRHAAGDSAKVLKNINGHIAYLEKQIKALEDQMDRFVDSCEAFRAKDEVLQSIPGVGPQVSRTLLAYLPELGQGTRQQITALVSLAPYNDDSGPTSHVRHIRGGRGKVRTGLYQAAVVAIRHCPEMKEFYGGLKARGKASKLALIAVARKLLVLANALVRSMTPYQTRPNSV

SEQ ID NO: 228243 - protein, 493 aa, unidentified
MGACGLESGDVVLAAIPIRKMTIGIAQTLLLVIEWRIAMPKRTTGDRPELKTVSVGAAAIDIGSKMHMAAVNPACTDVPVRSFGTFTQHLHDLADWFKACGVTSVAMESTGIYWIPVYEILEQRGFDVILVNARYAKNVPGRKTDVSDAAWLRQLHSYGLLRGSFRPDAEIATLRAYLRQRERLVEYAAAHIQHMQKALMEMNLQLHHVVSDITGATGMRIIRAVVAGERNPDVLATYRDVRCHSSPETIRAALVGNDRDEHIFALTQSLELYDIYQAKMLDCDRKLEVLIAALGNKGEKPVGKLSKPRIKTKQVNTPTFDVRTALYDVLGVDLTEIHGLGPSLALKLVGECGTDLRAWPSAKHFTSWLCLAPGNKISGGKVLSSRTRRSSSRAAALLRLAATTVGRSDTALGAFYRRLSSRAGKSKAVTATARKIAVLFYNTLRHGMSYRDPGADHYEQQYRNRVLANLQRRAKSLGFVLQAIPGDADPAVS

SEQ ID NO: 228244 - protein, 370 aa, unidentified
MAKRSMFVGMDVHKESIDISLAEEGREGEVRHYGVIPGDLEAVAKVVRALRAPNRRLRFVYEAGPCGFGLHRYLTVQGEECVVVNPSSMPKRSGDRIKTDRRDGNALARLHRAGELTAIYIPTADDEALRDLVRAREDAVGLSTQAKHRLKAFLLRQGRRYPGRAGWTRPYRRWLADLSFPLAPQHIALQEYRDTIDETERRVERLTDQLRHLTPTWRWAPVVDALQALRGVSFVTAVGLVVEVGDIRRFDHPRELMAFLGLVPSEYSSGPSVRRGGITKAGNPHARRLLAEAAWAYQGVPRIGRQMLDRQEALSPTVRAIAWKAQLRLTGRFRRLVARGKAKPKVATAIARELTGFIWAIAREVPPPSA

SEQ ID NO: 228245 - protein, 477 aa, unidentified
MNHRRLVGIDLGIASAHTVRVLDGEGNIVAKRKAWPTRESLTEVETAALARCPSGTALEVVMEPTGPAWLPIAVFFAARGHTVHRVSSAKAAALRRFLSRHTKTNGIDADTLARLPLFDPAGLAPLQLPGPERAALDRRVRACDRLTAAGAEHKRRIKDLVRQLLPMTPLTGDLGAADLAVLERWADPNALVNAGGKRITTTIAAASHGHQGPARAAQWLDAARAAIELYAGHPAVAFADLAAEVASEVRLLRAVQAELAGHAGERERCYRFVDPAALARSLPGLAEVGGPALVAAMGDPARFRRGRQFRSYTGLVPRASETGESDRKGQPMSKAGSSLLRTTMVRAADTARKLDPQLARIYYVQMVERGKDHLGALCVVAASLAERAWATMDRQMHYVICDTDDQPVTPEEAKAIIAERWTVPPEVRARRRSKKVGKAPQQVLQGHGQLGPGRAATRRPSPPPSSRRSDRDVKAPA

SEQ ID NO: 228246 - protein, 402 aa, unidentified
MNSVGIDVSKGKSMIAVMRPFGEVVVSSFEIHHTDSELCELTKLLSGLSGETRVVMESTGNYHLPVAWLLNDSGFYVSVVNAMLVHDYGNNSLRRGKTDKKDAVKLANYGLDHWLTLPRYVPEEDTRLMLKTCYRQYQQYSKVQTMLKNNLISLLDTTFPDANRLFTSPPRADGSEKWVDFVATFWHCECVCGLSKKAFTAKYQKWCRKHGYNFSQDKALDIYASACGRFGVMPKTNTAKLLVEQAISQLQTTSAALAALKQEMQSLAASLPEYPVVMEMFGVGPTLGPQLMAEIGDVRRFHSKKALVAFAGIDAPPYQSGQMDVRSRSISKRGSASLRRTLFLVMGVILQHAPMNEPVYQFMNKKRSEGKPYRVYMIASANKFLRIYYASVKAYLDSLEHD

SEQ ID NO: 228247 - protein, 347 aa, unidentified
MRFYTEQHKYYCGIDLHARTMFLCILDQSGKICFEKNIKSNPDEFLTVIEPFRSDIVVCVECLFTWYWFADLCAKENIPFVLGHALYMKAIHGGKAKNDRIDAHKIAALLRGGMIPQSYVYPPEMRSTRDVLRRRLYLVRKRGQLLAHIQNTNHKFNLPPIAAKLTYKTNRKGFTDRFEDPSVRKSMDVDLELVGHLDRIIQDLELFITRQAKLHNADMFHRLRSIPGIGKVLALTIIYEIHDIARFPCVQDFASYCRLVKCSKESGGKKLGFSGKKIGNVHLKWAFSEAAVLFLNKNPIGQKFLSRLTQKHGKGKALSILAHKLGRTAYYLMSHKRSFNMRKFLAA

SEQ ID NO: 228248 - protein, 348 aa, unidentified
MRFYTQQHQYYCGIDLHTKSMYICIVNQEGKILYHYDLPTQSDALFQVIKPYLPNLVIAVECIFTWYWMADFCAQHHIPFVLGHAIYMEAIHGAKTKNDRIDSQKIALLLRAGMIPMAYVYPAEMRSTRDLLRRRMYFVHKRSELLSHIQNTRSQYNLPNFEKRLDRKNNRIGINQHFNDPSVRKSMELNLSLLDTYETLLKELELFLVHHAQVHDPNNLYLLKTIPGVGKILALVMLYEIHDITRFPTVQNFVSYARLIKPRKESAGKITGTANRKMGNAYLRWAFGEAATLMLREIDDVKAYHQKLKNKHGKAKAMAILSHRIGRATYFMLKNQRAFNLKKFITVK

SEQ ID NO: 228249 - protein, 409 aa, unidentified
MRVMNCACAGLDVHQKTVVACTLLGAAGADPQMEKRTFGTSTRQLLELADWLQQQGVQQVAMESTGTYWKPVWAVLEGQFDLTLCNAAHIKQVPGRKTDQRDAEWIADLLRHGLLKKSFVPPQPQQDLRELTRYRAQVSADRSAVSNRIRKLLEGANIKLGSVASDVLGVSGRRMLEAIVNGETDPLRLADLALGQLKEKRAQLIEALNGRVRDHHRTMLRLELAQWKFLDALVVELEQAIEEALGPFLAAVNLVKTIPGFSDVSAAAVVAEVGANMEQFAEPGRLASWAGMCPGNNESAGKQYSGKTRSGNIWLKRILCQVAWAASRTGNSYFAALFRRIAAKRGKKRAVLAVGHALLVAIFAMLKKQQSYQDLGADYFDRLHADGLKRYCLRKLESMGHRVILEPAA

SEQ ID NO: 228250 - protein, 418 aa, unidentified
MIDDVQWFVGIDWATQSHRVCLLDVEGRHVNERDFAHGGAGLTELRDWLLEKTKAAPRQIAVAIETPHGPVVEMLLDHGFLVFAINPKQLDRFRDRFTVAGAKDDSRDARVLGSALRTDRQAFRRLVVDDPLVIELREWSRMADELQQERIRLANRVRQQLWRYYPQASELTDDVADDWFLALWQQVPTPATAAKVSEQAITRILKDHRIRRLDAATVLQTLRKTPLFVAPGTTEAACAHIRNLAARLHLVNQQIKEAHRALDGLCARLEAATENPSGQIREQHDVTILRSWPGIGRIVLATLLTEATEPLRARDYHALRALAGTAPVTRRSGKQCFVIRRLACNKRLQNAVHHWSSVAIQHDTAARRRYDALRRRGHGHARALRTVGDRLLYALCTALKRQTPYNPDCQTAQVTASL

SEQ ID NO: 228251 - protein, 344 aa, unidentified
MFYAGLDLSRKRLDVHVLDEAGEAVAERAICPDADGLRSLATTLGLSPVRAAVESMTGARFIHDQLELHGWDVEVADAAKVKGLAPLACKTDKIDAWVLAELCRRDLVPAIWLPSPEVRAERERARFRLHLVRHRSSLKNRIHATLLTFGKPCPVSDLFGHAGRELLARMQIPEPWKGSITASLELIDDIDRRIHDCERALRSLGASHPYVSLLQTAPGIAWVLGYTIASEIGDISRFATARKLVGYTGLCPRVYQSGERDRRGPLAKNGPRYLRWALIEASTHAARHPCYRQRYERTSKRLGKQRGPRVARVEVARSLAEAIWHMLTRNQPFAPAGAFETSVA

SEQ ID NO: 228252 - protein, 428 aa, unidentified
MKNCNVQKLEAITPGTLIVGVDIAKETQWAQFVDYRGLELREALKFKNHKNGFDSILASIEAICKNRRLDNIIVGMEPTGHYWKPLANYLLKNKVNVVMVNPYHTKRAKELDDNSQTKSDKKDALTIARLVRDGRYYEVYMPQDIFVELRVLSNSRISLMKRSNALKNTITAVIDEYFPEIVTVFKNPLKGKAAMQILKSCPFPSLILELGIDGVLFEIKKAVKKTVGRKKAQQLVETAKSSIGVGYGLVSAKLKLGLMIEELELLTKQLEQLEKAMEKALADTGYGEIILSIPGIGVVTAASFLGEIGDPMRFDHPRQIGKMAGYNLIENSSGENKSRTVISKRGRKNLRSILYQMAMTMVAVNDEMKKLYKYLKTRPNNSLKKKQALVVISKKIVTVIYNLIKKQTKYQAELVLGEFRKNQIKQAA

SEQ ID NO: 228253 - protein, 344 aa, unidentified
MGEVSTIGLDIAKSVFQVHGVDVAGVVVIRKRVSRARVLEYFGKLSPCLVGIEACPSAHHWGRELQALGHTVRLIPPSYVKAYLKRSKNDANDAAAICEAVTRPSMRFVPIKTREQQSALMLHRTRQLLVRQRTMLSNALRGHLAELGIVSAKGRNGTAELLRIIADDRDSRVSAAVRGILNVLARQYGAIGAEIASIDKSIMALHRGCEASRRLAEIPGIGPVGATALVAEIGDWNTFSSGRSLAAWIGLVPKQHSTGGKERLGSITKQGNRYLRWLLVVGAMAVIRYARKHGTARRPWLGRLIERRPTKVAAVALANKMARMAWAIMVRGERYKEPRLSLAA

SEQ ID NO: 228254 - protein, 468 aa, unidentified
MTVDKKLWRNRKERKEWARRLQSEDPGLEVVHPHAAGIDVGNSAHYVAVRPERDLQPVRRFECFTADLRRLADWLRSCGVKTVAMQSTGVYGIPLYESVEERGFEVYRVNARHTRNLPGRKSDVQESQWLLKLHTYGLLNNSFQPPAEIRALRTYWRQRGEHVAGAATCIQRIQKALTQMNLQLANVISDISGLTGQAIVRAIVAGERDPRKLAQFRDPRIQASEEEIAKSLEGNWRPELLFVLQQELEMYDTYQRRIAECDLQLQKHLASLANNVPPRPPEVEPDGKKRKRAKPAKNAPRFDLSCQLQRITGVDLTRIDGIDVMIAQTLLSEVGVDMSRWKTEAHFASWLGLCPDNRVSGDKVLRRGTRHVVNRAANPLRQAANALIRSRSYLGAQYRRLRTKLGAPKAITAMAHRLARLVYRMLKYGQRYVDKGTEYYEQRYRNQQIQLLRKNATKLGFHITEARA

SEQ ID NO: 228255 - protein, 458 aa, unidentified
MRRRGRPKGKRVQVEVVNPNAAGIDVGSEVHYVAVPPDRDPEPVRSFKCFTADLNVLADWLDECGIETVAMESTSVYWIPVYQILESRGFEVILVNARHVKNVPGRKTDVLDCQWLQQLHSYGLLRGSFRPEDRICVLRSYIRQRDNLVKSAGAHIQRMQKALEQMNIQLHKVITDIIGVTGIRIIEAILNGERDPTKLAQLRDHRTRSTEETIAKSLEGDWREEHLFSLRQEFELYQIYREKITECDRKIEAYLGTFESKVDPEQKPLPKFKHGRKKRQGNQPELDLRTPLYRMIGVDFTALDGFDVLTVQTIISEIGLDATKWPTEKHFSSWLGLCPNNKVTGGRVKDTRSKKVVNRAACAFRMAAQAAGKSHTALGGYYRRMRNRLGPSKANTATAHKLACIVYRTLKYGKQYVDPGVAYYEQKYRQRVLNNLKRRARLLGYELIQNLELRPVVS

SEQ ID NO: 228256 - protein, 391 aa, unidentified
MFYLGIDIGKFHHVAALLTHEGKVIATVPSFSNTHAGFEQLLTLITYHLPPTEELRIGMEATGPYWIPLAWWLKTHGWPPVVMNPIKTSSLRNYGVRGSKTDNIDSVLIANALRFEGDKPQQVFPKHSEELRHLTRLRADMVNDRTRVALRMTSLLDRMFPELLCSFSKTLSPSCLALLSQAPTPTRVLALGEEKLTAVLRKASRGKLGAARAREIMNKAAVSIGVNSQALEEILPLLLEQIDLIGSQLTTLDHRISELYEQAGLYFTSIAGVGTLTAATILGEFGSVERFKQAQQMVAFAGVDPKLRDSGHHQGQVHISKRGSRYLRRRALYLACRGVVRKDDYFNAIYQRHRDNGKCYKEAIVAVMNRFIHVIYAIWRDNRPYYPLTPV

SEQ ID NO: 228257 - protein, 422 aa, unidentified
MSYRIAGIDVHKRMLTIVVSDVEVVGEFAFERRQFGSGPAQLRELAGWLVAQRVEEVVMESTAQYWKPVWASLERDWKPLAQQWAGAGRMAGTLHLAQAQSNRARPGRKRDFTDAERLVKRFVAHELTLSFVPDPAQRLWRTLTRTKYQLTRNRVQLQNRLEALLEEAHIKLSSLVSDLLGVSARRMLHALAEGATDPGALAALANVRLRATQEQLRDALGACQDLNPVYRRLVRMALEDLLLLERQIGQVDQELADLLGPYHGQVQRLAEVPGLGVDSAQQIMAEVGATAATFPSPGHLASWVGACPGDDESAGVSHSHRSPKGNRQMRRVLNQSANAAVKCTGSIFQALYRRYVPRLGHNQTISIIAHRLCRLIWKILHQGVRYEERGPAMNERSKQRRAKRMIRELRSLGYHVEFAPVQ

SEQ ID NO: 228258 - protein, 373 aa, unidentified
MYVGLDLHKDSITVAYAIDAGEVELLGKTGTTGADIDRLCTRLQSKAPHVRVVYEAGPCGYGLYRQLVQKGFDCMVCAPSLIPRKPGERVKTDRRDAIKLARSLRAGDLSAVYVPGIEDEAFRDLARAWAAAREDLRHARQRLKSFLLAHGVRYTGSANWGEVHRRWLGRCSFPSAWQHLAFDEHRRTIEDRLAQCARLETALREAVISWRFYPVVLAVQAMRGVQFVTAVGMVSEVGDLSRFEHPRQLMAWLGVTPSEHSSGGKRRQGSITKTGNSYARRLLVEAAWSYRHPARVSPEIQARLEGLPKAIIDRAWDAQVRLCRRFRRLTARGKPINITVVAIARELAAFIWDISRLAMALAIPRSKLPAPCT

SEQ ID NO: 228259 - protein, 364 aa, unidentified
MTQTSHDTFAAFVGLDWADAQHDGCLQGAGSAQREYFQLAHTPEAIDAWVTTLRTRFYGQPVALCLELTKGPLVSALRKYDFLVLFPINPLTLARYREAFTPSRAKDDPTDAELQLELLLTHRDKLRPLQPQSPTMRALAQLVEHRRRVVGDKVRITNRLTSTLKNYFPQVLHWFQDKDTRIFCDFLSRWPTLKAAQLARRSTLETFFRDHHVRPADVLATRMRAIKTATPLTMDEGIIAPNVLLVQTLVSQLRVTLEAIEAFDHAIAQRAQHHPDFPLFQALPGAGPVFASRLLVAFGEQRERYASAAALQKYAGIAPVTERSGKKAWVHWRLQCPKFLRQTFVEWTAESIRHSFWAQVYYQQ

SEQ ID NO: 228260 - protein, 355 aa, unidentified
MPSKTDTAVAHTIGIDTGKNTLHMIGLDEKGAIVLREKVSRTRIAARFVNVPPCLIGIEAGMASHHIARELAALGHKVKQVPPAYSKPFRQVHKNDFRDAHAVAEAVERPSTLCVPIKTDGQLDLQALHRVRSRLVGNRTAVINQIRGFLLEHGIPVRQGHRFLRQQLPQILATRADVLSPRMIRIIGDLIEDWRYLDERIETVTDEIEALARADEGCQQLITVPGVGPIISSAMVAAIGNGAAFCKGRDFAAWLGLVPKQMSTGDRTILGRITKRGNRYLRTLFIQGARAVLLHPTSWARHSFGPWLTTAARRMHRNVLTVALANKLARIAWTVLAQGRRYEARVEPRIEPAAA

SEQ ID NO: 228261 - protein, 403 aa, unidentified
MNNVAGVDVSKGKSMVTVLRPFGEVVAKPFSVGHTGSELKELANYLKSLDGETRVVMEHTGRYYEPVARFLHEEGIFVSAVNPKLIKDYGNNTLRKVKTDKADARKIARYGLDNWVELRQHTPMDTIRMQLKTLNRQQGLYSKTKTMMKNNLIALLDQTYPDVNALFDSPVREDGSQKWVDFATTFWHVDCVRAMSLTAFMERYRKWCKRHGYNFSQSRAIEIHMEAQDLIAMLPKDALTKTMIRQAIDALNAVSKSLEQLKAEMRTLAAQLPEYPVVMAMRGVGNSLGPQLMAEIGDVTRFAHRGSITAFAGVDPGADQSGTHEAKSNRTSKSGPPELRRALFLVMDCLLKTMPQNDPVYRFMDKKRAEGKPYLVYMTAGTNKFLRIYYGRIKEYLASLEGN

SEQ ID NO: 228262 - protein, 407 aa, unidentified
MIFLGDDWAEAHHDIYICNEAGDRLAARRLPEGIAGVTALHELVSSHAASPSEVIVGIETDRGLWVQSMVEAGYQVYAINPRAASRYRDRHSLSGAKSDPGDAKMLAELVRTDRHNHRQVAGDSDLAEGVKIVARAHQNLIWERTRHTNRLRSSLREYYPAALATFDDLADRDTLAVLDRAPTPTEGQALTPGRVRTALRAGGRTRNIETRAQAIVEGLRVETLQASDVVVSAFAATTRSQIAILRALNEQIAALETELAAHFEQHPDADIYLSLPGFGVILSARVLAEFGDDPNRYANAKSRKNYAGTSPITRASGTRHVALARFVRPSRLADALDQWAFCSLRTSSGCRSFYDHRRALGDTHHQALRALANRLVGILHGCLAHHTTYDEAIAWAHRHDQVNQQAA

SEQ ID NO: 228263 - protein, 341 aa, unidentified
METKFIHFAGVDVSKQKIDVCIIVNNQRSSLLHNSFEQSKRGFGSLKKWLMEVTGRQTNRLLICVENTGLYDDALLYYLADNELPASLENAANIKRSVRDNRSKTDKLDSRNIALYALKHSDELQLWQKPRKQVVELQQLLSERSRLVNALKMLRQAHKEKQVFSWSSMVQSRSYVSGIKGLEKDIRQIETDIWELVKTDKELLQMFMLITSIPSVGKITAYHFICYTNEFRQVKSGKQLASYCGVVPFERSSGSSVKNKPRLSHQANKILKTLLHLCAVTAIKMKGVFAAYYKRKIEEGKNGLIAINGIRNKLALTIAAVIRNNQPYNENYLYNPNLEKP

SEQ ID NO: 228264 - protein, 388 aa, unidentified
MLYLANDQHRKQLTVNLRNEAGDVILKRQVSTEWKRAREFLEDVRNRSVPEGGFVAIVEVCGFNDWFLKLLAEYGCKEIVLVQPEKRSKNKTDRRDANALGELLWTNRRRLLEGKKVQNIRRVVPPSQRDAEDRQLTIMRYRLGRLRTRTINRVQHLLLKHNLQQECPTKGLQSQSARKWLTKLPLGAVDRAELDQLLAQWELWDRQMEELELRIRERQAESKAATIVATAPGAAAYGSLALACRIGSIERFPHARSLPHYWGLTPGCRNSGDATRRLGSITKQGSAMARFILAQMVVHVLRRDARMKEWYQRIKKRRGAKIARVAAMRRLATILWHMLKHQQPYRPGGNSTEGSDPGYGCKPPDRNAFLRHNRGVQGTGNKKAATVL

SEQ ID NO: 228265 - protein, 342 aa, unidentified
MAIAILGIDLGKTTCSVAGLDCAGNVILRRRIQRFRLLKFLSDLPPCVIAMEACGGAHHVARFSQEFGHEPRLMSPLYVRPYVKVHKNDDRDAEAIAEAATRPTMSFVTVKSAEQLDLQALHRARERLIHSRTRLINQARGFLMERGIRIGQGRHVFQRVLRQMLEERSADISSRIQALITDMAAELDELNSRIAVLDCEIKALSQRDPAMKRLTEIPGVGPIIASALVAAIGDGGAFAKGRDLSAWLGLVPRQVSTGGKAKLIGISKRGNSYLRKLFIHGARTVLHLIKDRTTPLARWIDQLKARSHGNVAAVAMANKLARIAWAVLTKNQRFNQAALLGV

SEQ ID NO: 228266 - protein, 361 aa, unidentified
MSLSSWLVAGIVPGVERQPLKKLTVDESALLKLLHRWREEAEKAGCRIERIVVAFEAGRDGFWLARWLKARSIEAHVIHAASVAVSREHRRAKTDRLDTQLLKRAFLGWLRGERDHCKMVDIPTIKDEDAKRPNRERENLVSEQSRIINRMKAALIRLGIRGFNPKLKRAAGRLEDLRTPEDEAIPPNTLAELRRDMERRRLVRDQIRQIEEARLERLDHAPGDGPHAMVRLLARVIGVGIETADMLVHEVLSRNMRDRRAVARYAGLTGSPDESGRKRREKGLARSGNARVRRGMIQLAWRFLLHQKDSALTRWFRARTENARGTRKPMIVAMARKLLIALWRLVREGIVPDGVVLRPAQ

SEQ ID NO: 228267 - protein, 345 aa, unidentified
MKITTVGIDLAKDVFQVHGVDAHGKAVLRKQLKRKDVVSFFANLEPCLIGMEACGSSHYWARKLAALGHTVRLMAPQFVKPYVKTNKSDRNDAEAICEAVARPNMRFVPVKTGEQQAVLSVHRARQGFVKARTAQANQIRGLLAEFGIVIAKGMGHIAKRLPEILEDGENGVPGMMRELLQRLGENLKEMDKQVGELERQIKLWHRENEQSRKLEAIAGIGPITASAYVASVGDAKSFKNARQVAAWLGMVPRHEGSGGKVKPGRISKRGDVYLRTLLIHGARSVIRQFERKPDQAEGWLKELLARRHKNIAAVALAAKNARIAWALLAHERSYQGDYVASRAAA

SEQ ID NO: 228268 - protein, 404 aa, unidentified
MLNAVGVDVSKGKSTISVLQPGGVIVRKPFDVTHSKDDLKELARYVKSLDGETKVVMECTGRYHEPLLRSFLASDIFVCAVNPHLIKNYGNNSLRKVKSDPADSRKIARYALDNWAELRQYSTMDTTREQLKTLNAQMDFFTKQKAAQKTNLISILDMTYPGLNSLFSSPARSDGSEKWIDYAASFWHVDCVRSLSLKTFTERYQAFCVRHSYNFRPDKAQQIYDAAQELIACFPKEKAYKDMVQLCIRQLKTTIATVEQLRQEMNDLAKQLPEYDTVMSMAGVGKTLGPQLIAEIGDISRFTHREALTAYAGVDPGVDESGQRKYKSNGTSKVGPPRLRKALFLVISSLLQTQPEDDKVYQFVNKKRAEGKPYHVYMTAGANKFLRIYYGKVKECLALQSETI

SEQ ID NO: 228269 - protein, 340 aa, unidentified
MTVIIGIDPHKSSHTAVAIGCDEQTLGQIKVRATCNQTARLLSWAEPLGPRTWAIESAGGLGYLLAQQLVGAGEHVLDVPATLASRVRVLGSGKSNKNDPNDALSVAIAALRAPALRTVEVADHGEVLRLLAKRNHDIGRLRNKLVTRLHAALANLSPGGITKELNASDADRLLGNLDPVTPVEHARYDLALELLDDVRRLDVQLKASHKRIKVAVQASGTTLTDLYGVGPILACELIGYTGDVRRFTSRDQFASYAGVAPFELSSGGRTVHRLSRRGNRQLNHAIHMVAICQIRQTNSKGRVYFEKKVAEGKTKREALRSLKRHVANAVYRQLLVDATK

SEQ ID NO: 228270 - protein, 322 aa, unidentified
MIFVGIDISKLTFDVAVLIDGKYMSRQFENKQSGFLKLSQWIKSFKKPAYFCLEATGIYGLALAKHLYQTNQKVIVANPLQTHAFAKMEMARNKTDKADAMSIARYCQYLFNRGEIDKGLFIPRSAAFERVQFLVTRLDQLSKMKSQENNRSGVSLDKAAARSIQSVLTFIDKQIVVIKKEIAMIIKQDEQLTVQLKLLVSINGIGDKTAWALLAYIGDISLFENSKQISSYAGLNPSIDQSGTSLNRSSLSKTGSTRLRKSLYMPAMVAVRYNPLMLAFYNKLLTKGKPKKVALIAVMRKLLVLAFGVLKSGKPFDVNYQL

SEQ ID NO: 228271 - protein, 411 aa, unidentified
MDRIYDKCCGIDVHKKLIVACFKKGNRQEVREFGATTRELLILADWLKDSGCEMTAMESTASYWKPLYNILESSGLKAMVVNAHHMKAVPGRKTDVKDAEWIADLLQHGLLRPSYIPDKDQRELRELVRYRKSLVGERTSELNRLQKMLEGANIKLSGTVSDINGKSARSILEYLLTGESIDGAKYDEMYEKKIIAHNLKATKEQIVDDLNGIMSPLQRRMMKELLNHLDELNIHIKNLDDEIDHFMKPEEKKASAAIQDVTGIGNTSAQAIISVIGTDMERFPTDSHISSWAGLCPGDNESAKKRKSGKTRKGNALLRTTLITCAHAAVKNKKSYFYAQFMRISSHRGKKRAYVAVAHSMLIAIYHILKDGVVFKDLGAEYYNQFNKERKINAYLKKLKALSWEAPVVAA

SEQ ID NO: 228272 - protein, 349 aa, unidentified
MAVAIVDSARLVVGGVDTHRDSNVAAVVDMNGGLLGVESFPTTAQGHRSLSLWMSGFGMIERVGIEGTGAYGAGIARYFLAGDVVVIEVDRPNRQKRRRHGKSDQLDAIEAARGALSGRCQGRAKSGDAYAEALRALLVAKRSARSTRIRTIVQLRHLMFTAPDELRSKLGALSATQLVNEAAKLRPRPGGDVALQGTKTAAVILARRVHALDAELAVIDEQIRPLVKAVAPELLNIFGVGVDTAAVLLVTAGDNPERITSEGAWAMLCGIAPIPATSGQIDNRFRLNSGGDRHANNAIWRIVITRLGQHDPRTVAYMNRRLAEGKSKRSIIRSLKRYVARETFRALPR

SEQ ID NO: 228273 - protein, 464 aa, unidentified
MARRRIGRVRGKKAGSGEQDWSLNLKVVHPNAAGIDIGNEAHYVAVPPDRDAEPVQRYACFTEDLRRMAEWLKSCGIETVAMQSTGVYWLPAYEILVASGMRVFLVNARHTKNLPGRKTDVQECQWLLQLHTFGMLNDSFRPPEDICVLRAYWRQRAEHVAAASACVQRMQKALTEMNVQLANVISDISGTTGMAIIQAILDGERDRYKLADLAHPRIQASQEEIARSLEGNWRKELLFLLRQERNLYEIYQRQMKECDQELAAHLKTLDDRAEPGCPLPPPPANKRPGGNAPSHFDLRSELYRISGTDLTRIDGINVMTAQTILAEVGVDMSRFPTEAHFASFLGLCPDNQITGGKVFRHRTRHVENRAATALRMAATSLWRSKTYLGAKFRHWRMRLGAPKAITAMAHMLARLVYRMLKYGEAYVDKGMNYYEEKYRENEIRRIQKKAKELGLVAVLTPAVP

SEQ ID NO: 228274 - protein, 351 aa, unidentified
MNTQITAQPKLYIGIDIHKRSWKIQCATDLFSGKSFTMPPKPEVLKIYIEKYFSDYEVTTAYEAGCCGYYAHRSFESYGWRSLVVNPADIHRKGKERFTKTDKIDAQLIARELKDGRLDGIHVPEVEREQLRSLFRRRNDLVKDFRRIKSIIKMQLLYFGVSVPEEFDNDHWSHNFRHWLDSVVFNHSTARETLDSRMRSFRFIDKELRDVSTKIRSYCRKHYKKDYYLLRSIPGIGGIVASGIICELGDLRRFNSIKHLAGYVGLAPGVHQSGDNQKHTGITMRAHRLMRSYFIEASWQAIRTDPIMQAYYRKHVGKNVKSVIVKVARKLLSRTLAVIKTEIPYAIGVVE

SEQ ID NO: 228275 - protein, 369 aa, unidentified
MNASVVYVGLDVHKDSIVIAVAREGREPAETWKTIPHDGVRLRKALKSLLREGERLRVCYEAGPTGFGLCRSLRKAEIDCVVVAPSLVPGKPGDHVKTDRRDARKLTHFLRSGDLTEVHVPEEAVEAIRDLERARDDAKRTERVARHQLSKFLLRQGRVWEQGTWTQKHRDWIRTQQFAYPAQQRVLEDYLKTVEDLAERVARLTGQLEELVQDTVLAPLVRALQAFRGISAVSAATIAAEVSDLRRFASAGQFMSYVGLVPSEDSTGQRRRQGRITRCGNGHLRRILVETAWHYRHVPRLSQELRRRSQGVADGVRRLAWEAQQRLHKRLYHLLHAGKSPQKAIIAVARELAGFIWAVGQEETLLAPA

SEQ ID NO: 228276 - protein, 369 aa, unidentified
MADRITYVGLDVHKESIVVAVAEGGLRGEVREYGRIANTTAALDRLMGKLGGAGVRLRFCYEAGPCGYGIQRHLSAHGQECVVVAPSLIPKRAGDRVKTDRRDAASLARLHRAGELTAVWVPDTGHEAMRDLVRARLDAVHALRRARQQLSGFLLRQGCHYGRPAWTKLHRRWLAGLKFEQAVHHLVLEDYIAAVEAAEARRDRLTAQIEAMLPDWTLAPVVAALQTMRGMALVNAATLIAELGDLSRFANPRQLMAYLGLVPSEHSSGASIKRGGLTKAGNSAARRLLIEAAWCYRFPARVSRELLLRQEEQPKPIREIAWKAQLRLCARYRKLARTGKPANVVTAAIARELAGFIWAIARRVPPAAG

SEQ ID NO: 228277 - protein, 349 aa, unidentified
MAMTIVEAPPGITGGVDTHLDKHVAAALDPLGRLVGTESFDADAAGYKALLVWLEDFGEVTKVGVEGTGSYGVGLSRFLRRKGIEVVEVNRPNRQSRRNQGKTDSLDAVEAARAAISGRASGVGKTKDGPVEAIRVLVVAKRSARQARVKAIVQMRHLGFTAPDQLHSRLKGLSVTALVAEGAKLRATKSADTVTAATKASLSSLAHRIQGLDLEIAELDEKIESLLLATAPDLMARFGVGPDTAASLLVAAGDNPERLHSEAAWAHLCGVSPVPADSGKNAGHLRRHTGGDRQANSALWRIAMVRIAHDPETTHYFERRVKDGRTKRDVIRILQRYIAREVYRYLPRG

SEQ ID NO: 228278 - protein, 339 aa, unidentified
MYPFYLGIDLHLKRTYMVLMDAKGEIINKGRISNQEITKYLQEKVPQETYAVLEATRNWPFMYDLLNEHVQRVDLVHAKGVRAIANAAVKTDQIDASVLAHLARMNYIPKAYAASKEMRDLRQLLRHREWMVNQRSKAKNRIHAVLAAYNLISPATDLFGVAGREYLHEVMEEDLRPSARQVVEDHLAMIDHLTERIHAIEKNISLNERQNHIVNILKSMPGVGRLIALILLAEIGDISRFHSPKALCSWAGLTPKVHSSDAVVQHGHITKEGSRYLRTAMVQAATTACRVSPKWYRVHEHMALRCGRRAARVAVARRLLTVIYYMWKKDQPYQENYGQ

SEQ ID NO: 228279 - protein, 478 aa, unidentified
MKSKPEEKNKRATQHHWHEMNRKQRRETIRKMQSEDLSLEVVHPDAAGIDIGNESHYVAVPPDRDSQPVQRFGCTTAELRAMADWLKRCRIRTVAMQSTGVYWVAVYDILEQAGLEVYLVNARDTKNLPGRKSDVQESQWLMKLHTYGLLRNSFRPSQEIRTMRTYWRQRNDLVQSASRHILRIQKALTQMNLQLANVLSDISGVTGQAIIKAILAGERDPHKLAEFRDPRVKANEEEIARSLEGNWQDDLLFVLKQEQQAYEFCQKQIAACDQHLEQYLRQREDRSQGAPLPEEKRKGRLKKKRANKPRFDLREGLFRMTGTDLTRIDGIDVNTAMTVISEAGYDMSKWKTENHFVSWLRLCPDNRISGGKVIGKGRLPTNNPVSIALKMAATTLRQSKTYLGAQFRRLRTRLGAPIAIKAMAAKLARLVYRILRYGMKYVDQGAAFYELKHRELQVHQLKWKAAQLGYKVTLLPAA

SEQ ID NO: 228280 - protein, 394 aa, unidentified
MQTTSQLYIGIDVHKKSWSVNLRTDLFDHKTFSMRADSDELLRYVDKHFPGYQVKCCYEASCCGYSIWRELSKAGWQVMVVNVPDVPVINKQQQHKSDKVDCRHLCKQLQVGQLRGIYIPDEKQEQLRSLFRQRNNLTKALRRIKCHIKGELMYYGIKLPEHYDNNNWSKGMLGWMEALEWKYETGRASLQSKLRHLHFVYYDWLKVSNELRSYARREYKTDYYLLRTVPGIGPLTAIGILAELGDIRRFRKLDQLCSYIGLIPSIYSSGEKLTTRGMTPRSKYLLRSYLIEAAWTALRTDMALQEYYRRHIGKPSNKIIVKVARKLVSRIWHIIKNTVSYQCEVKNTKDLTMLYSTQKQKGDCKTSDAAIQSRPENLLQSAPVKHAAPFLIKP

SEQ ID NO: 228281 - protein, 314 aa, unidentified
MIISPRCVGIDVSKRTLDIFDDAVGVPERIANAPQAITEQVARWQCADVFVVFEATGVYDRALAEALRQAGIRFARINPARARDFARADGRRAKTDAIDARMLAIFARTMVPAADRPPEPARNVLASLAKRRDQLVHMRAQEKNRRSEATDRTMIEDIVSHLDFLTDQIKAIEAKIKSAIEAEPEISEQARLLRSAPGIGPVACMQLLAQMPELGCLGPKQVAALAGLAPFNVDSGSYRGKRAIGGGRKRVRDALYMAALNAVRRDRTLKAFYQKLRNVGKPAKLALIAVARKLLTILNAMIRDQKSYLRPQSS

SEQ ID NO: 228282 - protein, 387 aa, unidentified
MPQPNDLSRSLVALDQNSTIIAVVELSHSSWLVGGVVPGIERQPRKKLEPHPERLLALLHRWRDEAVKAGRTITRIALAFEAGRDGFWLARWLETRGVEAHVIHASSLAVSREHRRAKTDRLDTELLKRGFLGWLRGERGHCSMARVPTIAEEDAKRPNRERDCLVGERTRIVNRIKSTLARLGIRNFKPTLRKAAERLATVYTPEGMPLPPNTVAELQRDMARLGVVISQIRQIEEARQKRLEQQHETGPHAMVRLLARIVGVGVETADMLVHEVLSRPMRDRRAVARYAGLTGSPDESGAQRREQGLARAGNARVRRGMIQLAWRFLMFQKESALALWYRARTADSRRGTRKTMIVALARKLIIALWRFVTTGEPLEGVVLRPVT

SEQ ID NO: 228283 - protein, 341 aa, unidentified
MNAITIGLDIAKSVFQVHGEDHTGKVVIQKRLRRHQVEAFFSKQLRCLIGIEACGTAHHWARTLVALGHDVRLIPAGYVKPFVRRNKNDARDAAAICTALSRPDMRFVTIKSVDQQASRGLERSRDLLVKQHTQLMNCTRSLLAELGVIAAVGRRGFAELIARVKHNEAAIPPVLLAALLPLIQQIEGLHTAIAALEDRIIAAARDNPVMRRLAGIPGIGGLTAHAIVTAIGDGRQFGSARDFAAWCGLTPQQHSSANKRHDKGISRQGDIRLRKLLALGASTIMRNARSRSDRATLWQRGILARRPVKVAVLAQAAKNARIAWALLVSGETYRNTTATTA

SEQ ID NO: 228284 - protein, 423 aa, unidentified
MDVLHERVAGLDVHQKTIVACVRRMAEGKVERECRTFETTTAGLLVLLAWLQECRCTHVGMEATGVYWKPVWNILSDGDFELIVANAAHIKNVPGRKTDLNDAMWIADLVACGLIRASFVPDEGLQELRSLMRTRKQFSREQTRHVQRIQKTLEEANIKLSAVISDIMGASGRRIVQAMIAGVRDPGQLVQLADRRLKASRTELYEALRGRLTEHHGFLLRVHLEQHDALAATIRQIDRQVEVALTRLDQERATGRITYRDLIALLCTIPGVSTLAAITILAEIGRDMSRFHTAGHLLAWAGLCPGQNESAGKRKATRLRKGAPWLKTMLVQCAWAAKRKKDSYYRAQFYQISARRGPQKAICAVAASLLTAIYHMLKDGTEHQDLGANRFDRRPVEAKVQSLVARLAKLGYQVQLQPLAEAA

SEQ ID NO: 228285 - protein, 343 aa, unidentified
MKKLSLNQTMYAYIIGIDVSKESLDVCMILTDSGHYQSKVFTNTKEGYQNMKRWMKMLGNDVKSESLFCMEHTGIYTRNLVKYLLSRGCKVWLESSLHIKRSMGLVRGKSDKIDAERIAMFAYTHQKDAKLISLTSTTLDRLQYLMRTRVRLMKSRESQEKAIKEMEHFDKKAGKEMRSMCKQALTGLKKSIEKVEAKMMELVSIDKEVRALYELITSVKSVGKVLAIDLIVYTQGFTRMLDGRKLACYCGVAPFEYQSGTSVFSPAGTSKFANKVLKSHLHMASMNAIRCHDELRNYYLRKVEEGKGKMSAINAVRNKLLHRVVAVVKRGTPYVEKLDKKEA

SEQ ID NO: 228286 - protein, 443 aa, unidentified
MEVMHRRVAGLDVHKETVVACVRVTAGRRPTRECRTFTTTTQGLLELLGWLTASRVTQVAMEATGVYWTPVWKILSEGDFTLIVANAAHIKQVPGRKTDINDAMWIADLLACGLLKASFVPPEEIHELRSLMRTRKQLVREQTRHVQRIEKTLEEANINPGFNPGDLMGVSGRRMIEAMIPTGQARGLKAHGERDPHRLAALAERSVKASPRALHDALHGRLREHHRFLLQLHLRQWDALEAAIRQIDEQVADQIERVDEEAADGQPPFRELIARLCAIPGVSVLSATAILAEIGRDMSRFPTAGHLIAWAGLCPGQNESPTGQARGLKAHGKRKSSRLRKGAPWLKTMLVQCAWAAKRAKHSYYSAQFHRLCGRRGPQKAICAVAASILTAIYHMVRSGASHRDLGADYFDRRTPQARAKRLVAQLAKLGFAAQLQPLAEAA

SEQ ID NO: 228287 - protein, 350 aa, unidentified
MEEVSVIGIDLAKNVFVLCAQTASGEIAWRKRLKRRAFKQFMAATAPRCLVAFEACGGAHYWGRFLTALGFEIKMMAPRAVKAYRQGPHKNDWRDAEAVAEAGSRHPVRAVRVKSEAAQAVQVLVRLRALQIRQLVQTGNHLRGILNEFGIVLPKGHKRLREAIARLRQEDPASAALPASVRRTADRLCLQLAEQARRVTEATSELEAAIKDEEDCRQLRTVPGIGPINAAALSVALEAPQAFRAFAASLRLVPLVPRQHQSADKQIMLGIGPLSANETRRHLVLAGQSLITMVRRFQQPPADKFLLWVYRLDRRKHRNVAAVAVAAKLARIAWALMAKDQIYQPRLATA

SEQ ID NO: 228288 - protein, 339 aa, unidentified
MTIVGGLDVHRRQITFDYLDTDTGEVRRGRVSPATREGLREWLARFEDRKAAFAVEGCTGWRFVVEELERAGIEAHMAEPADTAALRGKKRRAKTDRTDARHLRELLCEHRLPEAWVPPAHVAEARTKARLYRSLMHERDVWQLRTHAVLFHQGVPALPSLLTVAGRAALDKADVSASGRQLIGVALEVIDHLEGLAGPLRAELAAFGRRQPGCRALTAHYGIGPLLAVVIWSELGDTRRFSSSRQAVRHTGLDITVHSSDAKRARGRLSRQGPPALRWALYEAAICAARPGSPDHDYYLATKARIGGGRAALSVARKLAARCHHSLRELGDQAWADVT

SEQ ID NO: 228289 - protein, 345 aa, unidentified
MSTTIGVDVAKSVFEVAVSNRPGRIVKRHRLSRGQFARFLATRAPATVVMEACGMAHFWGRQAVASGHRVVLLPPHAVRPYVPRNKTDRADATALLEAARNATIHPVPVKSVTQQALTGLHRLRSTWLATRTARINIVRDLLREFGVTIPVGARQVVPRIAALLAGPDDTVPAVLHPALAAVISELRELDVRLRTVEQQLTAIAAAMPAVERLRTIPGIGLLTATGLVAFVGDARRFPTARHFASYLGLTPREHSSGLRRRLGAISKRGDTYLRMLLIHGARAVLCHAKKAITPARLQRWALHLERLRGHNKAAVALANKLARIAWAVWTSGTEFRVAHLTPTPA

SEQ ID NO: 228290 - protein, 446 aa, unidentified
MAQRTRMKLDIANPNAAGIDVGSASHFVAVPSDRDDEAVREFTSFTEDLERLADWLVACGIDTVAMESTGVYWIPLFELLESRGLTVYLVNARHVKNVSGRKSDVLDCQWLQQLMSYGLLSGAFRPKDEICVLRSIMRQRTMLLSYQGQHIQHMQKALSQMNIQLGNVISDVVGETGQRILRAIIAGERDPLKLAELKHGRIQASTEQIAMALHGNWREEHLFALTQAVELFDAYAQALQRCDVRLESMLGALSRTKDEPGPTKRRRISKVKNAPKFDVRTYLFRICGVDLTAIDGIDTTTALKVIAEVGPDLSRFKSAKHFASWLGLCPGTKISGGKLLSGATKRTANRVAQALKMAAISLRASQSALGAYFRRMCARLDKGKAVTAVAHKLARLIYAMLTKGATYVDQGQEYYEERYRKRVLFHLKRKAAALGLELVPVQSQQT

SEQ ID NO: 228291 - protein, 350 aa, unidentified
MSEHITIGMDLGDRHHIIVVFDNKGNEIAIKRITNTKLALRRYFQRYTGATVAIEAGTHSPWISAELEQLGLVVYVGNPRKLRLIWDSHDKSDEKDARILAMVCRVEPRLLWPVQHRNAQVYNDLEIIKARDMLVQSRTKLINHVRCVVKSHGERLPSCSAASFAKRAGGLLPAQLSQALSSLIDTIADMSQRILQLERKIEQLSKQRYPEAQRLRQVAGVGPVTAMAYVLTIEDPSRFRKSRMVGAYLGLTPRRDQSGASDKQLRISKAGNRYLRKLLVNCAHYILGRFGPDCHLRRFGLAIAARGGKNAKKRAAVAVARKLAVLLHRLWASQHCYEPFYAVGSNRKAA

SEQ ID NO: 228292 - protein, 348 aa, unidentified
MKPIYIGVDFHARQQTICYLKTETGELVFCELKHEDKEQVRAFYAEFPSPVIVGLEASGYSPWFERLLEELGCEVWLGHATEIRRRARWRQKNDRRDAELILDLMLHDEFPRLHRQTVQSREVMRMLRYRQKLIRIRTTSKNSLQALALQAGLARRSRLFTHAGKQELTAAPMSPVMQWQRDHWWQLLQPLNEQLQETMAWLKDQSQDDVCVARLRTHPGIGLLTALCLVHSLQPVSRFRNTRTVVAYGGFDPMVRSSAERAIYLGISKAGSRILRHLVVEAANLAVRRDEELKRFYQRLAERRGRPKAKVATARKLLIRAYIMLRDEIDYAEFRRRAVAARLAREGT

SEQ ID NO: 228293 - protein, 400 aa, unidentified
MISVGIDVSKGKSTVCILKPYGEIVSKPFNITHTQKDLSELSSMLFRLNDEVKIVMEATGIYHLPVLTYLQEKGFFVSVINPYLMKSYRNESLRKAKTDKIDSRIIANYGIDHWFKMKEFQTSGEIYEELKLLGQQYRHYMKLHLLSLAELTHLLDLTMPGIKNLLASWNETNRKDKRSDFVERFWHYDVITSMSEQEFTEEYILWAKEKKYVPSQEKAKVIYTLAQESIPTLPSETSSIKMLVTEAVRVLKEVDATLGLILSRMQEIAKTLPEYPVVREMGGVGNTLAPKLIAEIGDVRRFRNGKALVAFAGIDPPPYESGQFVGCNRKISKRGSASLRKVGYETMRSLKMRSRPEDPVYRYVVKKESEGKSKKSAKIAGLNKFLRIYYARVTELYKNI

SEQ ID NO: 228294 - protein, 349 aa, unidentified
MGEVSTIGLDIAKNLFQIHGVDADGTVVIRKRIGRARVLEFFAELPPCRVGMEACATAHQWARELRRLGHDTRLMPPTYVKAYVKRGKNDAADAAAICEAVTRPSMRFVPIKDVEQQSVLMLHRARDLLIRQRTQLINALRAHLAELGLVAAKGREGLHQLVAVVTECGSERLPSNARFACQAIVTQLHAVQIEIGGLDKRITQTHRANADSKRLDTIPGFGVILSTAVAATMADPKAFRTGRDFAAWIGLVPRQNSTGGKERLGSISKQGDRYLRRLLVVGATSVINCARARPYKYPWVIELLGRRPTKVVAVALANKMARIAWAVLAKGKPYRAPTRSSNAIVPAAA

SEQ ID NO: 228295 - protein, 375 aa, unidentified
MYYYVGCDLHKHSTWFYVADSSGKRIVSKSISNNPDNLHDFFKEIPKPFILAVETTYNWYFFVDIAEKYAETVYLANSYELKAFAKRNKKTDKIDARLIADVLRKGFLPDVFIPDKETRMTRELLRYRINIVNDRSRNIFRLKGLLDKLGENFAGNFATYKRLKEIPLESLIKNYRDIATGYIERIGFLLEKEHSSDKLIEKAAIKDEDIRNLMTIPSLMYFSSTLIKSEIADIERFASFNRLCAYAGLSPRVHQSGDKCIHGPLNKNRRKYLRWILLEIVYHYVKADSARMQKFEHLKRRKCHNTAKVVMARDLLKVIYHILKEKRPYYIKESKSGLRRPARSKGSEVPRASAVASLGLISGGSPSDIIMQASK

SEQ ID NO: 228296 - protein, 414 aa, unidentified
MDVLYPRCAGLDVHKDTVVAAVRSAANGPANTEVRTFDTTTPGLLGLSGWLAECGCTHVAMEATGVYWKPVWHILSDGDVTLILANAAHVKNVPGRKTDVADAAWLADLLAHGLVRASFVPEAPTQAMRALLRTRKQLVREQASHAQRIQKTLEDANLKLASVLTQVMGKSGRAIIGALIAGERDPDALLRLVQRGVKAPPERLRAALTGRVTEHHRFLLRLHLRQIDALEAAIAEIDQEVDRDLDPFRQAVRLLRTIPGLSDLTAQVIVSEIGLDMSRFPTAGHLISWAGLCPRNDESAGKRRSTRLRKGAPWLKTTLVQCAWAGTRKKGSYLQAQFQRLRHRRGPKKAVCAVAASILTAAYHMLRDGTFYQDLGPDHLRRATPEAQACRLARQITKLGFTCTLAPADTRVSV

SEQ ID NO: 228297 - protein, 310 aa, unidentified
MTQPLVYLGLDVAKATLAGNFAGQSFTLQNKPPDHAVLCARITAHGGPVQVICEATGGYERPVVDALREAGLTVSVLHPTRARQLARGLGYLAKNDPLDAAALAKIGALLAPAPTLAPPEGVATLAAMVGRRDQLAELIRREKHHREMTTLAVLLRDLDQNLAALQKRLEKNETLIAKHLETHPTLAQKAKRLQEAPGIGFVGAVTLLGLLPELGTGSQARISSLAGLAPRDHDSGTFHGARRVHGGRPKVRRILYLCALSAVRHHPHLKTFYTRLCTAGKAPKVALTAAARKLLTYLHAALKNPNFKLA

SEQ ID NO: 228298 - protein, 338 aa, unidentified
MKVYVGMDLHATNTYVGMVDEENTVLYKQRFRNELPLILAALDPFKEDIQGVVVESTFNWYWLVDGLMAQGYRVHLANVSAIKQYEGLKEIDDKRSAFWLANLLRLGILPTGYIYPKEERPTRDLLRKRLQLVRHRTSHVLSVKNILARNLGLRMKSEDVKRITDPEVKRFFPGREMQTMVLASVGLIRHLEDQISTIEAMITKKLKVRKEFTKLMTVPGIGKILALTIMLEVGDIHRFPTVGDYSSYCRCVKSIRTSAGKVIGYGNRKNGNKYLSWAYIEAAHAARRFHETVRSFYEKKMAKTNRIVAIKALSHKLTRASYYVLRDQVDYDPARLFR

SEQ ID NO: 228299 - protein, 415 aa, unidentified
MCKVIMIGCDLHDATTVLKVADGPDATVRKGFATSNRSAMIEWVKDFASQRGAVRIVFAYEASGQGFGLYDDLTDAGIECHVLAPTHLPHTTHSRKNKTDDKDALMILDEVRAHVLAGRTLPDVWVPNHQTRDDREIVRLRLEVATQRTRLKNQIRNLAKRSRLAFPDDFTSSGDWSKRSVAWLREVATGKTGALREGVRTALASLVELYQAMSVRIQALDQAIKRLSRTERYAQSYRKLKLLSGVGTLTAMVFLTELGDLARFANRRQLAAYLGLAPSAFESGERDDRKGHITKQGPPRVRHVLCQAAWAALRVSPEWKAKYDRIRRGSKSRSRIAIVAIMRQLGVEMWQTARSPELDAMLDERDALASQKTKKTTSARAPQKGAAPSTPPSPRPRRGEAEATATRKGLARHPE

SEQ ID NO: 228300 - protein, 416 aa, unidentified
MQVVYARCCGLDVHQKSVVACVLLTAADGQVRREVRTFGTMTADLLALNDWLNALAVEQGALESTGVYWRPVFNLLEADHELILVNAQHLKTVPGHKTDIKDSEWLADLLRHGLLKASFIPPQPIRELRELTRYRKTLVQERAQEVNRLHTVLESANLKLAVVATDILGTSGREMLAAILAGEAEPGVLAELARGRLRAKLPQLRAALDGRVQAQQRVLIRHVLAHVDFLEGQLAQLTSEIEAACAPFAQAVALLGTIPGVAETAATAIVAEIGTDMRRFPSAKHLASWAGLCPGNRQSGGKRLSGRTTAGNVWLKAVLGEVAWSITHTTGTYLAALYHRLARRRGKQKAIVAVAHSVLVSIYHMLRTHQPYHELGPDHFDRLDTTRIQRRYVHRRYVHRLEQLGYAVTLTPAGAA

SEQ ID NO: 228301 - protein, 429 aa, unidentified
MSNTDIQTTNTEEFAALIGIDWASEKNDVWVYDTTTGKEKHRVIKQTAEDLTEWVADLRVQFDGRQIAISLEQSRGGLIYALLGYEFITLYPINPSSLCKYREAFSPSRAKDDPTDAELLMDLLRKHRDQFKPWRPDDEETRTLALLNEERRKNIQMRLKIVQRLHATLKSYFPQALELLCNNLTSELACAFILKWPTLEALKRVKPETVRAFYYRHMYRRADLVESNIEKIAAAVPLTEDAAILTASTLAAQTLARQIRAINVSLDEYDQVIKRRFKDHPDSFIFKSFPGAGQNLAPRLLTAFGADRDRYTSAVDMQTYSGIAPVVERSGKQEWIHWRWACPRFIRQSFHEFARCSIGYSLWARAYFDQQKERGASSHAAFRALAFKWQRILFRCWQDRVAYDEDRYIEALNRNGSPLCTRIEALQNA

SEQ ID NO: 228302 - protein, 355 aa, unidentified
MTIVAHSRPFVVGVDTHAKTHTYAVIDPMGQLLGCEQFPTTAKGIARAIAWVGRRTRGQAEALWVIEGVATYGARLAHAAAEAGYEVAEAPRMNAKIRHGVGKSDAMDAQAIATAALGLDEARLRRPRADQGVRQALRVLVASRDQMTQEKTMNVNALTALLRVHDLGIDARKPLTAAQIGEASRWRGRDESLAQAVARDEAVRLARRVLTLEEALTANHARMAELITDSPAAPLLEQKGIGAYTAAVVITAWSHPGRIRDEAAFASLAGVNPIPASSGNTIRHRLNRGGDRRLNKALHIITVTRMTHDPNTKAYVEKRLAEGRTRREIRRCLKRYIARYLYRTLNALHDTPATT

SEQ ID NO: 228303 - protein, 407 aa, unidentified
MEVLYPRCAGLDLGKDALVACVRIHGREVQQECRTFGMTTRELLALSEWLTGHEVTHVAMEATGTYWKAVWHLLETSFSLMLANAGHIKGVPGRKSDVNDAMWIADLLAHGLIRGSFVPPEPIQDVRDLTRTRKQLVREIARHTQRIQKTLDIANLKITGLISDVLGVTGRSILRALIAGETDPVRLADLARGTLKAKRAALIDALTGRVTAHQCRLLKLHLHLIEQLEAAVAEIDQQLGETLAPFREAVTRLDGVPGINTIAAQAILGEIGLDMTRFPTHEALVSWACLCRRLDESAGTRRSTRTRKGGCWLKTVLVQCAWAAVRTKDSYLRAQFLRLRARRGPKKAIVAVAASILTAVYYMLRDGVEYRDLGVRYFDTRDQSQITKRLVQRLERLGYRVELQVAA

SEQ ID NO: 228304 - protein, 362 aa, unidentified
MNQEETSRRLYTTQHPFYCGIDLHARMMSVCILDQSGEILVHRTMKTDPETFLKAIAPYRQGMVVAVECLCTWDWLADLCADAGIPVVLGHALSMKAIHGGKAKHDQIDSHQIAALRRGGMLPQASVSPATMRATRDVLRRRRPLAHKRAALLAHVQNTHSPYHLPAMGTKIASKANREGVAERCADAAVQKSIAVDLALITSDDALRRDGELPIVTTAKHHDAHTLSLLHTVPGIGTMLRLVLLDAIHDVHRVPRVQDVVSSCRLVQCARASAGTRYGTSGATLGKAHRTWAFSAAAVLFLRDHPAAQKYLARVEKKHDTGHALTSLAQTLARAVSDLRKRPGACETETFFQRYTIREGSG

SEQ ID NO: 228305 - protein, 404 aa, unidentified
MFYCGIDIAKHQHEICVLDQDGQTVLQMHFRNTQKGLEKLVRALDTLEIEADIRFCMEATGHYWLPLFSQLEQLGYQLHVINPIQSDALRNLYIRKTKTDAKDALLLADMMRLGYTTDTKLAEETTLKLQTLSRSRLDFVRQVGSLKNQVIGVLDRIFPEYATCFSNVFIRTSKQLLKRYPEPEELAEVDLSELSQFLNEHSRGRLGQKRAEQIKTLAKGTFGIRLAMDAFTLQLRLLVEQIEFIEEQISIIEEAIDQVMEELRPQGAEYRHVLETIPGIGPVLAAAIIGEIGDINRFPNAKALVAYAGLDASVKSSGQFEGTKNRISKRGSPVLRHSLWMAAVSARRFNQELKVFYELKRSQGKHSNVATGAVARRLTHLVYSIWKNNRPFEPEHQWSPPGKN

SEQ ID NO: 228306 - protein, 321 aa, unidentified
MTAVLGIDVAKNKFDVALLRNGKYKNRSFENKPSGFESLATWLKQHDVLNFHACLEATGSYGDALARFLFDAGHMVSVVNPARIKAFGESELLRTKNDKTDAKLIARFCDTMKPLAWQPDPPEIEHLRMLGRRRDALISMRTQEVNRLGVAAASVNGSIQKVIAFLDEEIEQISKLIREHINNHPGLKKKRDLLKTIPGVGDVTIEAILSEANAFEGFDTVEKVVAYMGLSPKEKTSGTSVKGKPYLCKIGSARLRKILYMPSLSAIQHNPLINALYNRLKAKSKNGMIIACACMKKLVHIIYGVIKNGKPFDPAFNVKTA

SEQ ID NO: 228307 - protein, 351 aa, unidentified
MKEYAKESAGTEQFAGLDVSLKDVSICVSDGGGQVLWRGDVINDAAAVVAALRRHAPGLVRAVLETGSCGVHLYRGLEAASVPIVCICARHAKGVLKCKINKSDANDAEGLAQLARTGWYREVYVKSADAHVIRAHLLARQQINKARRNFENQIRALLRVFGLKVGQVARGRFEARVTGLLERVPALRLPIEQLLASRRALEASQAALEGEAKRLAAADERCRTLQTMPGVGPLTALAFVSAMDEPSRFAKSSSVGAYLGLTPRSYQSGEVAWTGRISKTGDALSRALLYEAANVLMVRVKAPLPLKIWALGLAARIGGKKARVALARKMAVILHRMLSNGTAYRWNPEAA

SEQ ID NO: 228308 - protein, 475 aa, unidentified
MNIKGSKKKNQVLSVNIFEQQGIIVKADAIKAGLKASTWHELETRGKFDKNDKLSFVSDDMLILGCDIGSETHYVRAIDTRGRELSKSAFGFSNTTEGFESMLDWSTKLAAANDKKQIVLGLEPTGHYWFCLTTWLVAKGISVVQVNPYAVKQTKEVEDNSQLKDDKKDPKLIANLVKDGNFGMPYLPEKLYADIRRLSMFRDQLNEDRIRNLNRLHREMKIYFPEYKDAFGKIDGAFSLELLKEAPFPDELAALGTEGMKQIWHEAKLRGRGYANASSILEYARKSVGIRDGADASRQAVKWFVSRIIELDGQLSDIENKLNQRCMEIPHAKNILAISGIGENILSGILAEMGDISRFDDVKEIQKLSGLGLVAGSSGKHTGETKISHRGRKRLRYWLFQAAKSAVAHSEEFKELHVYYTTRKQNPLKKMQSLIVIACKILRVIFTILTKGTTYDPKKLLGDIVRPNQAVPQAA

SEQ ID NO: 228309 - protein, 418 aa, unidentified
MRVEEKIQRMKPETLICGIDIGKTNCCARFCDFRGMEVYKKVWFDRTKNLDAIGCQITAAMYKENKTDIVVVFEPTGHYWLNVDKYFKDHGIETVLMPTKTVKDEKDSYDGQPIKSDPRDALLIARLATQGKYVKPIERNDVYQDIYSGYRLYNDKQTELNRIGNKIHVWNDKYFPELEHVYKIDSVAIKAIYENQLLPEEIANMSDEEFTVVMTENNHYAKKISIIKVKELASKTSGIKPDKYTKKEIKDLYKRYQEILTEIEELKKELIELASQIDYVEKAVEICGIGYMSMVGIIAETGDLNNYEHAKQVLKMSGLSLKENSSGQKKGKKSISKRGRSILRRNLKQIGIALVGKNSFFMQLHNYYTTQRGNCLTKLISINAIIRKFVYILMAIVKNKESFNEEKARKESCILSSI

SEQ ID NO: 228310 - protein, 341 aa, unidentified
MLNPYSRRSGAANASSHLQGRVSHVSQHTIVTAGVDVSKYKLDVAISDRSSVVCFEYSLSGLERLTKFLQKQNPQLVCLEATGGYERSLVHHLQTQGFPVSVVNPRQIRDFARGLNQLAKTDAIDARIIARFAERCEPRITQPVPESRRKLVALVSRRRQVQEMLVQEQNRLGTIADKEIQKLIRRMVREYQKQRREIDRRIAALIKQDPQLDTHARRLQSVPGIGPATAGVLLAELPELGTLNRQQIARLVGVAPTNRDSGTLRGKRTTGGGRVQLRTALYMPTLVATQHNHRIRTFYQHLLDSGKPKMVALIAAMRKLLIILNTMTRNGQSWNTTPNNA

SEQ ID NO: 228311 - protein, 307 aa, unidentified
MQKVCGVDVGSKTFEACIMENSDQSNVEHKEFNNNPQGVKAFVEWVRAKGVNTVVMEATGGYEKRINRKLIQSGIPSYVVNPAQVRHFAQGLGKQAKTDKIDAEVIAKFGHVVPLRKAADPNEIELQLKDLTKRREELRQMSVAENNRLKLAEGKRAKSIKRILVSLTREIQAIDESLKRVAGQSESTMSKIHTLTQQKGIGFITAVSLVSHLPELGKVNRKQIASLGGLAPYTKESGMWKGKSFIHGGRTPVRLSLYMAALVAARYNEELSVFYKNLVSRGKPKKVALVAVMRKLLVICNATIKNA

SEQ ID NO: 228312 - protein, 354 aa, unidentified
MTSNQNTDTVPGARAGVIKLGLDIHASLIVVVRQVDGQASQPPQRFSEEAFVGFVHRQLAAAEAVHSCYEAGPFGYVLHRRLTALGVHNLVVRPRDWSTYGERVKTDARDAGALCSSLDRHLAGNRGALAVVRVPSEAEEAARGVSRQRQSLVRDRVRFTLRGKGIARLRGIALPPEWWRERAFARLDIPADLREQLSGLRRVILSIDAEAVALTTQIEAAAPAALPAYLGPLTWEILRREVGDWSRFANRRQVASYTGLCPSEHSSGASRLQGSINRHGNPRLRHILVEAAWRLLRYQPAYRPVAKWREAFMDQGRPGRRKKIVVAIARQLAVDLWRLATGRATAAQLGLVVP

SEQ ID NO: 228313 - protein, 319 aa, unidentified
MNNVTTVGIDVAKDFLDVCIMPVVEVFRVDNTKEGFLKLYRVLQRHKEIFRIVLEHTGGYQKGVVSYLQKHQLPVSVINPARAKFFAKTIGQRAKTDKIDAENLALFGLMHKPAITKVEDGSLSVLRQLVRRRSQLVSMITSEKNRIEKEPCSELKQSIGRTLQFFNEELDVLSKQIHALIDANEVFRRKSKVMQSVKGIGKESSAVLISELPELGTVGRQQISSLAGLAPMNRDSGNKKGRAFIQAGRKNARLALYMPIITAIQYNSVLRAHYENLTSRGKPKKVAIVACMRKMLVHLNSLLAKEFYAGEKVETFCLT

SEQ ID NO: 228314 - protein, 331 aa, unidentified
MTLALGIDIAKKSFDAVLLDPTGKSIGYWHQPRTIDGLQELRDQLEALNVDFEQLHIGMEATGSLWKLVAVTCQSWNATCSVINPWVIHSFGQVKMAHHKNDKLDAALIARYVKMYEPRAWVAADATLSDLVELTRPVDDIKRLRTQEKCRLASEPSARVAESINTIIDCLQQEHDTLIAAIQELVAKDEQVSKTIERLTTIPGVAFWSACAILAELGDVDRFDNAKSVTSYAGLVAREFQSGTSVHKKSSLTIYGNRTLRKLLYFPAMAAIRRNQDLREFYDRLRGKGKSFKTALVACMNKLLRLFYAIAKGDSVFEANHQNKRAAASTI

SEQ ID NO: 228315 - protein, 305 aa, unidentified
MKIYIGIDISKLHLDLCHHQQSTQIPNTEKAIKHWLKSLPPAAVLVCEASGGYESLLIILAHAAQRPIARLNARQVRDFAKAKGRLAKTDKIDAQILVAFAEAFHPEPLALPDPLQQELAALVKHRAHLLMQITQNNNLAETLADKKLLALVARTVAFLRKQADQIETLMADKISQSPKLAAKSQRLQQVQGIGSLSATALIALMPELGSLSDTQAAALAGVAPFNRDSGQYRGQRHIAGGRSQVRSVLYMAALVASRHNPVLKPLYLRLLDNGKAKKLALTVLMRKLIILANRLLKNPNFSLAS

SEQ ID NO: 228316 - protein, 355 aa, unidentified
MDSRKYIGMDVHQASISIAVRDANGKLVMESVIETKAATILECIRGIRGNLWVTFEEGTSAAWLYDLLKPHVAQVIVCDPRKNALLKTGNKNDRVDARKLSDLLRAGLLTPVYHGESGVRTLRELSRSYLTVTKDLTRVMNRLKALYRSWAIPCAGEKVYSPRHRSAWLEQLSEVGVRRRADQLYQQLDMLLQIRREARRELLTESRKHPAQEILRQIPRLGPIRVALVIALVQTPHRFRTKRQLWAYCGLALQTRSSGEYRFTEGQRQHSQKLPALRGLNINHNHDLKNLFKSLATHVSTSSGPLGDFYRSLLAKGMKPAMARLTLARKMAAIVLTIWKKGERFDPEQLKRQAA

SEQ ID NO: 228317 - protein, 412 aa, unidentified
MDIVHERAAGMDISKRDAKVCLRVPGKRAGTYTSTVTTWGATTGQILQLRDVLEREHVTTVVMEATSDYWKPFYYLLEETLPVMLVNAKAARNIPGRKTDVSDAAWLAQLGAHGLLRASFVPPEPIRELRDLTRARAIATRDRTREIQRLEKFLEGSGIKLSSVVSDLTGVSSRAMLEALIEGERNPEVLAGLAKGTLRSKIPELVDALTGRFKAHHAFMARLHLDQIDAQSRIIDALTERIEEAMTPFRAAREFLATIPGVSLKVADVIIAETGADMSRFETPGRLASWTGVCPGSNESAGRIKSAHILPGNKYLKAALGIAALSASRSKDTYLAAKYRRIAARRGPMKAIVAIEHSILTAVWHLLADGECYADPGADHFTRLDPIKAKNSAIKKLNSLGFDVTITPANAA

SEQ ID NO: 228318 - protein, 482 aa, unidentified
MKATPKEPAPKATGQSTQPNWHQMNRKQRRDMERKIQRADLTLQLVHPDAAGIDIGNESHYVAVPPDRDNQSVRHFGCTTAELRTMADWLKRCGIRTVAMQSTGVYWIPVYDLLEQAGLEVYLVNARETKNLPGRKSDVQECQWLMKLHTYGLLRNSFRPSQQIRRMRTYWRQRKDLIESAGRHIQRMQKTLTQMNIQVANVLSDVSGVTGQAIIQAILAGERNPQKLAAFRDPRVKASEKEIAQSLEGTWQEDLLFVLKQEQAGYEFCQKQMAECDRQLEQYLRQLEDRSQGASLPEEKRKDRLQKRKGNKPKFDLRQQLFRMTGTDLTQIDGIDVMTAATILSEAGWDMIKWQDEDHFVSWLRLSPDNRISGDRIIGKGRLPTTNRVTVALKLAASNLRTSQSYLGAQFRRFRARLDTPVAIKAMAAKLARLVYRMLRYGIKYVDRGTQFYEVQQRTRQIRHLKQKAAKLGFQLVQAPAA

SEQ ID NO: 228319 - protein, 449 aa, unidentified
MPQPILAVGVDPAKRLHRAVAVLFPDEVVLDVELPNAFDAVANLDLRLCELANQHGADLVYGLEDHRHYGRLFCQVLTERGRDVRVVNPLWTNRQRAFYGQDKDDAIDGRSIAAVVLRRHHQLPLASDFGEVAQAIREAERSLQDLSEARTQLGNRLHLQLNDTYTAAYEEYFGKLRSPLALRFFHRFPLPQDLVGHNVEMLASLLLDLAGGKVGPHKGGNRLIAMRSKAQAILETSGAMRASPRTLALELKAELIRQLCDELLANHDRIIRLERMLREQLLPATKQTITTIIGISTILAATIIGETGSITRFRSPAAFAVYNGTAPARNSTGGRDRHKARRDCNHRLKRAFYLAARAAVLHDPIAKAYHQSCKSRGLSYVEALKRVARRMSDVVYALLKSGKAYDRSIIEHAIERRREQAAHAARSHAKQSLVHSRPRKSNSPLSQRK

SEQ ID NO: 228320 - protein, 410 aa, unidentified
MGLFCGIDWATEHHDVAVIDDDGHVVARGRVSNDAPGFAALLTLLAQAGDSAADPIPVGIETDRGLWVAALRETGRTIYPINPLAASRYRARHGVSGAKSDATDAVLLANIVRTDPGAHRPLPADTELAQAIRVLARAQQDAVWARQQIGNQIRDLLKDFYPAALTAFADLPEGRLARRDARTVLAAAPTPAQAAKLTPARLRRLLIKAGRKRYLDRDIARLCEVFTDTYLHQPPVVENAMGIHLAALLGQFEAACTAADALAEAAVAHFEQHPDAEIITSFPGLGMLVGARVLAEIGDDRSRFADARGLKAFAGSAPITRASGKKTVVLHRYIKNRRLAAVGPIWALGSLRASPGARRHYDARRAAGDWHQQAQRHLFNKFLGQLHHCLHTGLRYDEHLAFPPPLQLAA

SEQ ID NO: 228321 - protein, 403 aa, unidentified
MTMRRRAWVGIDVGKTSHHACAIDETGKVVWNQKVSNEQRAIEQLVTRACKGAEQVQWAIDLTSPMALMLITVLLCAEQSVVYVPGRTVNTMTHAFRGEGKTDAKDARVIAETARLRNDLSNVVLPDELVVELTQLTGYRADLMADWVRGINRLRALLGSIFPGLEAAFDYSTRTPLILVSGLCTPAEIRAAGIDGMTAFLVDNHAWPTGIVKSAATAAALANEQPLALPGEAGTAALVKRLACRLLELDREIKDIDKTITARFRDHPYARIIESLPGFGPGLGAEFLVVTRGDLASFATAGRLASYAGLVPVPKDSGRITGNLRRPKRYNRRLRRVFYLAALSSLRADGPSRRFYDRKRAERLIHTQALLALARRLIDVLWALLRDDREFTPEKPTAATAAA

SEQ ID NO: 228322 - protein, 360 aa, unidentified
MDKYIGFDIDSKKTIACVVQKGKKDEYATISADIESMRKYLRQQRAGVYRLHLTFEISGQAGFIYDSLIDSVDTITVGNPSKMTWIYRTAKKTDRIDARKQAVLLSIGEIPAVHMPNRQVRQWRNTILHRRKIVSRITAIKNRIRAVLKSVGFRKAFHRGSWWKNANRFWMRSLSEEGQISSEDLWRMNLCNLLDELELLEGQLHRVTEYLDSYLDKQAGGKLLMSIPGVGPRTAEAVLAYTDDVSRFGRSKQYCAYFGMTPRLDESGSLKRLGHISKQGPSVVRWLLCESSWKVIRKSKAMRAFYERVMCGQAGRKKIAIVAVGRKLLSIMRAMQMTGELFNEELVCRECGFIEMKRTA

SEQ ID NO: 228323 - protein, 335 aa, unidentified
MEDLPFVGLDVAKSNFKVHLLADVLDGNKKLRGTFQRTRQGFAGLCAWIKQHGFEKAWICMEHTGPYWKPIADYMFREGHQISVIRADKAHYHAKSGDSRNKTDDQDAFNLATFVREKKPRLWQPAAVEDEELRELHRRRDQLVKEQTRETNRLEYEPLTQTVFDSIHDHLKFLEQQISSINEAIKSHMNSHPRQKEIKALYASIPGIGEITANALTAEISDCSAFPSYKAVHAFVGLDLTKQESGTSLRKPDKISRKGNKSLRQKLYMAAMTAVRTDAHFRQFNERLKAKGKKHKVRMVAVMCKLLKTAYAVVKSRSPFVADFPNRCVAQEDTA

SEQ ID NO: 228324 - protein, 429 aa, unidentified
MKSTVARKLRQVPQGYLVIGVDPHKKKHAAVAITQDFTTLVKFKFDNSSEGFEMMLQRSRVEMTKTGCRGVIFAIETGGHYWRNLAYFLDGRGIPFRFINQFTLKRRREGKDLNRRKNDYRDSEVAAQLLCTGEFTDSKLPQGVYAELRAAHNAYRRLVKERSRITNLIKGLLDSLLPEFTKVFKDPCALTAMSALSTCMIPRVISSITEEEFVATIRAGHHGRLMRRKLRALHHISRTSIGIEASAWSVSMEISFLVEKLGLIKQHIRTIEGTLVRLVDKTEEGKYLLSIRGLNYIAVAGLLAELGSFKQYRSAKQLIKMAGSNPTESESAGKRRNHTPMSKKGRPALRYCAWTAVIPMLRFNPDFRAWAKKLRERPVHANPLNGREVVGAALNKLLRLAFALVKNQSLYRIPEIASIPELELLPVAS

SEQ ID NO: 228325 - protein, 316 aa, unidentified
MEAPVAGIDVSKDKLVVYFQGKYYEFPNDRQGYEEIIKILPKGCKVGIESTGIYHINLAKYLMGEYDVRIINPFILKKFKDFRGKKSDKNDAKKLAELVVSMGSEFTTSDARELTSQWDFVTRSIARVKNRLRRDLTLLGYKDSLSKKNLEEVLRGGDSIVLVEVRFLLEELERLEVRKREIEEKLEDLVPKDSLIFTIPGIGKTLGCIILARVGDIRRFSDKKRFVAYCGLDPVIESSGKSVVSKGISKRGDAVLRRAFYLAALTAIRVNPVIKRFYEEHKGKLKGKKLIIACARKLAVITWAVLYYNKPFDASE

SEQ ID NO: 228326 - protein, 394 aa, unidentified
MGIWVGIDIAKHIHWATAIDDLGQVVLDQRVANEPAGLQQLIEALAGLGDEPVIGLDVVGGIAALAEAMLGAAGLRLVHVSGLAVNRARQGMTGGEHKSDPRDARVIAEQVRTRRDLRPIQPVSELDLELRLLVGRRSDLQVEQTRRLARLHDLLVGIHPGLERVLDLTTKGGLWLVSRYVTPAEVRAAGRHGLIEHLQAAGGLPARQIQALADRALAAAVAQQLAVPGERLAASLVRELAAEALACRRRVGELDRDLAVLLERHPDAALIRSLPGMGAVLTAEFIALAGPLARFRSADALAAAAGLAPVLRQSGKVRFQRRPSGGNKALKRVFYQSAFCSLGSPDSRAFYARKRREGKRHHQALIALARRRIDVLWAMLHTRQPFQPNYPKAA

SEQ ID NO: 228327 - protein, 334 aa, unidentified
MENIALIGIDLGKNSFHIHCQDRRGKAVYRKKFTRPKLIEFLATCPATTIAMEACGGSHFMARKLEELGHFPKLISPQFVRPFVKSNKNDFVGAEAICEAASRPSMRFVQPRTESQQAMRALHRVRESLVQDKVKTTNQMHAFLLEFGISVPRGAAVISRLSTLLEDNSLPLYLSQLLLKLQQHYHYLVEQIKDLESQLKRKLDEDEIGQRLLSIPCVGTLTASTISTEIGDGKQYASSRDFAAATGLVPRQYSTGGRTTLLGISKRGNKKIRTLLVQCARVFIQKLEHQSGKLADWVRDLLCRKSNFVVTCALANKLARIAWALTARQQTYVA

SEQ ID NO: 228328 - protein, 359 aa, unidentified
MENLNPNTIIRVGVDLAKRVYQVHAVNQIEAVALTKAMSPDKFFDWARTLPAGCLVAMESCSGAHHVSRRLAALGLRPRIIAAHHVSPYRLAGTRAKNDANDAAAICEAASRPHLHSVPIKTAHQQGILALHRLREGYKEERTALINRIRGLLLEFGLSFAQSPQALRSALPDVLENASNELPGVTRLALSQASEHWSRLEKEMSWCEQRIEEHAREDEQARKASQLLGVGPITASAAVASVADFGQFKSAKQFGGWLGLVPSQNSSGGKSKLGKITKRGDTYLRTLLIQGAKSVLFSAAKRDDRTSQWLMKLKERVGWQKAVVAMANKNARILWCVMTRGDAYDPNHVPVIAGVAMSQ

SEQ ID NO: 228329 - protein, 400 aa, unidentified
MMTPDDIDVWVGLDVGKSAHHAHALDHDGNTLYDKPLKQDEKAIRTMLGKLSKHGRVLLVVDQPNTIGSLPLTVARNTGIAVAYLPGTAMRRTAQLLPGDAKTDRRDAHVIAWAALKLPETLRDAGPDDETLAALKLLAGHDEDLAHESTRHVNRLRSLLLQTHPAFERALRGERITRDATLALLERYGGPMGVKRAGIEDVKDWAKSNGLRAGRIIDDMFKAIGEQTVTVPGTLMAETIIPSIAHDIKTIRDRRREVGRQVEKLLEDHPLLTVPASMPGIGVRTASNILLGIGGDIANFRSSAHLAAYAGISPVTGQSGTSIKGERPSRRGNKRLKNALWQTAFVASAKHPPSVAYYKRKREQGKHHNAAIICLARRRCDVIYSMLKNGTLYQEPALVA

SEQ ID NO: 228330 - protein, 406 aa, unidentified
MAVVATVVEREMEGGIEQQIEYEGRRFGSGTREREHLVAWLRERQAGEVVMESTAQYWKPVWMDLEPHFPKLDLAQAQSNKAPKGRKNDFADARRLTRRMAAGELILSFVPGAEQRTWRAMTRGKQQLVRERVRLQSQTEALLEEMRIKLSSVVSDLFGVSGRRILGALAEGETDPGKLADLGDDRLKCGREELVDALTGHGEPIQVEILKLSLERLRLLDRQIEAFDQMAAGALKKHANAVARLAQVPGFGVDSAQQVIAEVGFDAKTFPGAGELCSWVGTIPGSDISAERNHSSQSPKGNQFLRRIFTQAAQAAVKTKGCHFQNLFRRLIIKLGYNGAIWAIANRLCRLAWKILHDGVGYVEQASEPTPQAKKRRVQRLTQALRKLGYQIAITPITPKAEGAQG

SEQ ID NO: 228331 - protein, 413 aa, unidentified
MSRKFMRTNTSGLLSQLLNSFKVVFIMFYVGIDIAKNTHWASIMSSDGEIIADPFSFSNDSAGFQILLSKLESLDREKILIGLESTAHYGENLISFLFYLDFKIGIINPIQTANLRRSNIRKTKNDKVDTFIIIKALTLGNYAPVTSRDINNLKLKGLCRSRRNLVTLRSRAKIQLVSFVDQIFPELSSFFKGNLHLNVSYQLLKDYSSPSEIANLNLTKLSNILKTNSHGKYKKEDAIKLRELAKNSVGISNPSLSLQIKHAIIQIELFDSQIQEVEKLYKEIVDELDTTITSIPGMSYNQAAVILGCIGDINRFNSSSQLLAYAGLDPSVIQSGNFSARSTRMSKRGSGMLRYALIYSAHNVAKNNVTFKNYYDLKRSQGKSHYCTLGHVAHKLVRIIFKMLKDNVSFNLA

SEQ ID NO: 228332 - protein, 330 aa, unidentified
MKKWNVILGVDVSKLTLDIGCSERRLHIKIDNNSKGFGEFKKWCKTNGIDLQETLVVMEYTGGYEYRFIQYCDSKAIPYCRVPGLEIKQCMGMVRGKNDKVDSFRIGRYGEEKSDKLVPSKPLDKNILSLKQLLSFRKRLVREKAGLQSTLKERGHMYEVNKTDTIIHIAQAKIKADEKHINEVEQEIRELIKSKEELFQNYRIITSIKGIGEINAWMTIAYTENFTSFKDARSYGVYVGVIPFGHDSGTSIKGRKRVSHLAQKELKSELNQAAKAAITYDPELHAYAERKLKNKDYPIVLNNVKFKLILRMFSLVKRGEKHVENYKKAA

SEQ ID NO: 228333 - protein, 334 aa, unidentified
MKSDTVHIGVDVSKEKLDVFVPALKEGSSPTTKEVDNSVAGFREIRDFARKAKAMVCVEPTGGYELELIAFLHKFEVPVAYTDALRVRQFARAEGCLSKSDTIDAALISRFADRIGVRVLEPQEVEAVELKRKAKFRQTMMDSRTAMVNRLETEVDSEMKALLKKQIKLMSKVIDKAERLCVETVEKDERMNALRERFTQVGGVGDLTAISILAGLPEIGKLPDAKLNRLVGLAPEERQSGTKEWQRRIWGGRRDVRNALYMAAVASIMWNSTLGTYYHKKRAEGHPHKWAIVPTMRKLLSLLNRIARDPSFAPSPEPESTKRNANAGRKRKAA

SEQ ID NO: 228334 - protein, 354 aa, unidentified
MIIIGADYHPTFQQIAFVDTETGELQERRLDHPEAAEKFYRELAAQGKKVRVGMEASGHARWFERLLAELNFELWIGDAAEIHRKRERKQKTDRQDAQHILHLLLKDDFPRIWVPSWKNRDLRQLLWHRHRMVQARTRMMNQLQAVALNEGLRCKKKLWREAGRKQLEAFRLAPWASRRRHDLLELLDRLNPTIAALSQAIEQEVEKCPEAQRLMTHPGVGPLTALAFVLIIERADRFQCGKQIASYLGLVPLEDSSGNRRRLGHITKQGNSLLRFLLVEAAQVTVRSLPEWRSKYVHLTMRRGRKIAKVAMARKLAVRLYWMMRKEWDYEQVKKFGSHAGQPGHRYGVKSNIE

SEQ ID NO: 228335 - protein, 343 aa, unidentified
MQTVTTIGLDIAKSVFQVHGVDAAGQVLIRRQLKRRTVLAFFEKLPPCLVGIEACASSHHWSRELQALGHNVRLMPPAYVKPYVKRQKNDATDAEAICEAVTRANMRFVATKTPEQQSCLTLHRTRHLLIRQQTSVINAIRAHLAEFGIVAPIGRNGVEQLLGVVADANDKRLPEVARACVAALGVQLRMLKAQILEFDRMISAWHRSNETSRRLDKAPGIGPVLATALVATVADPRTFRSGRNFSAWIGLVPKQHSSGGKDRFGHISKQGDRYLRGLFVAGALAVIRYAKIHGTKHRPWLTALLTRRPTKIAAIALANKIARMAWAMMVKGERYKEPVALAA

SEQ ID NO: 228336 - protein, 344 aa, unidentified
MNYHTALDVSLRSVSICIIDDEGTIQFEAKVPAEVEEIDKCLKLFSPSINSVGFEAGTLTQYLTYGLQAAGYEVICLEARQVSAALSAMRNRTDKNDARGIAQILRTGWYSRVHVKSMESHLIRALLSSRKTILKKCVDLENEIRGLIRLLGIRLPGTLYHGAYDAVVRQALESDGRMVDTLIPMLDARLALFQTYLKLDKQVKTQVREDPICQRLMTVPGVGAITALTFKSAVDDPTRFKRSRTVAAHFGLTPRRFQSGELDNPGRISKAGDPDVRSALYMAAHSLVVRSEQWCSSKVWGIQLMKTKGHRRATVAVVRKLAVILRQMWLNGTDFRYGSTEAKA

SEQ ID NO: 228337 - protein, 403 aa, unidentified
MNSVGIDISKGRSTVAVMRPFGEVVISPFEVRHTDSELSELARQLKILDGETRVVMEATGNYHTPVAKLLHDAGLYVSVVNAKLVHDYGNNDLRRVKTDKKDAVKLANYGLDRWLTLPRYIPEEDTRLLLKNCYRQYRQYSKVQTVLKNNLISLLDTVFPNANRLFSSPIRGDGSEKWVDFVAEFWHCRCVSEKSEKAFANKYQRWCRKYGYNFNEAKAHTIHAEASGHIGVMPMSETTKLLVEQAVAQLRATSTALAALKHEMQALTSQLPEYPAVMDLFGVGPTLGPQLIAEIGDVRRFYSKKALVAYAGLDAPPNDSGDVTGRHKSMSKIGASSLRRTLFLVMSVYLQTAPLDEPVYQFMDRKRAEGKPYRVYMMASANKFLRIYYATVKAYLESLEHTA

SEQ ID NO: 228338 - protein, 324 aa, unidentified
MDAWIGIDVSKDTLDACFLRPNGKTIGKQFLNNSAGCQKMLNWVNTLSAPLRHFCMEATGAYSHTAASFLVEKGERVSVANPARIKYFGMGEGILNKTDKVDARVIALYAKQKSPQPWRMSQPEVLHLLALMRRVQAIETHLGQERNRLGEPDLDPAVACSIDTIIQALQQEITRLQIQVREHIDQHPNLREDKKLLTSIKGVGEKLANWILAELPDPKEFESAKSAGAFAGLSPMEYSSGSTIKKRTRISKAGNSNLHRALYMPAMAALRFNTICAVRYQRLIARGKCRMVALGAAMRKLLMLAYGVLKTRIPFDAEFANSKT

SEQ ID NO: 228339 - protein, 392 aa, unidentified
MRICVGIDAAKVTHWAVAVDAEGRVVLDRAVENDPDAIETLVSELHDLGDDVVIGLDVVGSFARFLEAILLAEGFALVHTPGIAVNRAGQGFSGGERKSDPRDARTIADLVRTRDLRPILPDDDTLVALRLKVGRRRELVQDQTRRISRLRGLLCSIHPGLERTLDLTCKGPLALLTRYVTPAEIRRAGKSRLRAHLRKTPHLHGTGMLVDRALEAARAQKVVVPGEAPTADLIRDLAGEALEARQKIGRIDRDLEALLADHPDDALIRSLPGMGAVLAAEFVACVGDIRRFGSADALASAAGLAPVQRQSGKRAGWRRAYGGDKGLKRVFYQSAFCAVSIKDPLSKAFYDRKRREGKHHTQALIALARRRVTVIWTMLQRREAFDPDRKAA

SEQ ID NO: 228340 - protein, 374 aa, unidentified
MRIVGLDVSRSVAEIAYLEDGTLHAGGRTGLRRDELERFAAKLRATDHVVLEATGNTTAIVNVLRAHVARVAIANPLQVRLIAEVRVKTDKIDAAVLAQLYASGFLPEVWMPDEHTLALRRQIARRSQLVRQRTRLKNEIHAVLIAHLIERCPATDLFGKKGRAWLGVQLLPLDERLGAEQRLRELDRLGDDLREVEQALAQATIDDARLRVMLTITGVNTTVAIGLLSAIGDIARFPNPGKLVSYFGLNPSVYQSGPAPARHGHITKRGRSYARAMLVEAAWGATQAPGPLRAFFLRVRDRRGQQIAAVATARKLAVIVWYVLTRGEPCAWDRPALTAHKLRALELQAGMPAQHGSRKGSATIGRVSFIDGLR

SEQ ID NO: 228341 - protein, 412 aa, unidentified
MKIAGIDVHKKVLMVVVVDASVPEEKPARRRFVTLPSELRRFRIWLQEQGVEEAVMESTAQYWRSVWLELEPHMRLHLAQAFSNRAPRGRKHDFKDAERLVRRLIADELILSFVPNGEQRIWRSLTRMKVQLTRDRVRLQNQIECLLEEMRIKLSIVVSNLLGASGLRILQALAKGETDAKRLAQLGDERLRCTEEQLVDALTGRVQPMHREMLALQLQRLQLIDQQMAQLNRMIAQAMRPHQEAVIRLAEVPGLGVDSAQQIIAEVGAQASTFSSAAELTSWVGTCPGKEESAEQNHSSRSAKGNKYLRRVLNQAAHAAVAKKGSHFQVVFRRLLPRLGYKSAIWAVAHRLCRLVWKILHEGVRFIEQGCEPDPRAKKERARMLARALRKLGYEVAIKPLNQVAATNGIRI

SEQ ID NO: 228342 - protein, 432 aa, unidentified
MVRFDTGEGVVLEEDSQDGEIIARVAALDIGKAELVCCVRVPHEGKPGRRLQEVATYSTMTGSLLAMSDHLRSLGVGRVVMEATSDYWKSVFYLLEAQGHEVWLVNAKDVKHLPGRPKTDKLDAVWLCKVAERQMIRPSFVPPPQIRRLRDVSRYRIDLVGVRTAEKQRVEKLLEDAQIKLSVVASDIFGVSGREMMAALVGGQTNPKVLARLARGQLRAKIGALEEAFTGYFTDHHRFLLAKMLARIDALDADIAELDATLGELIAPYAPAVDKLDEIPGVGTTAARVIIAEVGVDMSRFPTPAHLASWARFAPGVKESAGKNKGKGTTGHGNRYLARVLGEAAVSAGKTNTFLGERYRRLARRRGKKRAIVALGRSILVIVWHLLSDPQARFHDLGPDFYDTRIGPERKKRNHIRQLEALGYTVTLEPTA

SEQ ID NO: 228343 - protein, 427 aa, unidentified
MEYALVVVLPEIPPGGVCAGIDWADADHAVCVVDLAGRVKDQFTAVHDKAGIAGLIARLRRAGAAEVAIERGDGPLVGALRAAGLTVVVITSRQVKNLRSRYGSSGAKDDRFDAYVLADTLRTDRARLRPLVPDSPATVTLRAAVRARRDLVRHRVAAGNQLRAWLASAFPGAVGLFSDLCGRLSLSFLAAFPGPAAAARLDEQSLAAWLAASPVRGRPAPVPVLLARLAAAPASCGEDTGNAAVTGVLAAVTAAAAAGARDLQDVIAGLLAAHPDAHIFTSLPGCGVLRAARLLAETGDCRTRYPDPQSLAIAAGVVPVTRKSGTWQSHEFRWGVSKELRDAWCDFADGSRHASPWAAAIYQAARDRGKDHPHAIRILARAWILIIWRCWQDRVPYDPAKHTALQAILATRDHDPGNTAQDQDATR

SEQ ID NO: 228344 - protein, 457 aa, unidentified
MAPRRKGNPSKIKSLSTQLPTLHPHAAGIDIGAREIFVAVPPGSDPRPVRSFPTFTADLHALRDWLRTCGVTTVAMESTGVYWIPLFQILEAAGIAVCLVNARHCKNLPGRKTDVQDCQWLQYLHSVGLLRGSFRPADQVCAVRTILRHRDALVRGAGRCVSHLHKALTQMNVQLHHVISDLTGVTGQAILTAILNGERDAQKLAALKDHRIKASRDVIAKSLRGDWRPEHLFTLQQTHALWQQHQRLIAECDAQIEAMLKAFDSRVDVKATPLTPAKSSHKKAQRNEPQFDARTECYRVLGVDLTAVPGFASPTVLVLLCELGPEFAAKFPTAKHFGSWLGLCPDNRITGGKIYSVRTRDVKSRVAEALRLAAQSLHRAQNYFGDLYRRWRARLGSPKAITAMAHKLARVLWHLLKYKQPFNPEVFAKEEAKLKRQKLARLQNLAASLNYQLIPQP

SEQ ID NO: 228345 - protein, 412 aa, unidentified
MDAILERCCGIDVHKSSLTACLLTGSLASKPTTTIKTFSTMTNSLFELKYWLESEGCTHVAIESTGVYWKPVFNILEDSLTVILANARDIKTLPGRKTDVKDSQWIAQLLRCGLIKASFIPPNPIRELRDLTRYRKQLSNDLTSEKNRVQKILQDANIKLSSVATDIFGASGTAMIEALLGGCEDAVVMADLAKGALRNKIGELEQALVGKVTGHHRFMLRASLDHIHYLKGAISSVDQEVDDCMKPFAEERELLMQIPGVKKRAAETLIAEIGVDMSVFPSHSHLASWAGMSPGNNESAGKRHSGKTTHGNCWLRSALLESAWAASRTKGCFYKARYCRLAAKRGAKRASVAIAHSILVAVYHILKDGCAYHELGEDYFDRLNEQAVKNRLVKRLEKMGHKVILEPKPQAA

SEQ ID NO: 228346 - protein, 344 aa, unidentified
MQISILGIDIGKNNCSVVGVDDHGAAVVRRTMRRQTLIEFVEKLPTCVIAMEACCGAHHLGRLFVARGYEVRLMSPEYVRPYVKAQKNDDRDAEGIAEAASRPTMRFVELKSQEQLDIQTLHRVRSRLVAQRTTLINQLRAVLLERGVIFAAGRVKFASALDGLLAEADEILSARIRSLVIELRDEWRMLDKKIGALNAEFVALARQNSAMRRLTSIPGIGVLNATALVAAIGDAGSFKHARDLGAWLGLVPRQFTTGGKARLLGITKRGNTYLRTLLVQGARAAMHTLSQSDTPIGQWLQTMLSRGVQRNVVIVALANKLARIAWAVLRKGQSYDRSYAVAVN

SEQ ID NO: 228347 - protein, 363 aa, unidentified
MAMKAMTLVGLDVHARQTHAAVLDPTSGEIAVSRLRMAPLEVASFLADLAPAVRAVYEAGPTGFGLARAAREHGIYVRVAAPGSIPRGPGDRVKTDRRDAIRLVRLLAAGELSFAFVPSVADEQFRDLVRAIEDVRGDLMRARHRLGKFLLRRGERYPGAGHAWTGAHMKWLRALSLPDPCSRATFADYLASVELLIGRRASLLAALEQQIPECSHAPVIARLRCFRGIDTLSAAGLCAELGHFARFPRPDQLAGFLGIVPSERTSDTKRRQGAITKAGPPHARRLLVEAAQHYRHRPAIGQKLARRQAGQDPRIIEIAWRAQRRLHARWQHLHQHRRKPAGVVAIACARELSAFLWEAATLD

SEQ ID NO: 228348 - protein, 391 aa, unidentified
MFLLGIDIAKLNHVASCIDSSTNEVVFSNFKFKNDFNGFSALLNKIKSFDAKNLIIGLESTSHYGENLINFLFIHDFKVALINPLQTSHLRKANIRNAKNDNLDSLNIAKSLLFTKLNFVSKKNIECFSLKKLTRFRCNLIKQRSKAKIQLTSLLDLLFPELQYLFKSKIHSKVIYSLLKKCPSTEEIAALKDDEISNLLYASSKGHFKKEKSIELKSLAKTTVGIKDTSISLHLIQLIELIELYTKQIKDIEIKITDIVNNLDSTLLSVPGISVIACAIILGETNNFENFSSSKKLLAFAGLDPKIRQSGNFNASSCRMSKKGSPYLRYALIFTAWNIVRHSEKFNKYYSLKRSQGKSHYNALGHVAHKLVRILFTLVKKNISYQEEKLE

SEQ ID NO: 228349 - protein, 341 aa, unidentified
MYYIGLDVHKKTISYCVKDASGQVHQEGTIGATRNELDGWIKTLPQPRIMAMEATIFTGWIYDHLLPHAEQVKVAHPLMLRAIALAKKKNDRIDAGKIADCLRCDFLPECHMASTEIRDRRRSLRYRHLMVRQMVQMKNRISGLLMETGVSHNKQRLHKVGYFRELLATNPEVPDSIRPLLKLSRETIVRCQRTDYALVSSLNRDPLLAERIRRLRTVPGVGPITALTWALEIGDVTRFRTMKQAISYCGLCGEEKSSAEKVMRTPLSKQRNKHIQHVLVEAAKLAPRQNHELALVYEKEKQKGNSNRATLAVARKMVAYLLAVDRRQREFVPSEKQSAAA

SEQ ID NO: 228350 - protein, 313 aa, unidentified
MIIALRYVGIDISKKHLDIFDEADGVPRRIANAPQAITQQVARWQCAALVVFEATGIYDLALREALRQAGIQFARINPARARDFARASGLLAKTDPIDARMLAAFARAMQPAPEQVADPARNTLARLAKRRDQLVLMRAQEKNRRSEADDRAMAERIGRLIEVLDSEIAEIEADISALIKAEAEIADDAKLMRSLPGVGPVACMQLIAQMPELGRVGPKQLAALAGLAPFNVDSGAFRGKRKIAGGRKRVRDALYMAALNAVRRADPFKAFYARLRQAGKPAKLALIAVARKLLTVLNAMMRDRKPYLQTKPT

SEQ ID NO: 228351 - protein, 311 aa, unidentified
MNTTLCGIDISKDWLDAHIEPMGAANRFANDAAGIADLAAWCQNHDVELVIMEASGGYERLAFLLLWEMGQPCGMATARSVRYFAEAMGFLEKTDRIDAAVIARYGAVKRLKPTPPPSAAQQRLKALVARLSQVGGDLTIQKQRKSTADAETIASLDEVIALLARQSRRLEGEIATLIHDDPLWACLDRAFRSLKGVASRTVARLMAQLPEIGILSNNAIAKLAGLAPIANDSGKRSGRRPVRGGRAGPRGVLFLVASIVAKYDPHLAAFKQRLQTAGKEKMVIRIALARKLLVILNAKARDARNEFANAT

SEQ ID NO: 228352 - protein, 323 aa, unidentified
MNKYKEIFGVDISKDVFDVYGSKSGHNQFKNAAPGFKSFLKNLPKESLVVMEATGYYHYRLAQFLYKQGVLVSVVNPLSVKRFIQMKLAKVKTDKSDAKAICEYGQINQVPLYTALTDVQSECLQLFRLLDSYLKKRTMTKNKLHGEAVLDIPSKHVYRSLTRNKKHLDTEISAIEQKLLSLVKQDQQKQLTLLKSIPGLGVKTALFLIVITDGFTKFETAAQLCSYVGITPTIRQSGSSVRGRSRISKVGNKKLRNLLFLCSFSACKHNKACKGIYERIVNKGKSKKLALIAVSNKLLKQAFAIAKSGHPYDDTFVSVLLSK

SEQ ID NO: 228353 - protein, 359 aa, unidentified
MTRIALGRGDVVVGVDTHKDEHLAVALDGLGGRLAELAIAANPDGYAQLLGWADHLGAVAMFGVEGTGSYGSGLARFLRRHGHKIIEVSRPPRKGERRLAGKSDAVDAEHAAREVLAGKATAVPKLADGIVEAIRLVKIARDSAVNAHSQAMITLKATLVTAGDELRCQLEPLSNFKLMTACAELDDGGDIADPSVAMRQVLASLARRWLELHEEIKVHSRHLKKLTKTAAPELVAAFGIGPDIAAEMLVTAGDNSDRIRSDAALAKLCGACPIPAGSGKTNGRHRLNRGGNRQANAALYRAIIVRMRWHPATIAYVERRTTEGLSKREIIRCLKRYLAREVYSLLPPPSGPRDLASAA

SEQ ID NO: 228354 - protein, 377 aa, unidentified
MSHTQAAAIRTHDGAICVSLELSCSQWLVASLSPGSEKMSKHRLEAGDGPGLLALLQRLRAHAEKACGEAMRLITIQEAGLDGFWLDRLLKAHGIESHVVDAASIAVSRRARRAKSDKIDVEALLRTLLAWLRGEPRVCSMVRPPSAEEEDRRRLTRERQSLIKERTRLSNRIRGLLASQGICLYDPLKRDRHKRLQRLQTGDGRAMPARLKSEIERMLERLEILMTQIKKLEAERAEQVAQNQTAALLLRLKGIGPEFAATLWLEGFYRDFANRRQLAAYAGLAPTPWQSGSLRREQGISKAGNPRLRRTMIELAWLWLRHQPQSQFSRWFVERVGQARGRVRRIAIVALARKLVVALWHYVGEGLVPEGAQLKTT

SEQ ID NO: 228355 - protein, 310 aa, unidentified
MTLSPTWIGIDVSKAWLDVADPASQRVERLANEPARLAAFAASLEGRDVIVVFEATGCYDAGLRQALHAAGVGSARVNPQRARDFARATGQLAKTDAIDAAMLAEMGRALRLAADPAPDGSREKLNRLNKRRDQLVAMRQQEKVRRAEAADPAIRADLDQHIAWLDAAVSTVETAIRDVVEASAPMAGTEALIRSVPGVGPVTAAILLGLLPELGHRSAKQIAMLAGLAPVNHDSGAKRGHRAIRGGRRRVRQAIYMAAVASLTTTSPLKAFYKRLKDAGKPTKLALIALARKILTTLNAIVSTQSYFKP

SEQ ID NO: 228356 - protein, 401 aa, unidentified
MKKTCGLDVHKDTIFCAVYNGEKYGKVTEFLTTTSSIHELGEALQAEGVMDIAMESTGIYWIPVWNILEQLGFKLLLVNPFLIKQMPGRKSDVKDAQWIAALLHKGLLRGSLIPDQSIRELRTYSRKYMRLQQRITSILQEMARILEMSGIRISSFVSNISGKSFLRIVSQVIQGETNPDVLIKYVHGRVINKHSKEKIMQALTGFVLPQQRFILEQSFEEYEMLVRHSDKCLLMMQEICQTKFFNELKLLQTIDGIGLIAAMILIAETGADMKAFENSGKFTGWIGLRPRNDESAGKYKSTATTKGNRYLRATLVQVAWAASRTKGSRFKEKYNQLAIRKSQKKALIAIARKIAVVMWNVLYYQQKYDPDKVIVYEPKNSEAKINYHQKEIERLRKLTQS

SEQ ID NO: 228357 - protein, 313 aa, unidentified
MDPVSVGIDVSKSEWTVAVQPSGERWTSPATAAALETVVAGLATRAPQIIVVEATGGYERTLVAGLVAAGLPVAVVNPRQVRAFAQALGRTAKTDAIDAEVLALFGARMQPVARAIHDAATQALAALVARRRQLLEMLGAEQRRLAQAPPTGRITRDLRNHIRWLERRVDEVDGDIGTTIQASPVWRVQDDLLRTVPGIGPTTARTLLAELPELGHLDRHAIAALVGVAPFNCDSGTHRGQRHIWGGRASVRATLYMAALVATRHNAVLRAFYCRLRDAGKPAKVALIAVMRKLLTIVNAMLKHQTRWEDQPA

SEQ ID NO: 228358 - protein, 319 aa, unidentified
MPRMTGEPRFRKKLSRQSFSKFMAEQPPASVVMEACGSTHHWAREMISFGHEVKLIAPRYVKPFVKRQKNDAADAEAIVIAARQPEMRFVEPKGVEQQSRAILFRARERLVHQRTETINALRAALYEYDHVVPQGTRQIRRIDEMLEAPHSDFPDLMRDECRDLLEQIAEQAIRINARTEKIKALAAEADTARRLQTIPGVGPMTALAVEAFAPPMSSFNCGRAFAAWLGLVPRQLSSGGKERLGHTTKAGQADIRRLLIIGAMSRLNWFGRKSIPEDSWLARITSRKPRMLVAIALANKMARVIWAMLTKNEDCRVLA

SEQ ID NO: 228359 - protein, 342 aa, unidentified
MEYYAGIDVSLECSSVCVVDGSGNVVREARVASEPHALIGWLASHGHELARIGLEAGPLSQWLYAAMKQAGLAVELLETRHVRDAFRAMLVKSDRNDARGIAQLMRLGWFRPVHCKSMSAQEIRSLLTARKLVQSKLLDVENSLRGILRGFGLKVGKTTKQTFAGRIEELVAGHPHLQMIAKALLAVRAVLRTEFAAFEKQTRRMVRSDMQARLLTSVPAVGPIVALTYASAIDDPARFKSSKQAGAHFGLTPKKHQSGETDYTGRISKIGDASVRTALYEATNVMLTKPVKGCSQLKSWAMRIKRRAGTNKAKVALARRLAVIMHRMLADGTPFNAAAAAA

SEQ ID NO: 228360 - protein, 367 aa, unidentified
MKKISTVATQQSRKISEQKLTVGLDLGDRSSWCCVLDEAGAIVREQKLGTTPKAMKEVFGAVPRSRIALETGMHSPWVSRLLSQLGHEVIVAHARNVRLIGESRKKDDRIDAQTLARLARIDPPLLSPVKHRSAKAQADLTVIRARAGLVRARTALVNTARGLAKSYGERLRGCNVRNMNAEKAQGLSPELRTALEPLLAGIESLSERIGECNERIERLARESYPEVAQLKQVKGVGTLIALTFLLTLEDAHRFRQSRDVGCYLGLQPGRRNSGQSEPQMHISKEGDPYLRTLLVQGAHHILGPFGADSDLRRWGLKLAERGGKSGKKRAIIAVARKLAVLLHHLWVSGEVYEPLRHSKQTAMPAAA

SEQ ID NO: 228361 - protein, 347 aa, unidentified
MIKENYMYVGIDLHKETHTAVIIDCYNQKLGEITFPNRPADFPKLVAKVKKCNTAGKEVVYGLENAYGYGRALAVWLIDKGYFVKDVNTAISHRQAKHRGAMYRKSDSDDAKAIALATLNMLDKLPDACPNDAYRSLGQLVHRRDNIMKQRTRLVNQLHEQLCIAYPSYKQFFNDISRPTALYFWENYPSRKYLKGKSVEDLRAELVPVSHNKCSTKTCEKILDAVASDKVKNNNFQDARDMVTLSIVSDLQHYDSQLAEVDKMLEQMYKMLGCTLTTIPGVNVITAVKILAEIGDIKRFGNANKLAQFAGIAPLHLSSSGKGKDVATKQGNRRLQATIYFLAIQMV

SEQ ID NO: 228362 - protein, 431 aa, unidentified
MPFAGLDLHQKMVEAVILDDDGRLLRNDRFPATRAALEAYARRHLAGCAVALEATCNTWPVAGILRPLVAELVISNPMRTRAIAWAKIKTDRVDATVLAHLLRLGYLPQVWQPDAETQSLRRQTTERAHLVADRTRIKNRIHAVLHQRLIQAPPGDLFSPRNLKWLAALKLDQDGRESLDRHLRQLGAVEAELARLENRLAQEAHHDPRVKLLMTLPGVDFTVAQALLSALGEVQRFPDGNRAAAYLGLVPSTYQSGEHCYHGRITKQGRGHARWVLVQAAQHLDRHPGPLGVFFRRIARKKNRNVAVVASARKLVTIAWQMLKYNEPYRYAQPQTVRAKFDRLRVRATGQRRRGGYAKGSGRPAAYGTGQATRAVPALDSVYASEQLPPLTAPSAGEKNMLEMHGVTAFAAGIHQGRRVPRKKSNTPGAK

SEQ ID NO: 228363 - protein, 322 aa, unidentified
MDSIGLDLHQRESQLCILTEDGEVIERRIVTSRERFTAVLGEHPRARILLEASTESEWVARHLEGLGHEVIVADPNFAPMYATRRRGVKTDRRDARTLAEAGRLGAYRPVHRASAAQRHVRAQLAVRDALIRTRTRYVSVVKALVRRDGLRLPPGDPVHTEAKLAALPLAPALADEVAPLRGLLDPLNAQIAVADTRLAAVALADPVVERLRTAPGIGPVTAVAFVATLDTVTRFTSAHHVAAYLGLTPREYSSGEQQHRGRISKTGSPRMRRYTGRPSSARPHRAPARVPPKSLASVQSHSVSSRASRTRRVRLERHSLPP

SEQ ID NO: 228364 - protein, 335 aa, unidentified
MHYLYYVGLDVSKETFDASLVAFEDANEMAHRKFANSRKGICSCLHWVEKRHGIRLDDVIFCAEDMGSYISEMAVCASDRTLNFNFSLISPLVIKYSMGIARGKTDRVDARRIAEYAITHYRKIALYLPAEKELCQLRTWLILRAHLAKQRVAKLVLLEKLDYKEKFADVSIQRSMLQEEIAYAETHMKTIEREMKELIAADSNICRNYKLLTSIKGVGPITAIVMLCSTLNFTKITDHRKFACYCGLAPFEHSSGTSVCGGCHTSSMANRDIKVQLNRRALIAIRCDPQLKAYYERKVAEGKHKFSVLNAVRAKIAARCFAVVRRGTPYVALQI

SEQ ID NO: 228365 - protein, 376 aa, unidentified
MKRIIKIGMDVHSTNYTLCAMEPIIGAEERVFGEIKVEPDYKWIICFIESLKMKLGYENDYSIECGYEAGCLGYTLYHQLTNAGIKCVILAPTTMLTPQGLRIKTDKRDANLIAKCLCYGGYHPVYIPTGEDDAVKEYLRMRDDHKKALKKLKQQINAFTLRHGHQYTGTKWSVKHVIWLNKLELKPMYRETLDEYMISYQEQESKIERYDKRIEEIATEARYKENVGKLGCFLGIRTHTALSLIVETGDFKRFAKGNTYAAFLGLVPGEHSSSNSVNRLGISKAGNKHLRCLLIEAARGICKGAIGYKSKTLRSRQSGQAPEIIAYADKANIRLRRKYHKMIRNGKKKNVAVAAVARELACFIWGMMTGRISITA

SEQ ID NO: 228366 - protein, 345 aa, unidentified
MQITTVGLDLAKRIFQVHAVDASGSVVVRKALRRSQVLPFFTKLPSCLIGMEACGTSHHWARELTELGHEVRLMPPSYVKPYVKCGKNDAVDAEAICEAVTRPTMRFVAMKSAEQQAALSLHRTRNLLVKQRTQLVNMIRGMLAEFGIDIPQGLERALGLARQIAAKEVEPDVPAMATQVLDLLCGQVLDTHVRLQAIDRSIRALQRTDDVARRLSTIPGIGPVGATALAASVADPGQFRSGREFAAWLGLTPSQNPSGGKDRLGRITKMGDRYLRKLLVVGATSLIRGAKYKPETADPRLVALLARKRVRVASVAMANKMARVIWAIMARGEVYQARHVPTLAG

SEQ ID NO: 228367 - protein, 367 aa, unidentified
MEWPAPFPSVYYDAVVCEKERNGPMTIVILGIDLGKNSCSVVGVDATGRVVTRRAMRRQTLIDYVAKLPVCVVAMEACCGAHHLGRLFAAQGHEVRLMSPEYVRPYIKAQKNDDRDAEGIAEAASRPTMRFVDLKSQEQLDLQTLHRVRSRLVAERTNLINQLRAILLERGVIFPVGRRKLELGVDGMLAEGIERLSPRVHQLVGELRAEWKLLDAKIGALNTEFIQLARNNSAMRRLTSIPGIGVLNATALVAAVGDASSFAKARDLGAWLGLVPRQYSTGGKARLLGISKRGNTYLRTLLIHGARAALPSLSTTDTPLGRWLNAMIERGVHRNAVVVALANKLARIAWATLRKEAGFDRGYPVAG

SEQ ID NO: 228368 - protein, 370 aa, unidentified
MKGKSRRRSSKRAREQRILEKIHLNAAGVDIGSESHWVAVPEDRDDRPVREFKSFTHELLALADWLETCGVDTVAMESTGVYWIPLYEILEERGIEVLLVNARHVKGVPGRKTDILDCQWIQQLHTFGLLRGSFRPDAPVTALRCLVRHRDQLVEAAASYVQRMQKTLVLMNLQLHNVISDVTGVTGIAILRDIVAGETDPSVLARHRHPRCKASEEEIAASLTGHYRDEHLFVLRQALELYDLYQEKIRSCDEQIEARIRALEATCESPGTLLPKSRRTQGRSSNEPPFEIRSPLFTLCGGVDLTELPGIGPYGALKLVSEIGLDMSRWPSEKHFASWLPATRSRGASCSAHALSLRPTAPPRSSAWRP

SEQ ID NO: 228369 - protein, 347 aa, unidentified
MTIVEAVRGVTGGVDTHLDVHVAAALDPLGGLLGTESFSTDLAGYKALLGWLESFGDVSKIGIEGTGSYGSGLSRYLRRVGVEVIEVDRPNREERRRSGKSDPLDAVEAARAALSGRASVRPKSRDGAVEAIRVLVVAKRSARQARVKALIQMRHLSYSAPEQLRCHLKGLSVCALVAEGTKLRPTRSADPVTAATKASLSSLARRIETLGRELAELDARIEVLLVATVPELLRCFGVGPDTAAALVMAAGDNPERLQSEAAWAHLCGVSPIPTGSGKKGGKVRAHEGGDRQANSALWRIVMVRIAHDPRTQVYFERRLKEGMTKPEVIRILKRYVAREVYRYLPRG

SEQ ID NO: 228370 - protein, 351 aa, unidentified
MPRIADPEQAVTGGVDTHAEVHVAAVVDLVGRVLGTEEFPATAAGHQKALDWMRGHGRLAKVGVEGTGSYGSGLARYLTVHGVEVVEVIRPNRQTRRRRGKSDAVDAVAAALAALNGDAAARPKTHDGAVESIRMLRVARRGAIKARTQAANQLRDLVVTAPQSLCDRLAPLPTVERVAVAARLRPGDLTDPAGAATVAMATVARRYQMLTAEIDQLDGQLDQLVEHTAPPRLLAKQGVATQVAAALLVAVGDNPTRMEREASFAALCGVSPVDASSGKQRRHRLNRGGDRQGNSALWRIVITRMAHDPRTRSYVARRTAEGKTTKEIIRCLKRYVAREVYKTLVAVASSP

SEQ ID NO: 228371 - protein, 366 aa, unidentified
MASIADTPFTFIGLDVHKDSISAGILEPGVDDPTHDKIFHDEPSIRRLMGRHDPARLRVCYEAGPTGYGLARLLASMGIDCQVVAPSLIPTAPGDRVKTDRRDARRLARLARAGELTPIRVPSELEEAVRDLCRVRVDAVQERRRARQRLGGFLLRHGRVFREAGNWTLKHTQWLNSLTFDEPAATATFGHYRSMLQMADTALQGIDDDLAAWTVTEPFAEPVARLAAYRGIQPLGALVLVAEVCDFRRFATASSFMSWCGLVPSEYSSGNSTRRGHLTKAGSQMVRTQLVESAWAYQHRPAVGAGLRTRQQQVPSATIARSWAAQQRLCGKHRKLAARKDSRSVVNAAVARELAGFVWAEMIAND

SEQ ID NO: 228372 - protein, 370 aa, unidentified
MLDTTTFIGLDVHARSIKAVSLDVMTGEVRAATFGYDAGAVAEWVRSVDPRARCVYESGVTGFDLQKRLSGLGVDCVVGAVSKMIKPSADRRRKNDRNDAEFLARMLSVGNVVEVWVPDDECEAARDLTRALEDARDDLSRSKQRLSKFLLRHGLAFDERTPTGRRKGNWTRAHWSWIESIRFAEGADNDVLAYYVDAVRRAAEEKARLEGLVEAEARKPRWRKRVDSLRCLKGVDTASAADLVFEAGEFSRFRNARSFAAWVGLTPSEHSSGESDRRGAITKAGNKHLRKALVEAAWHYLTCSARPKDLARGQDPDRGARRHAAKGVRRLVERREALLARGVHGNKANVATARELACWVWAVGLMAEEA

SEQ ID NO: 228373 - protein, 323 aa, unidentified
MTRIVCGVDIGSSSLTARIGQDGAAATFANTPEGIAELAAFCESHRVALVAMEATGGYEQRAFAQLSEHGLPVAVVNPRAVRQFAQSMGALEKTDAIDAGMIAWYAQTKRSQPLCLAPPTQLELRARVTRLRQLTEVRTAQLNQQRLVTNDAVQKGFRAMLTFLAEQIRELEQAIAALIEADPLWRELNQAFRTIKGVADRTVARIMAEMPEIGTLSNKTISKLAGLAPLANDSGKHQGKRAVRAGRATVRDILFLVGSVVARYEPDFTAFQQRLRAAGKPPKVVRIAVAHKLLVRLNAKAREVRQHGAALPPLPPLAFAKLS

SEQ ID NO: 228374 - protein, 402 aa, unidentified
MNAVGIDVSKGKSMVAIMRPFGEIVSTPFEIKHTSSDINSLVKLIKSIEGESRIVMEHTGRYYEVLAHQLSEANLFVSAINPKLIKDFDNDSLRKVKTDKADSVKIARYALDKWQNLKQYSVMDELRNQLKTMNRQFGFYMKHKTAMKNNLIGILDQTYPGVNTYFDSPARSDGSQKWVDFASTYWHVDCVRKMSINAFIDHYENWCKRKKYNFSKSKAEEIYGKAKELVPVLPKDDITKLIIKQAVDQLNSASITVESLRTLMNETASKLPEYPVVMAMKGVGTSLGPQLMAGIGDVSRFTHKGAITAFAGVDPGVNESGSYEQKSVPTSKRGSSDLRKTLFQVMDVLIKTHPQDDPVYQFLDKKRAQKKPYYVYMTAGANKFLRIYYGRVKEYLASLPES

SEQ ID NO: 228375 - protein, 357 aa, unidentified
MLSSNVKSIGLDVHKEAITVAVRNGAGKLVMESIVETKASTLLDFLHGLRGELHVTLEEGTWAAWLYDVLKPHVQEIVVCNPRRNALLKEGSKNDKVDVRKLSELLRAGMLRAVYHGEHGLRTLRELARSYQVVSKDLKRVMNRLKALYRSWGIPCTGTQVYSRRHREQWLKKIREAGVRRRAELFYQQLDGLQVLRRTVRGELLAESRKHQAVKVLRQIPFIGPLRAAQLVALMQTPHRFRSKRQLWTYSGLAVETHDSAQYRYVDGQLQRSKKPQQVRGLNQNHNHAMKEIFKSAALSATLRAGPFQDFYAGLLAKGMKPELARLTLARKIAAVTLTLWKKGARFDAGYVKPQAA

SEQ ID NO: 228376 - protein, 479 aa, unidentified
MKPKKIQSTASKTIRPAAKMPVIHPHAAGIDVGSVEHFVCVPQDAVPEGESAVRSFGGFSGELDKLVEWLQSCGVKTAAMESTGVFWIPLAQKLEDAGIEVVLVNARHLRQVPGRKTDVKDCQWLQQLHSYGLLQGSFRPGQDICYVRSLMRHRQNLTQSCGREVLHMQKALQQMNVHLHHVVSDLDGETGLRILDAILAGERDPAKLVQLRDALCHKSTPEQMVAALQGDWRPEHLFVLRQALETYRHLLEQLRVCDLEVQEALTKVILPVEEEPMETAPANPPACPKPRKKKRFHHRKAGTGLRQDLSGELARICGVDLTQVTGLNVLGVLIIISEIGLDMTRWRDGKAFSSWLGLCPGNKISGGKVLSSHTAHVVNRVAILLRTVAPAVGRSDTWLGSFHRRMRARLGPAGANTATAHKLATLIYHLLQYKEEYIDVDRVLYEEKIRGKRLARLRKQAGELGFELVQKNQTVSQAV

SEQ ID NO: 228377 - protein, 413 aa, unidentified
MHYVGIDIAKRVHVCAVLDEHNTVVMKPFKFTNDEKGFKKLLSHLDRLACERDDLIIGMEATGLLFENLYRHLKALAYRVVLLNPYQTSKFRQMDTMKRVKNDNIDAVMIAALLKSGRFSKGYVSDEQLHSLRELYRYKESLANQIKALKRNTQTILTVVFPELETVIKDPFSISGMALLEKYPTAKHYEYASVDRILKVFRGIQGNTFTQEKAKQLLDCAKHSIYSGTAKEARAMHIRMNLKQIKMLQEMLDETLEAMQALFRDDVPLKAEEKEVVSDIIDNLRTIPGVSDKTILALLSECGNLDRFRSSKALVGYLGLYPTLDESGERSRGGKLAKRGAKLAKKAIFLAAIAAIKHNDQMRTIYLKYRSRGKAKKEALIIVARKLIAIIYAIYTRNEPYDPVRVFTAKPNA

SEQ ID NO: 228378 - protein, 307 aa, unidentified
MFIGIDVAKDRLDVHVRPAGEVFSVPRDDEGVATLARRWAKDRPTLIVLEATGGFETIVAAGLAAAGLPVAVVNPRQIRDFARATARLAKTDALDAAVIAHFAEAVRPVARPLADPQTRMLGELMARRRQLVEMIVAESNRRRQLTAKRALKSVDRVLVTLKAQLTEIDHDIDTSIRGTPAWREAENLLTSVPAVGPKIARTLVAELPELGTLDRHQAASLVGVAPFNRDSGNLRGRRTISGGRPVVRAALFMAVLVAIRRNLPLARTYHRLKAAGKPAKLAIVACMRKLVILLNAILRDKTPWQPA

SEQ ID NO: 228379 - protein, 374 aa, unidentified
MKHYSTLYVGMDVHRDSFTLAHFALDMKQPTGIVRTDNDYRRIVAYVHHLREKYGQETRIVCGYEAGCLGYTLYHQLTKMNLECVILAPTTLPSPRGGKRVKTDGRDAANIAQCLAYGTYSPVHVPSAEDEQVKEFIRMRNDHCQMLKKLKQQILSFCLRHGYQYSGTRSNWTQAHMKWLDALQPEGLLGDTLEEYLTSFRYHQNKLERLDRRIEEISREETYREPAGKLCCLIGVKPLTALSVVSEVSDMHRFPTAEKFAAYLGLVPGEHSSGNSVRRGGITKAGNVHVRALLTEAAQCYTRGKVGYKSSALKKRQSGQSETVIAYADRANERLRRRYYQMTLQNGKRGNVAKTAIARELACFMWGLLTDHVV

SEQ ID NO: 228380 - protein, 307 aa, unidentified
MPEIPRSRTVDRVNQTRIAQGRDKRGEMNQVYAGIDVSKEFLDVAVLPSDERKRYSNDEAGIGELTARLKKLSSALVVMEPTGGLEMPLAAALTLEGVKTAVVNARQVRDYARATGKLAKTDKIDALVMAEFASAIKPPIREFRDEATAEIKSIMSRRRQLLEMLTAEKNRLAIAHKSLKTKILSHIEWLKKEIADLDNDLRQRIEDSPIWRVKDNLLQSIPGVGKVLSATLLAELPELGKLNRRQIAALVGVAPYNRDSGKMRGKRSIWGGRASVRSVLYMATLVSTRFNPVISSFYQRLLEKGKV

SEQ ID NO: 228381 - protein, 350 aa, unidentified
MDRYIGLDAHSSSCTMAIVGHNGKRLQSQVIETNAQALINFLLTIPGNRHLCIEEGTHANWLYEVLSPHVGEIVVARVRESRGPKSDQIDAFDLAEKLRIGAIKTRIYKKRATFGRLAELSRAYTVLVNDTVRVKNRLKCLYRSRGVSVGGTGVYAPATREEWVRELPVKVRFRAELLYQQCDGLSKLRQVAEKEMLGEARKHAIYHILKTCPGMGRIRTAQMLPIVVTPYRFTNKRSFWAYSGLAVVMRSSSDWVRTQYGDWVRAPVQQTRGLNRTCNRTLKAIFKGAATTVIGCAKAEPLYNHYMQLLESGTKPNLAKLTIARQIASIILSMWRSREVYDPRKLKRNT

SEQ ID NO: 228382 - protein, 340 aa, unidentified
MQKSVKFYLGMDVSKLWIDIVVMCVEDHQKQPAISGHFDNDATGIKALHKWLKKHNVSFDENSLLVIENTGVYHRLIWEYCSSHGLPLYIGNATHIKYSFGLARGKNDKIDSERLCAYAFKNADEIKVTPVLNPVFLKLKDMMTSRSRLLEQKNSIKVYLGEMKLSNSKEMQMIIENAHKAALEGLEASINFVEKQIKQIIKENAEIENNYKLLITVPGIGHLTAVYIICCTNNFICKISGKQLSSYAGVAPFGNTSGTSLKGRHKVHKMANKELKKLLHMGAVSAITHYPEFKDYYERKVKEGKHQLSAINAVRSKIALRAVAVINNQAPYVDKYKKAA

SEQ ID NO: 228383 - protein, 337 aa, unidentified
MLFCGIDLHSNNCLVVVSDDADKVVYSKRLPNDLAAICGALSPYQQDLFGVVVESTYNWYWLVDGLMAAGHSLHLANTTAIKQYDGLKHRGDESDARHLAHILRLGLLPEGHIMPKADRAVRDLARRRMQLVGQRTTQIVSIETSMAQHIGTTMSGNSVKELKAADIDAMPIGATEALGMKANLAVLQALQAQIDEIEAALAKHCRHDKDYRLLCSVAGIGPILATVILLETGDIQRFADVGNYASYCRCVGSIHVSNGKKKGEGNTKNGNRFLAWAYVAAANFAIRYCESARKFYQRKKAKRNGIVAIKAVAHKLARACFHMLKTGEKFSVERCFM

SEQ ID NO: 228384 - protein, 442 aa, unidentified
MEKVIKFEQVNEAAAGIDIGSEKVYVSPDGATVENFGTYSREYQRCIEYLRQWKIKRVAMEATGIYWIPLYQLLEQAGIRVSLVNPKETKQKKGKKTDVRDCRWIQKLFCAGLLKESFIPEGKVLELRYLIRERLDIIEMGSTYVNKMQRCLELMNIKLTQVLSQVHGASGMRMLRAIIKGERDPQALLLLCDEKIKKHKGLDVLQALEGNYNDTWLFMLEQNISLWEMHQQQVKIIDKKIAEILEMLSSQKPLMDASAYGIVKPVRHHKPAIDNLHVMLVHLFGVNITSVPGINDYSALRLIGETGTDMERYGGGNQFVSWCSLSSGHHQSGKRSKWVKQAPCNKAGQIFKQIAEALENSKHIAIGCFIRRLKARRGAAVAYKAGARKIALAYYNALSTGIPYIEKGVKQYEEQLKKKELGTLKKLAKKHNMQLVDNQKAA

SEQ ID NO: 228385 - protein, 391 aa, unidentified
MVCVGIDVAKDKHDCCILDSEGTTLVDCFTIPNNMDGFKSLLQTIQDCSQKSDKIKVGLEATGHYSYNIRGFLLDNDLPVYVMNPLHTNLYRKSLSLRKTKTDRVDAKTIATMLLSDVDLKSYTDTAYHNEELKSLTRYRFDKVQERAKLKQSVSRLVTILFPELEQLVSSIHGTSIYALLSEYPGAKQISEAHLTRLANILVTTSRGHYRKDRATHIRDAARTSIGSVMPAKSLELKHTIKLIQELTSEINEIEDAIRKIMDELKPPILSIPGMGFYSAAMILAEVGDFSNFNSPDKVLAYAGCSPSTYQSGKLTNCYAHMEKRGSRYLRYALYTATKYVCYWNPVFTEYLTKKQAEGKHYNVALSHATKKLVRLIYALQKSGKAYLAIT

SEQ ID NO: 228386 - protein, 352 aa, unidentified
MNTVKFIGMDVHKKTITIAIADKGRQKQPRIYGTIANDLDALDKFCRKMVSTSSLLYLVYEAGPCGYGIYRHLSAKGFDCMVVAPSMIPKKSGDRIKNDHRDAAMLARLHRAGELTAVYVPNAQDEAMRDLSRAREDAVMVAKKAKQRLKAFLLRNGIVFTGKSQWSKAYFNWLANIAMPFPAQQVALQEYIDTVHENLNRVNRLTDQIRQLVPGWRLAPIVNALQAARGVSLIVAVTVLAELGDLSRFDKPSQLMAHLGLVPSEHSSGDSIKRGGITKTGNSHVRKVLVEAAWAYRMQARISLLLLKRQQGLPDQVCRIAWKAQLRLCVRFRRLTARGKTKQKWLPLSPVN

SEQ ID NO: 228387 - protein, 362 aa, unidentified
MDGSSVQPQMTAGLDLGDNYSYLCLIDTQSGEIMEEGRLRTTPESLRRRFASHERPLRIAIEAGTHSPWVSRVLEECGHEVLVANARKLRLIYANKRKTDEMDAENLARLARLDPKLLYPLKHRGEDSQAHMAIIRSREALVGCRTQLVNHVRGAVKSFGGRLPKCPARSFHKKAAAYFPEALWPALGPILETIASLTERIRDYDRQLEAISKEHYPETDLLRQVEGIGVLTALTFVLTLEDPYRFERSRSVGAYLGLVPATNQSGDRDPQRRISKEGDEMLRKLLVGSAHYILGPFGSDSDLRRQGEKIASRGGKNAKKRAVVAVARKLSVLLHRLWVSGEVYDPLYNTHRRQEQEQEEAA

SEQ ID NO: 228388 - protein, 314 aa, unidentified
MIISPHCVGIDVSKRMLDIFDDAVGRPERIANTLQAITERVAGWRCGNVFVVFEATGVYDRELAEALRQADIRFARINPARARDFARADGRLAKTDAIDARMLAIFARKMMPAVEPAPEPARSALASLAKRRDQLVQIRAQEKNRRSEATDRTTIEGIQRHLDFLNGEIKAIEASIKTLIKAEPDISEQARLMRSAPGIGPVACMQLLAKMPELGCLGSKQVAALAGLAPFNVDSGSYRGKRAIGGGRKRVRDALYMAALNAVCRDLTMKAFYQKLRTVGKPAKLALIAVARKLLTTLNAMLRDRKAYVRPQPT

SEQ ID NO: 228389 - protein, 430 aa, unidentified
MTNRDPIPSDVVLVALDIAKVRNEVLIEASHHKRRRRLSVLNTRAEHDRLIEVLRAYGKPVICAFEATGDYHRPIAWRLIEASFEVRLVSSMALARTREALHNGWDKNDPRDAQVILHMLRIGATQRYHDPIRAGINDVQELSKTHEAIAKAKTEIQHRILTHYLPLYFPEIERFRGNSRSDWFFAFLDAFPTPASITALPKEAFIKTAWSVAGRKVSKERLLSDIYETARTSIGLPLPWDAPAIRMFRMVIAEARSLIRQRNEIERMADDLLGESADYHALRRIPGIGPIIALTILAEGGDLRRFGHHRQFLKFCGLDLSTQQSGQYRGQTRLSKFGNARLRRTLWIAGQVAIRQKENGFRHKFERYIAKDRDNPDLRRKALTAITAKMARVVHAVIKSGSDYRPFVEGRVPGGRTSVSKSREGATATL

SEQ ID NO: 228390 - protein, 484 aa, unidentified
MAKRKMSTFERLKIGQMNRTQRRKLGLRVAASDPGLTIVHPNAGGIDVGNESHFVAVPPDRDANPVREFGCWTAALNEMAEWLKSCRIDTVAVQATGVYWIALYDILEQHGIRVVLVNAQHTKNVPGRKTDVQECQWLMKLHTYGLLRDSFRLQQDMEQVRTFWRLRDRHVKEAGRAVQHMQKALTKMNIQLANVISDINGDSGQAIITAILQGQRDPYKLAALANYRIQASREEVARSLEGNWRPDVLFELQQAVDSYHFAHLQMEECDEKLTRYLASLPTRMLDIPVQSKGVPETKAQKRKKAKKPRANEPRMDMKEELKRICGVDLTSIDGINVMTAFTVISEVGTDMSRFQDEDHFTSWMGLAPSKDISSRKVVGRGKKKVKNRVAVALRTAATTLLESDTHLGARYRHLRRQLPTFQVAIKAMARYLALLIYRLLTHGEAWVDRGAAQFERRRLERELASLHSKARARGFTLVPIAEAS

SEQ ID NO: 228391 - protein, 409 aa, unidentified
MLFAGIDWASEEHAVAVHDDAGKSVAAFMVEHSAEGLDKLVARLRGMAEPAELTVAIERPDGRLVDRLLEAGHPVVAVSPNAIKVWREGEVASGAKSDPGDAAVIAEYLRLRFRKLQALRPFSDETRALRAAVRARGELVDQRTVVHNQLAAILDAFWPGAREVFADIASPIALAFLRRYPTPASAGTLGEKQMAAFCKKQGYSGRRSPAELIERLRKPPAGIVAGAEMGARKAAVLAYVKVIASLNAAIKDLDKEVATRLGEHPDGEIFTSLPRSGLINAAQMLAEWGDCRQAYDGPDAVGALAGMSPVTKKSGKHKSVHFRWACNKRFRNALHTFAGQSRHGSDWAAGIYDRARKRGADHPHAIRILARAWIRVIFACWRDGVAYDPAKHNAAAALAASSDSAPQAA

SEQ ID NO: 228392 - protein, 413 aa, unidentified
MDVVHPRCAGIDISKRDAKVCVRIQGRGNTPTTSTVTTWGAMSNQILALREHLLTERVSCVVMEATGDYWKPYFYLLEDTLTVMLVNAHDARNMPGRKTDVSDAAWLADLGAHGLLRGSLVPPAAIRELRDLTRARTALTRDRSRQVQRIEKVLEDAGIKLSSVATDIMGVSGRAMLAALIAGTATPAAMADLAQRRMRSKIPALTEALTGRFTPHHGYLIRMHLDLIDQYGQALADLDVRIGEAMAPLAAARELLISIPGVSRIVAEVLLAETGGDMSVFPTAAHLASWAGTAPGCNESAGRVKSTKTRRGNRYAKTALGTAALAASRTKGTYLSAKYKRIAARRGPMKALVALEHSILVATWNMLTNGEFYRDPGADYFTLRIPAKTKARAIGQLEALGYRVSLQPLTDTA

SEQ ID NO: 228393 - protein, 383 aa, unidentified
MGKATRFVGLDVHADSIAVAIAEGGRDGEVRALGTIPNRPDSIQRLVKKLGPADSLQACYEAGPCGYVLYWQLEGLGVRCVVAAPTLIPVKAGDRVKTDRRDAIKLARCFRAGELTAAWVPDKAHEALRDLVRAREAAKKDQLRARHRLGKFLLRHGRRPPTPCRSWGKAYMEWLRGVRFEQFAQQATMVDYLAEVDHAAARIERLEKAIDQAVAEAPPETRAIIEALQALRGVAKMTAVTIATEVGRLSRFERPRQLMGYSGAVPSEHSSGGPGKARRGAITKTGNAHLRRVIVEAAWAYRHRPAVQGSLSARQAGLSEPVKEIAWKAQHRLHTRYRRLVAKGKPKQQVVTAIARELLGFVWAIGIQVERELTATSTTRRAA

SEQ ID NO: 228394 - protein, 351 aa, unidentified
MSEYIAFDSHKRYTWVDREDHSTRKNSCHRLEHAPGAVREYLSGSEPGTAVAVEATGNWYWIIDEIEQAGLRPQLVHPRKAKLMMGLTNKTDKLDAQGLNRLQRNGTLPTVWIPPGPLRDLRELTRTRLVLVGQRTRLKNRLSATLAKYGTPASECSDPYGKRGRAELDKHLEGLPEQTRWVSGQLVAQLDFVGSQVRQLEQRLAELVEVTPQMQWLLTLPGVGVILAATIALEIGEVQRFPSAMHLASYSGTTPRVHASGGKVRYGSLRADVNRYLKWAFAEAANSVAVNHRRCPERHVSQLYRRLHQHKGHPKAIGAVARHLAEAAFHVLRGKQMYQDPSLGRGRTSQV

SEQ ID NO: 228395 - protein, 415 aa, unidentified
MDVIVQRPAALDVHKERVTACVRFPAADGTRAQEVREFKTTVGGLLVLHDWLKAHGVTRVAMEATGVYWKPVWAVLEDSFELLLVNARHVKNLPGRTTDIKDAEWLCQLLEAGLLRASFVPPKPIRQLRNFTRYRKAQINERQREANRLHKALEDTGIKLDCVATDILGKSGRAMLDALCQGTTDPEVLANLAKGKLRAKIPALREALEGRFEAHHALLISSILAHLDFLDEQIERLSDAIEEQLRPFQPAVDVLRSVGGIETRVAQNILAEIGTDVSVFSPAGHLASWAGQCSGNDQSAGKRRSGRSRKGSKWLNEALKDAAMAAIRTNNSYLQAQYRRLKPRIGHGRALGAVKHSIICAIWHMLTTGETYRDLGGDYFHNRDPERQTRPARRPARTPRSQGHPRSPTGGRLMY

SEQ ID NO: 228396 - protein, 400 aa, unidentified
MLSIGIDVSKGKSTVCGMKPGGEIVYTPFEVQHTREGMSELVSLLRSSGEEVRAVLESTGSYHCPVVAALLENGIFVSVVNSLRMKRFCSQSIRKVKTDRIDAMQIALYGLAYWQELQPTKLPEDTYRELQLLARQYYQMTSMLIKAKVDFNALCDQVLPGMQELMSDHAGRHKLSDFVLRYRHTTHILEMGETRFRKDYCKWAEKKGYRNCERMAALIFATAQNGIPVLPNAPSTQIVITEAIRVLHTVEASRDAILTQMQALAKTLPEYSLVREMPCIGDTLAPRLIAEIGDVRRFHSKRALIAYAGIDAPPYQSGKFCANNRHISKRGNRYLRKTGYEVMQSYVMHKPANDPIFTFIEKKRSEGKSGKLAMVAGLNKFLRVYYGKVTELYRSLPAIE

SEQ ID NO: 228397 - protein, 351 aa, unidentified
MAMLADLVELVIGVDTHKHTHTAAVVRAATGAMVDQTTVPSTPAGYQQLLRLANRQRGRRVWAIESTGGYGAGLTRFLQTQAEQVVELDRPKRAARRRGAKSDPLDATRAAREALGRDQLAQPRAAGHRAALSVRLAARRSAVQAATDAQRLLHALVVAAPDLLRSRLRGLTTPRLVSTCGRLRQRADWDTETAATAASLRALARRIQVLNAETADHTQAITTLVRAWRPELLTPIGVGPMVAAIVLCAWSHPGRCRSDAAFAMLGGAAPIPASSGQTIRVRLNRSGDRQLNQALHLIVLTRLRYDPATRAYAQRRRAEGKTNREIRRCLVRYVARQLYRLLEANPSFDPT

SEQ ID NO: 228398 - protein, 355 aa, unidentified
MEKIYDKCCGIDVHKKLIVACFRCGRKQEVRDFGATTRELLELADWLREGGCEMVAMESTASYWKPLYNILESSGLNAMVVNARHMKAVPGRKTDVKDAEWIADLLQHGLLQPSYIPDKDQRELRELVCYRKSLVGERTRELNRLQKMLEGANIKLSGTVSDINGKSARSILEYLLTGESIDGAKYDEMYERKIIAHNLKATKEQIIDDLNGVMSPLQRRMMKELLAHLDELNDHIKNLDDEIDNFMKPEEKQASQVIRDVTGIGNTSAQAIISVIGTDMARFPTDKHISSWAGLCPGDNESARKRKSGKTRKGNSLLRTTLITCAHAAVKNKKSYFHAQFMRISAHRGSKPIPC

SEQ ID NO: 228399 - protein, 425 aa, unidentified
MNYKQNEKINQVKESTLVVGIDIGSTTQYARAFDWRGIELGKVFPFSNSREGFESFKAWMKHLQDKYKKLDAIVGIEPTGHYWFDLGAYLEDEGILLVMVNPYAVKQTKELDDNSQSKNDRKDPKVIAKLVTEGRYSAPYTPDGVYADLRIMVANRKRLIREMTQIKNRFARWFAIYFPEYTDVFGDYEAQSSMLLLKKVCTPEAIVELGAEKINQIWRDAKLRAVGMKRATTLCETAKRSIGLKKGSSAARYEMKLLLEDYEYKKAQLDAVMEEIEKLCRKIPESRQMLAIKGIGVITVAGFLAEVGDVRRFESPRQIQKLAGLSLRENSSGKHKGQTTISKRGRSKLRAVLFNAAIPLIAKNPEFKSLHEYYTTRANNPLKKKQSVIAISCKLIRVFYAILANGVTYDAQKMLSDIHRQPQAA

SEQ ID NO: 228400 - protein, 401 aa, unidentified
MNAVGIDVSKGKSMVCVMRPFGEVVLEPFEVLHTAQNLHDLAEKLKALDGETRVVLEATGNYHKPVAFVLHDAGLFVSVVNPVLIHDYDNNSLRRVKTDRKDAVKIANYTLDKWTRLRQYLPEDDTRLALKNCYRQYQQAVAIRTMLKNNLISSLDLTFPDANKLFTSPAKSNGCEKWVDFIGDFWHSECISSLSANAFAKKYLKWCQKHGYVFTRSKSDEIYACAVNSASLPKSPTSKLLIQQQVAQLKAVSQSVAAFRQEMLRLSQQLPEFDTVMEMYGIGPSLGPQLMAEIGDVRRFSSKKSLIAFAGIEPQPNDSGKVVGNDKGISKVGSAVLRRTLFLIMTVILQTQPQDEPVFQFMNKKRSEGKPYKVYMMASANKFLRIYYARVKAVMDSERSQ

SEQ ID NO: 228401 - protein, 475 aa, unidentified
MNLKGTKKKNQVSNANIFEQQELLKKIEVVRENLTASTWHELETKGKFDKNAKLSFICDDMLILGCDVGSETHYLRAIDTRGRELSKSAFSFSNNVDGFSKAKEWAVKIAAEYDKKQIVLGLEPTGHYWFCLATWMISNGISVVQVNPYAVKQTKELEDNSQLKDDAKDPKLIANLVKDGNFGMPYLPEQLYADLRRLSMFRDQLNEDRIRSINRLHRELKIYFPEYKEALGKTEGTFSLELLKQAPFPDDLAALKEDGIRQIWHNAKLRGRGYSRAGEILEYAKASVGIREGKETGKLVVQWFVQKILELDAELALIETQINQKCLEIPHTDKVLEICGIGGNTLSGMVAEMGDISRFDDVKEIQKLSGLGLVASSSGKHKGETRISHRGRKRLRYWLFQAAKSAVAHAEEFKKLHVYYTTREQNPLKKMQSLIAIACKLLRIIFTILKKGIKYDPRKMLKDIRRESRQESLAA

SEQ ID NO: 228402 - protein, 431 aa, unidentified
MNYNQNHKITQITSETLIVGVDIAKHNHVARAQDFRGLELGKTCFFENTKAGFHSFLDWINQLVKECKLNQVIVGMEPTGHYWLNLAHLLKENNIKFVSVNPLHVKRSKELDDNSPTKNDVKDAKVIAQLVKDGRYAEPTIPQGIYAELRVAKKLRDLLNVDLQVVQGQVHNWLDRYFPEFLTVFKSWEGKAAIHFLKLEALPYELVKYTDEELLLSLRQVVKRSIGLKKIRALKEAANRSIGIRQGAAMAKLELRALLEKYDFIQMKFEELDYQLDQLLDHIPGVTQMLEVSGIGRDTVAGFFAEVGDLRGYQHPRQIVKLAGLSLKENTSGKHKGQTKITKRGRKKLRALLFRAAMILVAKNKAFKALHIYYTTRAQNPLKKMQSLIALCNKLIRILFSIGKKQFTFQEDKMLMDIPHMATFMVHQTVA

SEQ ID NO: 228403 - protein, 368 aa, unidentified
MKNVLYVGIDVDSKNFHAAGFCEQTGELLEFKCKPNNSSLLNKLRKLEEKGFILKTCYEATYLGYTLHRFLESKKVDNQIIAPSLIPEVAGHQIKTDRLDCIKLAKYLAKDLLTQVYVPSLEDEQTRDFIRSRSFLVDERAALKKHILATCRRYGMDYKQETKGKTYWTQMHTEWIDKQLSKLGEVASINLKLLLNQYDNLCDAIFEYNEKIEELANSEKYKKKKDALCCFRGVATTTAMTLITEIGDINRFSHPSKLTSYAGLDIREYSSGGREKKFGITKLGNSKIRTAAVESCQKSSLEYRISKRLKANRKGQPEEIINIADRCMKRLRKKSLRLQHKGKHINKVKVACAREFLCFTWEALRAVA

SEQ ID NO: 228404 - protein, 340 aa, unidentified
MDEYDGRRFVGVDLHRRRSVIVQMTPDGQRIGPAVRIDNDPFELARQVALWDESPQVVLEATYGWYWAADVLAEAGATVHLAHPLGVKGFAYRRVKNDERDAADLADLLRMGRLPQAWIAPPEIRGMREAIRHRSKLVAIRSGLKAQVHAVLAKQGVRVAVSDLFGVGGQQLLDDLELDAPFAARVTSLRRLIDAFTFEIDILTKRTSADLKTHPGFQAIQAIRGVGPVLAAIFVAEIGDVTRFARPQQLCSWAGMTPKHRESDTKVHRGRITKQGNPLVRWAAVEAVQTLRDGPIGHARVSIGERRGANIGKVAAARKLLTLVYYGLRDGHIRCLDRPA

SEQ ID NO: 228405 - protein, 352 aa, unidentified
MIVLGADTHKRSHTIAAVAAATGEMRGEQTVQVGARGFDALLRWARGLDGERVWALEDCRHVSGSLERFLIARGERVLRIPTHLSASARKSARQRGKSDPIDAVGVARVVLQEGLESLPTAHLDGPELDLRLLVDHRERLVRQRVALNSTLQWHLHDLWPELQLPGSSLFYGRWAPRVARRLARTEQTMRVRIARDELRRIRELSQAIKALEHEIAELVAKIAPQLLSEPGFGPLTAAKLVGEIAGAQRFATPAKLARAAGVAPIPASSGNTQRQRLDQGGNRQINAALHRVIVTRARCHPETRDYIARRQAEGKTTREAIRCLKRYLARHVWRLLQPPHPGQGTPPSPSIS

SEQ ID NO: 228406 - protein, 439 aa, unidentified
MPDPTSHFPSNCSSNPSFAAFISIDWADEKHSVCIQSAGSATVQSKEIAQTAEALSEWCNGLLAQFHGQKLAIIVEGNRSGLIYHLLGYSEFVIYPINPKAAAKYREAIYPNGSKTDPIDAALLLDFLLHHRDCLRPLAPDTDQTRILGQLSEDRRRLVDTRTEILNRLTARLKLAFPQILDLFDVLAQPMVADFLKKWPSLEKLQKAKPDQIRRFFYAHNSRSEELIVARLALIANAKALTRDAAVLTTATLMIEELAVLVQGLHRSIARYDELLVKLTQAHPLAPIFTSLPGAGKILVPRIISVLGTVPERWPKAYDLLCFSGVAPIEVASGKQYSVHWRWNCPRFLRQTFIEFAYCSMNQCPWAKAYYDDQKSKGKKHHQAVRALAFKWIRIIWKCWKLKTPYDESIYLKSLVKKNAPLLVTMNKSITPSLQTVTE

SEQ ID NO: 228407 - protein, 344 aa, unidentified
MQITTIGLDLAKNVFQVHGVDATGQVVVRKSLRRAQMLPFFAKLPACLVGIEACGTSHHWARELIKLGHEVRLMPPAYVKPYVKRGKTDAADAEAVCEAVTRPTMRFVPVKSPEQQAALSMHRTRDLLVKQRTQLINMIRGLLAEFGVDIPKGLERALLMARQIVDGKAPDVPLEAAKIVGTLSQQALDTHVRLREIDRDLLVWLRGNDVARRLTTIPGIGPVGATALAASVTDPHQFRSGRQFAAWLGLTPLQKSSGGKERLGRITKMGDKYLRKLLIVGMTSLVRRAKQNPGKIDPRLADLLARKPARVATVALANKTARVIWAIMARGETYRTGHQPALAA

SEQ ID NO: 228408 - protein, 349 aa, unidentified
MTHPPLRRTYQLYVGVDVAAATFDAAWQTLDGAPTSARTFQQTPTELTRFQQVLQTTGVAPAETLVVLEATGSYWVALAVRLHAAGYAVSVVNPAQVHAWAKSLPRRSKTDALDAQLLAQFAAERRPPVWTPPPAIYHELRQRLVARDGLLEMRQQARNQLHALIQWPVVVAAVQQQLEGVIATLDTQIQTLDSAIAAVLAESSWAASSAHLQSVPGIGLVTAAWLLVATVHFTTCPTAEAAVGYAGLNPLKGDSGTSVRRRAQLGHGGHARLRTALYMATLSAAQHNPVIKTFYTRLRAAGKPVKVARCAAARKLLHLAFAVVTKEQDFDPSYQKTPSSVSLKVGIAA

SEQ ID NO: 228409 - protein, 327 aa, unidentified
MNEDFSTELKASLGSSSWWGVDVASDKLDLACYEETEVLTFANSPRGIEQLVARISGQGAALIVIEATGGYELPLLSALAVAELPVVRINPRQLRAFAVAVGELAKTDRIDARLIARFAHDVRPAVRSLPTAEQRRFGDLAARRRQLISLKTAESNRLQKTCQREVQRSIKVVLGVLDRQILLLEQQLSELVAADQHWQQQTQLLRSVPGIGTVTSQILLAELPELGQLEHKQIAKLVGLAPLNRDSGKLRGRRTILAGRGTVRTALYMAALSASRFNPPIRCFYERLRQAGKPFKVAVVACMHKLLTMLNAMIRDQTAWRNSSLIT

SEQ ID NO: 228410 - protein, 391 aa, unidentified
MIYVGIDVAKDKHDCFITNSDGEVLFKSFTIPNNREGFETLFQKVQSVSDDLTKVKVGLEATGHYSYNLLGFLLDKGLPTYVINPLHTNLYRKSLSLRKTKTDKVDAHTIASMIMSDVNLKSYSDTSYHNEELKSLTRYRFDKVQERAKLKTSVSRLICILFPELEKLVPTIHMASVYAMLSEFPSAHAVASAHLTRLTNLLSESSHGRYGKDTAVMFREAARNSIGSNMPAKSLELKHTIKLIQELTSEIDEIETEIKSIMDEVNSPILSIPGINYRMGAMIIAEIGDFSRFDSPDKILAYAGMSPSTYQSGQLDNCYSHMEKRGSRYLRYALYNATKYVCHWDESFGTYLAKKRAEGKHYNVALSHATKKLVRTIYAMEKTGQSYSSAS

SEQ ID NO: 228411 - protein, 411 aa, unidentified
MEQIYHRVAGCDVHRDEVAVCVRTPGPRGGVQKEKARFKTTTAALAEMGNWLAERAVELVAMEATGVYWKPVYYALEDRFTLWLCNAYHVKNVPGRKTDLSDADWLADVAAHGMVRPSFVPPPPIRELRELTRYRKKQIDTRASEVARLEKVLQDAGIKLTSVASKVLTQSGRAMLEALIKGERDPRALAELAKGKLRPKIPELTDALTGHFGAQHALVAARILAHLDFLDQTIAELSIQIAARVAERYQAALDLLLPIPGLDHTSIEVIIAETGAEMSCFPSPAQLASWAGLCPGNHESAGKRRKVATTPGNQWLRRTLIESARAAARTKDSYFGAQYRQIARRRGPNKAAVAVAHSLVDVIWHVLSTGEMFTDPGADYFTTRQDPEYRTRRLVNQLQQLGYTVELTKAA

SEQ ID NO: 228412 - protein, 404 aa, unidentified
MIDIEIIFGIDVSKHSSNVAILADDSVIKEFKITNDRIGYETLDDALNSFKSPKVIFESSGIYSRSIRAFLQRKNWIYTEINPLAAKKDMDGFRHNKNDQLDAVALATAMAHYHYQSTFREAGVYEELHDLERTYQEFNEDLVRAKNRLHKNLQLTFPEVEQFISTTDGTLYWHVVQQFPHPTFVLETKLSELAQLILKATLKNMSEKRALGLAEHLKELANKSAPAVSSDACAVSSVVYLAGEVERLNDKKDEIIREMSQISVSLNEIPILQSIPGLGIKTAVCLLAELGDISRFHSSNAINAYIGIDLIQYQSGDYEMGQHIRKRGNSYARKILFKAVLNMVCAAKYHPSNVSILYQRKKQSSSETHTKKIAIAAMGRLIRTIYHLIKNNELYDSRKCLPQH

SEQ ID NO: 228413 - protein, 349 aa, unidentified
MQDITTIGIDLAKEVFAVCALDATGAVVYGKVLKRDAFMAWAEGLPPCAVAMEACGSAHHWGRWFAARGHTARLIAAEFVQPFRKSIAAKNDRNDAEAIAIASRQPTMRYVTVKSVDQQSILAWHRMREGWKEERTALLNRLRGLLGEFGVWPARSSDKLIRALPVLSEDVRLPAPVRAIVMETREQLSALHARLACCDQEVARHAHEHPAAKRMKEITGIGTLTASAAAATVADAKSFACGRQFAAWLGLVPKQMSSGGKPRLGRISRRGDAYLRSLLVQGAKSALQTALRRSPEKATRLQRWIVEIYARVGYHKTLVAIANKHARMIWAMLARDRGYDPDAWQRLSA

SEQ ID NO: 228414 - protein, 428 aa, unidentified
MDKRNENSWERRRYYLGLDWAKEKHDIVVVDRNGRVVLDMRIEHAAKGWYRLRTKLAELAGLDLSVVAATIETNRGPAVERLLELGCAVYPLNPKAAQRYRDRKAPSGGKTDHLDALSFADALRTDGHGWRRLKPEDPKIQELRLLCRDEINLIEQRTALVNRLQEALYEYYPAALEAFDDWTAPAPWAFVERFPTPEALRKAGKRLWEKFLHTHHLYRPETYQKRLDVFARATELCGGQAVTNAKSMLAVSLVKQLRLLAQQLKVYRQRIEKLFQEHPDSYLFGSLPGVGEKLGPRLLSECGEDRERFTDHQALQCYAGTAPVSFQSGQVHKVKYRYACNKNLRAAVHLWSNLSRTKCTWAQIYYQQKRLQGKSHACALRCLGQRWLKILWKMWQTKKPYDEQLHTHNQIEHGSWVLAMKSEQNSAI

SEQ ID NO: 228415 - protein, 415 aa, unidentified
MRVMYSHCCGLDVHKKSVSACLLAPDESGEMKQELRRFGTMTRNLLELSDWLAAHKVTHVAMESTGVYWKPVWNILEAQFTVLLVNAQHVKAVPGRKTDSKDCQWIADLLQHGLLRGSFVPPNPIRELRDLTRMRATLRQDHTAVANRMQKVLEDANIKLASVATDWLGVSGRAILSRLLEGETDPEQLANLCRGRLREKLPEMQLALEGRMNHHHRWMLRHLQEQLEFLEKQIATLDAKIQEQTRVYQDVICLCTTIPGIEDVAAANLIAEMGFDMEQFGSAPQLASWAGMCPGNNESAGKRLSGKARNGCVWLRRSLCQAAWAASHSKNTYLAAQFRRIAARKGKKRAIVAVGHTILVILYHMLKNRQPYRDLGADYFDRRDADQVKRSLMRRLERLGFQVTIKELAALSTPE

SEQ ID NO: 228416 - protein, 369 aa, unidentified
MNTTTFVGLDVHARSIKAVALDAMTGEVRSATFAYDAAAVAEWAGSLDPAAKCVYESGVTGFDLQKKLTALGVDCVVGAVSKMIKPSADRKRKNDRNDAEFLARMLSVGNVVEVCVPDDECEAARDLVRALDDAREDLKRCKQRLSKFLMRHGYAFSETTPTGRRKGNWTAAHWAWIRSIEFPEKADDDVLAYYVDAVRQAMENKKRLEKLVEAEASKPRWKKRVDSLRCLKGVDAMTAADIVFEAGEFSRFKNARSFAAWLGLTPSEHSSGESARQGGITKAGNKHLRRVLVEAAWHYISASPHPKDLAKGQAPDPAARRHAAKGIRRLVKRREEMLGRGVHKNKANVATARELACWCWAVGRMVENG

SEQ ID NO: 228417 - protein, 411 aa, unidentified
MDKIYDNCCGIDVHKKLIVACLRKGNRQEVREFGATTRELLELADWLKTSDCKMVAMESTASYWKPLYNILESSDLNAMVVNARHMKAVPGRKTDVKDAEWIADLLQHGLLQPSYIPDKDQRELRELVRYRKSLVGERTRELNRLQKMLEGANIKLSGTVSDINGKSARSILEYLLTGECIDGAKYDEMYEQKIIAHNLKATKEQIIDDLNGVMTPLQRRMMKELLSHLDELNTHIKNLDDEIDNFMKPEEKQASQAIQDVTGIGNTSAQAIISVIGTDMERFFTDRHISSWAGLCPGDNESAKKRKSGKTRKGNSLLRTTLITCAHAAVKNKKSYFYAQFMRISAHRGKKRAYVAVAHSMLIAIYHILKDGVIFKDLGADYYNQFNKERKINAYLKKLKALGWEAPVVAA

SEQ ID NO: 228418 - protein, 393 aa, unidentified
MDMIYVGIDVAKNKHDCCILGSSGAVLREAFTLSNDRKGFQELFSAIQEALHQEGTDQIKAGLEATGHYSENLVAFLRNSGIQPVVFNPLQVNLFRKSQSLRRTKTDKVDAKCIAQLLMSAESTPVFASYQIQELKTLTRHRSRLVSQRSKLKQYISRLVDILFPELPSVCCSATQASMRTLLLELPSARQIAACRIDRLTNLLYAASKGRYSREKALEIKQLAQQSIGANSPASEMELRLTLQQLDFLLDQLKQLEKAIQTIVAALHSPILSIPGIGPTLAAIILAEIGDIHRFSSPDKLLAFAGMDPSTYQSGKFTAGHTPMVKHGSTYLRWALMQAARLASIHCATFRDYMDSKLAQGKHYFVALGHVSKKLVRVIFHILTTNEAFVPQA

SEQ ID NO: 228419 - protein, 434 aa, unidentified
MTRYVGIDLHKHLIVGHVIDAAGKQVDTFRYESVHHVTLDHIGSTRLTPQDEVVLEATTNCWAVVRALEPFVARVAVSNPMATRAIAKAKVKTDKVDAAVLAHLLRLGYLPEVWQPDHATRDLREWTARRSRLVGQRTAVINRLRSTLAQRLLDCSHDMTCPAARKWIAGQNVDDDTRWLLDSDLRLMDSLQGELDAMDKLMAKRGYVDPRVKLLMTLPGVSRHTAQSLLAAIGDITRFRDADALASYLGLVPSTRQSASHCYHGPITKQGRRDTRRMLVQSAHAVRAHPGPLGHFFRRLRKRKPRNVAVVAVAHKLVLLAWHLLTKGEPYRYALPQATQKKLSKMRIQATGEKRRTGSVPGTKKSPARLPGGSHRIKPLAEVYASEQVPAARQAPAGELRHLAASKLNNFADSLQQAHIVPRRRPKEDGAETR

SEQ ID NO: 228420 - protein, 363 aa, unidentified
MEKYIMVGCDLHEGSMLLKIAEAREPSIRKSFKNRAASRKKMIAELKRHAEKADAKRIIFAYEACGFGFVLCDELTAAGVECYVLAPTLMPRSTKRRRMKNDDRDAEAILQLLRNYVLAGTELPSIWIPDLQTRDARERVRRRLDLGERLGTIKTQIRWLLYRNGIEKPISVGENWSVSYRGWLVELAANDLGPGTGATLDSMLRQHDWLVEEKARMQREVEALSCSDAYRPYAAALCCYKGVGVLTAMTFLTELGDAGRFDNRRELGCYLGLTPTSDESGKSDDHKGHITRQGPARVGKVLCQAVWSRIGSVAEEMEAYYNLVARNPKKKKIAIVARMRHLGVLLWHEMKDVQDRLRRQAAA

SEQ ID NO: 228421 - protein, 347 aa, unidentified
MTIVDSTRPLVGGVDTHLDTHVAAVVDPNGGVLGVKSFPTTSSGYEELAGWMGSFGPMERVGVEGTGAYGAGLARHLAANGLVVIEVDRPNRQARRRHGKSDQLDAIEAARGALSGRLTGHAKAGTGNVEALRVLLVAKRSARSTRIRTIVQLRHLTFTAPDDLRQRLTPLTAAGLVKAAAQLRPRAGSDTVRQATKTAAMILARRVQALDAELVILDARIGPLVTATAPALLNIYGVGIDTAAVLLTAAGDNAARIRSEAAWAQLCGVAPVPIMTGKSNGRYRLNPGGNRHANNALWRIVLTRLGQHEPRTVAYMNRRLAEGKTKPEIIRCLKRYIAREVFQALPR

SEQ ID NO: 228422 - protein, 338 aa, unidentified
MYYVGLDIHANQITICVLDDKGQVFRRCQVRQIDQMMSFLGQLPRPRRVCYEASTGYGMYFEMLSEVADHVAVAHPGLLRLIFRSKQKNDRRDAEKLAKLLYVGEVPTVHVPSADVRAWRELITFRRKLIEKRTRAKNAIRGLLRSLGIQAPRKPGLWTKQGMAWLKQLALANFMHALKRDLLAEEIISLSDQLRRVERELARYSANSVAVQLLRSIPGVGPRTAEAVAAFIDDPHRFANSKRIGAYFGLVPSQDQSGNTNRLGHITREGSATVRHLLTEAVWQATRRSPTVRAYLERLQRGEADRRKIAIVATAHYLVRVMWSMMKHGTLWQETVAA

SEQ ID NO: 228423 - protein, 430 aa, unidentified
MTTREVTPLDAALVAIDVSKARNDVLIELPGSRRRRRLTVPNTRTEHDRLIEILRGIGHPVIVGFEATGNYHRPLAFRLLEAGVSLRLVSSVALARTREALHNGWDKNDPKDAQVILHMLRIGASQVYLDPLRAGINDIQELSNTHEVISKAKTELWHRLLTHYLPLYFPEIARFAGNSRSDWFLAFLERFPTPASIIALAKEEFVESAWDVVGRKVSKARLLGDIYETARSSIGLPVAMESSAIAMFRLVVSEGRSLIRQRDAIEELADAALAGHPDYHRLRQIPGIGPIIAMTVLAEAGDLRRFKHYRQFLKFCGLDLATYQSGQFRGQTKLSKFGNARLRRAFWVAAQVAIRQRDNSFRSKYERYVARDRDNADLKRKALTAITAKMARTAHAIIKSGSDYRPFVEGPMPSGRTSLSRCREGASATL

SEQ ID NO: 228424 - protein, 320 aa, unidentified
MMAQNDLVVVGIDVAKDKVDACIRRFTLRQTFPNTAQGHRKLVAWLRKYQVGKAVMEASGGYEREWRNVLHNAGIEVRIVDPKRVRSFAQSAGRLAKNDPIDAEMIAWFAETFSQAPGQIPDAAREELAALAKARKALVDVKIRLQAQDEHAAPEPARKAYARVSKSLAAEIDRLEAAISAKVKATPEFAERAEIIESVPGLAQATSAILIAGMPELGQVSDEVAAALIGVAPYDDDSGKRRGERYIKGGRRWVRNAIYMPCLGAATQYNPVLKAFYQRLLAKGKEPKVALVACMRKLIIILNTMLARRQKWNPGRHAMA

SEQ ID NO: 228425 - protein, 352 aa, unidentified
MIIIGVDFHPEFQQIASVDTGIGEFQEKRLTHREEAENFYRTLAGQKVRVGMEASGHARWFERLLSELQLELWIGDAAEIRTKRVRKQKTDRQDARLILQLLLEDRFPQIWVPSWENRDLRQLLWHRHRMVQARTRIMNQLQAVALNEGLRCKKRLWRERGRQQLESFRLAPWASRRRRDLLELLDRLNPTIAELTQAIEQEAEKCPPAQRLRTHPGVGALTALAFVLIIGEADRFHCGKQVASYLGLVPLEDSSGNRRRLGHITKQGSSILRFLLVEAAQVTVRSLPEWRSKYFHLAMRRGRKIAKVAMARKLAVCLYWMWRKGWNYEQLTKFGSHAGQPGNLHGVQSNTE

SEQ ID NO: 228426 - protein, 342 aa, unidentified
MNQYAGIDVSLECSSVCVVDANGKILREARVASEPEALIAWFRSSGFGLERIGLEAGPLSQWLFAAMREAGLAVELLETRHVRKAFEAMPVKSDRNDARGIAQLIRLGWFRPVHCKSMSAQETRTLLTARKLVQSKLRDVENSLRGILRGFGLKVGKTTELKFAGRIEELVAGHPHLQVIAKALLAVRAVLRKEFAAFEKQVRKMARSDLRTRLLMSTPAVGPIVALTYASAIDDPSRFKSSKQAGAHFGLTPKKYQSGETDYTGRISKIGDSSVRTVLYEAAHVMLTKPVKSCSQLKSWAMRIARRAGMSKAKVALARRLAVIMHRMLADGTPFNAAAAAA

SEQ ID NO: 228427 - protein, 346 aa, unidentified
MEVAIGIDTHKASIAVASVDALGRVLSVREFANDPKGYRSLVRWVNEQERPRRVGIEGSLHYGAAAASRLLAEGEDVREVSPSLTHVERRRGSKGKSDPIDAVAIARVAAADETLPSARRTVLLADLKLLVDHRDQLVRARTQVANRVHADLVVLHPGYEAVVPNLRAKRHVMKARSLLGKDRCVRAALVRHRLRDILRLHTEIAEADRRIADKLREVHTTLTQIPGVGPFIAAKILGEVGAVSRIRSKASFALLSGTAPVIASSGQTHRHRLNRRGNRQLNWAIHYIALVQSRTTPEAKAYLARQRQAGKSHKEAMRCLKRHLSNVVYRHLVIDGRRLEQAGLTT

SEQ ID NO: 228428 - protein, 372 aa, unidentified
MKKNNTVKQSPKKALARETGPITIGLDLGDQTSRYCVLDKRGEVVQEGSVATTKKGLEQIFGSRKRCRIALEVGTHSPWVSRLLSGLGHEAIVANARQVKLISQSSRKDDRLDAQTLARLARVDPQLLRPIRHRSERAQMDLMQIRVRAALVEARTKLINAARGLAKALGERVPPCDAAQLDVERLEGLPAKVQAVLQPLLEEVESLTEQIQACDKRIEQIARSEYPETKLLRQVSGVGPLIALTFVLTVDDAERFQKSRDVGCYVGLRPKRSESGESQPQLGISKEGDVYLRKLLVQGAHCILNRRGPDTDLKRWGLKLAERGGKNAKKRAIVAVARKLAIVLHRLWVTGEVYEPLRNSQAQEAAKKKAAA

SEQ ID NO: 228429 - protein, 316 aa, unidentified
MNKLVVQNINVGVDVGKDFLDIHIRPLGEYFKVSNDKKGIGEAINRLKKLTVERIVIEATGRYEIAFVSACAKAELPFSVVNPVHVKRFAGATGRKAKTDKLDAALIAHFSEVIQPALSSLKPENIQKMADAVARRNQLLEMQTREKNRLQIMPKTVQSSIKAILTVLKKQIQKMDDELAYLIESCPEYKAKSDLVQSMPGIGKVSAAALISYLPELGLMNSKQVAALVGVAPMNKESGRYKGKQVTQGGRHQVRTVLFMAMMSAMQCNAKFKATYKRLVAAGKPKKVAIIACVRKMVVILNSMVRDGVTWEEKTV

SEQ ID NO: 228430 - protein, 342 aa, unidentified
MEHYAGIDVSLERSSVCVVDATGRIVREAKVASEPEALVDFFRRLGLPLARVGLEAGPLSQWLHAGLAGAGFEAVLLETRQVKAALSAMIVKTDRKDARGIAQLLRMGWYRPVHRKSPPAQEVRALLVGRKLLQGKLLDVELSIRGLLRGFGLKLGEVSKGRFAVRVRELVAGQPTLERVIGPMLRAREALRSEYLALHRAVLAIVREDAVCRRLMSVPGVGALVALTFASAVDDPARFRRSRDVGAHFGLTPKRYQSGETDVTGGISKVGDAMVRAALYEAANVMLTRAGRFSALKRWGLEVAKRRGARRAKVALARKLATVLHRLWVDGSEFRFGKEAAA

SEQ ID NO: 228431 - protein, 336 aa, unidentified
MRFIGVDLHTTQVTVCYLKSEAECSIRKYQLCEMEKFVKTLKQTDQIAVEATGNTRWFVEQVKERVKRVVLVNPRQFEVVKNSVKKTDKHDALNLARFLKADLLPEVRGKAEEAEKVQSLVNTRTKLVRLKTSLINKIHGLAVSNGRRLKKTSLSSEKGLEKVFSQEWSEIERIELEIIIEQIRGLKVSIKKLDQVIQAESEKLPGFNNLLSINGIGSLSAGILLSVIGNIQDFERADKLASYFGIVPRVSNSNETVNHGRITKRGNKTGRTTLVQCSLSAIKKSEYLKKYYEQVKARRGHGKAKIALARKYLGIIYNTLRNNWVFADFNNFELAE

SEQ ID NO: 228432 - protein, 348 aa, unidentified
MDHIIRIGMDTSKHVFQLHGVNAAEEPVLRRKLRRNDMVVFFERLAPTIIAIEAAGASHHWARLLRSFGHEVKLIAPQLVKPYVKRGKNDAADAEALCEAMSRPTMRFVPVKTAERQAALMLLGLRDRLVRNRTQLANAIRGYAAEFGLAAAKGIAHLAPLLARIQSDESLPGLARELFAAHAKEYAQLQAQIDEVEGKLMAWHKTNPGSRRLAQIPGIGPIGAAMLIMKTPAPETFRSGRQFAAWIGLTPKDHSTAGKVRLGVITRAGDEGLRSALVVGATAVIRHLRNGKGRSMLSAWVEQLLKRKPPKLAAVALANKLARIAWKLMVTGETYTAKPRPIASAGIA

SEQ ID NO: 228433 - protein, 287 aa, unidentified
MRFYQAQEHSKYFCGIDLHTRTMHLCVLDQAGRIQLHKNIRTRPDAFLKAIDPFRDRLVVACECVFCWYWLCDLCQDEGIEFVLGHALYMKAIHGGKTKNDRIDSEKIAILLRGGMLPCAYAYPKAMRATRDLLRRRSRLVRMRAELLGHVQLTKYQYNLPAFKKRIAYRAGRKGVAEHFDGSIVRRNVNLDIAAIDYLETAIKREEKFLVAQTRTHDRQAFYLLRTVPGIGVILAMTIFYEIEDISRFNRVQQFASYARLVKGQKSSAGKYLGSQGGKMGNAHLRR

SEQ ID NO: 228434 - protein, 345 aa, unidentified
MSACYEGQQFVGIDLHRRRSVIVRTTEGGDVLECVRIVNGVDRLGEVMARAGESPEVVLEATYGWYWAVDALQDLGARVHLAHPLGVKAFEYRRVKNDQRDATDLADLLRMGRLPEAWIAPPATRELRELVRHRAKLVGLRSHCKAEVHAVLAKCGVQVPMTDLFGLAGNELLDRLSLPTPYASRIASLRRVIRTLEFEIDVFAGIVRGNLANDAGYRAVLTIPGVGPVLGAVFVAEIGDVTRFARAEQLACWAGLTPKHHESDTHVHRGRITKQGSRLIRWAAIESVQILPKTSTVGRVRERVAARRGHNVGVVAAARQQLEYVFYALRDHHVRALEHHRPAAA

SEQ ID NO: 228435 - protein, 365 aa, unidentified
MNKCHSNIELSSHEGTRSQFNGGKCAIKLGIDVHQDFYVVVEQVDGTNPKPPQRFPKRAFLRWAARLKENTGAEVHAVYEACGFGFSLQRQLSSLGVQCHVVCPQKLDEQNRRVKTDGLDAKALVLKLDRFVQGNRSALALVRVPTEEEEQKRAIHRQREQLVKARKQLEAQGRSLMVNHGLEPVQSWWKPRAFAALPVPQWMKELLANSQPILVALQQKIASLTIQLQSSATPKQPRGLGLMTSVIIDREIGDWRRFSNRRQIGSYTGLCPGEYSSGNTRLQSCVTKHGNPRLRAALVELAWRLVRFQPNYKPIVKWRQILAKGALATGAARKKAIVAVARQLAVDLWRIKTGRLRAEELGLIN

SEQ ID NO: 228436 - protein, 410 aa, unidentified
MTVITIAQNTPVLVAVDIAKALHEDLISVPGKKRHRRLTVLNELADFTRLIAALKDYGHPVRAAFEATGNYHRALAYHLATAGFEVKLVSSVALAHTREALHNSWDKNDPKDAQVILHMMEIGNEQFYHDPLVRGTNDIQELSKTHDIVSKSKTELWHRILTHYLPLYFPEADRFHRSSRSDWFFAFLERYPSPHFISAMSKDAFIADAWDVVGRKVAKERLLADIYETSKVSVGLPVGLDSDAISMFRLVLGEGRSLIAQRNQIEDRAVALLKDLPDYQLLTSIPGIGPINALTILAEAGDLRRFGHHRQFLKFCGMDLATIQSGTFRGQTKLSKYGNARLRRTLWMAGQVAILQRANSFRDKFERYIAKDRYNTHLRRKAYTAIAAKMARTVHGIIKNGDPYRPFFEG

SEQ ID NO: 228437 - protein, 350 aa, unidentified
MTKGSTTIGLDLSDETGTYVIVDEGGEVVGEGKVRLTLSGISKVFGTREPARLALEVGTHSPWVSRALEKLGHDVIVANPRQLRLISHGAKKSDRLDAETLARLARFDPALLKPVRHRGEQAQADLALLRAREALVRSRTALVNSARGLVKAQGGRLPKCSAESFATKAKAHLPELLLPALAPMLSAIASLTEQIKQCMRQLKRLAQERYAVETEALRQVDRVGPLTSLCYVLVLEEPQRFRRSRQVGAYLGLTTRQQQSGQSAPQLRITKAGDAMLRTLLVQAAHRILGPFGKDSDLRRWGLRLAGSGNQARKNKAVVAVARKLAVLLHRLWLSGAEYEPLRQAEAQAA

SEQ ID NO: 228438 - protein, 389 aa, unidentified
MLLDHPSNGPTAIRTQFGAIFVSLELSRSNWLITSLSPGKGEKMSKHSVTAGDVAGLMRLCEELKRKTEVRTGRSYPIITIQEAGLDGFWLHRVLQQERIESHVVDPASIATPRRRRRAKTDRLDGETLLRALLAYKRGEPRVCAMVVAPSPEEEDRRRLCRERRTLIEERITHVNRIKGLLFAQGISGYAPMRRDRRARLEALRTGDGRELPSHLRAQIDRELDRIELLLGQIKAVEAAQDALLAAARKPASEEAAPDPVTMLLALKGMGANFAAVLWSEAFYRQFANRRQVAAYAGLAATPWQSGGIRHEQGVSKAGNPRLRTTMIQLAWLWIRHQPQSALTRWFKERSQQGRKRAIVALARKLLVALWKYVTQGVVIEGAVMKPAA

SEQ ID NO: 228439 - protein, 393 aa, unidentified
MICVGIDVAKEKHDCFILSSEGEVLADVFTIPNNREGFETLLQRIRSCTLPTDSIKVGLEATGHYSYNILGFLLDCGLATYVINPLHTNLYRKSLSLRKTKTDRIDARTVAAMLMSDVDLKSYTDTAYHNEELKSLTRYRFDKVRQRAKLKQSVSRLVNILFPELETLVPTLHMASVYALLSELPGAQQIACTHLTHLKSLLHDASKGRYDRDKAVEIREAARRSIGSKMPAKSLELRHTIQLIQEFDKEIAEVEASIEEIMNSIQSPITTIPGMGLRMGAMILAEVGDFSNFDSPDKILAYAGLSPSTHESGKLKATGTYAHMEKRGSRYLRYAIINATKYVCIWDPTFAAYLARKRAEGKHYNVAISHAAKKLVRVIYALQKSGQTYHSAA

SEQ ID NO: 228440 - protein, 429 aa, unidentified
MKKSLRSRPVLAKGRAVVGIDVGKRKHAATALTPQGEVIAQLASFPNTRRGVDQLEKEVLRKAGGPCKVLVGMEATGHYWMCLYHELTRRGYACVVVNPLQTNVRSRARIRKTRTDKIDSLTIARLILSGEARATRVPDAKTAELRLLVRHHRRLIHAAGDMERYAHTLVDRVFPEYAEVFCKVFLSSSQKLIREIGLAPRKLVQRADEVHELLRRAGRGRITPQTIDQLLEAAKESIGTRQAEDLAESQLRSIFDYLATLRQQIADIEKQLYERAEQLASPLFSLGLGSTLVAAIHAETDPIGDFASPEQYVAYAGLDPSLHDSGDTIQWRGKISKRGSPLLRHALYLAAFVVYRRHDYFRRIYRKHRSRGKKHRNALVVVARRLARVIWRLLTDGRSFTARPPKIVCPLTKPRKSVTSTRNAVRARV

SEQ ID NO: 228441 - protein, 411 aa, unidentified
MTVLIDPFTASTAITVVAGVDTHAATHHVSVLNAATGAVLGDRQVTATDDGYRQLLEFVISFGDVVRIGVEGTSSYGAGVARYLRGVGIEVAEVIRPKRAMRRRGKSDPIDALAAARQVLAGEALPIPKDGDGLVEQVRVLLAVRRSAVKARTALLRQVKSLLVTAPEPVRTRWSAITGNEDLMATLAATRPGPAITSVQAATGQGLRHLARRYQHLAAEIDELEQDLAALVDSANPALRAAFGIGTVTAAQLLVTAGDNPERLRSEAAFAALCGTAPIPASSGKTNRHRLNRGGDRQANAALHQIALVRMTTDPGTGLYAARRRAEGKTGREIMRCLKRSIARQVWHLLVHPDPVPDARQFRAARQQLRLTLTDIATRLGTCPARISELERGIRPNAQLATAYQQLLATV

SEQ ID NO: 228442 - protein, 456 aa, unidentified
MSESRMKSKPTGLPIVHEFAAGIDIGSRFHVVAVSPDLSDESVRTFQAFTSDLQQMADWLIDTGIKTVAMESTGVYWVAAYEILESRGIDVILANAREVRAVPGRKSDVNDAQWLQRLHACGLLRASFRPGRDIAALRAYLRSRERHLDYAAAHIQHMQKALTFMNLQLHHVISDITGATGMKIIRAIVAGVRDPAILAAMRDIRCKASVETVRAALVGNYQPEHVFALKQALALYDFYQQCVAECDIQIEQVVAVLNANRQKPEAPLPKARHRTRQPNDVNFEVRSALYQLTGTDLTQIHGIGPFLALRLVAECGTDLSRWRTSKHFTSWLTLSPGCKISGGKVLSAHTRKTSNRVTAALRLAAVTVGRTNTALGAFYRRLAARTGNAKAVTATARKIAVLFYNAMRFGMDYKDPGADHYERQYRERVLKQLHRRAAQFGLILRPQNSVVAEHVS

SEQ ID NO: 228443 - protein, 407 aa, unidentified
MTVARPGLNVAGIDTHKDSLHIGIISPVGIPIIDHEFACTADGYSAAVTFITDHGPVGLVGVEGTSSYGTGITRRLQTAGYTVVEVYGGRPSSRRNNGKSDPLDAYEAARAALADDGTSTPKDERTNILRGLHLAARSAVKARTTAINQMRAILISAPEAIREKYRHLDSTHLVTALAVCRPATQNDLIAITTLTTLRTLAKRARFLTDQHDDLTAQVWDLAREMNPALCAAFGVGPDVAAQLMITAGANPNRLSSEAAFAALCGAIPIPVSSGKTNRHRLSRGGDRQGNSALHTIALSRMRYHPKTKAYLARQLAAGRTKKDILRMLKRAIAREMFKLLTRQIELEDFSDLRPARQAAGLPLTVVAAAFGTSETEISRLERNLKRDDHLAHKYRQWLADHHPANAA

SEQ ID NO: 228444 - protein, 370 aa, unidentified
MQFIGVDLHTNKFTCSYRDENTPPDAKKGKRTETFELNSFGLCDFYKTLTTDTYVLVEATITTFAFVRLIQPLVKEVIVANTYELKQVSHARNNTDKIDANILSRTLKMQVLGGEQAVSPVVVPPERIQELRGLFTTYRFYKKQTTQTKNRIHSLLKEKLYGFTQEAIFDRKNRDKIRGLESNTPLAYQINDLLDTLEYMEARIDPLKEQIMAQAEPYMREIEILTSMKGVSVFIAIAVIADIIKVDRFKNAKAFTSYLRSAPRVSNSNTSVKVKGTNKQGRKLAATLLTQSLNHVLDASEKLDRWYRRLTQYKKAGLVRTGLRRRVFAEMYQMLKKGEYHYARDGKKHEAKLLQYKRFLKKRNILFETA

SEQ ID NO: 228445 - protein, 341 aa, unidentified
MNTTTYGLDIAKTVFQLYWVEPSGKCFNRRFSRSKLLEFLANREPGRIALEACGSAHWWARQVRALGHEPVLLHARYVRPFVQTNKTDAADARAIWTAVQQPGMPVVAAKTESQQCVLGLHAMRQLRVKMRTMLVNQLRGMLFEFGIRIRPGLRAGLKEIVQGMDEIERGVPPLLFEFVHEQLQSIEGLDREIARLDQRIDAWGRQNRACKTILAIPGIGMLTATAMVATIGDARTFKSGRQLAAYLGLVPKQTGTGGKVWLSGISKRGDPYLRTLLIHGARVVLSHLRRKNQPGWSLLLAQRRPKNVAAVALANKTVRTIWALLTHDRAYDRDYVSVRPA

SEQ ID NO: 228446 - protein, 451 aa, unidentified
MSGTKKSRSKRDISPTHQNAAAIDIGATMHVAAVGPDHVSEPVHSFGTFTGDLHRLADWFTQCGVRTVAMESTGVYWIPVFEILDQRGFEVILVNARDAKHVPGRKTDISDAQWLQRLHEYGLLRASFRLKGEVAVMRAYLRQRERLLDYAASHIQHMQKALTQMNLQLHHVVTDITGATGMAIIRALVAGERDPMVLAAHRDPRCHASAETIRQALVGNDREEHIFALTQALELYDVYQAKVALCDVRIEAVLKRLRKASCASVGKPPCVRTMKKQSNGPAFDVRAALHGLLGCDVTQIHGLGPYLALKLVAECGTNLSAWPNAKHFTSWLCLSPSNKISGGKVLSSRTRRSGSRAAALLRLAAVAVGRTETALGAFFRRLSARVGKAKAVTATARKIAVLFYNTLRHGMKYSDPGASHYEESYRRRVLTNLERRAKSLGYTLQPAPAPG

SEQ ID NO: 228447 - protein, 451 aa, unidentified
MPASKPRRANSAAQISVVHPHAAAIDIGAQFHVVAVGPERDPEPVRSFRSFTKELHDLANWLKHVGITTVAMESTGVYWIPVFEILEAYGFEAVLVNARDVKNVPGRKTDVKDAQWLQKLHTHGLLRASFRPRHDVATLRSYLRQRERLLEYAAAHIQHMQKALTLMNLHLHHVVEDVTGATGMKIIRAIVAGERNADELAKYRDVRCRASVETIRNSLIGHYQAEHVFELTQALALYDFYQTQVAQCDERIELALKHLQTGVEPPTAPMPAARARTKQPNGFAFDVRAALYGMLGVDLTQIHGLGPYVALKLFAECGNDMSRWPTVKHFTSWLCLAPGNKISGGKLLSSKTRRSSSKAAAALRLAATTVGRTDTALGGFYRRLSARIGKTKAVTATARKIAVLFYNTLRYGMDYVDPGAAYYEERYRQRVLSNLTRRADSMGYVLQPKAG

SEQ ID NO: 228448 - protein, 340 aa, unidentified
MKLYGAIDLHSTNSVLVVIDEEDKIVYQKRLPNDLALILQELCVYQSRLEGIVVESTYNWYWLVDGLMEQGYKVHLANTAAIQQYEGLKYSNDDSDARWLAHLLRLGILPQGYIYPREERAVRDLLRKRSQLVRQRTMNLLSIQNLMTRNTGSSMTANQIKGLDKTQVDGLLPDADLSLAVKANWSVMCSADEQVERLEQRVTERVKLRAQFSFLKTVPGIGQILALTIMLETGDIGRFATVGNYASYCRCVGSQKLSNGKRKGSGNTKNGNKYLAWAFVEAANFAIRFNSKIKSFYQRKKAKTKAVVAIKAVAHKLCRACYHIMKDRVAFDVTKAFGPK

SEQ ID NO: 228449 - protein, 387 aa, unidentified
MARKRILSTLDTSIAYEAVGLDLAKTDVALAAFDSDHKEPYFIDRIPYDKLYELLANMAPTLVAMEPCSGAHQIAEQIQALGHEVMMISGRHVQAWVKDHCNGQKTDLNDAFAILNLAYDRWLTPIRGKTREECRLLALQASYRQLKGQRTKTMVHVKATLHAWGFPIRTGSFNQKALRELIDANREAFGGEMAETLHLMIDRVRGLDHDIATVLKLLTEATKRDPRASLLRSIPGFGVLTTSRWCAVMGDIARFDSPKQTMAFIGLVPNNRITGHHTETSSGREARGQGRMSKRGDKMLRSLCILGAASLCMLVRKDRLQDCPFVASIKERLASPRPWFKVLVYVAAKLVRIATALLKYGETFSFEKAGISKAVLKQWELEQAKAA

SEQ ID NO: 228450 - protein, 346 aa, unidentified
MQNDTLVAVDIAKEVFEVGISDRPGRVARRRRLARYEFLEFFAQLPPATVVMEACGSAHFWARRIEELGHVVVLLPPQYVRPYVVRNKTDRTDVNGLLEAFRNEQIRPVPIKTVTQQVFGTLHRLRSGWLADRTRAINSLRGLLRELGFFIPEGRKHVLPDAWEIIQDPKRGLPDALKPSLSALCQEILSHSTRIEEVEAQLEALAKQVPVVARLRSVPGIGLLSATALYAFIGDAARFPSGRHMASFLGLTPREYSSGLRRRLGRISKRGDTYLRMLLIHGARSILWHAKRMKNRDRLRAWALRLERKLGHNKAAVALANKLVRITWAVWKNDRSFEPVPELQAA

SEQ ID NO: 228451 - protein, 333 aa, unidentified
MDHCAIDLGGRKSQVCVRAADGTVLFEGRHETSSLPRYLQELPQKCRVILETAAEAFRIADAARAVGHEVRVVPATLVRTLGVGARRTKTDRRDALALSEVSCRVDLPSVHIPSAQSREWKTICGMHDVLVATRTRLINNLRGWLRGQGRHLRTGQASTFAKRIRALQPLPEYAAMQVDALAVLDEKIKASEKRIAALAWGSELCRRLMTVPGIGSSTAVRFVAAIDDVSRFESAHKVEAYLGLAPGESSSSERQQRLSITKAGPATVRWILVQAAWVLQTRCRSREARSLQSWATEVAKRRGRHVATVALARKLAGILYALWRDGTTYQPRI

SEQ ID NO: 228452 - protein, 385 aa, unidentified
MTIQIQVPRFIPRDYEVFAGLDVDKKSMAVTFADHAGSQRALRMAHQVTPLLNYVRKHFAGQRVAFAYEAGPTGFGLHDELVRRAYTCVVVAPSKVPRAPGERVKTNRLDSRKLAESLRGGQLHSIHVPSAVYRNLRHLVQMRDTHVRQLTSSKLRIKSLLLYEGIAFPEEHEKWTGRAMRELQTLPCSETVRFKLDDLLDTLHFHFQAAARATKQIRQYCLDDPELQQSIDLLLSLPGIGWIVGSHLVARLGNPREIKNGRQIAGFLGIVSSEHSTGDKQNRGEITRSGDSRLRNKLIQSAWTAIKKDPELRDFYRRIYQRHPKKVAARKAIVAVARKLTNRIYVVLKEQRPYVIRPDSSIAPLTAEETVGPRERLDGAQNDQS

SEQ ID NO: 228453 - protein, 350 aa, unidentified
MGNVTIGMDLGDKNHAVCVFDQNGAICYQGTIQNRRDDLVRFFAQYHGATVALEAGTHSPWISRLLETLGCQVLVGNPRKLRVIWDSDRKNDSRDAEMLARIARFDPRLLYPINHREEQAQVDMELLQARDMLVKTRTSLINHVRGTVKALGGRLGSCSAACFHRKAKEELPEMLKAVALPVLEIIEQLTDRITSYDKAIKELCQTRYPETELLMGIKGVGALTALAFILVLEDPSRFANSRQVGSYLGLTPRRDQSGETDKQLRITKAGNPFLRRLLVGAAQYILGPFGEDCNLRRFGQRICDRGGKNGKRRAVVAVARKLAVLLHHLWVTGEVYDPLYRPSGALQKAA

SEQ ID NO: 228454 - protein, 401 aa, unidentified
MWYAGLDWADSHHDVVVIPEAGRQVASRRVAHTAEGLAELITFLQGIAPLDQIACIIETNQGLLISTLLEAGCTIYPVNPKTIDRRRTASGAKTDTIDAYLLAKTGRSDLADLRKLTPDSVIVQELKALTRDQDSLVQSQTRLVNQLTACLKAYYPVALQLFSKLQQRSTLVFLQTYPTAEAALSASVEQITTVLKQTRHPHPTTFALKMFKTLHQPSLHADAITTRTKSRLMLALVAQLLPLIEQIASYDKEISDLFLTHEDNEVFSSLPGAGKRLAPRMLAEWGDDRSRYSGSTSVQALAGTAPVAFQSGNYAKAHKRYACLKPLRNVLHQFAWQSTKQEGWALAYYQRKRREGKSHSMAVRALANVWVRIIYAMWFEHKCYETTTFEQAQHQHAPRAA

SEQ ID NO: 228455 - protein, 299 aa, unidentified
MQIRSVGIDLGKTTFHLVALGDKCKVLLKKKFTQKQLIHFTANLQTSLIGMEACSGAHFLGRALRAQGHDVKLLPAQFVKPFVKSNKNDFIDAEAIAEAVDRRNMRFVPIKTDDQLDLQALHRVRDRLMVRRTSVINQLRAFLLERGMVFAKSPIRLREAIPEVLENANENLTPRLRNLVAMLWSEWKHMELQIQEMNEEIERIASSDAACCRLRQIPGIGPLVATAIVASIGNGAAFHKGREFAAWMGLVPKQHSTGGKTKLYGISKRGNRYLRKILVHGLVLSCCDRREIGLRWAHG

SEQ ID NO: 228456 - protein, 452 aa, unidentified
MERSKSGALSMVNPRAAAIDIGSTMHMAAINPDADDNPVRAFGTFTGDLHDMARWFKTYGVTTVAMESTGVYWIPAYEVLEGHGFEVILVNARYAKNVPGRKTDVSDAAWLQRLHSYGLLRGSFRPEAGVATMRAYLRQRERLIEYAASHIQHMQKALMEMNVQLHHVVSDITGVTGMRIIRAIVSGERTPDTLAQMRDVRCHATIETICAALSGNWRDEHIFALGQSLALFDFYQTKVLECDRKLEVALQALEIDEGHDVRQLPKVRTKRRQVNTPDFEVRSALYRVLGVDLTQIHGIGPSLALKLVGECGTDLAAWPSSKHFTSWLCLAPGNKISGGKLLSSKTRRSSSRAAALLRLAATTIGRSDTALGAFYRRLSARAGKAKAVTATARKIAVLFYNSLRHGMAYHDPGASQYEERYRSRVIGNLQRRAKAFGFILHELPAEPDMAVS

SEQ ID NO: 228457 - protein, 423 aa, unidentified
MKSKAYRAVDVNSVQAAVWLRERRQAVVHAGLDIGKEFILCTLRWGVADFDRPWRVHNPHDLPRLAELLAAVGKGRQLIVALEPTGTYGDAARQAFERAGLVVHRVSPKMASDYAEVFDGVPSQHDGKDAAVVADLAAQGKSWPWPLPQPTEAEQELAYQVDWMDDQRRQMMHWCGRVEGLLSRHWPEATRIVSLCSGTLLACLAKYGGPRGLAAAKDALAQVRRWGGSFLSTAKAEALVASARDTLGVAMGRWDEEHVRRYVRQIQACREEIRAARRRLRVLTRDHVVIQAMSRVVGIGTACVLWAELGDPSAYHCGSAYRKAMGLNLAERSSGQWQGELRISKRGSSMVRRWLYLAALRWVRHEPVRSWYLRQKAARRGDGKPALVGVMRKLALALYRVGGRGEVFDRNALYRSVMSAPPA

SEQ ID NO: 228458 - protein, 342 aa, unidentified
MYYIGLDVHKKSISYCVKDASGQIHREGKVGATRWELDLWMKTLPQPWTAAMEATIFTGWIYDHLKPHAAGLKVAHPLMLKAIAASKKKNDRIDAGKIADCLRCDFLPECYMDSTEIRERRRTLRYRSLLVRQLVQLKTRVASLLMETGVSYDRQRLHRLGFIPELLASKDALDPSVRPLLRVSHNSILRLRGIESALIRSLQRDPLLAKRVQRLQTIPAVGKITALTWALEMGDISRFRSIRQAISYCGLCGDEQKSADKTVRTPLSKKRNKHIQHVLVEAAKLAPRYDPDLALLYAREKQKGNANRATLAVARKLLAYLLAVDREQRDFVPSQKLSGAAA

SEQ ID NO: 228459 - protein, 350 aa, unidentified
MVVVGADVHKRTHTFVAVDEVGKKLGEKVVSATCSGHHQALRWARERFGAQVVWAIEDCRHLSARLERDLLTAGPKVVRVSSRLMAQTRASARTRGRSDPLDALAVARAFLREPDLPVASHDEVSRELKLLVDRREHLVGQRTSTINRLLWRVHELDPEHAPKPRSLHLLKHRTLLSQWLGTQRGLIAELARDELADITRLSEMIDALAKRIGERVRKVAPALLALPGCAELTAAKLVGEAAGVARFKSEAAFARHAGVAPIPVWSGNTAGRVRMTRSGNRQINAALHRIAITQARLPGMGQAYYDKRIASGASTTEALRCLKRRLARVVFHHLRTDHQNRIQPCQPAAA

SEQ ID NO: 228460 - protein, 411 aa, unidentified
MRLFVGDDWAEDHHDVEVMNEAGKVLARKRLPEGVAGMAGLHELVGRHLGEDADDAEVAVGIETDRGPWVAALVAAGYTVFGVNPLQASRYRERHGVSGAKSDSGDAHMLADMVRTDSHQLRAVAGDSAEAEGIKVLARTHKTMIWERTRQVQRLRHQLREYFPAALEAFDDLDAPDTLELLGKAPEPARAARLTRAQVSAALKRAGRRNITDKATAVLAALRGEQLGQPAAVTAAYAVTVRSLIAVIAALNEQVKILQGQVEADFGRHPDAEIYRSQPGIGAILGARVLGEFGDDPDRYADGKCRRNYAATSPITRASGKKKVVAARFIHNDRLVDALNAQAFASLNASPGARALYDELRARGIEHNDALRRLANRLVGILHGCLKTRTLYDEATAWSHRQNLPQSSVAA

SEQ ID NO: 228461 - protein, 412 aa, unidentified
MEVLYACCCGIDVHAKMLVACVLKQGQKDVRTFSTMTEDLLRLLDWLTHVGCTHVAIESTGVYWRPVFNILEGAVDVMLTNARDAKGYKARKTDVIDAEWLADLLRHGLLKPSFIPPLPIRELRDLTRYRESLVREQTALANRIQKLIESANVKLGQVASDALGASGKRRLRALATGQTDAEQMSHLAQGVLKRKQPQLQQALEGRFTQAQRWILTELLDQYDQGEVALQRVAERIRQEVDKRADPFVPEAIKLLDTIPGVGETVAQIMVAEVGVDMEQFPSADHLASWAGMCPGNNESAGKRRSGKTTKGSRYLRAALVQAAWAASHQKETYLAAQYKRLVKRMGKKKALIAVGHSILVIAYHVLQNRTPYQDLGGDYFARRNVDKQRKRLVRQLESLGVKVTIAEIKEAA

SEQ ID NO: 228462 - protein, 367 aa, unidentified
MGWTPPRRPWCARVVVSVTTTEQEASVSEVSTIGLDLAKHVFQAHGADASGKVVFRKRLRREKVLEFFAGKPACLVAMEACSSAHHWARELARLGHVVRLIPPAYVKPFVKRQKNDAADAEAICEAAQRPTMRFVAVKSVRAQANAVVFRARDLLVRQRTQAINALRGHLGEYGLVAAKGPGHVIKLVEHVEDPGSNVPDAARLVLRTLVEALRFLSERIDLLDREIARRAREDDEVRRLMSIPGVGPITATALAALAPPADAFRRGRDFAAWVGLTPSQHSTGGKQKLGTTSKMGERTLRRLLIMGASSVVRKAVRQGTATGSWLGRMLARKPRMLVIVALANKMARIAWAVQAKGEVYRAPAVVA

SEQ ID NO: 228463 - protein, 456 aa, unidentified
MVVDEAIFILFVQEKKKSFLATMTLINFVAANQKNYAFNLLSVFIMVFWSVQYLLQHLLVQTQLSDQLLQPLILILQLPQTPQFRHARPGKFFLPVNGMDYLLPLRLTVRNVLTRRITMNIVFLGIDLAKNVFQLCGLSQASKPVYTKRTGRKELLQTLANIPACLIGIEAPTGAFYWQREFEKLGHKVKVISPQYVNPFVRGQKNDGNDAQAIAVALMQPTMQFVPPKSPEQQNIQALHRARQRIVNHRTATVCQIRGLLLDRGIPIGSAVSRARRAIPLILEDAENGLSSRMRRTIAELYDLFNDLGRRIHFFDKEIETVFRQSEACQRIAKVKGIGPKTATAVVAAIGKGTEFKNGRHFAAWLGLVPRQHSSGDRQVLMNMTKKGDKHLRTLFIHGARAVVRVATNNNDGHMNQRVNQLKERRGFNKTTVAVANKNARIIWSMLRNETEYQVV

SEQ ID NO: 228464 - protein, 418 aa, unidentified
MKKHNNSGKKSEPTSKRAKTRGPMRRDTKEVLAELVGKLKEKLDPKKVAATSAGEEHERGELGPNLDRLTVGVDLGDQWSHYCILGLEGETLAEGQLRTTQEDIAEFFQALNGARVVFEVGTHSPWVQEVICGWGHEVLVANPRLMEGSKRRKRKNDRIDANKLARLGRVDPQSLHPMQHRSREVRQDLVVLRARDALVAARTELINATRGLVKSMGSRLPKCSSPSFAQKVEETVPVELREALLPLVRMAATLSDCIQRYDEKIEKLGREKYEHTALLRQVKGVGPITSLAYVLTLENPDRFVKSRDVGPYLGLVPKQEDSGESQPQLGISKAGDTMMRRLLVGSAHYILGPFGPDTDLRRYGLRLCERGGKNARKRAAVAVARKFAVLLHCLWASGEVYEPLRQDMSATMTPAAAA

SEQ ID NO: 228465 - protein, 355 aa, unidentified
MKFYVKQHKYYCGIDLHARTMYVCIIDKEGAIVKQKNIDSGPDAFLQIIEPYREDTVVAVECMFAWYWLSDLCRKENIPFVLGHALYMKAIHGGKAKNDRIDSHKIAALLRGGMIPVAYVYPSEMRATRDLLRRRNHLMRKRAELLAHIQNTNHQYNLPAFHKSICYKGNREGVAERFNDECVRKSIEVNLSLIDHYDQLLRKLEYYIDKKAKVHDPEALFRLRSVPGIGHTLALIILYEIHEINRFPRVQDFVSYSRLVKSAKESAGKRYGTSGAKIGNAHLKWAFSEAAVLSLKQSPEIKKYKAKLVKKHGKAKALTILAHKIGRAVYYMLKRKEVFNIDRFLNKQLIQTGRA

SEQ ID NO: 228466 - protein, 331 aa, unidentified
MNFTETIGIDVSKPFFDAYIHTLKKHRRFKNNKIGFKELLQWVNRYLKTEASHKLFAFEHTGLYSLPLSIYLTETQAFFILIPGLELKRSLGIARGKDDEIDAKAIALYAFRRRDEIIPYKLPSVQLLEIRHLLSLREKLVKQCSGFKSTNTEIKGFLTQKDHETYFHIHEEMIKSLTQQIKKVEKRLIEIINQEDHLKQMYDLITSIQGVGKQTALFMIAFTNGFTLFENFRKFASYAGIAPFPFKSGISIHGKTKINHLANKKFKSLLSNCAINAIVTNPEIRLYYQRRLNEGKNKMSTLNIVRNKLLARIFAVIQRGTPYVDTLAYAS

SEQ ID NO: 228467 - protein, 339 aa, unidentified
MEVTTIGLDIGKHVFQVHGITADGAVVFNRPIRRSQLLKFFGKLSSCVVGIEACGSAHHWARELRAIGHDVRLMPAAYVKPYVKRGKTDAVDAEAICEAVTRPTMRFVAVKEKEQQALLTMHRVRQLIVRQKTQILNVIRGLLREFGHVIGTGPVAAMRFVKAFHADDCPDIPDLAKSVLKTLCDQVISLDERVVFYDKLIDYHSKIDERAKRLRTIPGVGPITASAIVSTIGDGKQFKNGREFAAWVGLTPLNKSSGGKERLGGISKKGDRYIRRLLVIGMTSQVQRARAFPERVHPWIMQLLERKPVRLATIAMANKTARIIWAVLTSGNQYRQSAA

SEQ ID NO: 228468 - protein, 343 aa, unidentified
MSEISTIGLDLAKNVFQVHGVDGSGNALLRRQLRRGAVEKFFAQMPPCVVGIEACGSAHHWARVIGRYGHQVRLMPPAYVKPYVKRNKNDGRDAEAICEAVNRPTMRFVPVKSVEQQATMAVHTTRALLVRQRTMLANSLRAALSELGIVAAQGREGLGELMAKLEAPSDEIPEVMRGALLLLAKHWQALDVDERVLERQITKIARADREARRLMEVPCVGPIIASTVLAKVPDARVFRSGRDFAAWIGLTGRDHGTGGKHRPGRISKQGDRMLRALLINGASAWLRHQKRRGVSNPWLRELLARRPYKVVMVALAAKTARIIWAMLATGEAYRDRASAPAAA

SEQ ID NO: 228469 - protein, 416 aa, unidentified
MKKNSISQTTSGQKTKPAKARGPVQRDSKEVMAELVAKLSERLGPKPAPEKAAEGKPGVVPAPNRDRLTVGVDLGDQWSNYCILGLEGETLAEGQLRTTGEDVAAFFRALSAARVILEVGTHSAWVREVVVGCGHEVLVANPRLMDGTKRRKRKNDRIDANKLARLGRVDPQSLFPIEHRSTEVRQDLVVLRARDALVTARTQLINTTRGLVKSMGARLPKCSSPSFSDKVEETLPAEVREALLPLVRLAEALSDCIKVYDERIEKLGREKYGHTELLQQVKGVGPLTSLAYVLTLENPDRFRKSRDVGPYLGLVPKQEDSGDSQPQLRISKAGDVMVRRLLVGSAHYILGRFGPDTDLRRYGLRLCERGGKNAKKRAAVAVARKLAVLLHRLWISGEVYEPLRHGALTAEVGEAA

SEQ ID NO: 228470 - protein, 350 aa, unidentified
MNARTIAIDLAKNVFELAIADEAGKIVDRKRLSRSQLRRYFENYGAAHVVMEACGTAHYWGRWFSERGMQVSLLPPHYVRAYIRRNKTDRADATALLEASRANDIIPVCVESVEQQALQGMHRVRSAWRGTLTARLNALRGLCREFGIIAPVGARRGLAELVQRIADESSGLPRIIRTVLQGVIEEVRAIQERLRQLELELAAIAEQSAVCQRLRKIPGIGLIGATAFAGSIGDIRSFRSPRRFAAWLGLTPREFSSGNIRRLGSISKRGDGYLRMLLVHGARAVLYSANAAQRAGRPLDALREWGLRVSSRSGHNKAAVAVANKLARIIWASWYRQRDFEFRPPSPATH

SEQ ID NO: 228471 - protein, 355 aa, unidentified
MNDEKYIGLDVHQATIVVAVMDSTGKVVMESILETEAATILQFFAGLRGTLSVTFEEGTWSVWLYDLLNPHVDKLVVCNPRKNALLKDGNKSDRIDARKLAELLRGNQLKPVYHGETGVRMLRELSRSYLTIVKDLSRVMNRLKAVYRSWAIPCAGRDGYYRRHRAQWLDKIREAGVRRRAERLYEQLDMLQHLRQQARRELLAESRKHAITAKLRQIPYLGPIRSALAVALMQTPHRFRTKRQLWAYSGLALETRISAEYRLVEGQVRRSKKLLSIRGLNKDHNHDLKGLFKGAATMASVRPGPFQDFYQAALAKGIKPTMARLTLARKIAAITLTLWKKGENFDAEKLKSQAA

SEQ ID NO: 228472 - protein, 428 aa, unidentified
MKYNTQNAKIKSITEKTLVVGIDVGSETHFARAFDWRNYEYSKKPLEFSNSKAGFATFQAWMEELAAKHGKDVVIPGMEPTGHYWFNLGVYLQDNGMRPVHVNPHHVKKSKELDDNNPNKNDRKDPKTIAALVNEGRFSYPYIPTGIYAEIRSLSNLRLQTQEEITRIKNRLARWFSIYFPEIKDVYKNPESVSGLMILKEAPLPQDIVKLGVDGINQIWREAKLRAVGPKRAKSLLTAAEHSIGNQEAPESARIELRNLLNDYEVYRKREDELMEILKKKLSEIPYIDKLLEIKGIGFKTVSGFLAEVGDITRFDNPKQLQKLAGYAIVECSSGKHKGESHISYRGRKRLRYVLYEAAISLIAKNAAFREVHRYYQTRKENPLKKMQSVIAVACKVLRIFYAILTKGVTYDEEKMLRDIHRPQMHAA

SEQ ID NO: 228473 - protein, 403 aa, unidentified
MFCGWDWGSTVHGVCLIDDHGAVVKRWMVQHSEVQLRNVFRELAELVDGDDAGQVPIAIERGEGLVVGLIARAGHPVWMVEPAAFKAARPRWGSAGAKSDLGDAFMLVDYARTDGHRLRRVEPLARATRELAALVRARTALVEARTAASNQLWAILAEHWPGAAVVFQKLTSQIALAFLTDYPTPQAAALLGEGRMGQFCRRHSYRGGKSPAELVRRLRAAPASANPIAPTILEAIVRGSTAQIRLLNTEITRLERDIADALAAHPKTPLLQTLPRVATVSLAALIAEIGPLLERCENPEQVAAMCGAAPVTRTSGKSRAVGFRYTANKPARVAITGFADNSRHSSAWAGDAYRRARARGARHPHAVRILARSWVRVIWACWTTDTIYDPSRHRSEQLLAAAT

SEQ ID NO: 228474 - protein, 429 aa, unidentified
MDYPPVAGIDVGKNFSEMCILSPNNEIYHRIKIYHDSIDSIKKAIGLLQKAEKDFAIRPVVVLESTGHYHKILFHYLSDSGFEVSIINPIQSDSIKNIGIRKVKNDKFDAHKIALLYRFSFIKTTVVPDDVIDCLKSLCRQYYKLGDELTTYKNRLIGIIDQVMLNFTDVFQNVYSNTALAVLDRYPSPKQILKANKQTLISLIEKTSKKGLAWSTEKYELLVLKAKEFKDLSINNPGNLAILKVNISMVRTLQDAQKDILDAINEIILADSLEDNPVLAPIINLLCSIPGIGILTAATILAEVGDFSAFSSPNKLVAFFGIDPSVNQSGEFIGTRNKMSKRGSRLLRRVIFTTALANIRSKRNGDKTNPVLYEFYQKKCTNKPKKVALGAVMRKLVNIIFAVMRDKKPFELRTPEEHEELLLTRSSVA

SEQ ID NO: 228475 - protein, 346 aa, unidentified
MAISLVAVDLSKSVFQLSLADAQHHIISRKRLNRAQFHRFLAQSSPVRVIMEACGTAHYWGRTAQLLGHEVKLLHAKYVKAYVRRTKTDAADADALILADRDESLHPIPVKPEERQALQSLHRIREQWKSARTARICEARALLAEFGVCIPKGARGIGRQLTAGAEHAPDLLQATLLDLIREIDELQQRIKSVDHRLAAYADTDCDVEVLLGINGVGVTIATAAVARVPSIHAFKRGRSFASWLGLTCREYSSGSTRRLGGITKQGDRYLRMLIIHGARAALVAARRKAANGKQLTRLETWAVNTQMRIGHNKATVALANKMARIMWAVWTRHERFNGDDALRFAA

SEQ ID NO: 228476 - protein, 414 aa, unidentified
MELLHERCAALDIGKKDLKACVRAPSPKGKRSRRQEIRTYATTTNALLELRDWLVAEQVTLVVLEATGDYWRGAFYLLEDDLNVILVNAAHAKGLPGRKTDVCDASWLCQLGECGLLRASFVPPEPIRQLRDLTRYRTTLIAERTREAQRLEKELEDAGIKLSSVATDILGVSGRAMLAALIAGEDDAVALAELAKGRMRPKIPQLVQALTGNFGAHHAFLCRLHLERIDQLSATIGELSARIEEQMRPFSHKLDQLQTIPGVARAVAEVIVAETGGDMSRFPSPGHLASWAGVCPGHHESAGKRKSGKTRHGDRWLCGALGTAAMAAARTRDTTYLGARYRRLVPRLGKKKAIVAVEHSILTAAWHMLTDDVDYHDLGGDYFARLDPERAMRRIVRQANALGYTVRFDPIHAA

SEQ ID NO: 228477 - protein, 348 aa, unidentified
MSQSKQYVGLDVSLKETSICVIDDADKIFWRGQVDSTPEAIASAIKQHAPHAVRIGLESGQLSSWLFHELKQAGLPVICVDARHAKAALSLKLNKTDANDAFGLAQIMRVGWYREVTVKGLDCQAVRALLVARAQIVSQITTLKNCVRGILKTFGRVLPKGLRSQFPARVRAAIDGHQVLGTIIEPTLRVLEAMRVQLRVYDKAVIQRARSDDTARQLMSAPGVGTVVALAYITGVEDPARFKRSSSVAAYFGMTPRRYQSGEVDHAGRISKCGDGMVRGLLFEAAKVLLSRSARPSALKTWGEALGKRIGAKKATVAVARKLAVILHRMWTTGTTFQWNAEAASSAA

SEQ ID NO: 228478 - protein, 457 aa, unidentified
MGRHKSKNKGRDTMSVVHPNAAAIDVGATMHMAAVNADRTPEPVRSFGTFTTDLHRLVDWFAECGVDTVVMESTSVYWIPIFELLDARGFAVFLVNARDAKHVPGRKTDVSDAQWLQRLHSFGLLRASFRPKGQIAELRAYLRQRERLLEYGASHIQHMQKALTEMNVQLHHVVTDITGVTGLRIIRAILAGERNPAVLARMRDRRCHASVEMIEKALAGNYRAEHLFALEQALPLYDTYQQKAFACDARIEAVLKELSVPRGREGGQLPAPRQNRSHQQNAMLFDVRAALFALLGKDVTQIDGLGPYLALKLIAECGDDLSAWPSAKHFTSWLCLAPSNKISGGKVLSARTRRSGNRAAALLRLAAATVGRTDTALGAFYRRLSARIGKAKAVTATARKIAVLFYNAVQHGMDYVDPGASSYETRYRARVIANLHRRAKAFGFVLQPIDPPPSAVS

SEQ ID NO: 228479 - protein, 446 aa, unidentified
MICAAVERCAGIDVGKKWLSVCVMIGPLDGEARAEKRRFGTTVAELQQLQGWLKQERITHVVMESTGSYWKPVFNVLEDAVKVYLANPREVKIRKGHKTDDKDGWWLAHLLRHAMIHPSFIPPRSIRELRDLTRRRERLNGNGTSEKNRVQKILEDANVKLGNVLSDVFGVSGQLMLDALLKGKAKPEEIAQFAQRRAKKKIPQIIAALEGHQMSDHHRKMIGYSLAHMRFLEEQLEELDNDIAEKIRSAGLDQQWQLLQTIPGIQERSAAKILAETGPDMTQFPSEKQISSWAGVCPGNNRSAGKNRSSHTTGGNPWLRGALTECAWAAAAKKDCFLKEKFWRLTTKSGGKKPPALVAVAHTVLCLVYQVLRTGQPYRERQASALPDTQKERLIRHHIRRLGKLGVRVHSNRQATETIASQQPNTAVQEPPIVGGKNINTRPATY

SEQ ID NO: 228480 - protein, 339 aa, unidentified
MRLYAAFDLHSSNSYLGISDEKGKRIFKKKLPNDPARIKETLRPFKAEIEGIVVESTYNWYFLVDLLREEGYRVHLANVMKTQQYSGLKYSDDKNDAFWLVEMLRLGILPEGYIYPKEERPIRDLLRKRGHLVRLRTSLIVSLQNIIARNLGGRLKANDVKVLTTDRVTPLFQGNEDLALAGKVSKEAIDFMTRQIKAIEASIDGRIHLSNPYNRLLSIPGVGKILAFTIMLETGSIDRFQKVGNYVSYCRKVPSGRFSNDKKKGTGNRKNGNKYLAWAFSEASDHARFFDSESRRYYHRKLQKTNAPIAHNALAHKLARAAYYIMKDGVVFMPDKAFA

SEQ ID NO: 228481 - protein, 378 aa, unidentified
MKNDIRYVGLDVHAETIAVAVVEPDGEMRFLGTIPNRPEAVRRLVKRLGSTTQLKACYEAGPTGYVLYWQMIELGVQCAVVAPTLVPQKPGDRVKTDRRDAEKLAVLYRGGHLTPVWVPDQAHEALRDLVRAREAAKSDQLRARHRLQKFLLRHGRRPPQGIKAWTQKHLDWVRREVHFEAPAQEAVLVDHLAEVEHARERVRRLEGAIDTAVEAAPACLRGVIEALQGLRGIAKVSAATIVSEVGSLSRFRKPRQLMGYSGGVPREDSSGERVRRGSITKTGNAHLRRIVGEAAWSYRHRPTVRGELLKRQVGLSEEVKAISWKAQHRLYSRYRRLIGKGKAKQQVITAVARELLGFIWAIGVHVEQQHGTATRRAA

SEQ ID NO: 228482 - protein, 348 aa, unidentified
MMIIGCDFHPSWQQVAWLDTETGETGEQKLLHATGEAKRFYAQLPKPALIGMEATGNSQWFIELIEDLGHEIWIGDAAQIRASYVRKQKTDKRDAAHILKLLVEGRFPRLWAPDREQRDLRQLVLHRHKLVMIRARVKNELQHLSLNKGMQRKRKLWSQAGLQLLRELPLKPWASCRREDLLGLLSMLHRQIEKLDGAVAQAAEDNPQAKLLMTQPGVGPNTALAFVLTIGDVRRFPRGKQVASYLGLIPREESSGGRQKLGAITKQGNRMLRSLLVEAAQVAVRCDAGLRKQYLHRCHQKPKAVAKVAIARKLAVRLYWMLRTHTAYPEIVRIESSSGLPLVVRHGG

SEQ ID NO: 228483 - protein, 316 aa, unidentified
MSASPLFVGIDVAKAELVVALGPSRDLLAVPNDESGIRQILEHLQAASPALIVLEATGGYETAAVAALAAAGLPVVVANPRQVRAFAKAMGILAKTDNIDAHVLALFAERVCPPIRPLPDEALRMLDALLTRRRQLIEMLVAERNRLAHALPPVEKSLKQHIRWLERRLADVDSDMDQAIQQSPVWRAKEDLLRSVPGVGPVVSRTLLADLPELGALNRKQIAALVGVAPLAKDSGTLRGKRMVWGGRAPVRAVLYMGALIASRHNPVIRDFYQRLVAAGKPKKVALTACMRKLLVILNTMVRNNTRWGERYALSA

SEQ ID NO: 228484 - protein, 460 aa, unidentified
MEKEKRSRKTKAIPALQTIQPEVAGVDVGSKEHWVCGPALASGQPNVRVFGTTTDQLKELVAWLRAQGVKSVAMESTGIYWIPLYELLESHGIDAVLANARQLHNVPGRKTDFADCQWIQLLHSCGLLRGSFRPGPDITAMRAIHRHLANLVEQRAHYVQWMQKALDQMNVQVHRAVTDLTGTTGMAIVRAIVAGERDPARLSALRDPRCGKSAEEIARYLTGTWRDEHLFSLASTLELYDAIDKLICTCESHLLDSVQALQPDERKDAALPPHPNPNKERFLRSHGAQPVRTALWRFAGVDLTRIDGISLGSAKIILTEIGPDLSAFPSEHHFVSWLRLCPRTPISGGKPLKKGRNGMGANRVANTLRMAASSLQRGKSALGASYRRIARKKGALVAVFATARRLAQLVYRMLRYGQDYTDIGEAKYQSLFDARRLAGLTEAARSLGYSLTKEPSPALT

SEQ ID NO: 228485 - protein, 550 aa, unidentified
MALPWVKRLPRRNNYPNIRGHALATFCRSDISFGVIHKLAERPFPGRHSSSSSKLVNNSAAGHNVVGGRPALARSRSLPLNPKRVTERLPAEPAALAPTSNRKAPQEGHYIRAVDSRAKGRKSEKQQDKTMNNSEQWQQHRAFGALDWASEEHFVIVVDQAGKVIEEFQIEHSALGWKKFREKLQPYGSIPFAIETNQGAAVEQLLEAGMIVYPLNPKSAQAYRERKAPSGVKDDRLDAWSSADALRVDGQDWKALRPEEPLIKELRLLCRDEVALIEQRTAFIQQLRHALAEYYPAALEAFEDWTSVSAWIFLQRFPTPEALAQAGKRQWQKFLHSRRLWGSDQGPRRMEIFAHAGEFVGSPPTIQAKSLLALSLVQMLFAIEKQLAIYRQRIEELFARHPDHDLFGSLPGAGPKLAPRLLSEIGDDRQRFDAEAQALQCLGGTAPVTKRSGKGRKYWHVHQRWACDKHLRHAMYLFAEQSLSRCVWADIYYQHHRQKNHSHANAIRRLGHRWLKIIHRMWMDRTPYDPELHHRNQLQHGSWIFRLKEC

SEQ ID NO: 228486 - protein, 312 aa, unidentified
MKEHYYGGIDVAKDRLDVQVLPHRQRFSVDNNATGWAELVAQLHALPIAAVGIEPSGGYERGIIRTLLAAGLSVRRINPNKLRQFARARGILAKNDRIDAQLIAEYVSIMPTRVVQRNTATERLTEVVTMRRQLCDEHVTIENQAAHVEDVILRRLNKRRLTRLKADIRLLDRRMAEMVAADADLAQRYALLISMRGVGPTLAFTLIALLPELGHMSRKQVAALVGVAPYDFDSGKLKGHRCIYGGRIPVRNVLYMAALSACRYNPVLKIFHNRLAAANKKPKVVIVAVMRKMITTLNAMVRDNAAWQPGAA

SEQ ID NO: 228487 - protein, 344 aa, unidentified
MSNRPITLKIEYHHSRANRLNHKENAMNVIGFDISKDTIDVTLLRNSGQVDYIKIANACEGFEKLNDWIRSKRIRKISISMEATGIYYEEAADYFSAIYQVFVINPLKIKEYSKSQFSHTKTDKADSKLIAEFANRHLDKLTPFRPSENPILYKLVNLLQQLKEQQKETQNRLHTAKDIYIKSTHEAIIELLEEKIDQTSKRIEGMIKQKESLNIEYQNLQTIPAIGKETALILLRHLTDKNFETANKFVAFAGLSPKIEQSGTSVKKNGRLSQYGHRQLKRALFMPALVAYRMNAFPQLVSNLEAAKKPKMIIIVALMRKLAKIAFYIHKTKKPFDKALHQTV

SEQ ID NO: 228488 - protein, 486 aa, unidentified
MHLRITNIRPEHSMFPALVSNLQVRLSSLTNTQGSPSNRLSILASQNSGMHVRICNLPLSEVIMKPQSNPSFTACVGIDWADKKHDFCLQAAGSDQRVFGTIDHSPESIMQWLCSLHERFGGPIAICLELAKGPLVYVLQRYDFIVIFPVHPSTLAKYRDAFVPSHAKDDPTDAEMALDIMLRHPDKLQPLKLQSVAMRTLTALVEERRDLIDSVVGLTNRLTSNLKQYYPQALDWFEHRDTLIFCDFLSHWPTLKHVKRARRSTLESFFREHKANRTYLVEERIQGIRAATALTEDESVIRPNQMAVQAMVEQLRVLLQAIGRFDAEIDAVGKAMPDYGLFAALPGAGHILAPRLLVAFGEDRDRYTNAAQIQSYSGVAPVVERSGNKCWVHWRIACPTFLRQTFVEWAGSTIPRSYWAEAYYRQQRAKGCSHRVAVRALAFKWIRIIYRCWKTRTPYDESVYLKSLKRRGSPLLASVAEAAKMI

SEQ ID NO: 228489 - protein, 391 aa, unidentified
MAQYTINSRYASVIALDTHARTTTAKGIDLTTGEEKTRRFNDCPHPVEIASWIKENFADPHYAAYESGCTGFYLCRELMKQGIDCDVIAVSSIARSSDDKKRKSDRRDAKRLLKELLVSHTSPSRVWLPDEECEGVRDLLRCYQDAKDALKRSKQQTTALLLRHGFVFNEKTPSGKRRRTWGSAFMRWLDACDLGTEEANGTLVYYRQIVSENAERKARMFLRIEKLAQTERFRCYVDALRLLDGIDTYSAMVYIAEIGDFTRFKNGRSISMWTGTTPKSKASGEDQRANGTITKAGNASVRGALVEGCSSLDRRRYRPVRPKSDAQVSERVIGECNKCNRRLIERYRHLRYEQKKLANVAKIAVANEMIRWVLQIGTLVQEEQRLSTLKA

SEQ ID NO: 228490 - protein, 385 aa, unidentified
MYFVGIDISKYKHDCFICTEAGEVIEENLSFTNINEGFIQLLNLLKFLDNSQEIRIGFEATGHYGMNLKLFLEKNNYSFMEFNPALVKRFISTQTLRRTKTDKKDAMLITKYLISVDYKPHPKQFYHKYSLKSLSRMREKLVKQRSYYEVQITNVLDIIFPEYKPFFNNDFSKTSLYILNKYKTPDKIKNMKDFDSIRKISRGKFTSANFIKIKELAKNTIGISNDIFETELESLLILHSQIEVEINKLENKIESIIKELNPPILSIRGIGIISCAGIISEFGDLSRFKSADACVAFAGIEPSISQSGTESHTGHMVKHGSGHLRYYLMNAADYVFMHEPIFTEFYYKKRSEGKPHRVALTHVAKKLVRIIYKLESENIEFKGNL

SEQ ID NO: 228491 - protein, 341 aa, unidentified
MEYIGIDVHQRESQVCIIDERGQVLIERRVRTSRERFAALLGARAGARVLLEASTESEWVAHAVEGLGHEVIVADPNFAPMYASRSRRVKTDRRDARTLADACRLGAYRPAHRTSAAQRTVRAQLAVREALVRTRTRYISVIRAVLRRDGVRVPSGGAATFGPRVQALALSAPQHRLVAPLLALLRPLNQQLAILEAQLARGVAGHAAARRLCTVPGVGPVTAAAVVATLDDVGRFASAGQVAAYVGLVPRERSSGEQQRRGPLTKAGNRRVRWLLVQAAWAYWRSRATAGTVLRAWVERLAGRRGRLRAVVALARRLARILYAVWRDGTVYQPVRLDVVA

SEQ ID NO: 228492 - protein, 408 aa, unidentified
MQLLYARCAGLDVHARQVVACARIVVNHAVTYHRLTVSTTTRGLLELADWLTRHEVTHVALEATGVYWKPVWHVLDGHFELVLANAQHVRNVPGRKSDVKDAQWLADLLAVGLIRGSFVPPQPIQELRDLTRTRKQLVREIGRHTQRLQKILEDANIKLTETISDIRGQNGRKILHALIAGETDPERLTALTRGLRASRAQLVEALHGRVTPHHRFMLNLHLEQIEAIEGGLSTLEQHLSEALAPFRAARDLLTTMPGISDTVAAVLLAEIGDDISPFPTAGHLVSWAGFAPRLDESAGKRRSTRTRPSAPWLKTTLVQAAWGAARTKNSYFHAQFARLKSRRGPKKAIMAVAASMLTAVFHMLRDGVEFHDLGAQHFAHHDKDQITKRLLRRLRDLGVEVEVKEKAA

SEQ ID NO: 228493 - protein, 365 aa, unidentified
MIKERTSVGLDVHARSVVATGLDGVTGEVFKRRLVPASEVVVDWLRGLPGPVATTYEAGPTGFGLYRAITAAGIRCEVAAPSKLNRPAGDRVKTDAKDALLLARLLQVGQITPVRVPSITEEAARDLVRAREDVRGDLMRARHRVSKLLLRHGRVYYGGAAWTAKHITWLNSIRFDQPGTQAAYDADREAVDFALARRARLDRTIATMAADSEFTVVTRRLCCLRGISTLTGFALAVELGDWTRFTGASIGAYLGLVPSEHSSGDSRRQGGITKTGNTHARRLLIEAAWHHKPRYTVGPVLQARWDQATPTARARGHAGNQRLHHQWAKYVARGKKHTIANTAIARELAGWCWSLATLEQQPAVE

SEQ ID NO: 228494 - protein, 347 aa, unidentified
MSITMIGLDTAKSVFQVHGVNETGKVEIKRKLRRSELIPFFEKLDACTVVMEACGAAHHWARILSSLGHEVKLIAPEAVRPFVKKGKKNDPADAAALCTAASRPDMMFVPIKSIEQQGILALHSARSLLVKQQTMLANAMRGLATEFGLTVPKGIDRLEELLALVDADKAFPEKARQVFTGLFDQCRALAESIRAIEVEIVAHARHDDTARRLATIPGVGPITASLIAATVVDIGLFKTARHFAAWLGLVPRQFSTGGKTRLGRITKTGNREIRKLLVLGATSMVYRAPQWNSVVGAWTRGVLERRPVRLVTVALANKIARIAWALMTRKEVYRATGRVVAVTEAAA

SEQ ID NO: 228495 - protein, 458 aa, unidentified
MPKKSSNKAKSQRSRERALLQKVHLNAAGIDIGADAHWVAVPEDRDGYPVRSFGVFTRDLIALCDWLKRCQVETIVMESTGVYWIPLYQMLERKGFEVRLVNAHHVKNVPGRKTDVKDCQWLQQLHTFGMLGGSFRPQAQMCVVRSYLRLRDTLSKDCNSLVQRMQKALTEMNVQLHRVISDITGVTGMSILRAILAGERDCLKLAQLKHPQIKSSAQDIAKALEGDYCQEHLFALETALELYDSYQLKIMACDRHVQDALSAFEPKANAPTPDLSRMRSAEKRQEALRRHHLEEMTGADLTKLPGLDLLAVERILSEIGLDMSRWPSEKHFCAWLNVAPNNRISGGKILSSKPRKNANRAAAALRLAAQSAMQSKTAIGAFIRRIKIRLGAPTAINAGAHKLARLVYRMLKFGKAYVETGQEAYEKLFKERALRNLQRKARELGFQVTPITAAVLVS

SEQ ID NO: 228496 - protein, 350 aa, unidentified
MKRVFVRTGCGLDISKNDFHACFGGQDTEGNFVIRARKKFKNQPSGINAYLAWLDKQRSKLSGQGELPFQAVMETTGVYHENLLFAAYEAGLPVCLELAKKVKRYLHSIGQESKTDKLDAAGICQMSCERRCKRWEPFSPNIYSLRAALRHRKSLIKAKTRFSNQLHAMRYSRVADKEVKASVERLLKQTEKEIKKAEQRIMELYQADTCLSSRLQPIVESVKGLGLFTALTAVAETNGFAQITSRKQLASYAGYDVLENSSGNVTKKGRMSKRGNARIRAAMYMSAVCVIRFKEGPLYELFTRVRRRNPKVYKIANVAVQRKLLLLIYTLFKKGEAFDPLDSTNKCNGI

SEQ ID NO: 228497 - protein, 376 aa, unidentified
MQEISKIHVGLDVHKDSIAVAVAEPGRAAAKVIGTIRHDVPKLLKLLVKLGNTEAVHVVYEAGPTGWGLQRALTAKGYSCEVIAPSKMPRRPGDRIKTDRRDCAQLAECSRAGQLRAVWVPRPEDEAIRDLARAREDALNDRRQLRQQLKALLLRHDVRFPGKTSWTQAHHAWLGKLNFSEVATQAAFMDYWMAVQASDERLKRLSSALLEYVKNWRFAPQVSALQALRGIDVTCAIALVAEIGDFSRFDHPRKLMGYLGLVPSERSSGERTARGSITKTGNAHARRMLSEAAWSYRFKPRLGERARRRQEGLSQQLCAIGWTAQLRLTQRFAKLDARGVHRNKVCVAVARELTGFVWAVAQAADTPSQATQGGTT

SEQ ID NO: 228498 - protein, 350 aa, unidentified
MQFYTQSHRFYCGVDLHTRKMYLCILNSEGENVFHRNLKASPKAFLKAVSPFREDLVVCCECMHCWYWLADLCYEEGIPFVLGHAFYMKAIYGAKSKNDRLDSERIARLLRGGVIPMSYVYPHEMRATRDLLRRRSHFVRKRTELFAHLQGLSSQNNLPEFAGRITSASNREEFLERFEVCPSLDRSAQADQGLIEHYNRMIPDLERFIEKEIKEDAVAGYYLLRSIPGIGRILAMTILYEIHRIDRFQTCRKFASYARLVRCQHSSNGKISGHGKRKMGSMHLKWAFSEASAYFLRGNTRGQELLAQLEKKHGKGAALSILAHKLGRTVYYMLQRNQPFNARLFYRDSA

SEQ ID NO: 228499 - protein, 485 aa, unidentified
MALVFAVVLGLLILEVAMSRRKPNPTSPDPASLALLHTLHPHAAGIDVGAAELWVCVPPGAVSIPRPPTVLPAHVRRFGVFTADLQAIAAWLHQCGVTTVAMASTGVYWIPLYDLLEQAGFEVLLVDPRQVQRAPNRPKTDVHDCQWIQRLHSLGLLTAAFRPEEPIRVWRSYQRHRASLIEDAGRHLQRMEKALEQMNVKLPEVVSDLTGRTGMRIVRAIVRGERDPKALAKLRDHRCKASAETIARALQGTWQPEPLFALQQSLALYDYYHEQIRDCDRVIEAHLMGMALPEVPPLEPKRRSRRRKDNEATFDARQRLHHVAGVDLTAIEGIEESTALVVLSEVGTDMSRWPSEKHFGSWLGLAPNPKKSGGKMKSSATRPGVNRAAQALRLAAKNLQRSHSALGAFFRRIAARRGLAKAITATAYKLARIIYAMLKHGMAYVAQGLEAYETAYRERVVRQVKRKAVALGLVVVERDAGVQPS

SEQ ID NO: 228500 - protein, 397 aa, unidentified
MDVHKDNITACILTPEGKEIQTFSTKTVFLLQLVDWIKQHNCTHVAMESTSVYWKPIVNLLEAEDIEFLVVNAQHMKAVPGRKTDVKDAEWIAKLLRHGLLKASYIPDRNQRELRELVRYRRSIIEERARQHNRIQKVLEGANIKLGSVVSDVLGVSARDMLDAIADGEEDPEKLANFARRTMKKKKEELELALKGYINSHQRLMLKTILGHIDFLTEQIEMLDQEVADRVSSHQEDVARLDSIPGIATRMAEQILSEIGTDVKKQFPTAAHMCSWAGLVPGQNESAGKRKSAKTKKGNKYLRSALTEAAHSVRGSKNYLGALYRRTASRKGKKRAGIVVAHAMLRISYYLLTRKEMYVDLGEDYFDKQRQQSIVRHSLRRLESLGYTVTLEEPKAS

SEQ ID NO: 228501 - protein, 307 aa, unidentified
MSLCVGIDVAKHSLEWAAGSTGPVEHTRNEPRPIGALVRRMVTLAPERIVVESTGGYERALVAKLAEAGLPVVVVNPRRVRRLGEGMGLLAKTDAIDARLLALFGEKVEPPIRPVLQGNDRLLADLVARRRQLVGMIVAEKNRQETAPPAVRRSIAAVLRTLQKLVRELEQRIDAMLYEDPDRGELLALLQTVPGVGPSVARTLLIDLPELGHLGRREIASLVGVAPFARDSGTFRGTRRIRGGRASVRTALYLAAMTASRFNPPLAAQYQRLRQAGKPPKLAFVAVARKLLVALNAIARERTAWQS

SEQ ID NO: 228502 - protein, 362 aa, unidentified
MRIIGCDLHARQQTLAMLDTATGEVEKITLKHEGNNVREFYSALPRPVRVGIEATGSMQWFLNLMEELEIECQVGHPAEIRAAEPRKQKHDRRDADLILKLLTENRFPSIWLPSKELQDLRSLVRHRHQWVRMRTRIQNALQSIALANGLRRGPALWSQDGQSRIASLPLARHTAYRRSELQAMYEKFEAEIEKLNQRVEEQACGRPGARLLMTHPGVGPVTALATEVFLGDPARFADSKALASYVGMIPREYSSGGRQRLGGLSKQGNPLLRFLWGEAGAHAARRDPELQRFYRRKLVQKGMGKASVAVARKLGIRLWIMLRDQIEYNEFCRRGQKQQKRSGACAGMPETPYGAKSHRPVD

SEQ ID NO: 228503 - protein, 343 aa, unidentified
MKSKAVTTWLEFANCPAIGVDVCKKHLDLVGLCGSASVHRRIDNNAKTIGELIKALVRQGFTGTVLCEATSHYHLVLAVMFCEAGMDIRVINPLLSSKHAKSAIRKTKTDRIDAQVLATMVLTEPNLPPPLRLTRSHCLVRHTLGLIHSQEQHLQGIKRTLDSYRERLGQLNLEAGNAYQQTVEVFKQLQSCHEHLLSELESYLLQTQPDRQEVIERVCAVPGITRRNAALFTFVLNPMVSSAKSWIAYAGLDVAIKESGTWRGHGKITKRGPAWLRKRLFQAAWGTAMNSSQGRLYYDTLKAKGRNHKEALIIMAKKLLSIMHTLIVHQKKFNFSKAFQVTA

SEQ ID NO: 228504 - protein, 342 aa, unidentified
MSEITTVGLDLAKNVFQAHGADASGRAVLRKKLRRDQVLDFFGRLAPCVVAMEACGGADFWGREIGKLGHEVRLIPPAYVKPFVKRQKNDAADAEAICEAALRPTMRFVPVKSEETQGAAMVFRIRELLVRQRTQAINALRGHLGEFGQVVPQGAANAARLVAIVEDPDSGLPADAIATLKVLVTALTHLEAEIGKLDAEIVRRAKANEMARRLMTVPGIGPLIATALAVLAPPPETFRKARDFAAWLGLTPRQHSTGGKQRLGATTKMGERSLRRLLIIGANSVIIKRHVHTAAGPGTWLGGMLTRKPPMLVRVALANKMARIVWALMARGGVYQSPATAA

SEQ ID NO: 228505 - protein, 344 aa, unidentified
MYFIGVDHHKQSSFMTVLDEDGQEVKRGRVDNRRASVSRFVKGCLPFQAVLEAGYCSYVMADLLRELGGEVKMANALQLKMIAKAKIKTDKRDSRTLARLLRSGDIPEVTQREPENRRAQRVMRLRAYWVSKQTELKNKIRALVAQQREEIRLEVERREEGLFSGKGLEFLDRLALPEVDRLIMEDLIQAYREGQAHLEKTAGFVRKLYEELADARRIDTVPGFAMTLAELMAVEIGDIHRFESASSLHAYAGLVPTTPASGERVYHGHITKEGNACLRWAALEAVFPATKKDLELKVLYNRLARRKGPNVAKVAAARRLLTIIYRVLKEKRDYIPEMKIPSAA

SEQ ID NO: 228506 - protein, 349 aa, unidentified
MRYFQPPADTRFYAGVDLHARSLFLVVLDHKGQIRYARNLPAAPEPFRKAIAPFRDGLVVGCECMHCWYWLADSCRDDNIPFLLGHAWGMKAVHGSKTKCDRKDAEAIARLLKGGNFPLAYAYPKERRGLRDLLRARLRLVRQRAELYGHVHTARRQLNLPPVSNDVKYKSKRASALAGIDDACVRRRVEVDLSLLEPLDSTIRRLEKDIEVAARQHYSTEMAALQSTPGVGIVIALTILLEIDTLERFDSRQQFCSYARLCGARQESAGKTVGSGNAKQGNAWLKWAFSEAAVLSAQKDERIGKYLDKLSSRLGKAKALSALAHKLGRAFYHMLQKKEVFNIDKFLRH

SEQ ID NO: 228507 - protein, 338 aa, unidentified
MVEGTVGSHHKEGSTKMGQDSIVCAGIDTGKRKLDVALADGEHGQVDNSADGHSRLSTWLRRRRVERVGIEASGGYEQDIVARLRRDGFVVVVFQPAQVRAYAKFHLQRAKNDKIDAALIAACTAAIKKIHAPPDPRLAPLAQQLTFLDQIDEDIARCKTRRESCRDGRLRRFWDEEIARLKRLVRAELKAIVAAIRQHRDLATRLDLIASVDGIGLKTAVAILVRMPEIGAVTRAQAAALAGLAPYDADSGEQIGLRHIAGGRARLRMSLYAAALPAAFHWNRPLIALYRRLTAAGKAHKSALVACARKLLIYVNTVVARGTPWHATPPAVALRPGG

SEQ ID NO: 228508 - protein, 332 aa, unidentified
MSNDQGEWRYVGIDVSARELAVAERGAGGTGVWRVANTAAGHQQLGERLAAQGGPVRVCLEASGNYSLDVALTLSRRRGMEVNLVNPRQARRFAESLGERSKTDPVDARVLAEYGARMPWTAWQAPSAAALQLRAITRAIAALVVTAAQQKNRQHALAASTALPPLVARECARVEKYALQRVERLRRQAQRIVERDPHLRRCWAHLLTIPGVAEASGLAILGELAILPASLDARQWVAHSGLDPKQHVSGSSVERRPRISRAGNRRLRAALFMPALVAVQHDPYLRGFYQRLVGHGKAKLQALTAVMRKLLHGIFAMFRHDEDYHGEKLCAV

SEQ ID NO: 228509 - protein, 409 aa, unidentified
MLNIYYYNCCGIDVHKKMLVATIAKTDEHKVTTYQTKQFSTLTKDIKHLKQWLIDNDCKDVCMESTGKYWIPIFNILEDTCHVIITHPKYVRAIPDKKDSIWIADIFKHGLVNPSFMPPLEIRQLRDLMRYRFKLLNCRTSEKNRFQNSLTMSNIMISNVVTDTFGKTAQSILKKMLSKNDNLTLDEISPLLRKNLKASPQEILESVQSNLTKEQNSKMEICLDHYDYINKCVDKLEEAILPLVANYQNEINLLLTIPGVQDVSAVYILSEIGSNMNAFVDDKHLCSWAGLTPQNNESAGKKKSVRISRAGVYIKPLLVQCANNAIKDKNCEYFKLRYEAIKKRRGHKRAIIAIARMLLTCAYHMLSKNEPFNIELYKQLTESNFKSKHTKLNINNAIKFLEQQGYKVS

SEQ ID NO: 228510 - protein, 424 aa, unidentified
MIGGDFLNIQLNSIYVGIDVSKLSNQVFITDFNQSLSKSFSAPNNNHGAELIETNLINFLSDTLFTHVIVVLESTGIYSAHIATYLSASDKLLPYHIEVYCINPKISKNYRSSFADMDKTDPKDAFILADLARVGRTKSMNPFKGSQKLALQRLTRHRVHLVNLLTKEKNYVLTNIFLKFSEFGNKDFKFTSDTFSKTAISILEEYSSPEDIINTSLEDLVAFISKTSNNRFNDIEDVAELIKKAARASYRLDKAAYEPINFAISSSLVLVRCFEDEIKKIDKSIELLVKGFSHHEYLSLRSIPGIGPVFASGIISEIGSIHQFDSEESLAKYAGITWRKNQSGKFEADDTKMTKTGNHYLRYYLIQAGNSVKNNIPLYNDYYHKKFNEVITHQHKRALALTSRKLIRLIYGLMSKGQLYNKNY

SEQ ID NO: 228511 - protein, 380 aa, unidentified
MDVHSTNYTLCAMEPTIGAEDRIFGEIQVAPDYKMIILFIESLKVKLGFYDEYSIECGYEAGCLGYTLYHQLTNAGIKCVILAPSTMLTPQGKRVKTDKRDARLIAQCLCYGGYHPVYIPTDEDNAVKEYLRMRDDHKLEQKRLKQEICAFTLRHGHQYVGTKWTTRHVIWLRKLELDPLLREALDEYLASYEELEANIERYGKRIEEISAEARYQESVKKLECFLGIRTHTALSLIVETGDFNRFAKGNTYAAFLGLTPGEHSSSTNVNRLGISKAGNTHLRCLLIEAAKGICKGAIGHKSKELRSRQSGQTADVIAYADKANIRLRSKYYKMIRHGKKKNVAVTAVARELACFVWGMMTGNIGAVPGTVTSAPAVSQG

SEQ ID NO: 228512 - protein, 350 aa, unidentified
MSKQTNAIAVHTIGIDTGKNTLHMIGLDENGVIVVREKVSRSRIAARLVNVRPCLVGIEAGMATHYMARELVALGHVVKQVPPAFAKPFRQGHKNDFRDAYAIAEAVQRPSTRCVPIKTDDQLDLQALHRVRSRLIGDRTAVINQLRGFLLEHGITVRQGHRFLRQQLPQIVATRTDMLSPRMIRIIGDLVEDWAHLDERVERVTDEIEGLARTDVSCGRLMTVPGVGPIIASAMVAAIGDGASFSKGRDFAAWLGLVPRQMSTGDRTILGRITKRGNRYLRMLFIQGARAIQLHPASWAKHSFGRWLTAAARRLHCNVLTVALANKLARIALTVLLEGRNYETRIKPVA

SEQ ID NO: 228513 - protein, 348 aa, unidentified
MSKGNQYVGLDVSLKQTSICVIDDADKIVWRGQVDTTPEAIVSAVTQHAPHAVRIGLESGQLSNWLFHGLKQAGLPVICVDARHAKAALSLKVNKTDANDALGLAQIMRVGWYREVTVKGLDCQAVRALLVARAQIVSQITTLKNCVRGILKTFGRVLPKGLRSQFLARVRAAIEGHPVLGAIIEPTLQVLEAARAQLLVYDRAVIQRARSDDTARQLMSAPGVGTVVALAYMTGVEDPARFKRSSSVAAYFGMTPRRYQSGEVDHAGRISKCGDGMVRGLLFEAAKVLLGRSSRPNALKTWGEALGKRIGLKKATMAVARKLAVILHRMWTTGATFQWNAGTTSSVA

SEQ ID NO: 228514 - protein, 422 aa, unidentified
MVAHVVIGMDPHKRSATIEVIDEREKVLGTGRFDTDRDGYRRLLAAGRKWPDRVWAVEGCAGVGRHLAQRLVADGEAVVDVPAKLSARVRVFSTGQGRKTDATDAHSVAVAGLRTPGLRLVAADDTAVALRLLVDRRDELGVARTVTVNRLHRLLVDLVDGGAKKALSANQAKALLGTVRPRDVVGRTRRQLAAELIADLAGIDRKMKAATAQLTVLVQATGSGLLKLTGIGPSGAARLLGDIGDVARFPTRGHFASWNGTAPIDASSGEQNRHRLSRAGNRRINRVLHIMALVQLRHDTIGRDYYRRKLAAGKTGMEAMRALKRRLSDVVYRQLVADQKRLRRAGDGAAPGGQAGAATGSSAAGSHPNTGTSEKSLPGTAGPQATPTQRSHRRGFSTLGRPAADALTRPDGAAIDSLKPAS

SEQ ID NO: 228515 - protein, 458 aa, unidentified
MARRLHRPTRPVTMPILQPHAAGIDIGATELYVCVPLDRDPEPIRHFGTFTADLHALADWLKACGVTAVAMEATGVYWIPLYQILETRGFAVCLVNARHVKHVPGRKSDVQDCQWLQYLHSVGLLHASFRPPEAVCAVRTLLRHRDGLVQDAAAHTQHMQNALSQMNLQLHHVLTDLTGVTGLAILDAILAGERDPQVLAGHRDHRVKASAETLAKALVGDYRAEPLFTLRQALASYRHYQRLIGECDGEIQARLGTFASTIDPATHPLPPATGSRRTARGPSSTPGFDLRTERSRILGTDLTQVPGLQTPTVSTLFTELGADLSAFPASDHFTSWLGVCPDNRISGGKVLSVKTRHVKHRVAQALRLAAQSLSRSSSVLGCFFRRMRAKLGAPKAITATAHKLARIIYHLVTTRQPYDESRLAAAEADHQRRTESRLRAQARALGFQLVPAPVQSVS

SEQ ID NO: 228516 - protein, 356 aa, unidentified
MAQSAKETAVNDWKDIVLAVDYHLENLQIRQFNPATGEERCFRRKNTASEVLRVVGEAQVEAGLAGGKVVWIMESTTGWARVKDLLGERAQFVLANVLQMPLPPKAKRRKTDKIDTMRMLREYRNGSLPRAFQPVAELRQVRRLVDCRMDLTHRQTALKNWISHYLSHETWSGTGNLWSGKGRTRLKSLSLPGSDALVMKMKVTELEQVRELLEQVETEIQAVYRRWPRAAWLDEVRGIGPISAVTILAYIGPITRFARAEELISFAGLAPGVHGSDGRVYNTRTGGGGTHGRLRFFLIEATRWLQEIPRYAPAHQRVVAKRGKKVARIVLARMFLRSLDKMLRAGQRFQPQTVAA

SEQ ID NO: 228517 - protein, 438 aa, unidentified
MSNKVIFNLDDLFISVGIDVGADFSWMSIALPNQQFVGKPYKILHSSIDSLTTAVSKIKEAEELYSLESRIFLESTGIYHYPLFCYLRDKGFNCSVINPIITKNSTNINIRKVHNDRFDSKKAALVGLKPDLKVSLMPSDLALNCRNLCREYYDLMDNRGAYVNKLQGELRMAFPQYLGIFSKVTINTSLTLLETYTSPSAFLEADKQEIIDIIKSTARFGLTYAQNKYNAIIQAATDANQFGYIIDSNIKRIRLYISFIRKYDEEINNILESLHELVDANEDADFVKQIHLIETFKGAGFLSAVSIMGEIGDFSAFSKPKQLFAYFGLDPAVKQSGKFEGTKVQMSKRGSAIARRVIHTLTLQSISISRNREAKNPVLREYYLKKCDSKPKLVAMGAVSHKVCNMIFAILRDNKSFEIITPQEHIKQYNASKCDMAA

SEQ ID NO: 228518 - protein, 420 aa, unidentified
MQILYPRCCGLDVHKASIAACILVYKDQGEPEIRRRTFSTFTKDLVRLKMWLSSSKVSQVALESTGVYWKPVWNILEPGSFQLILVNPQHFHAIPGCKTDPKDSRWLAELLSYGLLRPSFVPPQPIRELRDLTRYRVHLKQDRNRIHNRVHKVLEDANIKLDCVATDILGISGRRMIDGIVEGRHSAEFLADRARSRLREKLPSLRLALKGRVTDHHRLMLRELLGDLDAVDSKIERLEQEIVTRVAPYADLIARLCTIPGIDTVTAWTLLAEIGVDMTAFPDADHLASWAGLCPGLKESAGKRMSGRTRKGDCYLRRALCQAAWAVSHTKDNYLAALFYRIAGRQGLKKATIAVAHQLLRIVYHILRDGGAYRELGGNYFDRLHPERTRNRLVRRLENLGLKVVLERRDPTAAPAAQTL

SEQ ID NO: 228519 - protein, 342 aa, unidentified
MDEYDGRQFVGIDLHRQRSVIVRQSESGEQLSAVRIVNDPVALELQLEEAGADPEVVLEATYGWYWAVDVLQACGARVHLAHPLGVKGFRYRRVKNDVRDAADLADLLRMGRLPEAWIAPPQTRELRELVRYRAKLVAIRSGFKAQIHAVLAKAGVLIAVSDVFGVTGRQRLAKVPLRPAYAQRIRSLLELIDILDSHEARFAAMIAERLNTDRGYQAIQHVPGIGPTLAAVFVAEIGDVHRFTDPAHLCSWAGLTPRHRESDTVVHRGHITKQGSKAVRWAAIEAIQHQPDTTKIALDRNRIEARRGRNIAKVAAARKLLTLVYYGLRDGHIRALDRAGAA

SEQ ID NO: 228520 - protein, 348 aa, unidentified
MLADQLDYVVGVDPHRDSHALAVVQVVSGAVLFEAAVTASSDGYANALKLVDQHAPGRRAFAVEGTASFGAGLTRFLTGRGEQVLEVGRSRRERRSGGKSDALDAVRAARSVLTSERPATPRAGGERQALQALVAAREGAVNAKRAGLCQLRDLLITTPEPLRSELRPLTRARLLQRLAATRPDGRRDPELRGSMLALRSIARRVLQLTAEERELAREIETITRKLAPQLLDQPGVGPHAAAQLVLSWSHQGRITSEAAFARLAGAAPIPASSGQTIRYRLDRSGDRKLNRALHMILVTRKRSHPATIAYIERRIQEGKTRREANRCLKRYLARNLYRLLEHGPPAAT

SEQ ID NO: 228521 - protein, 345 aa, unidentified
MNKVVTIGLDLAKQVFQVHGVDAEGKTLFNRTLRRTELLPFFEKMPTCLIGMEACSSAYHWARQFVSLGHNVKLMPAVYVKAFVKRGKTDAIDAEAICDAVMHKNMRFVPVKTVEQQAFTMLLKVRALFVRQRTKTINALRSHMAEFGIVVPTGVTRISALLDILNDENDNRIPEVARAALSGLSEEVELLAARIEKLDEKMASEVKHDKEAQRLMTIPGVGKTTAGAIKAHVVDASAFKSSRDFSAWIGLTPKASGSGGKIRNGRISRAGNPVLRSLLYMGATSVLRENGKSESASPWLKKLMARRPFKVVAIAVANKMARIIWALLRNGGTYHAPFEPNPATA

SEQ ID NO: 228522 - protein, 336 aa, unidentified
METKTKFIGIDFSKATFDATIYEGEHCKFTNDDQGFKEFLVWVETHIDGLSLQDCLFCGENTGNYSVRLSNFLYVHHCTMWLESALRIKRTIGLVRGKDDKIDSAYIARYAARNAEDTVSYEPCCKNIGELRRLFARRQLLVSQRTALMNAGKEANVLGEKSKYDRALEKQNTKLITMLAKEVLRIEKMMLEVIQADERLSRQYQHITSIKGMGPINAIALISVTEGFTKYASDAKKLACHAGVAPFKKESGTSVNGGTHVSHLSNHILKPLLTQAALSAILYNRQIIAYYERLISRGKKSQVALNNVKNKLLHIVIGLIRKDEDYDIQYQPAPKI

SEQ ID NO: 228523 - protein, 316 aa, unidentified
MVPSPLFVGIDVAKATLDIAVRPTAETWSVSNDATGIDALVLRLGALAPTLIVLEATGGYQGPLVAALVAAALPVVVVNPRHIRAFAQAVGILAKTDRIDARVIAHFAEAVKPAPRPLPDAETQELRALLVRRRQLVEMVSAERARLDTAPPSIQDAIQAHIAWLTTQIAGLDDALTRASQTHPVWQAKDDVLQSIPGVGPVLARTMLGQVPELGTLGPKPLAALIGVAPFNRDSGTLRGRRTVYGGRAEVRAVLYMGALVATRHNPVIKTFYERLLAAGKAKKVALTACMHKLLTIMNAMVRDLKPWQPQEVPSA

SEQ ID NO: 228524 - protein, 412 aa, unidentified
MQIVYERCAGLDVHKKSVMACLITSTPNGERRKERHTFSTMTPDLHRLREWLKEQQCSHVAMESTGVFWKPIFNILEGHLEVLVVNAHHIKTVPGRKTDIKDAEWIADLLQHGLLRPSFIPPAWQRTVRDLTRSRASLSQERTRVIARLQKGLEDANIKLASVASDLMGQSAQDMLHALLEGELTPEGMAAFARGKMRPKRELLVQALTGHFQEHHRFLLAENLKHLSELQDAIDRLSIEIAARLHSYEELLKRLETIPGVKRRLAEIILAEIGPDMSRFPDAAHLASWAGMCPGNHESGGKRLSGKTRKGSQWLRTALVEAAHAASHCKECYLSAHYHQLAFRRGKKRAAVALGHTLLIIIYHVIADAKEYQELGADYLDQRERQGKEKRLVHQLEKLGFEVALTPLASQA

SEQ ID NO: 228525 - protein, 310 aa, unidentified
MTLHPFYIGIDISKAYLDIFEESTSKHLQIENTSEAISAWLSALPDMPSLNIIFEATGRYDRKLTHALHTLKIRFSRVNPARARDFARALGQMAKTDQIDARMLADMGKCLKPDASTQRAPERDQLAALHKRRDELVDTRKKERQRLAQALAEEHASIARHISWLNEEIKFIEQKRDTLLKETAEFTHDNKLLRSIPGVGPVAATTLLALMPELGHASPKAIAALAGLAPFNVDSGQFRGHRAIKGGRKRVRNALYMAAVTAARSNSHFASFAQALIKRGKPFKAAMIALARKILITANALLRDNVPFNA

SEQ ID NO: 228526 - protein, 400 aa, unidentified
MRNNAFVPSDYDVFSGLDVDKRSISATFNNQQGHIRSLRMPNSVEHLVNYVRKHFPDQKVAFAYEAGPTGYGLYDGLVAQGYRCLIASPSMIPKAPGQRVKTNRLDSVGLAENLRGGQLKSIHIPSPVYRDLRNLTQLRDTFVSAMVGMKQRIKSLLLLEGIEFPPAPAGSQWSIVVKHKLRKLPCSSTVRFKLDQLLDSLEFNEKQVVKTTQQMRRFCQNDPELSRCMGYVMSVSGIGRIVASQLLARIGDWRELKNVRQLGGFLGLVPTEHSTGDRTDRGSITQTGDGRLRSKLIQASWSAIRQDSELREFFASVCKTHARHIAPRVAIVAVARKLSVRISVVLMKQRPYVVREKVHSAPLTQEETSPQGTTRRKPEPGEPKLLTVRPLRQRSRGLVP

SEQ ID NO: 228527 - protein, 403 aa, unidentified
MPFTSSGRSCLRPRYAPLRVLARARLPEGIAGVTRLHALIGQFAGPDAEPGEVAVGIETDRGLWVTALRAAGYTVYAINPRQVARYRERHGTSGAKSDKGDSHTLADMVRTDSHQLRPVAGDSAEAEALKVAARAHQTLIWERSRHLLRLRAALREYFPAALEAFDDLAAPDALELLARAPDPASAARLTSGQITAALTRARRRGIPAKAAAIAAALRGEQMRQPQPLAEAYAATVRSLTVIIAALGGEIGRMEGQVTACFRRHPDAAIYLSQPGIGEILGARQLGEFGDDPHRYATAKARKNYAATSPVTRQSGKKKIVMARFIRNDRLADALHRQAQSALISSPGARAYYDEQRDRGLDHDAALRALSNRLVGILHGCLKTGALYDEATAWSHRVKLAGAA

SEQ ID NO: 228528 - protein, 447 aa, unidentified
MLKIVYPVCCGIDVHKTFVVACIASANDKGVTTYKSHRFSTFSKGLRELSQWLSVNGCRDVCMESTGKYWIPVYNILEPTCNLVLAHPKYVRAIRGKKTDKKDAKWIADIFKHDLVCGSFIPPYDIRQLRDLCRYLVKLTGFMTGEKNRAQNCLTVSNLQLASVFSDVFGKSATAIINHLLEHPGETGFDFMSLVDGRCKASAEDIAAAVDGNLLPEQAEKLTIIRSHLQGLELCAANLQSQILTLAEKYAHQLELVCTVPGILSLSAIRIIAEIGVDMSVFPSAKHLCSWAGLTPQNNESAGKKKTTRISQAGAYLKPLLVQCALAVIKSEKHPEIRNRYLALKKRRGHKKAIIAISRMLLSAIYHILKKGEPYNPELYKKADMPPKHREIPVEQAIFILQQQGYLYPPAARLSGNQGICRYLTFANSDLQLPLVALFAMLFFIHC

SEQ ID NO: 228529 - protein, 326 aa, unidentified
MKKYTVGIDVSKDKLDYCILSNEDRSVLSKGVIENERKELLRWLRKFDLEQYGFALEHTGNYGAMLAWLLSEANYCYYMINPMALKKSMGIQRGKTDAVDAYRIASYAISNSHQLEPYQLPTEELRKIKALITARERYVKIVVQLKNSLKSNQILNKTIDVKELIKEEKRQIKAISGSIKKVEKQIMELINATEDLKKSYQKITKVIGVGPITAVKCITETNNFLNFKNARKFSCYCGLAPFPYQSGSSVKGKTKTHHLRNKPLKSTLFKAAGSAIQHDPQLKAYYQRKTKEGKHKLNALNAVANKLVLRIFAVVKRDEPFVKLAA

SEQ ID NO: 228530 - protein, 312 aa, unidentified
MDKPPTFVGIDVAKHRLDVHLRPSGEHFTVSHDEAGVAALVERLAALAPTLVVLEATGGMEVAPAAALAAAGVPVAVVNPRQVRAFARATGRLAKTDRLDAEAIARFAEAVRPPARPLPDEATRRLGALVARRRQLLEMLVAESNRRHMADPVLREGIDAHLRWLEEALDAIGRDLDEAVRASPVWRAKEELLRSVPGVGPVSARTLLAELPELGSLTRRQAAALVGVAPFNHDSGKMRGKRAVGGGRAALRACLYMAAVAAVRAGNPAIAGFYGRLRAAGKPAKLALTACVRKLVVTLNAMLRTGSAWKHA

SEQ ID NO: 228531 - protein, 440 aa, unidentified
MKEKKSKAFPILYPNAAGIDISSREHYVAVNPDSAEVPIRAFGSFTEDLYSIVEWLRECKVDTVAMEATGIYWVSLFLILEEAGFDVVLVTAKHVKNVRGKKTDVSDADWIRQLHSCGLLSASFQPDAFTRKLRAYMRHRKNLIQMSATHINMIQKALEQMNIKLQHVIADITGKSGQEIIKAIINGERDPEALYAYCQGRIKPEKKEAIVKSLKGVWKEEHIFELEQSYSIFNFYHLKIKECDANIEKHLREKSGIDTFEEVKLKAKSNKNNLNFNAKGILQELTGTDLSDIFGITESNAVEIISEVGLEMSKWPTVKHFTSWLNLAPNNKISGGKILSSRIPKKKNQAGQIFKMAAFAVQRSKNWLAMFYHRIKVKKGTPKAIVATARKIAAIFYKLVREKIKFNPIPIEKYMDGFKEQQIKKLKRQAQNLGYQIVGG

SEQ ID NO: 228532 - protein, 420 aa, unidentified
MASVVEIVYPTCCGIDVHKNFLVACIAKTDGSGQTTHMLGRFSTNTGDLRRLAAWLVEHGCHDVCMESTGKYWIPVFNILEAAGLRVFLTHPKYVKAIKGKKTDKKDAKWIAELFKCDLVRASFIPPFEIRQLRDLCRYHTKLTQMTSSEKNRGQNCLTICNFKLDAVFSDVFGKSATRIIDKVMELGHSNFDVAPLLHSRCKAKAEEVAAAIDGELTYAQTEKLKIIRQHMEQLERLKTALESLILELAKPFEAEIALLLTVPGVGSPFTAIRILAEIGNDMSVFETAKKFCSWCGVAPQNNESAGKKKTTRVSRAGNYLKPLFVQIVLAVLKSKKHAEVKEKYNSIKKRRGHHKAVIAITRRLLTAVWHMLTKKECYNPALYQKSEAAPASRILTPEQGLALLKQKGYIIRNPKNKVA

SEQ ID NO: 228533 - protein, 439 aa, unidentified
MAELHVLDQRAAFVDVGSEQMHVSIAGGAPVVFGTVTTQLHALRDWLLEQQVHSVAMEATGVYWLPLYGVLEAAGLEVVMVNGRQTKNLPGRKTDMADCQWGATLHAHGLLRPGFVPPAHIRRLQDYVRLRNDHIMEAGACVQQMQKALERMNVKLHDVISDLAGVSGLAVVRAILDGQRDPQKLLALCNAQIQRAKGEQVKEALRGTWAEEHLFALGHALQTFEHYQRQIADCDRQIQALLPEPPDEQPPGQAHPDKARKRPGGNAPRIPGLRKILAHMCDGRDVTVLPAHTEYTALQIISEVGTDLTKWCTEKHFTAWMGLAPGTRQSGKRRGNVKRSRNRVGRLFCVMARSLARSKDIALGGFYRRLAARRGGLVANIALARKLAILFWRVMVKGVDYVEHGLASYQAKVRETKQRALRRLAKELGHELVPVASTS

SEQ ID NO: 228534 - protein, 381 aa, unidentified
METDWRCPLLMLWTAPPPGTQVPRIRELLGLPRSDELSMQIITTIGLDIAKSVFQAHGIDAAGQVVIRRQLKRRFVLSFFEKLPPCLFGIEVCASSHYWSRELQALGHTVRLMPPAYVKPYVKRQKNDSTDAEAICEAVTRPNMRFVPTKTAEQQSCLMLHRARHLFIRQQTAVINSIRAYLAEFGIVAPVGRRGVEQLLEVVADRADDRLPEVARACLAALGSQLRALKAQILEFDRRIIAWHRSSVTSKRLDAIPGVGPALATALVASIADPRAFRSGRDFSAWVGLVPKQNSSGGKDKLGGISKQGDRYLRSLFTAGALAVIRYAKIHGTGHRPWLTGLLARRPTKVAAIALANKLARMAWAMMARNERYKEPAALAA

SEQ ID NO: 228535 - protein, 439 aa, unidentified
MAKNILAVGIDPAKRIHRGVAVLYPDDVVLNIEFANTVESCLDADRKFLALAERHGAELIYGIEDHRLYGRTVTQVLTELKRPVRVVNPLWSNRQRAFYGQDKSDSVDARSIAAVVIRRDRDLPDAADASELAGSLREAERYLQDLAERRTITLNRLHRQLTEVYTYRYLDFFAGIKNTLGLKFFRNYPVPQRLAELDPDGLAAILFDLSEGRLGPHRSDQRLDWLRRKATLILEASVALRSRPQTLALDFKAELIQQLCDELLANHERTLRLRRMLRNQLLPASGQTITTIPGIGDVLGAAILGEIGDIRRFRSRDAFAKYNGTAPASKSTGGKERHCARRSCNHRLKRAFGIAATAAILHDQLAKSYFQKCRARGLTYIDSMKRIARRMSDIVYAVLKSGQPYDKDKLATAIAERADKMAANNNLSAPEQAPLHRES

SEQ ID NO: 228536 - protein, 343 aa, unidentified
MDHFAGLDVSVKETSLCIVDDAGRIVREVKVASEPEALLQALQKPYYHLKRIGLEAGPLSQWLFNALADAGLPVICVETRHMRAALKAQINKTDRNDARGIAQMMRAGLYRPVHVKTLRSQKLRMLLTHRKLLQSKAIAIENDLRATLRNFGLKVGVVGTVKFEERVKELVDNTPDLVVLVEPLLIVRRVLREQIGILHRRLLAIVRNDAVCRRLMTVPGVGPVVALTYRATVDVPSRFRNSKAVGAVFGLTPSKHQSGESNRTGGISRCGDEMMRMMLYEAAHIMLVRSAKWSWLKAWAMKIARHRGLKKAIVALARRLAVIMHRIWVDGTEFRWTREVAAA

SEQ ID NO: 228537 - protein, 350 aa, unidentified
MVVVGADVHKRTHTFVAVDEVGRKLAEKVVATTSRGHGEAVMWARERFGADMVWAIEDCRHLSARLERDLMSFGQKVVRVPPKLMAQTRKSARTRGKSDPIDALAVARGYLREPDLPVASHDAVSRELKLLVDRREVLVAQRTATINRLLWRVHELDPERAPKRRSLDLAKHRRILGDWLETVDGLVAELARDELADITRLTESINALAKRIGERVRAVAPVLLAMPGCGELTAAKLVGETAGVTRFKSEAAFARHAGVAPIPVWSGNTAGRVRMTRSGNRQLNAALHRIAVTQIRLHGLGQTYYRHRLDNGATRPEALRSLKRRLARVVFGHLHNDHQHRLQPCQPAAA

SEQ ID NO: 228538 - protein, 365 aa, unidentified
MGYATILGLDLGKFKSVCCVMDAVTGRHAFETLASTPATIADLLTRHAAAASGQEILLVIETCDAAGWVHDVACATPGVAVTVVHTQGDERWKWCKVKRKTDRDDALKLARLARLGELPHPPVHVPSPQRRQWRRLIIHRRSVVNRRTRSRNAIRSIYLQQGLELARGNKQWTKAGIAQLTQDARPMQDCAIDDLWRGRLHVELTLMAAVDAQLKLVDAKLDELAKTESRIALLQSVRGVGPRLSEAVVLHIGQDPRRFKSGEQLANFAGLVPKQLASGQTTRLGHITGRGPALLRSLLVEAAWMVWRLNDWAQAFVNKVSRGGRGRRKLAIVALAKKLLILLWGMLKSNRPFRAPAPREALAIA

SEQ ID NO: 228539 - protein, 382 aa, unidentified
MTEIQTIPRPDNIRNDRLYIALELSNTKWKIAFGNGFKIRLKSIEARDIEQFELEVQRTRKHFGMAENIPVFCCYEAGRDGFWIHRYLCTLGIHNLVVDSSSIEVNRRYRRAKTDRLDAGKLLTMLIRYINGETKLWSVLRVPEKDHEDARRLHREIERLKKERTAHTNRIKSLLALHGVVMEMGIGKAFPEYIEKVVLWNGEHLPSRVKEEMIREYRRYDLIQQQLQASEQEKKEALKRESQSSKKVLTLQNLKGIGPVSSWVPVYEFFGWRLFKNVKEVGAAAGLAPTPYDSGGSQSEQGISKSGNRRVRALMIEVGWYWLMHQPKSKLSQWFMERYGQGGKRMRRIGIVALARKLLIALWKYLEQGIMPEGATVKAYFD

SEQ ID NO: 228540 - protein, 350 aa, unidentified
MSVIPAGFHESNPNSRLGLCQPQARIARKGPLVSSQRLVTAGIDVAKDSLDFALSTEAKVQSFPNSPTGHQQIAQLLRQQTDLTHIVVEATGRYETALVAALAAVQLPVVVVNPRQVRDFAKALGILAKTDAIDARVLASFGELVKPEIRPLSSENARQFQELLSRRAQLVQMKTAETNRLGTAASKPVRKSIETLLKLLEKQIADLDQQLDDQIKACPAWKEKENLLLSVPGIGNQTSRTLLAELPELGQCSRQAIGALVGLAPFNRDSGTLRGQRSIRGGRSVVRSALYMATLSAVRHNPVLKAAYQRLVVAGKKKKVALVACMRKLLTILNAMLRNKTTWKNIPQTV

SEQ ID NO: 228541 - protein, 332 aa, unidentified
MSIIGCDLHTRYQVIAMLDTETGEVATRGLEHEGGEAKAFYAGLGKPALIGIEATGYTQWFERLVADLGHELWVGDPAEIRARAVRRQKTDTRDAEHLLDLLINQRFPRIWIPTPEERDYRQLLKHRDKLVKMQTSVRNQLHFLAMSQGVCRKRGLWSARGRRELEALQLGRWASLRRQELLALLDGLGPRIEEMDQAVKAEALRRAEAVRLMEQQGVGPVTALAFVLTVGPVERFPSSHKLVSYLGLNPREDSSGGHQRLGHISKQGNEMLRWLLVEAGHTAARLDPELGRVYQRLKFRRGGRVAKVAIARRLAVRLYWRLRNGNAGSHVQ

SEQ ID NO: 228542 - protein, 436 aa, unidentified
MHREFAQVAVWEDGVVRQVGQIALTDEALRIFADSLGPEDEIALEATCNTQAIVRLLEPHVARVVVSNPQKTRAIAEAKVKTDKVDAEVLAQLLAADYLPSVWVADPATQALRRQVARRAHVVRQRTRLKNQVQAILHRNLIPRCPAADLFGIKGRCWLANQPLPPDEALTVEALLRQLDFHGQELRIIDAELGRVALGSPEVKRLMTIPGVDATVALSIVAAVGDFRRFRRPEQLVSYLGLNPRVKQSGGQPASHGRITKQGRAHARGMLVEAAWVATKTPGPLRAFHDRVRSRRGMQIAVVATARKLAVLCWTMIERSEDYAFARPSLTDKKLRALELRAGMPSRRGQKGKAAAYSLKEVRRRERELAEQAERAYRQLVADWQTKRLTQPKPKPGVAAANGTRLKRPPVGQAARQASVPEPALRSGVDHALTEA

SEQ ID NO: 228543 - protein, 388 aa, unidentified
MNRIIKIGMDVHSSNYTLCAMEPTIGSEDRIFGEIKTAPDYKAVIAFIESLKKKLGPNDTYSIECGYEAGCLGYTLYNQLTKAGIKCVILAPTTMLTERGKRVKTDKRDACLIAKCLCYGGYHPVYIPTAKDNAVKEYIRMRDDHKLALKELKQRILAFTLRHGHQYTGGKWTVKHIAWLRKLELDPVCRETLDEYLTSYDEQEEKIRRFDNRIEEIASEADYKEKVGKLRCFLGIRTHTALSIIVEIGDFERFAKGNTFGAFLGLAPGERSSSDNINRLSISKAGNAHLRCLLVEAARGICKGHIGHKSKELRARQNGQSAEIIAYADRANTRLRSRYYRMIRRGKKKNVAVTAVARELACFVWGMMTGNISKASLAGTSVPAASQG

SEQ ID NO: 228544 - protein, 344 aa, unidentified
MSSLASPVFVGVDYHARSVQVCVLNREGQILANRACGNDWQAVVAIVRNKCGPQTPVQAAIESCCGASDLADELIGRASWSVDLAHPGYVARIKQSPDKTDYSDARLLADLERVGYLPRVWLAPEEVRELRRLVRYRQTLTKERKNLKLQIGAALRESRQRPPESVHPWTKAWAGWLTKEAVLSPNTQLIIRQRLKRLADLAEEIRASERLLAEQTNNDPLVQKLLKLPGIGLVTAATIRAEIGRFDRFRSGKQLARFCGLSPRNASSGQRQADAGLIKAGNPQLRMVLVEAAHRLIRYDPRWGQLAGRLRGRGKPVSMTVAAVANRWMRWLYHQLQPQQLTTP

SEQ ID NO: 228545 - protein, 318 aa, unidentified
MNSPCFIGVDVSKATLDAAQESDAASVQIENELPAIRRWLKRLPAHSYIGVESTGSYHRALVREAIAAGHVVFLLNTRDLSHYARAVGRRAKTDRLDAQLIARYLNREHMNLHPYRLPSEIQAQIDSLVNRRHTTVVALTMLRQSFSTLTVKPSKLASAQRAMTTLIDQLDQELQTLVSTDPVLEPIATRLDSITGFGPLLSNTMANALTRHPFKHADAFIAYVGYDPRVRDSGQHRGRRYLSKRGPAELRRLLYVAAMSACKTTLWRPFYERYRARGLSSTATLVILARKLARIAFSIVKHGTVFRPELIESACAKP

SEQ ID NO: 228546 - protein, 404 aa, unidentified
MEVVYERCCGLDVHKKTVVACVWSPEGQETRTFGTLTRELLALGDWLGEQRVSHVAMESTGVFWKPVYNLLEGLELTLLVVNARHIKAVPGRKTDMKDAEWIAQLLRHGLLRGSYIPDRPQREIRELLRYRRSLIQRRAQVVNQIQKVLTGANIQMSAVVSDVVGVSGRAMLEALIAGCDDTKAMASLARGRLQHKLLTLEEALRGLMGPHQQLLLASQLRHLDFLDQEVEQLSHEVAARLGPFDGALQRLDAIPGIGRRVAEEILAETGLDMSRFPTAAHLASWARLCPGNNESAGKRKSGRTGPGNPWLRAALVEAAWAAARTKNTYLSAQYHRLAARRGAKRAIVAVAHSILVIIYNLLQRGTTYQDLGGNYFDERDRQTAVRRAIQRLQRLGYKVTLEAA

SEQ ID NO: 228547 - protein, 415 aa, unidentified
MSDPFRFFVGIDLGSASHQVCVVDASGQTLGERGVAHSGADMAALFQWLATLTQGADPQSIAAASEMPHGAMVEAFLERGYAVFAINPKQLDRFRDRFSVAGAKDDRRDAFVAAHALRTDRYAFRPLALGDPRLLRLRELGRAEESLQQDLRRAANQLWQLLQRYFPGLLTLVPAADEAWLWDLLENAPLPEKAARLRPSTLQRILKKHRIRRVSAQQLAELLAQPALPLAPGANAAIAEQVLLLLPRLRLLRKQHTQLGRNIETLLEQLAGDESFKQHRDVQILRSVPGVGRIFTATVLAEAAEPLAQRDYRVFRTVSGVAPVTQQSGKTKLVSIRRACHPRLRHAVYHSAARYAQDDPRGQQHYARLRARGCSHARAVRGVADRFLALIFALLTHNQLYDPCRRALLDPAPTC

SEQ ID NO: 228548 - protein, 318 aa, unidentified
MGSIERTSKQVVVIGVDPHPGSHTACAMDETGRVLGQWRAQNDHEGIEGLLAWAKAFGPCRWAVEGPMNAYARGLVRALWAAGQEVVGITPAMTAEYRRKRWRGKDDEIDAGNAARALLANPELPVHAPPAYQERLRELTRTYQRVSQQLRAMRMAARSLETDEARAALQSVIVSLEQAVQGLKATIRATVTPLAAPLLARRGVGPITTGIVLAETGRIDRFPSRDHFASFAGSAPIPWASGAHQAVRVNAGGNRRLNHAIHIIVLGRLRIDPTTRAYRDRKLAEGKTQREAIRALKTYVCREIYDVLRTLNLTPVPA

SEQ ID NO: 228549 - protein, 338 aa, unidentified
MEFKRISIDTSKHVFTIHAVDEKERPVLRREIRRAQVEPFFAKVVSTEVVLEACAGSHHWGRILSRMGHRVKLIPPQYVKPFVKRSKNDRNDAEAICEAASRPTMRIVPLKSAEEQAATLILKHREMLVGQRTQAINALRGHATEFGIVVAKGCSNVAALLATLSTDKAIPNTAKSMFEQMGKHVTDFDEKIAALDQRLGELHKTNPVSQRLAAIPGVGPITAITMALTINAADFETGRHFAAWLGLTPREHSTGGKHRLGKISKAGNERLRHLLVVGSMAVIRHAKPSSKSASAWLLQLLERRPRKVAAVALANKIARTIWAMMVRGEVYRRQPVAA

SEQ ID NO: 228550 - protein, 391 aa, unidentified
MFAGIDVASERHVLARIDAQGSPIGPPTPITEDRAGHSKLVELLAQPPALVVMEATGHYWKNLFATLTAAGHEVALVNPLQARRFQQAGLGRTKTDAIDATGLARLAYEKRPPPTRLHDPMAEALRELVRHRDRLRQDFDDRVRQLHRLVDLGFPELTRYVRTLDSMLATCLLAEYPTAQAFARANPRRLAKLRYDGRHHVGAELAEQLVEAARRSIGQHHGPAYDLQARHICQDLDLWRRRLAEIDRDIEGLLDSHEVGSLLTTIDGIGPQSAARIIAAVGDPARFKSAAAFAAYVGVVPGLRQSGKQTHTRAGIAPIGNARLRMALWMPVLGAVRRNPWLKAFYERLRASGKPPKLALVAALRKLLHAVYSVAKSRKPFLPAIHHANPA

SEQ ID NO: 228551 - protein, 411 aa, unidentified
MDSVLYVGIDTSLGAHVVCAMAADGQVVARTTVPNDQAGAEQFVAWLHPHAAPYARLAIGVEATSVYHVPLMEWLTQTPDLQRWQPTWYVLNPKVVQKFRETYVDRGKTDRADAALIADVMRFGRVTPWTPPDPRYAALQVLTRHRRQLSHLITQEKNRALVQLFCVWGQYAHTEEPFFSNVFGVASQTVLERYTPDTLAAIPLADLVAEIAAAGRQRLKAPDDIAQTLHRLARRAFRLHPDEQDARHQSLVLHLDTIRALEHQQQALDKVIARDMQAFRQTLTTIPGIGPVYGAGLLAEIGPIERFPSENALAKYAGLTWRPHQSGNFDADIRPLTRTGNVYLRYYFIEAAERVRVRDPQFKAFYEKKYHEATHHAHKRALVLTARKLVGVVYGMLTRGQIYDERKLMPH

SEQ ID NO: 228552 - protein, 422 aa, unidentified
MSYCPVAGIDVSKKFSDMCILSPDNKIFAQEKIYHDETSINRANALLQKAERLFFSKPVIVMESTSHYHLILFQFFSEHGYDVIVVNPLQSNSMKDFSIRKRKTDRVDAFKLAMMYRTKTLRPSQIPQTATRALRQLCRHRAELLNDVSSYKNRLTALLDQTFPGYDKVFSDVGGVTSCAVLVRFPTPTILLVEEESELVEVIAAASKSGYSFAKKKARLLISAAQKAQTLGIHSCADETLIVCTIQMLRTLSESVLQIETAIDNLLAQIKGMRNNVSLLQSIPGIGSHSAALLLGEIGDISLFKKPKQLAAYFGLDPTERQSGSFRGTKNKLSKRGFPYARAALHMGVVNSICKRGKDSAANPVLLSYYEKKCKNKPAKVAQAASMHKLVFIVFAVLRDQMPFELKTPEQHAVEQGFVKAA

SEQ ID NO: 228553 - protein, 325 aa, unidentified
MAIDAGKKRSYVVVQNGDVVKEEGYVDTTELGFTSIIPDCEGNTFILEAGTNLYPIVDILERYKNCKIVVAHPTAMKLIAKAPNKTDKNDAHKLLEAYNADYLPTSWLAPKDVREDRNLCSARDFMVRQRAGIKNRIRYEAQRYGINLGALTKKSFGNLEKSEHVTMRELAGLHKAYTERVSNLDNAVKDRAEENHYAKLIDTIPGIGYSSALSIASQIGDVHRFHNEFHFFSYIGLCPSTHQSGSKEWKGHLKAGNVTLRSTLIECVWMHIMHCKDSRLTATYYQLSRRMGPKKAAVACAKRLARVIYFMLIRDKPFSPYGVGR

SEQ ID NO: 228554 - protein, 392 aa, unidentified
MFFVGIDIGKNNHVASMMDDTGKVVFKAFSFPNTSDGGNALFSKLASYSLKPSDFEIGMEATGHYWLSVYSFLFEKSFLLHVINPIQTDGWRRGTEIRRRKNDIIDSVLIADLIRYGQFVETKLADEDLFSLRTLTRFRTYLVESISDLKRKVVCVLDQVFPEYQSIFSDIFGKTSKEILLQFSSPIDFESVSSETLAQLLAQLSRQKVGAAKAEQLKAAASSSFGVTFSKNSFTFQLKALIEQISFIEKQVKETEVEISSIMKKLESPITTITGIGSVTGAAILSEIGDISKFDSPRKLVAFAGLDATVTQSGEFEAAHNVMSKRGSPYLRKAIFQSALIASFKDPVLSVYYQKKRAEGKHHLTCVGAVARKMCNIIYAVLKSNQPYVPKA

SEQ ID NO: 228555 - protein, 329 aa, unidentified
MNYAGIDISKYKHDCFILSDFGEVIHAGFSFANNAEGFKSLEQELRKCGKGNVRIGLEATGNYGINLKLFLEKIGFDYMEINPMLIKQHIKSTTLRRTKTDKLDAKAIADYIREREYRPNPEGFYDLFALKQLTRLRSRLIGIRSRYLVRLTNVLDCIFPEFKPFFSDRFSVTALYILANYKTPEAIANMNIRSYDILRRKSRGPFSMDKFVTLKALAKNTVGVSHKCYVLELDSLLDLYCQIDAKVEELESEITQMLETINPPTLSIKGVGSISAAVIISEFGDISRFFGPNQMLSFAGLEPGGISSPAYQNTRDIWSSVGHHICAVC

SEQ ID NO: 228556 - protein, 334 aa, unidentified
MSYQFVIGIDIAKHSFDIAILLADSPENIFHNAFSNDENGFKDLMIFANETIPGFDITKALFCMEATGLYCNALLQFFQAQQANVWVENAVQIKRSLGVKRSKTDKVDSISIAKYAFKNADLVRLWKPSGVVLEKIKQLATLRERMVVTQKRLITPISELRDAGQAKMADLLFKSIKKSINAIEADLKKIEVKIMECLKEDASLHHVFSLITSVVGIGFVTAVNLIIHTQGFNIMCDSRKLACYCGVAPFPYQSGISIKGKTKVSHMANKKLKTNLHLAALSAIKCDPEIKTYYERKVLEGKPKMSVINAVRFKLLARVVAVVNNDKEYVKKTA

SEQ ID NO: 228557 - protein, 433 aa, unidentified
MQDVQDEPLFCERVAGLDIAKAEVEVTIRVPSDTTAGRRQQETRTFGTTRRELESLGDWLACWGVTRIGMEATGDYWKPVFFLLESRGFDCHLYNAAQVKALPGRPKTDRADSIWLARITERGSVCSSFVPPEPIRALRTHTRYRRHLTQARTAEKQRVEKLLEDGHLKLSSIISDIHGVSGREMLNAIAAGQRDPRVLAQLARGTMRAKIKRLEEALDCAFFTGEHAAVLAMMLATIDHYTTQIDNLTAKIEVLAEPYLHQIRQLDEIDGVGPVCAQDIIAEIGTDMTVFPTAPHLVSWAKWSPQVKQSAGKRKGSNATGRGNPYLSAALGEVSISAGRTQSFLGAKYRRLARRMPKKKALVATGNSALTIIHALLSDPAARYTDLGPDYYEQRMHTRRQARNHVRSLERLGYKVTIQAINPDTGELLAAAG

SEQ ID NO: 228558 - protein, 376 aa, unidentified
MGHHSEAFIGIDTSKLKNAIAIAEGGRHGEVRYLGEIDTTDAATRRLIRKLAAKYAKLTFCYEAGPTGYGLYRLITSLGHECSVVAPSLIPRKAGDHVKTNRRDAQSLARNLRAGELTAVWVPDERHEAMRDLSRAREAAVDDLKSKRQQILSLLLRLGLHYPGKKTWGKSHRNWLASQTIGQREQRIVIEELLGAERQVQDRVGRLEQAIREAVPEWSLAAVVTALMSVRGIDLVAAVTILAELGDLSRFASPRELMAYLGLVPSERSTGNNVKRGGITKAGNRRARRILVEASWSYRYPPRIGRDKQAKVDAAPEPVRAIAWKAQTRLSSRFRMLSKKGKRPTIVATAVARELCGFIWAIHRVVTSPGATTASR

SEQ ID NO: 228559 - protein, 400 aa, unidentified
MDIAQQLHVARAVNFRGIVVGDPLAFENNEDGFASLLKWMDKLQRLNKLDAAIVGMEPTGHYWINLSKWLFKQGIEVVTVNPHLVKRNKENRDNTQSKSDKKDALVIADMVKNGYYAFVRNTSESFEILRVLMSNRDVVVKRLVSTINQLNRWVDIVFPELRQVFKDITGKGAIATLRLFPSPMELRSLKPHDVVSGWKSIMKRQPGLKKAQLLLQLARKSVGTRQALEAYKFHLEQLLEEYDLAVLQLERVEQEVKDVLKQIPFAKKLLAIKGISEISLAGILGEAGDLSGFSHGNSLLRHAGLHLAEASSGKWKGQIVISKRGRSRLRRFLYLATMSLVMNNTEFRAIHTHNVKVKKMKKMKSIMKLVGKLARIFVGIARRNESYCADKVQPITELVA

SEQ ID NO: 228560 - protein, 398 aa, unidentified
MRAIGLDVHRDFCEVAIFEHGNVTRHPRVPARRDALAAFARSLRPTDEVGLEATGNALVIARLIEPHVARVIVANAAATKGIGPTRAKTDRIDARTLAQLLGTGFFPEVWLAGEHTRLARRRMSRRAQLVRERTRLKNQIHAVLHRNLIERPPASDLFGVKGLAWLEGIELPVDERETVSSCLGQLGFLGDELERLDRVVAQDALGQESIRLLVTVPGVNLTTAAAFMAAVGDITRFASPSQLVSYLGLDPTVRQSGLSPARYGRISKQGSAGARHALVESAWVVASAPGPLHAFAERIRARRGANVATVAVARKLVVLFWHLLTKQQEYAFGRPSLTAEKLRRIELTAGSPSVRGKRSGGRVYASRQQRLREQQVAVYAETAYRQFIGERRKAARTT

SEQ ID NO: 228561 - protein, 360 aa, unidentified
MKRQRTSVGLDVHARSVVGCGLDGDTGEVFQRRLCPDHREVLEWVAGLPAPVAVTYEAGPTGFGLARALIGAGFDCRVAAPSKLQRPAGDRVKTDARDAAHLARLLHLGQIVEVMIPSPAQEAARDLVRAREDCRVDLMSARHRLSKLLLRQGIVYSGGQAWTGKHELWLRAQRFDTLGLQLAYDTAFDAMVCCVHRRDRLDEAIVGLAADSEFTPVVRRLGCLRGVSTLTAFGLAVEIGDWSRLTGRSIGAYLGLVPTEYSSGATRAQGGLTKTGNSHARRLLVEAAWHHRSIYRPSRDLRRRWDQASAAARTRGHAANHRLHTRWVGFDKRKKRPVIANAAIARELAGWCWSLAVLDG

SEQ ID NO: 228562 - protein, 319 aa, unidentified
MESIYYIGLDVHKKSIAYCIKTVTGQIVCQGMVKAERRSLRKWLEDIPGSWVGAMEATMFTGWIYDFLKPYAVELKVAHPAMLKAITAAKKKNDRADAEKLADLLRVNLLPECTMMSEELRELRRILRYRNLIVRTASKMKNKISGLLMEVGAVYDKRKLHGKRYFGQLLERVEDVPESVKDLLKLISKRVELLRSISGVGEVMALTWVLEIGDPKRFSNSGQAISYCGLCSAQHESAGKEHRGPISKKRNKYLQSMLIEAANLAPYWNPQLGILYEKELTRGNRNRATLAVARKLVIYMLAVDRRGKPFMTEKESLVA

SEQ ID NO: 228563 - protein, 414 aa, unidentified
MEIVYTRVAAIDVGKREIAVTVRAPGQRPGTRASQTRKFRTFYQVLRQMVGWLVEQGVTHVAMEATGVYWKPVFHALCEAEAVEVLLVNARHVKNVPGRKTDVKDSEWLAQLLECGLLRGSFIPPPQIAAIRELTRYRKKTIQARTRELQRLSKVLEDAGIKIDSVASSITTLSARDMVEALIAGERDPQVLAGLARGTMRSKIPDLTMACAGRFGEHHALLARVHLNHIDHLTGMIEQLDQRIEQMLDPFALQLSLLRTIPGIGDRAAQVLIAELGVDMSRFPTAAHLASWAGLCPGNNESAGKHLSGRTRKGNAEVRDVLTECAWAAGKTRTYIGAQFHRFHRRFGKKGGGKAAIAAAHTLIVIVWHVLHDQSTYRDIGHDYFTRHDQPEAAKRRLIHNLEALGYHVELTAA

SEQ ID NO: 228564 - protein, 340 aa, unidentified
MSNITTIGLDLAKSIFQVHGVDATGAVVVRRQLRRREILRYFESLPFCLIGMEACATAHYWGRELRAMGHEVRLIPPAYVKPYVKRNKNDAADAEAICEAVLRPSMRFVGIKTVEQQSILSVHRARDLLVRQRTMLVNSLRGLMAEFGVAEAQGRMGAGRLIEIIGDAADNRVPALARRALGSLVAQLHGVGREIRALDREISAWHCQSDVSQRLATIPGIGPITATAIVASVPDPSVFASARQFSAWLGLVPRQYSTGGKPRLGGISKRGDGYLRRLLMTGATAALQHSKTIKAQPWVHGLLERRPRKLVAVALANKMARIAWVIMTRQTRYQPVPVRS

SEQ ID NO: 228565 - protein, 358 aa, unidentified
MPYRTSIGLDVHARSVSACALDHLTGEIAQRSFSEPVPQDIVEWASGFEGPMRAVYESGPTGFTLARALNASGLECLVGATSKMLRPSGDRVKNDRRDAVLLARMLSTGNIPEARIPDLEQEAAKDLVRMRETARAALTAAKLRLSHFLLRKGYSYEKGKKTWTRAYEDWLRRLVFDTELDRAVFDELLADVLAARDRKERLQKMVEEQARSARWSPMVSRLSCMKGVSSYTALAIAVEIGDFSRFPNARAFQSYVGLLTTENSTGAKVHTGGVTKTGNALVRKLLVEASWLYLRPRMLNPTIASDGVPAQVAEHARKGCMRLKKRAAHLQSRGKKGCVVVAAISRELAGWLWALATM

SEQ ID NO: 228566 - protein, 401 aa, unidentified
MKTVLSVDVAKNKSMIMLMNSDGEILIDTKEIKHNLEEFEKVKAEIKEINPQNLTIFMESTGTYHLPVERYFKENGFNTLVINSLTTKNNYDTIRKTKTDKKDCYRLAKLFFVNEVEYHELSKKDLYANLKAMTRQYFYLLQQNVSCKNRYKRLINICFPELEKIFKSTRIYDDTALNFIKEFPHAEIVKEKRIDALYNNLYKTNGRNLNFYKKLATTIKTASANSYPGVDKKHEDVQNLSYMAKIVQNNNNIINELREKMIETAKQSPYFKIINSFYGIGEILTAEILGELGDITRFDSPKEIIAFCGLDPTIKQSGKSINVKGAISKRGNKYARYILFNCSQMVVKLGASNYPEHPVYIYYQNKKAEGKHYYESLTACSTKILRMLYSMCKNNKQFLEN

SEQ ID NO: 228567 - protein, 342 aa, unidentified
MDYCTTIGIDVSDRTSKVCVMSKEGGARRVLVETTCATTQEGFGECLSKFDRAWPVVFETGTHCRWMKRHFESMGFKTIVANPSEVKLITDSNAKNDRGDARKLARIALADAELLKPVQLRGEGFQRMLRLHESRLLLVKCRTSMVVQVRCFAKSCGFRLPDCPAERFHELDRSSWPSDFEQMVWPMMDMVKTANLKIAAYESMIRKLAATPEFKAKVERAREVYGVGFIGSTVVVAAIDGDATRFAHARDVGPYFGMTPKKSQSGESDPQLGITKAGNNLVRKVLVECANVAMIDIAVKITYAPKHYTSIDLFAGCGGLSKVSRMGFKALAHVEIDHWACR

SEQ ID NO: 228568 - protein, 355 aa, unidentified
MTFVGLDLHKRYITACALDAGGTVLAEVKRLPAALDALGAFLAALPGPVTVAMEATLYWAWLTEHLEAAGVTVRVAHAYQVKLIWQARSKTDPIDARKLAELLRTHLLPTIWVADAATRARRQLLRGRAFLVRQRTQLKNRVHGHLTAENHACPTTDLYGKAGRTWLTSVALSPALREQVDALLRLVDALTQEIHALDRAVQRAARGNAVAAQLQTLPGVGPFGALMLEAEIGPIARFRSSHELAAYAGLVPSTHSSGGRTTHGGVGPAGNRWLKWSLVEIVQTLKLAPGPVGAYYQRLLRAKGKAKATVAAARKLCCYVYWMLKEGWSYAEWLRQHDRSLSSEVRPIQRMGAVA

SEQ ID NO: 228569 - protein, 354 aa, unidentified
MTRTIKYVALDVHQATTLASVRAETGRVIARSILPTEALALVEFFRGMRGTVHVAFEEGTQAQWLHDLLVPLVHRVVVCDRHGEKRRGNKGDRVDADQLSARLWRGELRAVYHGSTERATLKELTRAYRNLVEDATRVMLRLKALFRARAIPTPGSKVYRPSDRGTWLAQLPERGVRFRAEALYAELDVLRELRPKAKAAMLAEARRDPAWRVLRTIPFLGAIRVALLLATMQTPWRFRTKRHLWAYAGLAVVTHSSADHELQHGRPVRRRRAPLTRGLNPNHNRVLKDVFKGAATAATARPSPLQAFYQGMLARGMREELARVTLTRKLAALTLRLWKRGERYDPTQLTQQAH

SEQ ID NO: 228570 - protein, 347 aa, unidentified
MRFYTKVHEAYCGIDLHARTMYVCIVNRDGEILLHRNMPTNPEIFLKAIAPYRQDLVVAVECMFTWYWLADLCAQEGLTFVLGHAQYMKAIHGGKAKNDRLDAHKIAVLLRGGMLPQAYAYPATMRATRDLLRRRLHLVRQRAERLTHIRQTNSQYNLPALGKSLKSKAQREGVAQRFSDPAVQKNIDVDLALIDYYARVIRDLERHIMTAAQQHDSETLRRLQSVPGIGPILSLVLLYEIHDIHRFPRVQDFASYCRVGKCVHESAGKRYGTSGHNIGNVHLKWAFSEAAVLFLVDNPPGQKYYGRLEKKYGPGKALTVLAHKLARAVYYLLKRQTTFDMDTFMRG

SEQ ID NO: 228571 - protein, 267 aa, unidentified
MSDAQAEVFVGIDVAKAKLDVGVHPSGESWTIEHDEVGITTVVERLVAAGPTLVILEATGGLELSLAAALIAAAVPVQVVNPRQARDFAKATGQLAKTDRLDALVLARFGAALRPEPRPLPDAALSEVRALVARRRQLQAMVIAEKNRRSGASKRLHAQLDEHLAWLRRAVADLDRDLATTIKGTSAWQTAVTRWRSVPGIGPVVRATLLADVPELGTLTRQQIAALVGVAPLNHDSGAHRGIRSCWGGRAHVRTALYTAVLMRIEG

SEQ ID NO: 228572 - protein, 310 aa, unidentified
MTVVTVGIDLAKNVFAVHGVNAAGKAVLVKPLVRRAKLLELIATLPTCLIGIEACTGAHYWAREFQKMGHTVRIMAPQLVSPYRMGGRHGKNAAADAAAICEAVTRPNMRFVPIKSVEQQGQLFVHRAHQGYVSERTALINRIRGLLGELGIVLPQAFKAFLSGVAQVLEDLPGYCNQVIGDLLNELYHIEEKIKNSEKLIQQLARDNSAAQLLMPFRGIGPMTATAIVASIGNGHDFKNGRQFSAWLGLTPRQQSSGGKARLGRITKAGDSYLRTLLVLGAGSVLLEAAKNARMCWAMLHLRDEFRFPA

SEQ ID NO: 228573 - protein, 362 aa, unidentified
MKKPSKHLIAEVPRSVAKVKMMTIGIDLGDVWSHYCTLNEDGEVVDRGRFRTTPAGVEKWFTDLPRARIAMEAGTHSIWVSEQLREMGHEVIVANVREVRSISHSNRKSDTVDAEKIARYARVDPKILHPISHRTVAQQEALTLIRARNLIVRLRTAAVNSVRGLAKPCGYRLPASSTLCFAKRCMAVLPPGLARALGPVLEQIAAMTVKIQQYDHTIKRLTETEYPETQALLQVYGVGQLTALTYVLTLGSKERFQRSRDVGCYLGLRPRRSQSGDHDPQLGITKAGNIYLRSLLVECANHVLGPHGRDSTLRKWGLHLASRGGKSSRNRAIVAVARKLAVLLHRIWITQEPYIPFHAVAA

SEQ ID NO: 228574 - protein, 353 aa, unidentified
MAQSTEGREVILGVDTHLDVHVGVVIDGVGKVLGTLIAPAGLHGYQQLLQWSRSFGACTRAGVEGTGTYGAGLARVLRGAGIEVLEVNRADRSKRRLRGKSDPTDAENAARAVLSGEATAIPKLQSGVVEAMRAITVARRSAVKAKTQAINQLRALLVTAPDPVRAKLMKSKPEHCVQACIRMRALGRTPLLEALTRTLRILAKRWTVLAAELRELDAMLEALARRAAHRMLAKFGVGPYTAATLMVVAGDNPERLRNDAALAALCGASPLPASSGKTQRHRLNRGGSREANNALWTIAMVRMRSDARTRAYVARRTAEGLSSKEIQRCLKRYIVRELYPLILADLRDAVATS

SEQ ID NO: 228575 - protein, 345 aa, unidentified
MEITTIGLDLAKSVYQVHAINGAGEVVVRKTIRRAQVLRFFERLDPCLVGIEACGTSHYWAREISKFGHEVRLMPPAYVKPYVKRGKTDASDAEAICEAVSRPTMRYVAIKSCEQQAALTIHRTRDLFVKQRTQLVNMIRGLLAEFGIEIRRGITHALNLAERIAAGDMPGIPTLAAKMIASLAGQILDLEARLREIERELLAWHRSSEIARRLATIPGVGTVCATAFAASVTDPHQFRSGRQFAAWLGLTPLQHSSGGKERLGRISKIGDKYLRRLLVVGMTSLVRRAKYKPDAVDRWLSDLLSRKPVRVVTVALANKAARVIWAIMARGGIYRAPQPAGAAVA

SEQ ID NO: 228576 - protein, 369 aa, unidentified
MRNSTTTSWVAMDTAAETIHVAIFRGEEATPSAEFEVKADAQGIGRLKKKLEKEAGAVKCVYEAGPCGYGLCRTLTASGYACEVIAPSLTPRKPGERVKTNRLDARRLGIYYRGGQLTPVRMPDETQEALRDLLRARDDVRRNLQQSRQRLSGFLLRHGHHFKEASRWTRKHWAWVKAVEFKEQMLQTVVAEYITAVEMQIEQMRRFDQKIHEISQRPEYAAKVSAYSVLRGIQTRSAMTIIAEGGDLRQYGQAPQFMASIGIVPGEDSTGERRKRRPITKTGNVYLRRILIEAGWSYQKRLHAGVGIQNRRRNQPEALLAIARKADHRLHGKFSKLQFRYNKPSVVANVAVARELAGFIWAIGQLLEQ

SEQ ID NO: 228577 - protein, 394 aa, unidentified
MIYAGVDIAKTDHVIGAVDERGAEMCPPMPFKNTEAGLERAVAWLEGLAGSPSDVVVGMEATGHYWMACYSFLVARGYSVAVINPMQVKAVRKLKGLDKVKNDRVDAGLIAEALRIGQYDETRLATDEMASLRSLSRYLQSLRGMVAELKTQCICLMDAHFPEYAGIFSDMFGAGSRAVLSKSPLPFELARRRADSLARDIAEASRRGGKSSGYAAKIKAAAKSSIGVRLGQEAASFQVKSLIRQIEFADSECAGVEARLRSLLDEVEPLVLTIPGVSYVTGAQIVSEIGDVSRFRNAPALVSYAGLNSSVSQSGKFDSGGGPITKHGSPYLRRALWLAANRARQYDPGLRAFYDRKRAEGKPHRVAVTAVARKLCHIVFAVMRDQVPYDPGRE

SEQ ID NO: 228578 - protein, 405 aa, unidentified
MNTAVGIDVSKGKSMVCAMRPFGEVVLPPREYPHTPAGLSALTESLLLIDGNTRAIMEATGRYHEPVASALRSAGVRFSVVNPKLIKDYGHNTLRKVKTDKADAVKIARYGLEYWEEMMEYTEADAVRKQLKLFSRQYNLYMKTVVSLQNNLISLLDSVFPGVNNLFTSAMRDDGRQKWVDFVTIFYHRDCVAGVGLASFTERYRKWCSRRGYNFSKNKASELHAASLNVVTTLPKNALTKALITTAADQLTTASVTLAVFKAEFIRLAATLPEYEVVQSMYGVGGITGAQLMAEIGDVRRFANRGSLIAFAGVDPGIDESGTRKSQGISTSKRGSPHLRKTLFQIVSTYLRCSPENEPVYQFLDRKRAEGKPYLVYMTAAANKFLRIYHARVKECLSPRELSGT

SEQ ID NO: 228579 - protein, 310 aa, unidentified
MSILSSSVAGIDISKTRLDVCILPQGDAFSVSAEDRDTLSRRLRRKGVGLVVVEPTGGLERQVVAALEKTGIAPAVVNARQIRDFARASGLLAKTDRLDARVLAEYAARMTPQPRERRSEDQQRLCGLVRRRRQLVEMRKGELTRRHQVDVPDLDEGIERSIRFLTGEIKAIERKIKAALDAAFASVNRILRSMPGIGLVTAASLLAELPELGRLSRRKIAALVGVAPFSRDSGAFRGRRTIWGGRAELRHTLHMAVISATRQEGSLRNTYQRLRQAGKPHKVATTAVLRKMIVQLNAMIRDNKHYVTAT

SEQ ID NO: 228580 - protein, 337 aa, unidentified
MKVTLIGIDLAKSIFQVCGVNQAGKHIFNRQVRRARLMELLLQYPDASIAMEACSGSNYWGRELQQRGFKVMLLPPQHVKPFVKGNKNDRNDAFAITEAARRPELKCVQPRTLAQTDMIQVHRVLDRMIRQRTALINQLRGFLNEYGIVVAQGKEKLLAAMPDLLEDAENGLTPSSRALFQALHGQWRQANAAIERIEEGLKRQAKADEAAQRLMKMNGVAAKISTATIAHAGNGHGYKSGRHFAANLGLVPREYSSGGQQKLGGISKRGNQYLRRLLIQGAWSVVRNVDKNDDRMSRWARQLVERRGKHKAVVAVANKMARIMWSMLYHQTEFQAN

SEQ ID NO: 228581 - protein, 405 aa, unidentified
MNAVGIDASKGKSMVTILRPFGEIVSSPHEVKHTSDQIDDLIREIRSLEGESRIVMEYTGRYHEPMARWLSDAGLFVSLVNPKLIKDFDNDSLRKVKTDKADSVKIARYTLDKWHKLKQYGAMDELRNQLKTMNRQFGYYTKLKTAMKNNLISLLDQTFPGANTFFDSPARSDGSQKWVDFVDTYWHVDRIRSMSLVAFTEHYQKWCKRKGYNFQPDKPAEIYESVRNIIPVLPKDEVTKFIVRQAVNQVNTASAAVEELRTRMNDIASQLPEYPVVLAMKGVGTSLGPQLMAEIGDVTRFTHKGALTAFAGVDPGKNDSGSYSQKSVRTSKRGSAPLRKTLFQVMDSLIKAMPQDDPVYEFMNKKRSQGKPYYVYMTAGANKFLRVYYGRVKEYLSEHTETAVK

SEQ ID NO: 228582 - protein, 399 aa, unidentified
MLAVGIDISKSKSVAAILNQDGSMHTSPFEFHHTQPELDAFIKYILNSKQSATILMENTGHYHYPVLKAFQEAGLPVCMVNAYQIKKFGDMDLRKAKTDKKDAVRIARYALEKSYSLVPYTSMEQKYEDLRFLARQYNQRMLTLKTNKVFLLNLLDETMPGITNILPLTTRTPETSLSVLFINRFKSYDRIKKMGKSRFLDAFEKIARKSRNRQTKTYGLAIYEAALRNITTRGENEYTLAAQDQCLELVCESQKAADSIILKMKTLAETLPEYAVLRSMAGVGNRLGPLILAEIGDIRRFHSGKALNAYAGNDAPPYQSGTFESHNRHISKRGNAALRKYCFEVMQALKLTRPQNDPVYLFLLEKEQEGKPYNVAKMAGVNKFLRIYYARAMETLKQQ

SEQ ID NO: 228583 - protein, 426 aa, unidentified
MPFAALDLHQKIVEAVLLDEAGAPAWRGRFPATRTALEHFARAHLTAQHHLALEATTNTWAVAALLEPFVAEVVVSNPLRTRAIAEAKIKTDRVDALVLAQLLRSDFLPRVWQPDPATRHLRSLSTERANLVADQTRLKNRIHAVLHQRLIEPPAGDLFQPQSRAWLEHLELDPLGRQTLDRHLRQLARLQEELDALTTQQAAQAYADPRARLLMTLPGVDFPVAQTLLAALGDVSRFPDGNRAAAYLGLVPSTRQSAAHCYHGPITKQGNSHARWMLVQAAQAVACHPGPLGVFFRRLQNKKNRNVAVVATARKLVTIAWHMLRRNEPYRYAQPATLEAKFSRLRIRATGRRKKTGSGKGAPRPAAYGTGKPTRAVPSLDQVYAAAELPALPAAAPGERRMLEQTGAAAFAAQIRNPQRIPRRSR

SEQ ID NO: 228584 - protein, 392 aa, unidentified
MGCPMPQRNDLSRSLVPFQQDGTLVAVIELSRSSWLVAGIVPGLERHPLKKLAPDEDALLRLLHRWRDEAAKAGCAITRLAVAFEAGRDGFWLARWLRAREVEAHVIHPTSIAVSREHRRAKTDRLDTGLLKRAFLGWLRGEPGHCSMAAVPTLEEEDARRPNREREGLVGERTRIVNRMRGCLARLGIRGFGPASRGAPDRLEALCTPEGVALPPNTLAELRRDMARLRFVSDQIAEIEAARRERLRQAPAEDRPHAMVRLLARVIGVGVETADMLVHEVLRRDLRDRRAVARYAGLTGSPEESGARRREKGLAKAGSARVRRGMVQLAWRFLRFQEGSGLAGWYRARTADARAGTRKTMIVALARKLLIALWRLVTTGEVPEGVVLPPAA

SEQ ID NO: 228585 - protein, 331 aa, unidentified
MFPVGIDVSKNTLDLCMLYDGIKGRIKTRNIQNNRHSVENILRWLRLQHCGPEDVHVVMEATGVYHERLATELHDAGFRVSLANPHRSREFARGMGIMTKTDKVDAYMLACYAFIKKPHRWEPPAPEIRYLGALLRRRDVLLGDALREENRLEKYLSTDTPADIISSCRRMAQLLREEVSNIERQIKAHIKASPALRRDYTLLSSIKSVGPQQGMHMLVVLRSHNFVSAEQAAAFLGVVPIEKRSGTSVRRRPRMSKIGPPQLRAKLYMSALCGKIYNKRIRNIYDEMCLRGKPKMVAIGALMRKLVHWCYGVLKTGTVFNDEDLKPVLST

SEQ ID NO: 228586 - protein, 343 aa, unidentified
MRNDSYFVGLDVHKQVIAYCVKTASGEIVREGKMPATRAALDEWVKTLPGPWRGGMEATMFSHWIYRYLLPHAEELQMGHPARMKAITAGKNKSDKLDARTIADLLRVNLFPACFVTPAELEGLRRQMRFRQMMVQETVRFKNKTAGLLMEVGAEYEGRRLHGKRYFGELLKKNQAMIQELRPLLEFNRSQIESLATMDKQLMRLLESDGRLSGRVKELQKIEGVGPVTALTWALEVGDPKRFSSIKQAVSYCGLASALRESAGQQKRGPLSKQRNHHLQSVLIEAAKMAPRLNAKLAQVHQRASERGHKNRATVAVARKLVAYLLAADRAFFATQVELKPAA

SEQ ID NO: 228587 - protein, 396 aa, unidentified
MNTVYSLGVDVSKRKVSYEWLDETGQCHGRGSVPTSQGGLRQLLEQLSAPAGAVWVVLEATGVLHLSWAEAFHQRGYPVLVLNPLLSKRLYATANAIRDHKTDAVDAHTLAEIGRLHKAELQRFRYQPEPARFGLQRLASVRQQLRQSLTNLKKNYASLLDVVFPELSALVNVQRLDVRRLLQQASSPAAIVRLPWPRLQGCFRSQAEAVLSAARSSLAPAALAQATQPALLAALQGLEALEAQLAQVDAQQQALLPQVLASTQIALARTVPGIGPKTAVAILAELPASLWQKGGRRQIAAALQALMGNDPRLRESGQYRGQTKMSKRGSPSLRTGFFQATFCATTSDPEFQQRYRTYRTRGKQHKVAISHLMRILARRLVAVLVSGRPYETIYAT

SEQ ID NO: 228588 - protein, 345 aa, unidentified
MEHYAGIDVSLESSSLCVVDTTGRIIREAKVASEPEALIAWFNRLGLTLTRIGLEAGPLSQWLYAGMQKAGLAVELLETRHVRAAFKAMPVKTDRKDARGIAQLMRLGWFRPVHCKSLPAQEVRALLTARKLLQAKNHDVEMSLRGVLRGFGLKVGPTTPRTFSSRVRELVTGHTTLSTIAEAMLAARDMLFSEWQKLEKRLRSLARDDDRVRRLMTTPGVGTIIALTYVAAIDDPGRFKSSKRVGAHFGLTPRKYQSGETDVTGRISKIGDAGVRTALYEAANVILTRPVKASTLKSWGMRLAARAGMRKAKVALARKLAVVLHRMLVDKTSFLADKAAAATTR

SEQ ID NO: 228589 - protein, 498 aa, unidentified
MNNFAASASSGYELSSFSEKMNWTRLSNLAVVLGSGNEYSDEDESSLETITSGYKEFASGSGRANDHYPLSNMNESVSEQPLSPKVAAYVGIDWADQKHDVVLRSAGDPAKPEHQVIKSEINALNDWIAQMQERFGAKGKVIVCLEQSRGALIYHLMAYELFELYPINPSQLANYRKTFFSSGAKDDWPDADLLSELVMCHRDRLKAWKPDDQLTRELAALNEGRRHAVNRRTELANEIKSQLKLYFPVALQILQNDITTALAADLLVQWPTLAELQKVSPGKLRKFFYGHNSRQEKKILERLALINEAKPLTTDAAIIRPSALRVKLLAQQLKSLLPFIAEYEKRIAELFGSHPDSFLFDNLPGAGPALAPRLLTAFGTDRDRFEVASDVSTLNGIAPVRVASGKRSSVHFRWACPKFQRQSFHEFATHSIRFCPWAQTYYQTQIARGKTHHVAVRALAFKWIRILFACWKNRVPYDPERYLKALQSRGSEYAQTAV

SEQ ID NO: 228590 - protein, 324 aa, unidentified
MSKASIICAGIDTGKHKLDVALEGRSQELQVPNTAEGHRQLSSWLCKHQVGRVGIEASGGYEQAVVSQLRQDGFVVIVFQPAQVRAYAVFHLQRAKNDKIDAGLIADCTAAAKKIHAPPDPRLAPFAEVVTLIDQITEDVACLQTRRESFRDERIKAHYTSEIRRHKALLRGELKKVAADIRQHDDLGKRLDLILSVDGVGLRTAVAILVRMPEIGRVPREQAAALVGFAPYDNDSSDYVGQRHISGGRKRLRGNLYNAALPASMRWNPQLIALYKRLIAKGKPHKVALVACARKLLIFVNTVVERGTPWSKETPALAIANRST

SEQ ID NO: 228591 - protein, 342 aa, unidentified
MDEYDGRQFVGIDLHRQRSVVVRQSESGEQLSAVRIINDAVALQLELEQAGADPEVVLEATYGWYWAVDVLQAGGARVHVAHPLGVNGFRYRRVKNDVRDAADLADLLRMGRLPEAWIAPPQTRELRELVRYRAKLVAIRSGLKAQIHAVLAKAGVLIAVSDLFGLSGRQRLANVPLGPAYAERIRSLLELIDIPDSHQAHFAAMIAERLDTHCGYQAIRQVPGIGPTLAAVLVAEIGDVHRFADPAHLCSWAGLTPRHRESDTVVRRGHITKQGSKAVRWAVIEAVQRHPTTAKIWADKHRIEARRGTNIAKVAAARKLLTLVYYGLRDGHIRALDRARAA

SEQ ID NO: 228592 - protein, 342 aa, unidentified
MSISYVGLDLGSSNFQQVALNHDGVSRVNRDFSTSEANLIKAFSDQRGEIHVHLEAGELAPWAASIIAPLVTRVVCSHPQSNAWIAKDADKCDRVDAYKLAELLRLNRFKEVHYAREQSRREFKTLVQHYDELTAQQARLKTKLKARLRMQGVIVTGERLFSRAGRKPVLAEVKSRDLRTAISQLYEVLDQSVVSQTEARLLMLQAAQRFPEIKILRTAPGIGPIGACRFSAYIHTPSRFSTTRKLWKYCRLSVSHRSSNGKPLRRPRLDHCGCGRLKDVTRKAFDVAMRSRHDNGFKRAYLRALETTHDKTHARLTVQRKIVSTLRAMWINQTPYCDELMR

SEQ ID NO: 228593 - protein, 359 aa, unidentified
MQAQSNKLNFEGQNIYVGIDVHKKAWTVCIFSQHLEHKKFSQPPTAEALRTYLHRHFPGAMYYSAYEAGFCGFHVHTELQAAGINNIVVNAADVPTTHKEKVNKTDKGDSRKLGSSLRAKELTGIHIPSGKTQEDRSLVRMRYTVRKDLTRLKSRVKSLLNFYGIKHPEQFSLPGSHWSARYMTWLKTVAMKEESGQFTLQSLISEVEEIRKIQLAVTRQIRALSKTTSYQKDYELLSGIPGIGLITGMSLLTEIEDINRFSNTDKFAGYAGFIPSCHSSGEKENNGEITSRANKLMRDLIVESAWIAARKDPALHLAFCKLCKKMEQNKAIIRIARKLLNRIYHVLKTKTKYVCGTVE

SEQ ID NO: 228594 - protein, 410 aa, unidentified
MGLYCGIDWATQHHDVAVIDDDGRVIARGRVSNDAAGFAALLTLLAEAGDSAAHPIPVGIETDRGLWVSALRETGRVIYPINPLAASRYRARYAVSGAKSDATDAVLLANIIRTDPDAHRPLPADTELAQAIRVLARAQQDAVWARQQVGNQIRDLLKDFYPAALAAFDQLPEGGLARADARTILAAAPTPAQAAALTPARLRRLLVKAGRRRHLDRDVERLREIFTDTYLHQPPVVENAMGIQLSALLRQFDAAATAADELAEAAIAHFERHPDAAIITSFPGLGMLAGARVLAEIGDDRSRFADARGLKAFAGSAPITRASGKKTVVLHRHIKNRRLAAVGPIWALSSLRASPGARRHYDTRRAAGDWNHQAQRHLFNKFLGQLHHCLQTGQHYDEHRAFPPPLLLAA

SEQ ID NO: 228595 - protein, 345 aa, unidentified
MELHTIGIDLGKTVFHLVGLNLGGEVVVRKKFSRTQLLRFTANVHVGLIGMEACGGSHFLGRALREQRHEVRLIPAQYVKPYVKTNKSDYIDAEAIAEAVARPTMRFVPIKTDDQLDMQSLHRVRERWVMRRTAVINQIRGLLLERGITLRKGRHHVHAALPLILEDADANLSGAVRLLLAQLKLDLDQLAARIDEADAVIRKTAHENEACRRLVAIPGIGPVTATALIAAIGNGGAFHKGREFAAWIGLVPREHSTGGQQKLLGISKRGNSYLRRLFVQGARAVLQQRTKQSSGLSAWLAQLTSRTHRNVVAVALANKLARIAWAVLAKNEPYRHPILADAAAA

SEQ ID NO: 228596 - protein, 406 aa, unidentified
MEEKRKRYIGLDVHKHYLVALGVDAELNVVLPLRRVELSHLERWMKKTLTKQDEVVLEMTTNTWQLYDELIEYAGSVIVVHPPHVGLITRAQVMTDKIAASILARLLAKGLLVGIWVPPQEVRELRGLVAQRQKMTRLATQAKNRLHAVTQRHHLKLPAGNPFGKANNGWWQGLALGKLEKMNLQSDLETLQFAEQQEARIEKEMTKIAAEDEKIGQLLQIIGFGVITAMTVYAAIGDIGRFPEAKKLVGYAGLGARVHDSGMTTRTGKITKAGRRDLRVALVEAANVVVGSNPYWEAELARLEPRLGRNRAIVAIARKLLITVWHVLQGKTDKHTEPEAVAQKMLKFAYAVGKANRGGKTAAQFARERLDGLKMGESLSSIPWGAKKPIPLPPSTLSGRSVVPNK

SEQ ID NO: 228597 - protein, 400 aa, unidentified
MLSIGIDVSKGKSTVCGMKPGGEIVYTPFEIQHTREGMSELVSLLHNSCEEVRVVLESTGSYHCPVVAALLENGIFVSVVNSLRMKRFCSQSIRKVKTDRIDAMQIALYGLAYWQELQPTRLPEDTYRELQLLARQYYQMTSMLIKAKVDFNAICDQVLPGMQELMNDHAGRHKLSDFVLRYRHTAHILEMGETRFRKDYCKWAEKKGYRNHERMAALIFATAQNGIPVLPNAPSTQIVITEAIRVLHTVEASRDAILTQMQALAKTLPEYSLVREMPCIGDTLAPRLIAEIGDVRRFHSKRALIAYAGIDAPPYQSGKFCANNRHISKRGNRYLRKTGYEVMQSYVMHKPANDPIFTFIEKKRGEGKSGKLAMVAGLNKFLRVYYGKVTELYRSLSAIE

SEQ ID NO: 228598 - protein, 421 aa, unidentified
MEEITEEAAELVARVAALDIGKASLVACLRVPQEGRPGRRRQEVRTFATTTRSLLGLQDWLVAQGVSLCVMEATSTYWKPPFYLLEDVTECWVVNARDVKNVPGRPKTDRLDAVWLAKLAERGMLRPSFVPPVWQRELRDLCRYRRTLIQERTREKQRAEKLLEDTQIKLSAVISDIFGKSGRDMLEALIAGQRDPYVLADLARGSMRGKKGVLQEALTGHFRDHHGYLLRMMLDRVDALTAQIEALTQRIDEVIAPFAHQVAQLDEIPGIGRTGAQELIAEIGVDMTRFPTAGHLVSWAKYAPKAKQSAGKSKPGTTGKGNPWIASALGEAGLGAARTKTFLGSRYHRLARRRGKQRALVAVGNSLLVIAWHLLSDPDAHFTDLGPDWHDRLAPLRRKRQLIAELERLSGKKVTLQDDAA

SEQ ID NO: 228599 - protein, 404 aa, unidentified
MIIVGLDWSRCKHDFVIMNLQGEILERGTIAHNTNALEELATRIEHRVDSAKQVRVGLELNDGALLAWLVTKGYTIFGIQPKSAQRARDIYRPSGSKDDSIDAFVLAEFVRVNAARLRPWSAPSETTLQLRELVRWREGLVQQRTASYQRLRALLAEWSPQLSELCNNLDCIWQLDLLSEFPTETRLCQAHGNRIRSFVRNHRMRQKKQQKIEDIRQSVPMHIPNGRVQVVERQTLFLLEQTRMLTAEIKHIEEDLQKLTDQHPDVNVFKSLPVQGIVTIAGLMAIFGDDHKRTTSPDELAALYGVAPVTIASGKTKRVRQRRACDHTFHQTLVHFAFNTAFCDGCWAGPFYQRKRSEGATHYAALRCLAKRWLKILHRIWKDQAIYDEQLHQANQKRNQNHAA

SEQ ID NO: 228600 - protein, 350 aa, unidentified
MKTTHPVIIGIDTHKASHVAVAIDTQGTRLATLYIPTNPKGYLELERWSQSLGKVQAFGIEGTGSYGAGLSRSLLAHGHNVIEVTRPNRQLRYTQGKTDSLDAEGAARSVLSGQATARPKTQTGSSEMIRHLKIARDTAVKSRSQAMVTLKTLIINAPADLRDALNHIRGKIALIRHIAAFRPGDIDNPLASAKAAMRALARRWLWLHEEIIAHDKELERLVTERAPELMASHGIATLTVAQMLILVGDDPTRIRSEAAFAKLCGVCPIPASSGKTHRFRLNRGGNRQANAALYRVAIVRMRSHEPTLAYVKKRTKDGKSKSEIIRCLKRYIVREIYSQLCVPKSSQIKA

SEQ ID NO: 228601 - protein, 372 aa, unidentified
MVASFGRARTLESTAGVLPRTVEALDRCQEGSGLMEVVHPCCCGVDVHKASVVACLLTPGAGGGTTKEVRTFGTMTQDLLALSDWLVAANCPAVAMESTASFWKPLYTLLEGVIPTLLVVNAAHIKQVPGRKTDVKDAEWIADLLRHGLLRASFIPDRDQRELRELTRYRVSLIQERSREVNRVQKTLEGGNIKLSVGAKDLTGVSARAMLAALLEDRLDAAAMAQLARGKVRAKIPQLEQALVGLMGPHQRAMIAWQLGHIDDLDALVAAVSADITARLRPFALQAAQVDTVTGIGPVTAETIIAEVGVDMTRFPDADHLTAWAGLAPSSNESAGKRRRAKTRKGSPALRAILVEAAQAAGRSKDTYLGAL

SEQ ID NO: 228602 - protein, 420 aa, unidentified
MRGSHELLFVGIDWATEAHQICIVNDRGEVIEERTVQHSGPAMAEFIDWLLRLSQGEADRIVVGIEVPRGALVETLTERGLAVYAINPKQLDRFRDRHFPAGSKDDRRDAYVIATSLRTDLRCFHNVRTDEPAIIRLRDLSRLDDELRLSFHRHCCQLREQLQRYYPQLLELSPSADEVWIWSLLEMAPTPEHAAKLTGGRLERLLMQHRIRRIDAQQTLEVLRHPGFQLVRGTVEAASEHALLLVPHLRLLHAQRIELGRKMDSVLQQMSCGEDSESNQGQHRDVELILSLPGVGRVVAATMLAEASQALGERDYHALRAYSGIAPVTRRSGKKCVISMRQGCNERLRNAMYHWSRVSIQHDVVSREHYRRLRSAGHPHGRALRGVSDRLLAVLVAMLKSGEPYEAARRHARAQTEVHS

SEQ ID NO: 228603 - protein, 320 aa, unidentified
MNQKSSFIGIDVAKARLDVATRPTDQQWQVDYTDKGIQELVEQITKLHPTLVLLEASGGLEVPVVAALAVANLPVVVVNPRQVRDFARATGKLAKTDSLDALVLAHFAEAIRPLPRSLPDTETRALAALVARRNQVMSMLVAEKNRLRTSRPPVSQRIPLHIDWLKQELDEIDRGLKEMLRNSPVWREKENLLRTVPGVGPQLAVSILAYLPELGTLNRKRIAALVGVAPFNRDSGTLRGKRAVWGGRSRIRATLYMAALVASRYNPVISAFYQRLLAAGKAKKVALTACMRKLLVILNAMLKHHSSWQSLNPQFLGPCS

SEQ ID NO: 228604 - protein, 343 aa, unidentified
MQMITTIGLDIAKSVFQVHGVDAAGEVVIRRQLKRRYVLAFFQKLPSCLVGIEACASSHHWSRELQALGHTVRLMPPAYVKPYVKRQKNDMADAEAICEAVTRANMRFVPTKTPEQQSCLMLHRTRHLFIRQQTAVINSIRAHLAEFGIIAPVGRKGVTELLHVVADPSDKRVPEVARACLAALGTQLLRLKQQILEFDRMIMAWHRSNQTSKRLHYIPGVGPILATALVASVADPRTFRSGRNFSAWVGLVPKQHSSGGKDRLGSISKQGDRYLRSLFVAGALAVIRYAKIHGTKHRPWLTALLARRPTKVAAIALANKIARMAWAMMAKGEHYKQPVALAA

SEQ ID NO: 228605 - protein, 317 aa, unidentified
MQSPMYVGVDVAKAEVVVACSQNSFAVRGIPNTPSALKQFLQTLPSDARIGMEATGSYHFALADLAFSMGFAVYVLNPQDTWHYAKGVGSRAKTDRVDAKLIARYTANESAHLHPYDPATAEQRAIDQLLRRRSHIVSLKTAMRLSCADAPFLNDQAGKLMADFKDLLKQIDQEVSRVNALIPNRSEQVKQLQTITGIGPLTSSWLANLFDRVKFKNGDAVVAFVGMDPRPCDSGQKRGRRRLSKRGPAEGRRLLYNAAMAAAKSPVWQPMYARYRQLGWPTTAALLIIARKILRIAFALSKKQGAVFDPKILGIGA

SEQ ID NO: 228606 - protein, 381 aa, unidentified
MNEDRIWVGLDLGLARTSVCVVDDDGVPLHELECETKLGALKDALAPFPMERIGLIAVEAGSDTHIVRKLRGAGFPVVMFDARKASKFLAVRRNKTDASDARGLADLARVGRNTVSQVYLKSRECEQLRGLLVMRNRLVMMRVAMENFLRSRLALYGRPFKAVSTAGGLRLQVQAQLADVRVEEGVDLRADLQPLVELCESLKVHLAALDRDLKKMARSDPVCRLLMGVPGVGPICALSFTSAVEDPGRFRAAADVGAYLGLVPRRYQSGSVSRTLGITKSGSRLTRTHLVTSATVFGTTAPDCALKRWYLALRGRAGSKRARVALARKLAVILLTLWKTGKGFELDPAEPEAPGLAVEISDQEPPTGADAGNPSKPSEAR

SEQ ID NO: 228607 - protein, 493 aa, unidentified
MATRRATTDTQTQPRSAYRRRKARARARAARAHEAEERRVEGLPVTQAHAAGIDVGSRSHWVCVGAGAGDPAAVREFPAHTAGLHQLLDYLRQHHVTTVALESTGVYWIPLYELLESNGFEVLLVDPSYTKQVKGRPKTDRLDCQWIYRLHSVGLLAAAFRPDEKTCQLRSYLRQRANLIRYAGQHIQHMEKALEQMNLKLREIISDITGVTGQAILRAILKGTRDPQKLARLRNQKCKASEAEIAQALHGSYRDEHLFALRQAYEAWQFYQKQLDQVEEQIQQQLARMKQDRALPPLKPRPRTSGRKPNQPRFDVRTALYYVVGIDLTEIEGIAELTALTIISEIGPDVSKFATVKHFCSWLGLCPQLKKTGGRVKSSRTRPGVNRAAVAFRLAANSLYASKGALGAFLRRQKGRLGAPQAVTATAHKLARIVYLALKHGLAYVRQNQQEYAAKVREQQIKGVQRRARQLGLEVIEKQPSTSTAAQTAAVPC

SEQ ID NO: 228608 - protein, 423 aa, unidentified
MHNPTLCVGADVHRDQIVIRAVDKADGHEVIERFRVVNNRPGAEAAATVVAQTATELGYRRLQIGWEATGMLWIPFHRHLASSLLLQPFQPSFTCFNPQLVAKFKEGLVLRKPKNDDRDALDVAARLRFGELPRSYLPDDFWQGLRRLTRYRYRLSRNLSREKMRFQSYAFLKCSDWKRGRPFSNLLGATSAALLTEFTIAELKAMTHDQLLDLIRRRGRSRFPDPHATARAVQQVLRSSYPIDPQMDEMITATLATGWEHIRSIQRLMKRLDRHIACHIDLVPNPLITVKGLGSVITAGLLAEIVDISRFPEHKHLAQYVGLTWEKRSSGRFVSQNTRLTKVGNSYLRYYFVLGADRLRQFNLEYKDFYFRKYNQVSKYQHKRALVLTARKLVRLVHALLTKNVPYVRPRTLPNLTEDERLQ

SEQ ID NO: 228609 - protein, 370 aa, unidentified
MKKRITFVGLDAHKNSIEVALADVGRNTEVRLYGRIGGDSASLDKMIHKLQATGAELRFVYEAGPCGYEIYRHLRAQGFHCDVVAPSMVPRRSGDRIKTDRRDACNLARLYRAGELTAVYVPREDDEAMRDLVRGRQDAIDAQRKVRQQLGGFLLRHGFRYPGKCAWTLAHRRWLAGIKMPHPAQQIMLQEYIHSVEECTQRVHRLTEQILHLMPDWRMHPLVEALQALRGVAPVGAATTVAEIGPLDRFKSPRQLMAFLGLVPSENSSGGSIRRGAITKTGNAHARRALIEAAQAYSRPARISRAILKRQEAVSEPIRQIAWKAQLRLCARFRRLAARGKSRNRVVTAVARELSGFMWAIAKQVPEPQA

SEQ ID NO: 228610 - protein, 352 aa, unidentified
MMVLGADMHKRSHTVAAIAASTGELVEDTTIRVSDEGFLELLDWARALDDERVWALEDCRHVSGSFERFLIGHGERVVRVATKLMSDARRAGRERGKSDRIDALAVARAALREGVENLPSAQLAGIELDLRLLIDHRERLIRTRVALNNDVLWHLHDLWPELKLPVSALFSKKWSTKISRRLAAAEQTARVRIARDELRRLRELTAATNGLETEIAELVGQAAPQLLDEPGFGPLTAAKLLGEVAGIERFATEAKLARAAGVAPVPVSSGKTNRHRLDRGGNRQLNTTIHRIALTRARCHPETQDYIARKRAEGKTGLEAMRCLKRHLTRRIWHLLQPPHPVGGTPPSPSIS

SEQ ID NO: 228611 - protein, 411 aa, unidentified
MEAREEVFVGVDWASEAHEVCVLDGKGTVVERFCVEHSGEGLEKLEKRLGERVGGCFSRVKVAIEVPRGAVVETLLVLGCRVFSVNPKQLDRFRDRHTVAGSKDDRRDAFVLADSLRTDGHLFREVRLPPEAMTRLREMLAVRKEVVREERRLANQLREQLLRYYPQLLSLCPAADESWLMDLLEKVPTPAQGAVFPRGQVTKILRKNRVRRLTSDEVVGALRRRPVKTAPGVVEAASSHALYLVERLRIVQRQRCRVEKSLEDALSALETVEEGSEHRDTAILRSMPGAGSYVVATMLAEAYEAIRDRDYHALRVLSGVAPVTRRSGKAVFVQRRYACNQDLSVAMYHWARNAVRCDPLLGRRYKEAIERGKRHGCAARLVGDMLLRIACAILRSQKEYDVTIREERKAA

SEQ ID NO: 228612 - protein, 383 aa, unidentified
MKSVCGLDVHKDSVYLCILSEFGELIEKVFGVLTYQLEEMRDLMLHHHVVEVSMESTSVYWIPIWRVLSPHFKLNLANPYFIKQLPGRKSDVKDAQWIAECTMKELIRGSFVPPEIIQQLRQYDRRIFDLNEEIVRKLSKLDAVLQRCNIRLSNYVSNVDSKSYKAVVRAISQGITAPEELVKLIHGRIINHHGIDVITASLKGVVSLAEIDMISQLRDELDMAEAHKEKCQARMLEICEREFPEELRRLQTIPGIKERAATSLIAEIGTDMNKFETANHLASWSGLKPRNDESNKKIKSRSITHGNVYLRKTIIECAWAASRTKDCFFSRFSYHQTQVRKKNKMKVLVAVARKMLIAVWHVLHDNTIYIDFTTDRKTSRTKG

SEQ ID NO: 228613 - protein, 320 aa, unidentified
MTSKGAEKMQNDTIGVDVSKDHLDACRLADGASRRFANDKCGRKAFVKWCAEMPVVRVVFEPTGPYHRAFERVLGAAGVPFVKVNPRQARRFAEAIGKLAKTDRLDAATLARMGAMLELKARPPQSEALLKLKELHLAREALVKDRTATKNRGKILTAPLLKRHNAQRLEQIKRHIAAIEAEILKLVQADPDLAQRFAILTSIPGLSAITAFALLIEMPELGALEPGQAASLAGLAPMARQSGRWTGRAFIRGGRAEIRQALYMPALVAARFNPDMRAKYKQLTCAGKPAKVALTAVMRKLIVLANALLKANRSWTPKYA

SEQ ID NO: 228614 - protein, 389 aa, unidentified
MTKLFCGIDVAKYEHVASIYDPSTGEIILDSLHFDNNSKGFKSLLSHLSKLNKSKEVVVGFESTGHYHQTLFNYLTTSKYKCYLINPYMTNKFRSISLRDAKNDNIDSRAIAHFLSFEYSNLVNEEFLSNELKELSLQRKFLMTDSSKMKIKLKSYLDRVFPELETGVDIHCKAIRAILKKYPTALDISKVRIDHLKKLAKEASKGKYSLSKIEIVKEAAKSSIGFYSKAIGLNIIQGIETLQIKEKQIDIIEKSIISHPLVIESPLHKVKGFNSIEIGYIMSAIISIDRFSCVKKLIAYAGLDPKIRQSGTWQAGTTKMSKRGSKLLRYALIWSAYNMTRFEGPMKRYYETKTSQGKSHYNALGHCAAKLCRWIYWILNNPDKDFIAK

SEQ ID NO: 228615 - protein, 352 aa, unidentified
MRIIGCDLHARQQTLAMLDTITGEVVNRTLMHEGKEVREFYSELPRPVLVGIEAIGPMQWFLNPLEELGIECQVGDATKIRAAEPRKQKHDRRDAELILKLLVEKRFPAIWMPSKELLDLRALLLHRHQWVRLRTQIQNALQAIALANGLRRGPSLWSYDGQAKLAFLPMPPHTSLRRSALQAMYGHMEEEIEKLTVQVAEQAEHRSGAQLLMTHPGVGPVTALATDVFLGDPQRFVDGKSLGSYVGLIPQERSSGRRRRLGKITKQGNPLLRFLWNEAGAHAARRDPELKRFYRRKLVQKGLGKARVAVARKLGIRLWIMLRDQIDYEEFCRRGQKQSGAACAGMPGTRLV

SEQ ID NO: 228616 - protein, 337 aa, unidentified
MCIVTVGIDLAKNVFAVHGVNAAGQVQLLKPEVKRDKLLALMASLPPCLIGMEACSGAHYWAREFQKFGHTVRLIAAQFVTPYRKSSRIKNDAADAAAICEAVARPNMRFVPIKSVEQQSQLFIHRARQGYVEHRTALINRIRGLLSELGIVLPLAHAQFCKGVHAVLEDLPGYSNRVIGDLMSELDQTEQRMAQYDQLIVQIARQDAQAKRLMQIQGVGATTATAIVASIGNGLDFNNGRQFSAWLGLVPKQHSSGGKAKLGRITKAGDRYLRTLLVLGARALLRYAKDKDDPISRWALALQQRRGYGRALVAIAAKNARMCWAALRLGDDFKLPA

SEQ ID NO: 228617 - protein, 346 aa, unidentified
MEYIALDVHKHYTWARVENDQGHKLYESKLAHSRGTIKNFTQQWNPGTPVAVETVGNWYWVVDEIEAGQGSPQLVNARLAKLMIGSVNKSDKLDAKGMNRLQRSGTLPTVWIPPSSVRDARELPRTRMVLSDQRTQLKNRIHATLGKYGLKVEGVSDAFGKRGRTIIDRLLEELPPNTRQALKLMLDELDHVEANLKTIEGQMREAFAPCQQTTYLQSEPGVGEMLAVVIWTEIGTIERFGRAEQLASYAGLVPRENSSGGKVRYGRVRRDVNLYLKWAFVEAANSAVLNRERCEYTHVSRLYDRVKAKRGHGKAIVAVARHLAEASFWMLKKGESYREPVSFTQG

SEQ ID NO: 228618 - protein, 379 aa, unidentified
MISVGIDVSKGKSTVCILKPYGEIVSKPFNITHTQKDLSELSSMLFRLNDEVKIVMEATGIYHLPVLTYLQEKGFFVSVINPYLMKSYRNESLRKAKTDKIDSRIIANYGIDHWFKMKEFQISGVIYEELKLLGQQYRHYMKLHLLSLAELTHLLDLTMPGIKNLLASWNETNRKDKRSDFVERFWHYDVITSMSEQEFTEEYILWAKEKKYVPSQEKAKVIYTLAQESIPTLPSETSSVKMLVTEAVRVLKEVDATLGLILSRMQEIAKTLPEYSVVREMGGVGNTLAPKLIAEIGDVRRFRNGKALVAFAGIDPPPYESGQFVGCNRKISKRGSASLRKVGYETMRSLKMRSRPEDPVYRYVVKKESEGKSLSLIHI

SEQ ID NO: 228619 - protein, 419 aa, unidentified
MIEAVLERCAGIDIGKKYVVCCVTVGAAGAKATEEIRQYNTTVAELEKLRDWLQENQCTHVAMESTGPYWKPVFNLLEAHFTVILANALQVKSLPGKKTDRKDGRRLAHFLRHNLLEASFIPPLAIRQLRDLTRRRRKLMGAGASERNRVQKVLEDANVKLGNVLSDVFGVSGQAMLEALLANNGTPQQIAEFARGALRRKVPEIVAALEEHRMTDHHRFLIRQSLDHMAFLEEQVVGLDSEILRQLKPFQKEFENLQTIPGVKATAAASILAEVGVDMKQFPTGHHLASWAGICPGNNESAGKHKSTRARKGDTWLRGTLTESAWAASRQKGSSFAARFRRLAPHRGQKRALVALGHNLLIVVYQVLLTGQPYQELGSTYWEERTHQARVRHHLRCLRALGALAPGANFTEVPVNPAA

SEQ ID NO: 228620 - protein, 388 aa, unidentified
MYHIGIDISKFKHNCFIATEAHVKVKEFIFENNASGFNELFDTLKSLGDPSEIKIGFESTGHYGTNLKQYLSNLGYTYVEFNAYLTHMFSKASSLRKTKTDKVDAKVISSMLGSVDYETLHTKFYHNNVLKELVRQRYAYLQSRSKELVKLTNLLDKTFPEFKPFFKGQLGSGALFILKRFKNKARISKLTKRDYDLIRSKTNGRFSYPRFNQLKSLAKDSIGLDDKIYDLLIQTVISSIKYFTDTLEILDQEIVNLFSQIDSKLLTIPGLGIITAATIYAEVGDFKNFSSPAKLIAFAGFDVRIIQSGTKESYGKLVKHGSPLLRSAIWTYALPAVRFIPTMNDYYHKKRDQGKHHKVALAHVCRKLIRMMHYIEFNNVSYDPNLNR

SEQ ID NO: 228621 - protein, 344 aa, unidentified
MNHFAGLDVSVKETSVCIVDDTGRIVREVKVASEPEALLKVLGNPAYRFKRIGLEAGPLSQWLFSALAEAGLPVVCVETRHMRAVLKAQINKTDRNDARGIAQMMRVGLYRPVHVKTLRSQKLRMLLTHRKLLQSKAIAIDNDLRGTLRNFGLKVGMVGTVKFEARIRELVEDLPDLVVLIEPLLIVRRTLREQVVILHRRLLAIVRDDEVCRRLMTIPGVGPVVSLTYRATVDVPARFRKSKSVGAVFGLTCSRHQSGEVDWSGKISRCGDEMMRTMLYEAAQSMMHSKKWCWLKAWAMQIARRRGMKKAVVALARRLAVIMHRMWVDGTEFRWTREQAAAAA

SEQ ID NO: 228622 - protein, 432 aa, unidentified
MKTYILRPFPPVESQRTRSHNPPADRPKVQPSCGPALFLGLDVHSDTIAVGLAPSNSSEVRSYGVIGGSQDDVLKLLKKLSAAHPGCLLKICYEAGPHGYPLCRCLRAHGYDCIIVAPSKVPRKPGDRVKTDRRDAQQLARLYRAGELSAIYVPEPEDEALRDLIRARFQVSRQQHRARQQLKMFLLRHNIRYAGKTSWNAAHLRYLAQIKMPFPVQQIIFQEMLNVISEAGTRLEQLDLQIQRAVPAWRWYPVVRALMSLRGLALLHAATLVAELGDLSRFTHPRQLMAYLGLVPSEDTTGKDRRQGGITKMGNAPARKALVEAAWNYRSPARMTPHLQRRQEGLPKAVTQISWNAQQRLHHRFVHLTRTGRKKSQVAVTAVARELSGFVWAIARLIQPLPVDKVTGSNSAPTSLAAVSSRTSSPRGIRRR

SEQ ID NO: 228623 - protein, 362 aa, unidentified
MEYFAGLDVSIEETAICVVGDDGKVVLETAVETDPAAIANALERYAGRLRRVGHEAGSLSPWLHPGLRELGVPAVCLETRHVRAALSAQRNKTDAADALGIAHIMRTGWFREAHIKSETCYRLRLLLVQRRNLKRKFLDLENAIRHSLKVFGIRLGKVSRGGMEKAVREAVADDAMTAGLMDCMLRARAALWAEYLTLHKLVTQIAMSDELCRRFMEIPGIGPIAALSFRSAIDDPTRFRRSRDVAAYFGLTSKRWQSGTSIDVKGRISKAGDADVRRALYEAASAMLTRFKGNDTIKAWGLRLAKTKCHAKARVAVARKLAVVMHAMWRDGTFYTGDPDASAQDVAAWNAAKVQRLSLANS

SEQ ID NO: 228624 - protein, 370 aa, unidentified
MSKTTPVFVGLDVHKETISVAYAAGESAIPPQFVGEIGTRQCDLDKLVRRLQGRSPDLVFAYEAGPSGYGLHRYLTSKGFDCRVVAPSLIPKKPGDRVKNDRRDAVELARLLRSGDLTSVYVPAVEDEAIRDLCRARDATRVTLKAAKLRLKSFLLRHGLNYVGRADWNDAHRRYLAKVVCPTPAQQIVFQESLRAVDEQVERLERLEQELRDLAPRWRMFPVVEALQALRGVQWLVALTVVAELGDITRFDNPRQLAAFVGLTPSEYSSGGSRRQGGITKTGNPRARRVLVEGAWAYRYPAKISQHIQKRIDKLPKVARDIGWKAQVRLCKRYRRLASRGKHVNVVTTAIARELLAFMWAIAKEVPINT

SEQ ID NO: 228625 - protein, 344 aa, unidentified
MTYYAGLDVSLRSTHICVIDDDGELLAEGKAHSEVADIIDFLDELDVDIGEVGLEAGTLTQYLTYGLQFAGFKVVCMEARQVKAALSAMRNKTDKHDARGIAQLLRSGWYSPVHIKSIESHQVRALLASRKAVLAKCIDLEQEIRGLFKVFGIKLPARLGHGSFDPKVRPLIEADEALSRSLLPMLDARLVLYHTFRELENRVRNLAKDDPVCQLFMTAPGVGPITALTYKAGVDDPTRFKKSRTVGAHFGLTPRRCQSGEFDFDGHISRAGDADVRSTLYVAANSMLTRSSKWSPLKAWGMKLAKTRGHKKAVIAVARKLAVILHRMWIDDTQFRWSTEAARS

SEQ ID NO: 228626 - protein, 365 aa, unidentified
MDDGTVWVGLDLGLRETHVCVIGADGDPLHEQSCETALAALNDALAQFPLGRIGAIAVEAGSDTHIVRKLRSAGFPVAIFEARKASKFLALRRNKTDASDARGLADLARLGRSTVSQVYLKSPECQQLRGLLVMRKRLVIMRLAAESLLRSRLGQHGRRLKAGSAPGSLRKRLEIELAQLSANDGVDLRQELAPLAEVCESLRTYLRTLDRDLEKRASAHEVCRRLMEVPGVGAICALSFYSAIEDPHRFSVNQGVGAYLGLSPRRYQSGATARTRGITKSGSKMTRSHLVIAATVFGTCAPDCRLKQWYLALRERSGPGRARVALARKLAIMLLAMWKNGTHFELLPGNGHAEADVRQAVEAAG

SEQ ID NO: 228627 - protein, 355 aa, unidentified
MDNRKYIGMDVHQASISIAVSDAAGKVLIECIIETKAAAVLEFFQGLRGSLWVTFEEGTSAAWLYDLLKPHVTKVVVCDPRRNALLKAGNKNDRVDARKLSDLLRAGLLTPVYHGESGVRTLRELSRSYLAASKDLTRVMNRLKAIYRSWAIPCAGQEVYSPRQRAAWLEKLREAGVRRRAEQTYQQLDFLMGIRKETRKELLAESRKHPARELLEQIPRLGPIRVALLIALLQTPHRFRTKRQLWNYCGLGLRTRSSGEYRYTGGQLQHARKPPALRGLNVNHNHDLKNLFKSAATQAGTKDDPLREFYQNLLAAGMEPPMARLTLARKIAAIALKIWKKGERFDPAKLKQQAA

SEQ ID NO: 228628 - protein, 373 aa, unidentified
MKKGIIMLDVKKRRDTKKAKKKKKQSGIVTGIDLGDQMSVYHQIDRDGNFVESGSVRTTREGLKKQFGGEPRMRIVIEVGTHSAWVSQLLSELGHEVIVANPRAVPLISDSSRKNDSADAELLARLGRVDPKLLSPITHRGPEARQHLLLIRARAGIVEARTKLVNEVRGLAKSMGERIPSFDADQMTIEKLTALPEPVRQPLAMLAASCAALTGQIKECDKQIEQIAAQQYPEVRYLTQISGVGTLIALTFILTIDDPNRFAKSRDVGCYIGLRPKQSESGESKPQLGISKEGDAYLRKMLVQAAHCVMSQRGPETDLKRWGTKLASRGGGNGKKRALVAVARKLGILMHRLWVDQAVYEPNRHSQPVAKAA

SEQ ID NO: 228629 - protein, 346 aa, unidentified
MRIIGCDYHPSWQQIRWVDTLTGETGEEKLDHASGAAEKFYRQLSEPAVIGMESTGNCQWFVEMATTAGHQVWIGDAAKIRASEVRQQKNDRRDAALILKLLLEGRFPRIWTPSGEEKDLRQLLIHRHKLVRIRVQVKNELQHLAMNQGVTRAGKLWSKAGQKVLCELPLKPWADRRREDLFKIREMLNGQIALLDQAVVDVAQKNEKVRLLMTQPGVGPITSMAFVLTMGDVSRFPRGKQVASYLGLIPREHSSGGKQRFGSISKQGNGFLRMLLVEAAQVAVRCDPQMRQEYLHRCHKKAKGVAKVAAARKLAIRLYWMLRTNRGYPEVVRVESSSRVPLVSAS

SEQ ID NO: 228630 - protein, 405 aa, unidentified
MEVMVARCAGLDVHKDTVMACVRTPGRGRQRRQEVREFRTFTGALRALRAWLAGEGVTQVAMEATGIYWKPVWHMLVEAPGLEPLLVNAHHVKNVPGRKTDVSDAVWLAQLCECGLLRGSFVPPPVIAELRDLTRYRKKLIEDRTRETQRVQKVLEDAGIKLDSVVSDVLGMSSRRMLAGLIAGVADPAVLAEHAHGSMRRKIPELRAALEGGFAAHHALLVRMHLTHIDHLNLALEQLDAEIDRVIAPFARQLERLTTIPGVGKRTAEVVIAEIGVDMTRFPTAAHLASWAGMCPGNHESAGKRASGRARKGDAALRAALCEAAWSASRTRDTYLSAHYWHLLRRFGKKGQAKAAFAVGHTLLVIIWHLLARDCDYHDLGADHYDRRSDAKTREHYYIRQLEAL

SEQ ID NO: 228631 - protein, 457 aa, unidentified
MTRRKHSRPARDIAPVHPHAAAVDIGATLHVAAVRPGCDPEPVRTFGTFTTDLHRLADWFEQCGVETVAMESTGVYWIPLYEILDQRGFEVVIVNARDAKNVPGRKTDVSDAAWLQRLHEYGLLRASFRPKGEIATLRSYLRQRERLLDQAAAHIQHMQKALTEMNLQLHHVVADVTGVTGLRILRALVAGERDPDTLAAYSDPRCKAPAETLRAALVGNDREEHVFALAQALELYDIYQAKVAACDQRIEAVLERLKAANPPPAAALPPARPRRRQANEPGFAVREALHAILGADPTQIDGIGPSLALTLVGECGTDLSAWPSAKHFTSWLSLAPHNKISGGKVLSARTRRSGSRAAALLRLAAVAVGRTATALGAFYRRLAARVGKAKAVTATARKIGVLFYNMLRHGMDYADPGASAYEARYRQRVLSNLRRRAKSLGYVLQKADPASAAIAVS

SEQ ID NO: 228632 - protein, 408 aa, unidentified
MQVLYTRCAGLDVHKDTIVACVRCVSPPLHQEVRSFGTTTAQLLELADWLGEHGCTHVAMEATGVYWKPVWHVLEDEFELVLANAAHIRNVPGRKTDVNDAMWIADLLAHGLIRSSFVPPQAIQQLRDLTRTRKQLVREVSQHSLRIQKVLEDANLKLASVLSDVLGRSGRAMLDAIVAGETDPARLAALAQGTARSKTAELREALRGRITEHHRTMLRLHLQVIDALHRTLGELDTAVGKALAPIQQRTRLLTTMPGVSDLTASVMVAEIGVDMSRFPSAGHLISWAGLCPRSDESAGKRRSTRVRKSGTWIKTTLVTAAWAAVRVKTSYLRAQFLRIKARRGAKKAILAVAASMLTAAYHMLRDGTEYNDLGSQHLDRQDRSKTIRRLLKRLQVLGCNVPQMAHET

SEQ ID NO: 228633 - protein, 358 aa, unidentified
MASIALARTDVIVGVDTHKDQHVAVTIDGLGGRLDAVFVPATNDGYAELLAWADAQGRVVTFGVEGTGSYGIGLARFLRRHGRTVIEVGRPPRKAERRAAGKSDTLDAEHAARQVLAGTVTATPKTSDGDIETLRLVKIARDTAVKAHSQAMITLKATLVTASDELRAQLEPLTNFKLITACAAFDAAAVLSDPDVAMRYVLGTLARRWLVLHEEIKSHSRHLKARTTAAAPQLVAAFGIGPDIAAELLVAAGDNSNRIRSEAALAKLCGVCPIPASSGKTNRHRLNRGGNRQANSALFRAVVVRMRWHEPTIAYVERRTAEGLSKREIIRCLKRYLAREVFQLLPPPSTTVTELRAA

SEQ ID NO: 228634 - protein, 331 aa, unidentified
MSNIIGIDVSKASLDCAYLRDPDQEKAKRKSYHNEVRCFASLVAWAEARSGLPVQSLAFVIEPTHVYHEQLVQFLHHAGATVYLVNPGRVRKFAEGIGILSKNDLVDADLLTRYGLIARNLIVYQPVAQEVNDLRSLLNRLEVLERNLRSELNRQEKIGKTMVFHRLEQQSIAQTIKRLRTEIMTFKRAIRQCIKSTPSLQQNLDLLCTIPGVGAKTAWVMLVILGSRTFRSAPEVASFLGLNPIEKRSGKSQYRRPRLSKSGSGNYRQQLYFPAMVATRKNPDIQALYERLLAADKSKMCALGAAMRKLVHICYGVVKNQTPYQAQSAQP

SEQ ID NO: 228635 - protein, 346 aa, unidentified
MIAVLGIDLGKNSCSVAGLDETGRVILRRRLTRDGVVRLAGKLPACVMAMEACCGAHHLGRVLREQGHEVRLMSPEYVQPYVKAQKNDERDAEAIAEAATRPTMRFVELKSEAQLDAQILHRARSRLVGQRTALINQLRAVLLERGIVVAKGRRRLETFLTETLDPEAEPPSTLSARTRLLIEDMRLEWGDLDRRIAALTAEFVARAREDQAARRLVSIPGFGALNATALVAAIGTGETFRSARDLAAWLGLVPRQATTGGKPRLLGITKRGNTYLRTLLIHGARAALPSLSAGPTAMGDWLRGLLGRAHKNKVVVALAGKLARIAWAVLRSGEGYAATTGRPVVA

SEQ ID NO: 228636 - protein, 327 aa, unidentified
MIEHYIGIDLHQAFFQACAVDTAGTRMWEERFPRTDAGIAALITRCDRRSAVAVEASTPTWHFADAVGDRVGELRIVDPMKTKLKAGYAAKTDRLDARRLADALRRDSVVGIYYPPVAIRELRELCRYRHAVVQVRTALINRLRAVLLRQGIVDGRRLARTPNDAWLDGLIVPPRAAASIAGLRRLLTAVRAEAAQADREVLAAATGGPIAPRLQANPGPGPVLSLMVRAEIGALERFPTPGHLASYAGLVPRVDASARRIRYGRITRRGSPWLRWALIEAAIHGTRRHDRIGRWGRGLAVRKGALKARVALARTLCEDIFRHWPIG

SEQ ID NO: 228637 - protein, 410 aa, unidentified
MRRVIGIDIHRTFGEVVIWEDGVLRREGRVEMTRTALEGFGRRLEKSDEVVIEATGNCMAVARVLSPHVARVVIANPLQVKAIAYSRVKTDKVDAGILASLHAAGYLPEIWTPDAATERLRRLVARRYQVVRHRTRLKNEVHSILHAHLIPKCPHADLFNRPGREWLARQPVPEDEREAIARHVRELDRLGKDLGVLDRAIAETGLEDVGANRLLTITGVNLTVAAGLMAAIGDVARFDSPQKLVSYFGLNLRVRQSGLGAAHHGRISKVGRSHARAMLVEAAWAAAKSPGPLRAFFIRIRARRGHQVAAVAVARKLAVLCWHMLTKDEDYLWARPSLVAQKRRAMELQAGRPQRKGNARGPAYAYNVKALRDQEARIAERAEKGYEQFVAAWRRRPPKDRIAPQVERST

SEQ ID NO: 228638 - protein, 401 aa, unidentified
MREFSPEQHWIETESALERVGNAGQEERHAAYVGLDVHKETITVAVAEPGRGEPVYWGEIANKPKTVEKLLGKLSEAYGGGLLRLCYEAGPCGYVLYRQILASGHDCQVVAPSKIPKAPGERIKTDRRDALKLARLLRSGDLTAVWVPDQEQELMRDLSRARDDMKSQERKARQQLNAFLLRHGHHWPRGKSRWTPAHENWLAGLKMDHPWQQVVLQEYIDAERAAGERVAQLSDHLMRALPEWSLAPVVDALIALRGVDKLAAIVLLAELGDISRFESPRQLMGFLGLVPSEHSSGGRRRQGSITLTGNGHARRMLVESAWSYRFPARQTKHLKGKARNASPEAKKIAWKAQTRLCGRYRTLTRAGKNTKLVCVAIARELAGFIWDIVRQEMPRLALQEG

SEQ ID NO: 228639 - protein, 414 aa, unidentified
MEVVYTHCAGLDVHKKTVVACCLTPDPQGGWKKEIKSFGTMTCELLQLSDWLQARECTHVAMESTGEYWKPVYNILEANFETLLVNAGHIKNVPGRKTDVRDAQWIAELLQHGLLRPSFIPPVNVRELRDLVRHRSNFVRERATLVNRVQKVLEGANIKLASVATDVLGVSGRAMLNALCAGDTDPAVMAELAKGRMRTKRELLARALDGRVKPHHRFVLTELLCQIDSLDETIARFDEQVAVYCAPFDEAVALLDTIPGVGRETAQLIVSEIGTDMERFPSAHHLAAWAGVAPGNHESAGKRLSGRTRKGNQALRQGLVQAAHAAAHTKETFLSAQYHRLAMRRGKKRAIIAVAHSILVIAYHLIVRQEEYRELGGEYFDRRNPAATAKRLTHRLEQLGYRVTLQEQTSVAMD

SEQ ID NO: 228640 - protein, 401 aa, unidentified
MNAVGIDVSKGKSMVCVMRPFGEVVLEPFEVLHTAQNLHDLAEKLKALDGETRVVLEATGNYHKPVAFVLHDAGLFVSVVNPVLIHDYDNNSLRRVKTDKKDAVKIANYTLDKWTRLRQYLPEDDTRLALKNCYRQYQQAVAIRTMLKNNLISSLDLTFPDANKLFSSPVKNNGCEKWVDFIGDFWHSECVSSLSANAFAKKYLKWCQKHGYVFTRSKSDEIYACAVNSASLPKSPTSKLLIQQQVAQLKAVSQSVAAFRQEMLRLSQQLPEFDTVMEMYGVGPSLGPQLMAEIGDVRRFSSKKSLIASAGIEPQPNDSGKVVGNDKGISKVGSAVLRRTLFLIMTVILQTQPQDEPVFQFMNKKRSEGKPYKVYMMASANKFLRIYYAKVKAVMDSERSQ

SEQ ID NO: 228641 - protein, 388 aa, unidentified
MEAQTVNTLPPVAVDHDPVRCLLAIELSKKSWIVAITTALSDKISRYTLDGCDWKGLLELMERIRTRVAREVGRPVEMISCYEAGYDGFWLHRLLERHGVRSHVIDPASVQVDRRARRAKTDHIDAKRLLRSLMAYLRGEPKVWSVLCVPSVAEEDDRRLHRERDRLIAERGQHVNRIKGLCAIHGIYDYEPMRRDRMLRLEQLHTGDGRELPPRLKAEIARELQRLELILEMLKEIEAERDAIALTEKVSAHTNTKTIQNLVKLKAIGAEIATVLTGEVFYRPFNNRHQVASYVGLTPSPFQSGSKCRDQGISKAGNPKARSTMIELAWLWLRHQPDSPLSIWFQERVGTRKGRIRRITIVAVARKLLIALWRYLETGVVPTGAVLN

SEQ ID NO: 228642 - protein, 452 aa, unidentified
MRLLNGKQGLRRSQFAKELKGADLEKVLLVPIDVSKVLQKSMILNYFGDVFEPSFSFMVNKTGRELLKKKIEKAKLACQADRIFVGIEATGHYYEDIVRILTDKGYSVHIINPASTHEERKQHLTYMKTDDIDLYLIAEVLIGNKATNCKLTKGVFKQLQHLTRARRSEINKRSRIKVEIRSLHDQIWREYQGYSVLEGNKVKTKKILSDFWGKSSLYILTHYPYASQILELGEIGLKRISKEHNLKIRKTTIEKLLYAANESVSKPLEDLSSELFLLKQKLKDYDWHTQNINTYEQEIERILVDTDGSLLLTVPGIGLVTAAEIYCEMGDLSLYTSASQLIKKAGTNPVIKQSGNGEGYFGRISKQGNVNLRSAIYNAGKSLSVHNEALKPFYTRLKEKGKKAGSLYIAMGNKFLKIAFAMLKNKQPFQWDNPTFNYKEEILKKLSLSIAS

SEQ ID NO: 228643 - protein, 343 aa, unidentified
MTEIMTIGLDLAKTVFQVHGADGEGRAVLRRRLRRGRVLGFFAAVPPCLVGLEACASAHYWARELQALGHEVRLIPPQYVKPFVKTNKNDAADAEAICEALLRPTMRFAAVKSADQQSVLMLHRARELLVRQRTMLINALRGHCGEFGIIAAQGARKVAALIEVIEDPDDHRLPALAREALLSLVAQLRATDERIAELEKELTAWHRSSEASLRLAAIPGIGVITATALVATVGDARQFRSARQFAAWLGLVPRQQSSGGKDRLGRISKRGDGYLRRLLVHGARTVLHWSRRRKKARSDWLEALLARRPTNVALVAMANKTARIVWAVLSRDQAYMPDRQAAA

SEQ ID NO: 228644 - protein, 328 aa, unidentified
MTMNPALSAFNHVVAFEVAKDSLVIHVLPAGKQSFSANKPKAIREALIAEMRRNAEASLGPLLVVCEATGGYERHVLEVCQKLGIAAHKAHGSRVRYFARYLGLLAKTDPIDARVLALYGLKTTDLRLYVPPAPEALALRDLRTRRDQLQQMLFAESNRLEHARHLSVSRSLKAHIASLRKALAALEAEIAACLKASETLARKARLMQTLKGVGPATVAAILAYMPEIGAFTKAGAACMAGLAPIDDDSGKLKGPRHIEAGRAAVRKALYMPALVAIQHNPVMRLFADKLKRNGKPAKVVIAAVMRKIIVTLNAIIRSGEPWSHAKIA

SEQ ID NO: 228645 - protein, 346 aa, unidentified
MKQITTIGLDLAKQVFQVHAASADGSPIFNRKLRRAEVLRFFERTPACLVGMEACGSAHYWAREIRALGHDVRLIPPVYVKPFVKRGKTDAADAEAISEAVTRKTMRFVPVKSADQQAAAVVLKTRALLVNQRTQAINALRGHLSEFGIIAAAGTVRIAGLISIVRDKTDERLPKAARLALMEVASQIDALKAQIEKLEQAIVATVRRDDDARRLVTIPGVGAIIAASVRALVPDPGGFKSGRHFAAWLGLTPKPHSSGGKERLGRISKMGNPALRSLLVVGATAVLRHARGNPNASRWSAALLARRPYKIVAVALANKMARIIWALLVKGGTYQDKGARNQIVAA

SEQ ID NO: 228646 - protein, 342 aa, unidentified
MEQVSVVGLDLAKSVFQVHGVNAQGEAVLRRRLTRGQLMKLFEKLPPCLVGMEACASAHHWARELAALGHEVKLMPPQYVKPYVKRGKNDAADAEAICEAVTRPTMRFVGAKSPDQQATMMLHRVRKILTRQRTQLSNALRAHMAEFGITAPIGRGALERLIAVIADQDDARLPDEARACLAVLSTQLEMVKEQILDNDRRILADARKTEAGRRLMKIPGIGPLLASAIVACVPDPSTFGGGRGLSAWIGLTPRQNSSGGKERLGSITKAGNPYLRELLVVGAMAVVRRAKQGSTKRPWVAQLLTRKKPKVAAVALANKNARIIWAMLASGEAYREPELAAA

SEQ ID NO: 228647 - protein, 393 aa, unidentified
MICVGIDVAKDKYDCFILSSEGEVLADVFTIPNNAEGFDTLLQTIRRCARPEDKIKVGLEATGHYSYNILEFLLNEGLDTYVINPLHTNLYRKSLSLRKTKTDRVDARTIAAMLMSDVDLKSYTDTAYHNEELKSLTRYRFDKVRERAKLKQSVSRLVTILFPELEKLVSTLHMASVYALLSEFPGAKQVSEAHLTHLKAVLYDASKGRYGSDMATTLRDAARCSVGSVMSAKSLELRHTIRLIHELDAEIEDIEAAIQSMMGEIQSPITTIPGMGVRMGAMILAEIGDFSRFDSPDKILAYAGMSPSTYQSGQLSLSGAYSHMEKRGSRYLRYALYNATKYVCLWNPTFAAYLAKKRAEDKHYNVALSHAAKKLVRLIYALEKSKRPYSTAA

SEQ ID NO: 228648 - protein, 377 aa, unidentified
MKKRITWAGIDDHKLKLTVAVVRGAGKEPAVTEVANEDAALRRWVRRLVREAEGGEIRICYEAGPNGFALKRRLEAMGPVVVEVMAPTLTPRRVGRRVKTDPIDARKLVNLFRAGELTEVSAPSSSDEAGRDLVRLYHRVGEELTRKKHHILKFLVRRGRIYRSRNWTGAHRKWLKDQTWECWPDEVQFEEMMTGLRELEDRRRRLEESMERLAKEDRHRVEVGLLRCFHGLDTVSSLTVVTEIFDIERFESPRPLMSFVGLVPTVSQSGEGAARQGGLTKTGNRYLRWVMGQVAWQARRKPQVGYRLKKRREGQPAWAIAIADRAQQRLHRRYWALVNRGVPSQRAVTAVAREQMGFLWEVLTEARARSRKKSKAA

SEQ ID NO: 228649 - protein, 417 aa, unidentified
MKCFVGLDVSSTKLDVCIMLSDTTTPFTASLTNDLVGASEIKKQILELNDSYSFERIVIGMEATSLYSFHPAMFFHEDSDLKALKVEVMVEQPNKIKKYREAFEENKNDTLDAFYIADYFRIERFSPAFLKEEKYMALQHLTRTRLQLIEQLTKTKQHFIENIYYKCNTLSTEIKNENLSTNLWSSTIISLMTEDYSLDELATIALEDLAEFLQKLGRGRFKAPEKLAKAIQAAIRGSYRLSKLQQDSVNVILGLLAREIRNLEQMIKDIDKAIEDMVEVIPEYQCLTSVPGVGKVYAAGIIAEIGQIERFKDHPQVAKYAGLNWKQYQSGNTNSQNTELVKRGNRYLRYYLVEAPNSVRRHDSEYQTFYMKKYQEVPKHQHKRAIVLTARKFVRLVDALLRNRQLYTPPRRLMEDK

SEQ ID NO: 228650 - protein, 406 aa, unidentified
MSQRRKKQKRAGQGGGAVPSLSCIEPNAAGIDVGATEIFVAVPQDRDPSPVRSFETFTEDLQRLKNWLQQCGITTVAMESTGVYWIPLFQILEKAGMEVCLVNAQHVKHVPGRKSDVIDCQWLQYLHSVGLLRASFRPEQRICAIRSLLRHRDSLVQMAAAHVQHMQKALTQMNLQLHHVLSDITGQSGLAILDAILAGERNPAVLAQLRHARVQASEEIITKSLVGDYQREHLFTLRQSLQAYRYYPSLITACDQEIEEQLQNLDSRTPPDASPLPPERYPHRPRKNEFRFDMRSELYRIYGTDLTAIPSINALTGYTVLAEVGTDWSKFRNGDAFASWTCLCPQNKKSGGKILSAHTRRSANRVNRALRLAAQTLERSTSYLGAYYRKMRARHGAPAAITAAAH

SEQ ID NO: 228651 - protein, 355 aa, unidentified
MMLIGVDPHKCTSTATAVEPESNREVASIRIEATLKEYRRLLTWAHRWPERRWAIENAEGLGRHLASWLLARGEQVVDVPSTATARVRQLSRGGGRKNDRIDAAAAACVAALQGDARPLEAEGTTDALALLDEQRSNLSQARVRVVNQLHALFRALLAGGAPTGLSAAAAAALLRTVRPVGEAERVRKQIAGDLVAEIRALDGRLKSNEKAMAALVKDAGSTLTQTVGIGAVTAARLIGRTGRPSRFPTSAAYASYSGAAPVEVASADKARHRLSRSGDRQLNAALHTIAVTQIRTTGSRGNLYHQMKIAEGKTPREARRCLKRRLADHVWRTMIADEKRQRAKTSSAPTAAGAA

SEQ ID NO: 228652 - protein, 384 aa, unidentified
MTKHNILFIGLDTHKEFIEVAYIEDNRGAQPIHFGRISSAKVAIKKLIRQFESKYPNATLHFVYEAGPCGYWIYRLITSLGHCCYVVAPSLIPKKPGERVKTDKRDALKLAKLLKSEDLTPIYVPEPEDEAIRDLSRAREVAMKDLKDAKYQLKALLLRNNINYAGTANWSLKHLRWLTELVLPHPAQQIVLQEFIQTINERMARLERLDNELSHHVYQWRYYPVVKAIQAMRGVRLLVAAGVIAELGDLTRFDHPRKLMSYLGLVPSEHSSGGKRYIGAITKCGNGRARRLLIEGAHTYRYAANISTDMQKRQEGLPKDIIDIAWKAQLRLCKRYKKMIAKGKHYNLVVTAIAREMIAYIWAIAKEVVLKPVNTKLRLARVPA

SEQ ID NO: 228653 - protein, 345 aa, unidentified
MIIGCDFHPSWQQVNWLDTETGETGEQKLVHASGDAQQFYQALAAPVLIGMEATGNSQWFVELVEDLGHEIWIGDAAQIRASDVRKQKTDKRDAEHIRKLVVEGRFPRLWMPDREQRDLRQLVLHRHKLVLIRSRVKNELQHLSLNKGVQRKHKLWSQAGQKMLRELPLKPWAACRREDLLGLLAMLNQQIGKLDEAVQQAAEENPQARLLMTQPGVGPNTALAYVLTIGDVSRFPRGKQVASYLGLIPREESSGGRQKLGAITKQGNRMLRALLVEAAQVAVQHDPGLRKQYLHRCHQKPKGVAKVATARKLAVRLYWMLRTNVGYPEIVRIESSSGLPLVGAS

SEQ ID NO: 228654 - protein, 317 aa, unidentified
MEVTPIFIGIDVSKAQLDVAIRPTGERESVANDKSGIKALVKRLAKIQPAWIVLEATGGLERPLTHALVSAELPVVVVNPRQVRDFARATGQLAKTDNIDADILARFAEAVRPALRPLPDALTLELRALTARRRQIIEMIGAERNRLATASKAVQKRIGAHIRWLEQELERADQDLDRSIRQSPIWKQNEDLLCSVPSIGPVTSRTLLAELPELGELNRKQISALAGVAPFNRDSGTLKGRRSIWGGRASVRSALYMATLVATRRNPVIRDFYKRLRAKGKVFKVALVACMRKLLTILNSMIKHKTRWSENFFLQTT

SEQ ID NO: 228655 - protein, 406 aa, unidentified
MAAVMIGVDPHKGSHTAVAIGSAEEPLGELRVRASAAQAGQLVAWAADWPERTWAAGGAGGLGHLLAQQLVAAGERVLDVQPKLGARVRLLTAGDTNKNDPSDARPVAVAALRSAARREVSADDHAAVLKVWSKRHRDLGRTRTQVACRLHAVLCELTPGGFSKAITAGQATRVLAAIQPADAVGAARCELAAEFPGDLRRIDAQMRDTRKRLNAAVKASGTTVTEIFGVGPVIAAIVIGCVAGASRFASRDHFASYNGTAPIEVSSGNRKIHRLSRRGNRRLNHAIHMAAVTQIRHRHSDGRAYYDRKLAEGKTSKEALRSLKRRVSDAIFGRLQADARQPAAASPEGPGGQPGNDSVASAAGLHPEHRLFGQATPGPGSTLRPATARNCTVTPERTPKNTQKTP

SEQ ID NO: 228656 - protein, 355 aa, unidentified
MKKQAIQYLALDVHQTTVVGTARDEQGTIRMRATVPTEAKAIVGLVRSLGPRVHVAFEEGTQAQWLHDLVEPHAEKVIVCNVRGRSETSNKSDKIDADGMSELLRLGSLKSVYHGGSSVLTLKELVRCYGNLVEDSTRVMLRIKALFRGEAISTPGTSVYRPKERKKWLAMIKGRGKRMRAESLLQQLDALFELQPKAKAAMITEARRQSGWKTLRSMPFFGPVRVSLLLAIIATPFRFRTKRQLWPYIGLGVVTRSTADQEFVDGKLQRRRRAPMTRGLNRNHNPALKNVFKGAANAAAAKPGPLKDFYDACVARGVREELAKVTLARKISSIALRLWKKGELWDPKKLTMQTI

SEQ ID NO: 228657 - protein, 343 aa, unidentified
MDQYIGLDVSLKDTAISIREDGKRFWRGKCPSDPKLLAEMIRKHAPHARRVVFETGPLSTWFYHALTAEGMPAICIEARHAQKVLDETLNKTDANDADGLAQLAEAGFYKVVRVKSFDSMLTRTLVGGRNQLLNISTQLSNQIRGLMKTFGLIIPKGTGRVFDGNVRELLAGNNDLARIILPLLEAWRDIRKRAADLDRQLLAVARQSQSTKLLMTIPGIGTVTAVSYIAAIEDPENFRTSRSVGAWLGLTTRRYQSGEVDYNGHISRRGDNHLRGLLYEAATVLLTRASVRTESSLKTWGLKLRERLGFKRAAVAVARKLAVIMHSMLRTGEVFNASVGATA

SEQ ID NO: 228658 - protein, 337 aa, unidentified
MDYFAGLDVSLEKTHICVLDRNGAVVLETSAASTPEAISSALEGAPACKRVVFETGRMAPMLYHGLADLDVPVICIESRQAYQALKTLATHKTDRNDARGLAQLARTGFFKPVHVKSLPSHAVRALIMARKKLVGQRITLENQIRGLAVVFGVRLPRGLSPAFVEEVIAMSDGIAGLSSAMRGLVAARDAVLAAVAAIDADMKRLVRASDACRRLMTIPGVGPLTALAFTAAIDDPKRFRRSRDLGAYLGLVPRRYQSGEIDYTGSISKVGDRRVRTLLYEAANVMLTRFKGQLKLKDWAIAIARRSNMRKARIALARRLAIIMHAMLKHGTEFKPA

SEQ ID NO: 228659 - protein, 340 aa, unidentified
MQISTIGLDIAKNVFQIHAVDSEGRAVLRRKVRRDGVEKLFEGIEPCLIGMEACATAHHWARRLTELGHQVKLMPPTYVKAYVKRNKNDAADAEAICEAVRRPTMRFVPIKSADAQSVLMLHRARHLLVRQRTAQVSALRAHLAEYGVVAPRGLAHVRDLLTMIEVGAPMLPEAARQTLLLIAQMIDALSQQIRKIEIELLAWHRASAVSQRLETIPGIGFITATALAATVGDARAFRSGRQFAAWLGLVPRQNSSGGKERLGGISKMGDRYLRHLLVIGATAIVRYTKRKATPVSIWANRLLERKPARLVTVAVANKMARIAWAVMARQEIYRAAPIAA

SEQ ID NO: 228660 - protein, 469 aa, unidentified
MAYSLFNHIQGKKGSRWAEFVRETGTENLMMVAVDAAKFTQKALICTFYGDILVKPFEFDASLTGFDYLRRIIQSEKDKHKFKEVVVGIETTGHYYEDLVRRCQSYGYHVRTLNAATTAQERQALLNWSKTDNLDLMAIVQSMIHGRGTSNELSSGDILTLQKLTRARRELVGEQTTTQNLIRVHMDHIFREFQGKSIWKNGTREHVKPFSKLFGKAPLYLMRYFPHPSDILKLGKEGLRELSIRENLKLRDSTIQTLLDFAQNSISQPKEYLEGDIFLLTQKLDRLELLSKQISVLERKIEDLFVGMEGAVILSVSGIGVVTGAELYAEMGDISDFDHAGQLIKLAGTNPIVKQSGGKKPSYYCISKQGRRTFRNVTYLVGKSLAVNNPEMRQRYLDLKERGKHSNQAYIALGNRMIRLAFSMIRNQTLYQSRQENYVLLKEISKKLRASNVKRFYEIHVSAKLCQSA

SEQ ID NO: 228661 - protein, 343 aa, unidentified
MDHFAGLDVSVKDTSVCIVDDTGKITREVKVASEPDALLAVLTNPAYHFKRIGLEAGPLSQWLFSALAEADLPVFCVETRHRRAVLKAQINKTDRNDARGIAQMIRVGLYRPVHVKTLRSQKLRMLLTHRELLQSKAIAVDNDLRGTLRNFGLKVGMVGAARFEARIRELVEGLPDLAVLVEPLLVVRRVLREQIAVLHRRLLAVVRDDEVCRRLMTAPGVGPVVALTYRATVDVPARFRKSKSVGAVLGLTCARDQSGERDRAGAISRCGDKMMRAMLYEAAQSVLVRSTRWSWLKAWAMQVARRRGKKKAIVALARRLAVILHRIWVDGTEFRWTRDAAAA

SEQ ID NO: 228662 - protein, 334 aa, unidentified
MDTHADVHVAAALDSVGGLLGVEEFPVSPAGYARLLGWLGGFGTVCLVGIEGTGSYGAGLARHVAAAGIRVVEVDRSDRQDRRRQGKSDPLDAVSAARAAQSGRARGAPKGRDGAVEAIRALMVAKRSAVGERTRTINQARALILTGPDDLRARFTRHTPAALVAGIASLRPRPGDVPGYAVRVALRELGRRAVFLDGQLERLDELIVPLVTARAPGLLALYGIGPNTAALLLIAAGDHPGRLRSEAAWAHLCAAAPIPASSGKVTRHRLNPGGDRQANHALWRIVFTRMGSDAATRAYVERRTKEGKSKAEIIRCLKRYVARQVYPHLRPDAG

SEQ ID NO: 228663 - protein, 410 aa, unidentified
METVVERPAALDVHKEQVTACVRVPGASGRREQHVAEFKTTVQGLLALRDWLKAHGATHVAMEASGVYWKPPWAILEDEFECLLVNARHVKQVPGRKTDVSDAAWLCQLLEAGLLRASFVPPKPIRTLRNLTRYRKAQIGERQREANRLHKILEDTGIKLDCVATDILGVSGRAMLDALVAGTTDPAVLAELAKGKLRQKLPALREALEGRFDVEHGIVVGAILAHIDFLDEQIELLSEAIGEQIRTFKGAVELLCTIPGVQRRTAEVIVAEIGTDMSVFPTAGHLASWAGLCPGNDESAGKRRSGRSRKGSRWLSIALTEAAQANTRSRDTYLSSQYRRLKPRRGHKKAIGAVRHSIIVACWHMLTSGELYHDLGSDYFTRLDPDKQTRRLVAQLERLGHLVTLQPVAA

SEQ ID NO: 228664 - protein, 467 aa, unidentified
MAARKQKQKRMSAQVVEDEDYQLRYEVAAGIDVAKESAVVCVRMPPAAGRKHRTSHLQTVPATVPAIGELAAELKAAGVQMVSMEATSDYWRIWFAVLEEAGLAVQLVSSSQARNLPGRPKTDKEDARQLARTAGMGMLRSSFVPPPEIRALRVYTRHIWDLTADRTRYWQRLEKLLEDALCKLTSVVSRLAGHQTARAVIEAMIAGERDPRVLAALGKGKMRNDKLPALAEALSGMRFGPQHAHAAASLLRAIDLLDAELRDLHERVTAHLAAIPGSWGVDADGVTGPQAGRAADAPALPAAERLDEIPGLGKEAAAALIAEIGLDMSRFPTPQALVSWAGLTPTARQSGPRKGRGKKGHGNTYAKRICVLAAYAAANTDTFLGERFRRLSSRPGGGGRKKAGCAVGRSILIIVWHLLSDPAARYRDLGSGWHARHTDRSRKARNARRQLEALGYDVIITLREDAA

SEQ ID NO: 228665 - protein, 485 aa, unidentified
MAKRSIYTRQNQTLIDLFKDAEHPDKVLCVPIDYAKKTHMALCCNGAGTVLKKAFPVKNNPEGVEFLLEAVEKICRKHHIVSRHVFFGGEDCGTFSLNFIYKLREKGFIVMGVNAKDAADQRENMQASTDELDLLGIAKLLLNRRGSKAGGELGEERALRILTRYRSKHVRLRTATKNQINQKVDQLFPGFLDETLSGIPPFSEASLYLMQDRFSPPQLQKRQDRALLKQLKATGLQQAEKAMGTLKSYSRQVLVQPLELSGLLQTSLAGEINLYRCLTANIEQIEREIAQQLAKTSGAMMTTIKGVGITLAAGVASEVGSPSSQSSTRRLTSYAGIIPRLKQTGGPEKPAKIGKVSRRCNHLLKNFVVQCGNHLGQHGPIDLKEDHRRRGANKQHADFGMARRFLRMGMCLMRNNDSYLPPELRHGATKEELRNYYLQQWPKLLKKWTKLGAEQAAFHEDNPLGQWRKRIETIYEIEFSLPEKK

SEQ ID NO: 228666 - protein, 367 aa, unidentified
MARQERDRSQRSGSVSLKTVGQLGSSRSSGHQPGQLKGPQARIVQGRETRRCTMSAEIFVGMDVSQGCVDVAVRPGTAFQITQDERGIAEAVERLQAVQPTLIVLEATGGLEVPLTGALAAAGLPVVVINPRQVRDFARATGQLAKTDRLDAQILARFAEAIRPPVRPVPDEQTQALAALVARRRQLIEMLTAEKNRLRLAARPIQKRVQAHITWLEKELAATNTDLTATMRESPVWREKEEVLRSVPGVGPVLTTTLFANLPELGTLTRKEVAALAGVAPFPRDSGTLKGRRAIWGGRAHVRAALYMAALVATRRNPVIRVFYQRLCQAGKAKKLALTACMRKLLTILNAIVKSGTPWRVAVSQSA

SEQ ID NO: 228667 - protein, 370 aa, unidentified
MTSIIYVGMDVHTTNYTLCCYRIGDDDVFAVIQTEPDYKNILRYVEQVKKNHGKDCGIQCGYEAGSLGYTLHRQLTDHGIDCVILAPSTMPKTNRKEIKNDKRDAKKIAKCLAYRDYSAVYIPTEEDNAVKEYIRMRDDEKDTLKRIKQRILAFCTRHGKHFTEGRSYWTLKHLAWLKRQDFGNAVLQEAFQEYLALYHQACDKVALFDRRIEELAQQESYEEKVRKLSCLIGVKTHTALATIVETGDFKRFKTAQQYSAYLGLVPGENSSGKYIRRGGITKAGNSHIRRLLVEAAQCYSRGAIGKKSKALLSRQAGNDSKVIAYADRANERLKRKCYRIMFRSKRNIAVTAVARELACFIWGMMTDNIA

SEQ ID NO: 228668 - protein, 351 aa, unidentified
MIIVGVDYHPSVQQVAFLDTETGETGERRLNHSDGEAERFYRDLERRQVKVRVGIEATGHARWFERLLAELKFELWIGDPARIKAARVRKQKTDRQDAQLLLRLLVEGRFPQIWVPSPENRDLRQLIWHRHRLVQMRTRAMNQIQAAAMNEGVRRKKTLWSKTGRRQLEALPLAPWATRRRQDLLELVDRLNTTIDELTAAAEQEARKRPEVLRLMTHPGVGPITALAFVLVLGSPDRFGCGHQIGSYLGLIPCEDSSADRQRLGHITKQGSSLLRFLLAEAAQAAVRWDPDWRRRFVHLAMRRDRRIAKVAMARWLAISLYWMWRKGYDYQQSLKFGSHAGEPGYRHGVK

SEQ ID NO: 228669 - protein, 402 aa, unidentified
MKKCNATKIRVETAASGMVLKANEPSCGYGAYVGLDVHKDTIAVAVARPGREAPQSWGEVASRPQAVAKLVARLYAEFGGERLLLAYEAGPCGYGLYRQLLELGCDCQVVAPSLIPRAAGERIKTDRRDALKLARALRSGDLTAVWVPDAEQEAMRDLSRARDDLKAQERKARQQLNAFVLRHGHHWPANKSRWTQTHSHWLESLRFAHDWQQVVLQEYIEAVKAAGRRVAELTDQMMRVLPQWSLAPVVDALVALRGIDKLAAMVVLAELGDISRFDSPRQLMAFLGLVPSEHSTGSRRRQGSITKTGNGHARRVLVESAWSYRFPARQTMHLKRKAAAAPAAAKAIAWRAQKRLCGRYQALIRAGKNTKQACVAVARELVGFIWDIACREMPKIHAPAVR

SEQ ID NO: 228670 - protein, 341 aa, unidentified
MEEYIGLDVSMKETAVSIRRAGERIWRGKCASDPSIIAELIRKRAPSVKRVVFETGPLSVWFYHSLRTEGLPAICIDARHAKAALDMAANKTDANDADGLAQLAEVGFFREVRVKGFDSMLTRTLVAARTRLVRITTELSNQIRGVMKTFGLLVPAGKGSTFEKNVRRLLADQDRLASIVLPMLEAWRGIRVRAAELGRQLVRDARQSRACRILMSIPGIGAITATSFTTAIEEPDNFRKSRSVGAWIGLTTRRYQSGEVDYDGHISRRGDHHLRGLLYEAAAVILTRSSTHSTLRTWGLQLRERIGFKRAAVAVARKLAVIMHTMLKTGELFNPNAGAAA

SEQ ID NO: 228671 - protein, 341 aa, unidentified
MEQATTIGLDIAKHVFQLHGADAAGHVLFRKRITRVRLLSFLAAQTRCVVAMEACAGAHYWAREIAKLGHHVRLIAPAYVKPFIKRQKNDAADAEAICEAAQRPSMRFVPVKTEEQQANGIVFRARDLLVRQRTQCVNALRGHLMEYGYVFPKGITHVETLIALVEDLQSSLPDSVRVILKLLIDTFTALEAQIAVLDAEINQRSKSDPTARRLMTIPGVGPIASTAITALVPAAEGFPAGRDFAAWLGLTPLQKSTGGKQKLGAVSKRGERTIRRLLIIGASAVVQQASRRGAPKGSWLAQMLARKPKMLVTVALANKMARIIWALLVKGGTYRAPAVAA

SEQ ID NO: 228672 - protein, 352 aa, unidentified
MREYIAFDSHKRYSLVEREDVASGKIVQQVRLTHGPGAVRRYLARCTPGTAVALEATGNWYWIVEEIEQAGLQPRLVHPRKAKLMMGLINKTDKLDVHGLNRLQRNGTLPTVWIPPRPLRDLRELTRTRLVLVEQRTRLKNRLTATLAKYGVPPSEYSDAYGKSARAELEARIEPMPEQTRWVCKQLLAQIDFLVRQIRQLEQRLEDLVEVTPEMERLMTLPGIAEILAATIALEIGDIGRFPDAPHLASYAGTTPRVHASGGRVRYGRLRTDVNRYLKWAFVEAANSVAVNHRRCPERHVSQLYDRLRQRKGHHKAIGAVARHLAEAAFHVLRRQETYRDPVLERGCTGEV

SEQ ID NO: 228673 - protein, 428 aa, unidentified
MDELNRNRLEEFRQLRQEIRHSEEYLIVGMDIAKDRHHAFFGSATGRTLLRRLVFDNNYEGFRKLLDQTEALRVRHGLKKVVYGMEPTANYHKPLGEYLIHLGRCVVLVSGVTAKKNRESLDGRWDKNDPKDSANVADLISQGKCLYYEYPAAPLRGLRGLLSFKRRLKKQEHGYRVRIRNHLIAQYYPEMDREYERLGAEGLATMRWCFPPSEMTGLDVEHYIDRVTSGRIRGEKRERLERVWEQAGETIGCDGVPGVQHEARLMVEGLKQVREMIRETEDEIEELCEGFPEYGYLLTIPGYGPDVSSKVLGAIGEADRFQNGRQVLKLAGYDLSADRSGKDSEKAIPQISKRGKADLRYALYQAALIASTKNREFMRYYTSKLRGREKEKGIHRKVLVKLSAKMLLMAWTLMKKKEAFDPTYLNRA

SEQ ID NO: 228674 - protein, 386 aa, unidentified
MVLAVDVAKVQQYALLTTQEHTQSWLMQWSHLEHTQYLIEQLKALEVPIAVVMESTSTYGDSLRYQCRQAGFTIYQANAKKVHDAREIYDGVPSLHDAKAAWLIAKLHKDGATKLWCEPTEEARRMNALRLEYELHQDQHVRSQNRLEAYLSRHWPEVLTLMPLDSVTLEQLIKTYGCPQEIAAQSEQVASYMRGWGKSRLSTDKIANVLASAKNTLGEPCIEAERQFLMALASELQHSREQKQAAKQALEALVENDEALREMGRTIGKITTAVLISLHLDPRCFATPKSYQKALGVNLTEKSSGQINGRLRLSKRGSAIARKFLYLAALRLLVNDPMVSKWYEVKKDERVKLKTVVALMRKLPLALWHIARGEKFDAEKLFKVTV

SEQ ID NO: 228675 - protein, 328 aa, unidentified
MDHFAGLDVSVKDTSVCIVDDTGKITREVKVASEPDALLTVLKNPAYHFKRIALEAGPLSQWLFSALAEADLPVICVETRHMRAVLKAQINKTDRNDARGIAQMIRVGLYRPVHVKTLRSQKLRMLLTHRKLLQSKAIAVDNDLRGTLRNFGLKVGVVGAARFEARIRKLVEGFPDLAILIEPLLVVRRVLREQVGILHRRLLAVVRDDEVCRRLMTVPGVGPVVALTYRATVDVPARFRKSKSVGAVFGLTCSRDQSGERDHPGAISRCGDEMMRTALYEAAQVMLMHSVKWSWLKAWAMKIARHRGRNKAIVALARRLAVIMHAAA

SEQ ID NO: 228676 - protein, 343 aa, unidentified
MKITSIGIDIGKTTFHLVGLDPHGSIVIRRKFSRKALLAYTANLPSSLIGIEACGGAHCLARVLREQGHQSRLIPGQFVKPYRKSNKNDYLDAEAIAEAVTRQNMRFVPIKTEDQLDLQGLHRVRERLVHNRTEVINQIRGFLLERGITFNRGPMSLRKEMPLLLEDAQQNLTPSLRTLLDHLWHEWEHLDSQVDQIADAMDAVANSDAACRRLRKIPGVGPLVSTATVAAVGNGAAFKRGRDFAAWLGLVPKQHSTGGKARLLGITKRGNRYLRSMFVHGARAVPLRVKYDAGGFGQWVHRLAARAPRNKVIVAIANKLARIAWVVLSSGNEYQHQPIAAVA

SEQ ID NO: 228677 - protein, 341 aa, unidentified
MSNNMYFIGLDIACNDFAASIYQSPEKPIITKEAILNNPDGFNMLISWLKSNNINNTNSIICMEATGVYSKAITNYLTADGFNVCVEAPLKVKRAFDPVGHKTDAVDSKQIAEYAYRYRDELRLWKPKDEILEKVRQLLAARERFTKQSTAIQNASKAYEKEPIKVALIIKSHKQALKQLKKHIADIDKELDKHIHQNPAIFQNTNTLKSIPGYGMLLSANLMVITDNFENIKDHKRLSAFIGIVPYQHQSGTSINKKARIRHFGPQTTRKLLRLAAQSVATHNKGFRQYYLRKQAEGKAKTLVLNNIANKLIKIACAMMRENKSYIKEHRSIHPMCLKTA

SEQ ID NO: 228678 - protein, 375 aa, unidentified
MGKHRLAFVAFDSAKNKHAAAIADDGRDGEVRYLGEIDNSPDAVRKLVAKLSRQYERLHFCYEAGPTGYGLHRQLTELGHVCDVVAPTMIPKRSGDRVKTNRRDSVTLVKLLRAGELRAIWVPDSIHEAVRDLTRARETAMVDLKTKRQQLLSFLLRHGRSFPDGRNWTKMYERWLAKQTFGHPAQQIVFQDQLEAITTAQARLAALEQQLREIVPTWTMASVVAAYQALRGVSFLVAATFVAEVGDVRRFATPQQLMAFLGLVPSERTTGDTVRRGSITKTGNYRARRVLIEGAWTYRFSARVSETLRTRLKDLPLSVRAIAWKAQVRLCARYRRLIARGKKPPVVTSAIARELAAFLWAIGQQVAPQTGVLRN

SEQ ID NO: 228679 - protein, 370 aa, unidentified
MKQRLLYVGLDVHKNTTDVAIANGRSNGKVRSYGKIDSTLDALNKLIKKLQDGDKELRFVYEAGPCGYQIYRYLDAKGIHCSVVAPSMIPQRSGNRIKTDRRDAINLARLFRAGELTSIYVPTPEDEAIRDLLRCRDDMKRFERKARQRLLSFLLRHGHQYSGKKNWTKGFYTWLATVRFSYSAQQVTLQEYIDVTNECSERIQRITQQIQVHVEEWNRAPFVKAYQALRGVSIIVATTVVAEIGDMNRFQSPKQLMAYLGLIPSEHSSGKTVRRGPITKTGNSHVRRVLIEAAWTYKMQARVSNILLNRQKGLPKSVCEISWKAQTRLCARYRRLYARGKSRQTVVTAIARELSAFIWAIDKEIQLAVL

SEQ ID NO: 228680 - protein, 356 aa, unidentified
MQHTSKLDFTGQRIYTALDTHKKSWKVSVFTDQFEHKTFSQVPDIEGLVHYLRRNFPGGEYIVTYEAGFCGFWIHDRLAEKGIKCVVVNPADVPTTDKEKKGKCDPVDSRKLARSLRNGDLIGIYVPHREKVEDRSLVRTRQAMVKKQTRCKNQIKALLHFYGIAIPEVLAEGRWSRKFIDWLSGIEMVRNSGNVTLKFHLAELTYLRQSIADLTKEIRRLAHTEEYAENHRLLKSVIGISTLTAMTLLTELVDLTRFKNLDRLANYVGLVPDTASSGEKEVHIGITSRRNPHLRGILIESAWVAVRKDPALILAYSQLLKKVTKKIAIIKIARKLLNRIRYVLKNKQEYVLAVVQ

SEQ ID NO: 228681 - protein, 357 aa, unidentified
MERILKQSLGIDVSKASLSLSFGTLYGNLKKEFVSHPDIGNDVSGFKSLRTWISKQVDRKEGFYVIMEATGVYHQRVCHYLYGLGYNVCVMQSGRVKRYAQSLDQRSKTDALDSRMLSMLGLERELRLWSPPSEELQQLKLLGRERSSLLKDRTTEINRQSAIDSSSCLGKRASKRHQRRLQPINEQIAAIEQEMRGLVKGDAVLRERIGHLESIPGVSFISAATVVGETLGFESMSNAKQLTSYAGYDVVLKESGRFKGKTKISKKGNSHIRAVLHMPSMACVRFNPTLKLFYSRIKPNKAKPMVALVAVQRKLLVLMYTLWKKEEDYDAEFEKKKQQRPEVLAAQDSAQIKLSAS

SEQ ID NO: 228682 - protein, 392 aa, unidentified
MDNNNLIGNVDVGEASVASRDNINRRREFDRVQVKKTVTEREPRRRCGMSPNSRLNRRGPTHTASSHLQVREYTVLSEEIYVGIDIAKETFYVATCPDAIKQQLPNTHHGHRQLLKLLQKQNVVLIVLEATGGYERPLAAELISNSLPVVVANPRQVRDFARGIGQKAKTDPIDAQVLAKFAQIVKPSPKPQSKPQINELSELVRRRRQLNDLLTQESNRLAIISHPKVKKSIHKMIKTLESQIKEIEQLIRNYIDSDDDFKKKDNILQSVPGVGPQTSAMLIANLPELGTLNRQEIAALAGVAPWNNSSGKFDGKMHIWGGRKDVRSILYMSTFTARRFNPVIRLFAERLKKSGKAYRVVMTACMRKLLIILNTMIKDQALWTPKIFLKNT

SEQ ID NO: 228683 - protein, 488 aa, unidentified
MKMLYDRCAGLDVHKKSVSACIRISKGKETSQETRTFGTFTADLEDLRDWLLKHKVTHVAMESTGVFWIPVWNVLEQCEANFVLTLINPQHVHALPGRKTDRKDGERIAELMQYGLLKGSFIPPPAIRELRDLSRRRTHLQGERNRVINRIRRLLETANIKLGSVVSDITGKTARLILGEICRGNCTPEELAKLAQASLKNKRAELIGSLKGFYSEHFRWLLTEAVQDLAYLDRKLEPLDQQLAKRLLPHGDLIRRLCTIPGVDFTTAAVIIAEIGLDMSRFPDAAHLVSWAGVCPGNNESAGKRFSGRVRKGNRYLRRVLTQSAWSITHKKECFLTSLFWRVAARGGRTKAAIAVAHRVLAIAWHIIKNEGEVYREVGGSHQDRLRPQRSARRLVHRLEQLGFEVNLKAKAREAAPAPESVTLPASPVNRRSHRSLSSSPASHQKPQAVAADPSICRRCARWGIACIHLRNANRRPSAVVSPDESIT

SEQ ID NO: 228684 - protein, 408 aa, unidentified
MKLFIGINVSSTDLETVMISSEDNGIVFQGKFANDITGASEIKDQILKLAQPARFDQIVIGMESTSIYSFHPAFFFKNDAELAKFNVQVVVINPRQTKRYHDIFEDNKNDHIDAFYIADYLRVGRYTIGIVRQENYSALQRLTRTRYELTQSLVRAKQHFLHNLYYKANNLAIGKQKTSVFGATMMDLLIEDMTLDEIVNTPTEALADYFSHKGRGRFADPQGLAKDIQKAVRSSYRLGKVMNDSVDTVLAIYAKEIKTFQKMIKELDDAITQIVDVIPEEQILQSIPGIGPVYAAGIIAEIGQIDRFEDETKLAKYAGLTWKQNQSGKFESTTTPLLRTGDSYLRYYLIEAANRVRREDSVFKEYYSRKYQEVQRTPTKRALVLTARKLIRVIFYLLKNHQIYKPKE

SEQ ID NO: 228685 - protein, 338 aa, unidentified
MAIVNVGIDLAKNVFALHGVNEAGQVDLRRPSVPRAKLHELVAALPPCTIGMEACSGAHHWARLFAQSGHTVKLMAPKLVTPYRMSGKRGKTDAADAAAICEAVQRPNMRFVPVKTVEQQSRLMVHRTRQGFVESRTAVINRIRGLLAEFGIVLPQKAQVVRREAARHMDGLPGFGKLVIEDLLDEIRHLDERIKAYDAHVRSMARDCTAAQQLMQIIGIGEVTATAIVAMVGNAREFSSSRQFAAWLGLVPGQYSSGGKTRLGRITKAGDAYLRGLLVMGARAVLNAAGAKDDSVSRWAKNIALRRGYWKAVVAVAAKNARLAWAALTKGDSFTMPA

SEQ ID NO: 228686 - protein, 379 aa, unidentified
MSSNVCHQIIYLAIELSSSSWVIAYRLPANDKAKVHRLEGGDGAGLLAFIASLRHRLDPSDDASTLDASTLVVSCFEAGRDGFWLHRLLSAHGVISHVVEPTSILVTRGARRAKTDRLDAFGLLRVLAAKFAGDPDACRIVVVPTVEEEDAKRPHREREFLVQERVRIENRIAALLATQGIRGRPSLRSWDADMRALRTGDGHPLLTHLVAELNRLRRRLSLTLEMIRELDAVREQALEAQHDSASRTVKALCTIRGIGVNFASVLTREVFYRTFDNRRQIASYLGLAPTPFQSGGMDRDRRINRAGNSRARKTLVQLAWLWLRYQPESSLAAWFRDRVGSLQGRTRRVAIVALARKLLIAIWRFVTLGLAPEGAIIAA

SEQ ID NO: 228687 - protein, 345 aa, unidentified
MPIVGGLDIHRKQITFDYLDTGTGQVRRGQVSPADRAHLRAWLARFAGREDVAFALEGCAGWRYVAEELAAAGITAHLAEPADTAFARGRKRHAKTDKTDARHLRMLLAEGRLPECWIPPRHILECRAVLELYNDLRRERTAWAQRIHAVLFHQGAPALGEGALRTERGVAELRAAAAAHLSPAGQLQVATAVEVIDALEARLHVVRHQLLDAARHLAGAKALAARLYGVGPVTALAITCWLGGAGRFSSSRQAVRFAGLDITVSSSDRKGPPGKLSRQGPPVLRWAVYEAGKAHARTSAPDHGYYAAVKDRKNSKRACLSEARKILRQAHHILAELGDDALAVA

SEQ ID NO: 228688 - protein, 377 aa, unidentified
MSKVRFLGLDVHADTIAVAVADTNGEVRRHGMIPNQLDALRRMVKKLGAGYDLRACYEAGPTGYVLFWQLTALDVACEVIAPSLVPSKAGDRVKTDKRDAEKLARAYRAGDLTAVWVPDAAHEALRDLVRAREDAKQDQTRARHRLSKFLLRHGQRPAVKTKPWTLIYMDWVQRKVHFDQPALEATLRDYVHEVEHAAERIKRLEKDLAEAIGNAAPVIRAVVEALQALRGVAFLTAVTIVAELGMLSRFATPRQLMGYSGLVASEFSSGNRIQRGAITKTGNAHLRRVVVEAAWAYQRRPWVGGYLAKRQKGLNPAIIDIAWKAQHRLCGRYQKLAARGKNKPQIVTAVGRELLGFIWAIAKTVETQFAQPHTQAA

SEQ ID NO: 228689 - protein, 389 aa, unidentified
MQCFDANKSLIVLDQDSTLVAVIEMSLSGWLVAGVVPGLKRQPKKKLDPDPDALLALLRRWRNEAMKAGRQVERMTVAYEAGRDGFWLARWLNGRGIEAYVIHPSSIPVPREHRRAKTDRLDTELLMRAFLGWLRGEVKHCTMAAIPTLEEEDAKRPNREHQMLTGERTRLINRLKSALIRLGIRNFKPTLGKAAERLAELRTPEDVPLPENTLAELKRDMARLSLVKDQIKAIERDRLVRIAKAANHGPNVMVQLIAQVIGIGLETADMLVQEILSRNLRDRRAVARYGGLTGSPDESGSRRREKGLPRSGNSRVRRGMIEFAWRFLQFQSDSPLAEWHRNQTQSGRKDVRKRTIVALARKLLIALWRLATQGVVPEGIALRKASAIH

SEQ ID NO: 228690 - protein, 337 aa, unidentified
MKQITKNEIYKHYIALDWSQVNFALASIRDSGTKYKVVEHPANLKILKECLKKLPGRKILTIEETTTAQWLYVELIDYVDKILICEPFHNSLLKSGAKNDKIDATKLCMLLRNGSLKEVFHTTDELYKLRKLVSVYEDFVNASVRMKNQRSSMFLSEGKDHKKERILTGNTINKFITEKQNLSIDHFALMRKEFELIFQKIKKENQTIQRLVKISGIAEKLAVTILAVVVDANRFESKYKYYAYCGLVKHFKKSGDRDYGKRNTRHSRRLKRCYKIAANAAICGNNDIREYYEYLIQNNYSYEDARNQIARYIAKASYAVMKNGTDYRPYQWRENIK

SEQ ID NO: 228691 - protein, 347 aa, unidentified
MLYVGLDLSRQRLDVHVLDEEGRTVEVTAATPEVFGLRELVARISRHGEEVSATIESMNGARFVHDQLELAGWDVEIADAVKVKGLAPLAAKTDKIDARVLAELTRRELVPAIWLPDPTVRAERERARFRLHLVRHRTALKNRIHATLIAFGHPVPVSDLFGAKGRELLASLAVPEPWATTLATSLRFVDELETEIDRCTADLQAAGADHPYVPLLMTVPGIAWVLGYTIAAELGDIGRFASPKKLAGYTGLCPIVRQSGRRDDRGPLAKNGPKYLRWALIEAATHAARHPAYRERYERTKKRLGRQRGSKVARVELARELSTAIWHMLTKNEPFAPGRPPARALVA

SEQ ID NO: 228692 - protein, 338 aa, unidentified
MNHVAIDLGGRESQIYVSASDGTVLEQKRVATLALKEMFRQMPHSRVIMETCSESLFVADAARECGHDVRVVPATLVRALGVGSRRTKNDRRDAQILCEASCRIELPSVHISSAKARHRKTLCNSREALVSARTQLVNCVRGWMRQTGNRLRSGGVESFTKRFHDKVGDATPEAIKRLLTMIDELCDQIADADRQLDEEVKNDPVCQRLMSVPGVGPVTAARFTAQLDDCARFPDAHRVESYLGLVPGEDSSSDRKERLSITKAGSGRVRAALVQAAWSARRWRANDPMVRWCLEVEKRRGKRVAVVALARKLAGILFALWRDGGVYNPLRGAKARSS

SEQ ID NO: 228693 - protein, 483 aa, unidentified
MKSKSEEQNKRATNHPTQHHWHEMNRKQRREMMRKMQTEDLSLEVIHPDAAGIDIGNESHYVAVPPGRDSQSVREFGCTTAELKAMAAWLKQCRIRTVAMQSTGVYWVAVYDILEQAGLEVYLVNARDTKNLPGRKSDVQESQWLMKLHTYGLLRNSFRPSQEIRVMRTYWRQRNDLVQSAGRHILRMQKALTQMNLQLANVLTDISGATGQAIIKAILAGERDPHKLAAFRDPRVKASEEQIAQSLEGNWQEDLLFVLKQEHEGYEFCQKQMAECDRQLQQYLQQREDRSHGAPLPEEKRKGRLKKKKGNAPQFDLREGLFRMTGTDLTRIDGIDVMTATTVISEAGYDMGKWKTEDHFVSWLRLCPDNRISGNKVIGKGRLPTNNPISIALKMAASTLRESKTYLGAQFRRLRTRLGAPIAIKAMAAKLARLVYRMLRYGVKYVDQGAAFYELRHRELQIKRLKSKAEKLGYRVTPIPAAA

SEQ ID NO: 228694 - protein, 365 aa, unidentified
MTKSISRKSTQRSEQLGTWWDRVSTIGIDLGDRSSHCCGIDDEANIVAEFRVATDATSFEEAFRGIARKTIAIETGAHSPWVSRLLESLGHEVIVANSRKLRFIYENRRKDDRVDARSLARVARLDRTLLEEIRHRREGAQVDLELVRARDVLVTTRTRLVNHVRGVVKSFGKRLPACDPSALPRKATTAIPPVLLEALTPLLDMIESLSDQIRLYDRAVEHLATIEHPEVAKLRQVSGVGALTGLAFALTLDDPHRFRQSRSVGAWLGLVPAKDDSGERRPQMRISKEGDHYCRRLLVGSAQYILGPFGPDCDLRRHGLAIAARGGKNSKKRAAVAVARKLGVLLHKLWVSDAVYEPLYNKIAA

SEQ ID NO: 228695 - protein, 317 aa, unidentified
MSTVSFEQVILRGCGLDVHKDVVVATISGEGLSTETRSYKTFSSSLTELKEWLLSNGITHAAMESTGVYWKPVYKILECPQMKVWVVNARHIKYVPGHKTDKKDSAWICKLLLAGLLKPSYIPEREQRELRDLTRYRNKLIQHVSSNKNRIVRILEDCNIKLSSVMSHLDGVVATKLIDILIDKGHVTMDDIACVYHKRLEASPELLYQACEGFIEPHHTYMLQTIRKDIEQTESILSDLTSRIKEVLSPYENVIDLLRKIPGLDRKTVEDLIAEIGVDMEVFPTEKHLASWAGICPGNNESAGKKKVEEPLMATNS

SEQ ID NO: 228696 - protein, 356 aa, unidentified
MSRDIKYIGMDVHKEATVIAVLNGSGKLMMESIVETKASSILQFIHGLRGELHVTWEEGSWAAWLYDLLQPQAAQVLVCDPRRNALLKEGNKSDKIDARKLADLLRTGMLRPVYHGEHGLRTLRELGRSYQTLSQDLNRVMNRIKALYRGWSIPCAGTQVYAPRYREEWLHKIEHVGVRRRAELLYQQLDGLQRLRRTLRPELLAESRKHKASKLLRQIPCIGPIRAARLIALMQTPHRFRSKRQLWTYSGLGIETRDSAQYRYVGGQLQRTKKPQQIRGLNQNHNHEMKEIFKGAATRASCGVGPFRDFYVALLEKGMKPEMARLTLSRKIAAIALTLWKKEGRFDAEQLKPQAA

SEQ ID NO: 228697 - protein, 356 aa, unidentified
MKSYKVQNFVVKGKEVFVGLEDSKKTWKIAVRCEKMLIHQVSMPAEHQALVRYLRNKFPDCNIHLIYEAGFKGFNLFDRLMDEGIDCVVMPPHLVTEAKVNRVKTDKIDANRLAVTLENHDFKHPCFVPDKERREDRQISRTLWAFQKDIIRVRNRIRKLLDFHGIEVPFPDRWGKDEFKALKELPLGDSLKKSLLALISHLEQLWEHKESLQEALRALCSKERYKKAFGIAMSLPGIGWFTAIRLVLELGEDLSRFTTGKKIAAFVGLTCSEHSTGEAERKGRITGMGSGFIRATLIESSWMAIRKDPALLAKFTRIWKGKGTKKKAIVAVARMLIVRLRACLLSGKPYAIGTVR

SEQ ID NO: 228698 - protein, 341 aa, unidentified
MTTALPRHYVGIDLHRWRSVVATMNEEGEQLGCERIDNSPLELVRAVTAYGGEIEVALESAYGYYWAADVLAAEGLKVHLVHPLGLHWESRRVKNDERDAAELANRLRRGDLPESWIAPPEVRELRELSRYRLKLTAYRTSAKAQIHAVMAKEGILPELSDMFTPADQRLIDKMPLDGAYAIRVESLRDLLELVDREITMVEKELARRLKDDKGYQAIQALHGVGPILGAIFVAEIGDVTRFASARHLCSWAGLTPVHHESDTKVHRGHITKQGSTYVRWAAVEAVARYHGGSPIAPTYERIVKRRGAMIARVAAARKLLSLVYYGLRDGEIRCLADKEAG

SEQ ID NO: 228699 - protein, 360 aa, unidentified
MQTQRTELNFEGQNFYVGIDVHLNGWAVSIISEKLPLKTFTQPPSAEKLYNYLTHNYPGGTYHSVYEAGFSGFWTHYKLKEMGINNIVINPADVPTTQKEHLLKDDPTDSRKLARSLRSGDLKAIYVPELLTMEDRSLVRLRATLVKDMGRYKSRIKAMLYVHGIPYPQEFENSKSHWSKRFIRWLTETDLLQSETGTLALRTLVQEAEQQRNLILDTTRAIRKMSQGEKYASNMKLLRTIPGIGLITGITFLTEVEKIERFTNSDHFAGFIGLIPTRHSSGAKQSNGEMTFRGHVNLKKMLIESSWIAVRCDPALTLSYHKYTNRMDSNKAIVKIARKLLNRIFYVLTNKKEYVLCVVK

SEQ ID NO: 228700 - protein, 358 aa, unidentified
MTATTISMTSGNGQRRVIVGVDTHKEAHVAVALDELGGLLGTGSFNADRAGYRALIAWAVAFGGEVIFGVEGTGSYGAGLASAIRRSGIGVLEVLRTDRRDRRLRGKSDTLDAENAARAVLAGTVHAVPKAGDGIVEMIRVTKVAKDNAVKSRSSAMISLKQVLVNAPDELRQTLQRLPRMTLIRRCAGLRPGPIEDVTSATKNALHAIATRWLALDEEVRGHDALLSRLTASVVPSLVDAFGIGPDVAAEVLIVLGDNPERIHSEAAFARLCGTNPIPASSGQTIRHRLNRGGHRQANAALYRTVVVRMQYHEPTITYVTRRIAEGKTKPEIIRCLKRLLAREIWALTREFRQPGTA

SEQ ID NO: 228701 - protein, 366 aa, unidentified
MKKTSTVQALKNEIFKGRKLTIGLDLGDRWSFYCVMDEAGQIILEQTLPTTPEAMKQTFGKIPRCLMALETGTHSPWVSRLLSELGQEVIVAHAQKVQWITKSSRKDDRHDARTLARLARVDPELLGPVRHRSAQAQLHLTVIRARAELVSARTALVNAARGLVKSYGQRLPKCGTYQVSEKLAEGLSAELREVLVPLFKEIESLNEHIKEYDERMEKLAKQVYPEVYLLQQVKGVGTQIALTYVLTIEDPHRFAKSREVGCFLGLRPGRRNSGQSEPQKGISKEGDRYLRTMLVQGAHYILGPFGEDSDLRRWGHKLAERGGKNAKKRAVVAVARKLAVLLHRLWVGGEVYEPLRNSQKAMREVA

SEQ ID NO: 228702 - protein, 349 aa, unidentified
MVVLGIDAHKRTHTVVAVDEVGRQLGVRVTQATSTAAHLELVAWADRFGSERVWAVEDCRHLSRRLERDLLGAGEQIVRVPPKLMAHARDSARTYGKSDPIDALAVARAALREPGLPVARLEGPERELRLLVDHREDLVAERTRVINRLRWHLHELDPGWDPRPRSLAARKNITAVAAALAGMDGLVARLAAGLAQRVCALTTEANALEREIAARVAVLAPSLLALPGVAALTAAKIVAETAGIDRFKSKDAYARHNGTAPLPAWSANPNRHRLSRTGNRQLNCAIHRIAVTQKRCHPPAQAYLQRRTTSGDTPTEALRALKRRLSDIVYRTLLADSTTHAIAPHRQAA

SEQ ID NO: 228703 - protein, 347 aa, unidentified
MEVYIGLDVSLASTAVCVLGEKGKMVTEAHVASAPDALVSFMRGLPHAIAAIGLEAGPLSNWLHKGLTDAGFEAVLMETRQVKAALKAMPIKTDRRDAEGIARLLQMGWFRPVHCKTVSSQETRALLTSRKSVKDALVNMELSLRGVLRNFGLKLGAVSKGRYEARVRELIAGNAMLEAAAEPILRARQALRRELAKLEKLVRNLAGQDPVSRLLMTMPGVGPVVALTFVSAIDDPGRFRRSKDVGPWVGLTPGRNQSGERDIVGRITKAGDAGLRTALYQAATVMLYRGAPNWLKAWALRLAVLRGRKRATVALARRIGVVLHRMWRDGTEFRFTREAAMALHAAA

SEQ ID NO: 228704 - protein, 300 aa, unidentified
MKSTIPTILAGVDTHSTTHTLALLDEHGRVTDTETFNADPKGYERLIAMIGDPALCLGVGVEGTNSYGAALSRRLAAAGYTVHEVLRPKRSVRRSDGKSDPIDAIAAARSVLAGDGISTPKASDGWCEALRHLIAAREQLVTSMTAISNCLAGLLTTAPEGIRERYRSLPSKRRIGKLAACRPSGGIVERNVLSSLKTLASSWRELHDRADVLECRMRQILEENARPLLDVYCMGTMSAAQLAVIGGDNPERIRSEAAFAKLCGACPLPASSGKTNRHRLNRSGNRQGNRALYNVALVRM

SEQ ID NO: 228705 - protein, 278 aa, unidentified
MGNDTLVAVDLAKVVFQIAVSDRPGKVVRRERLLRDKFLEFFAQLPQATVIMEACGSAHYWARRIEELGHVVVLLPPQYVRPYVLRNKTDRTDTDAMLEAFRNEQIRAVPIKSVMQQVVGTLHRLRSGWLGERTGRINALRGLLRELGFFIPVGRKNVLPSAWEIIQDADSGLPEALCPSLGALCEEIVALSKRIEDLEEQLQALARQIPAVTRLRSVPGIGLLTATALYAFVGEIGRFPSGRHLASYIGLTPRNTPAACAGTWAGSRRGVTPTSACC

SEQ ID NO: 228706 - protein, 350 aa, unidentified
MYNNNDIILVVDYHQKNLVIRRLNCHTGEERLFKCINSRAIIRKLIDEAVTEAACVDGRAIWIMESTTGWARVKKLVVPKAVFLLVNVLQMPLPPKAHRRKTDKIDTGRILREFLSGTLPLAHQPTPAVRRLRRLVADRENLVSRRTALRNWIDRYLAHETWNSRSGLWSNKGMRQLKKFVDSAREPDQIVLATKIAELEQIQQLLAPIEARMIRFHKHCRQAQWLDQIYGIAEISAVSILARIWPVTRFGSADELISYAGLAPGIQSSDETIRVGHIGGGGTDKHLRHYIIEATIWARRIPRYRRTYLRIMKKRGKKIGRLVVGRLLLRSIYHMLLNNERFNQLPAKVG

SEQ ID NO: 228707 - protein, 460 aa, unidentified
MLITRGFGQHMIPRINLLLQVPGTHNREGGDIMLKINPLSTLYVGIDVSSKSNYVCALDFYKNKYINSSFANNQPGAEELAQKLLECLKKHPDLNTVVAALESTSVYSIHIANYLSSCEELMPFKPYVFVLNPKCTANYKKSYIGLGKSDPIDAFVIADYARAGNIETEPWRGSQFLALKRLTRHRLHLVECITREKTYLVSNLYLKFSELQMLDKDDQPFCDIYGATSSSVLTEYLSPEEIIEASEEDLVSFLANKSRNRIKDISKTAELLKKAARNSYRLDKALYEPLNVSIASSFNCIETFKKEIKAIDAAIEREIKGLNPNAFIILQSINGIGPVFAGGIVAEIGDISAFTSSDALAKYAGLCWRSNQSGDFDGEDTPMIKAGNRYLRYYLGEAANSMRKHNVEYGAYYRKKFNEVPKHQHKRALALTSRKFVRLVYGLLARNQLYSGVSLDTSNE

SEQ ID NO: 228708 - protein, 354 aa, unidentified
MIMIGVDYHPEFQQIASVDTDTGDFQEKRLAHPEEAEKCYRSLAAQGVKVRVGMEASGHARWFERLLAELQFELWIGDAAKIRTKRVRKQKTDRQDAQLILQLLLENRFPKIWVPSWENRDLRQLLWHRHRMVQARTRIMNQLQAVALNEGLHCKKKLWREQGRRQLESFRLAPWASRRRRDLLELLDRLNPTIAELTRAIEHEAEKNPGVQRLRTHPGVGVLTALAFVLIIGQAERFQCGKQVASYLGLVPLEDSSGKRRRLGHITKQGSSILRFLLVEAAQVTVRSLPEWRSKYLHLAMRRGRKIAKVAMARRLAVCLFWMMRKEWDYEQLKKFGSHAGQPENRHGVQSNTE

SEQ ID NO: 228709 - protein, 330 aa, unidentified
MTYVGIDVSKDTFTVAYSSDKNSKTKTFKNTVKGIHEFIQTVSKEDTHCVLEATGNYSALLVYLFSKAGITTSLENPLKIKNFARVMLSVTKTDDVDARLIAMYGEKMNPSPYKLKEESILVLKQKRTVLRQLKKQLVATRNLKGSMEVLPFVDSTCKRTIERTIEFLEKQIRNMEENITSLTNQEYKKQMDLLTSIKGIGATLAAALIIATGGFTYFDNAKQFTRYLGLSPTYQQSGTSVNVKGHINRNRDSTLRSQLYVAAFASLRCNSECKECYDRLRSNGKPGKVAVVAVANKLVRQAFAVVTKEKEYVDGFVSEKPQKTQKHIST

SEQ ID NO: 228710 - protein, 344 aa, unidentified
MDNHTQYLGFAGVDLAKKVMQIHFVTEDGEITDKSVKRAEFLDFFRNRGKCLIGMEACGSSQDWARKFEAMGHEVHLMSPKAVKPFVSGQKNDHNDAIGIYKAMFNGVRRVPVKSTEIRDLQTLRRIRSQVTKDKVKEINHVRGLLAEYGIVMGKSLNAFNKDISSALEILTERGDVSPLVAEELRTTVEAIKAKIERQKKLDQEIEQLARGCKNYENFLKTPGVGPFTAAMLCVLLCDPSIFANARQFAAYIGLAPRSRGSGGKNYVTGIPSKFNCDSESRAVLVECAQAIARCKNKSLWVEEILRRKPKKVALIAIANKLARQVWAMANKGESFKQMAVLTA

SEQ ID NO: 228711 - protein, 366 aa, unidentified
MKKISTVQAFGNDIFKEQKLTIGLDLGDRWSFYCVLDESGKIILEQKAPTTTEGVKQTFARMPRSLIALETGTHSPWVSRLLTELGHEVLVAHAQKVELITKSNRKDDRHDARTLARLARIDPELLGPVRHRSAKAQIHLTVIRARAELVSARTALVNAARGLVKSYGERLPKCGTQQVSRELAAGLSTELRDVLEPLFREIESLNERIKEYDQRMEKIAKEVYPEVSLLQQVKGVGTQIALTYVLTIEDPYRFAKSREVGCFLGLKPGRRNSGESEPQKKISKEGDRYLRTMMVQGAHYILGPFGEDSDLRRWGLKLAERGGKNAKKRAVVAVARKLAVLLHRLWVSGEVYEPLRNSNRAMRAVA

SEQ ID NO: 228712 - protein, 421 aa, unidentified
MENTAARKLKQVPEGYLIIGVDPHKKRHAAVGITRDFTTRDKFKFDNTREGLEIMLRRARMEMVKLDCRGIMFAIETGGHYWRNIAYFLDEQGIPFRFINQFTLKRRREGKDLNRRKNDYRDSEVAAQLLCTGEFTESTIPQGVYAELRTAHNAYRRLVKERTRITNLIKGLLDGLFSEFTLVFKDPCGLTSLSVLSTCAIPGVIAGMTEEEFVATIEAKHQGRLMRKKLRELHHMARASIGIAAGARPVSAEISFLVEKLGLIRRHICIIERTLVSLVDETEEGKYLLSIRGLNYIAVAGLLAELGCFKAYRSAKQMIKMAGSNPTESESAGKRGSHTPMSKQGRPVLRYCAWTSVIPMLRLNPDFRTWAKQMRERPVHANPLNGREIVGAALNRLFRLAFAMVKNQTYYRLPQLVQITG

SEQ ID NO: 228713 - protein, 408 aa, unidentified
MNPLYVGIDVSSKSNVVYFMLPDGSKHSNFSVANSHTGSSQLVKRILSAMTSCSLDTVLIGLEATSVYGDNLVYFLREDAALARFNSKIHVLNPKQISKFKEAYNDLPKNDLIDSFVIADCLRFGRINKEVYIGDYRYKALQNLTRARYFAVSNLIKKKQRFMNILFKKYSTMTQEKVFSDTFSTTALAVYDEFESAEALSDMDLHELTAFIMEKGKNRFPNPDAVAKAIQKAARSSYRLPKTVNDSVNQVLSISITSIKALEAQIKEFDKAIAAQMELLPNVLISIPGIGPVFSAGIMAEIGDINRFHNQAQLAKYAGLAWKQHQSGDFEAQTTRLINSGNRFLKYYLCEAAFSLVRCDKEYSDFYHLKYKEVNRYQHKRALALTARKFVRLVFRLLKDNRLYTSAE

SEQ ID NO: 228714 - protein, 375 aa, unidentified
MSKSTVFVGMDVHAETIAVAVAAGRDQVRSVGTIANRPEAVRRLVGKLGKPAKLKVCYEAGPTGYALYWELTRLGVQCEVIAPSLVPTKAGERIKTDRRDAEKLARSYRSGDLTPVWVPDARHEALRDLVRAREAAKEDQLRAKHRLGKYLLRNGQRPAEGCRAWTAAWWQWVRALELPYADQNTTLLDYIMQVDHQAQRIELLEGAIDRAVAAAPAELRAIVDALQALRGVAKVTAVTLATEFGSFSRFERAAQVMSYTGVVPSEHSSGPKTRRSGITKTGNSHLRRVLVEAAWHYRHQPRICQRQHALQAALPPKVAAIAWRAQERLHRRYWALAQKSKPAGKIVTALARELVGFVWAIGIETEQQMQRAKAA

SEQ ID NO: 228715 - protein, 425 aa, unidentified
MNQDNQSFAAFIGLDKSDKKINVTLQRRSTARSERSIIQGGAEALHAWVAVLCARFPHQQVAICVEQPTAGLIHALMGYDFVVLFPINPVTLARYREAFTPSRAKDDPTDADLLCELVAQHREQLKVWQPDDICTRKLRHLTQARRSSVNMRTRLSNQLKALLKGYFPQALELCGDDLTTPLACAFLQKWSSLQQLKKARPETIRRFYYAQNARRGDVIEKRLTLIAQAIALTNDPALIESSIVTLQALTLGLRAVHTAIARFDREIARTFTQHPDASLFAALPGSGTVYSARLLAAFGSRRERFESAEALLNFSGIAPVLKRSGQTTIVHRRYARPIFLHQSFIEYANESIRHSLWARAFYQMHKAAQQSHWVIIRALAYKWIRILFRCWQERTPYDELRYLKSLQKSRSPLLQYLAQPNTQTV

SEQ ID NO: 228716 - protein, 344 aa, unidentified
MKITTVGIDLAKNVFQVHGVDERGKAVLKKQLRRDQMATFFVNLPPCLIGMEACSSAHHWARKLQGMGHTVRLMAPQFVKPYVKSNKNDAADAEAICEAVGRPNMRFVPVKNVEQQAVLALHRVRQGFVKARTAQANQIRGLLGEFGMIIPQGIGYIASRVPDLIEDASNELPGTFRLLVQRLLDHLKELDRQVDELEAQILAWHRSSELSCKLAQVPGIGPITASALVASIGDAKNFDNGRQVGAWLGLVPRQHSSGGKSNLLGRSKRGDTYLRTLLIHGARSVIYRAGQRTESCQWINGVVNRRNKNVAAVALANKNARIVWALLAHDRHYQAGYVRGVAAS

SEQ ID NO: 228717 - protein, 420 aa, unidentified
MDEITEEPAALVERVAALDIGKATLTVCVRVPHDDKPGARRQEVRTYATLTPALLELRDWLICQGVTLVVMEATSAYWKPPFYLLEDDIECWVVNARDVKNVPGRPKTDKLDAVWLAKLAERGMLRASFIPSRPQRQLRDLTRYRRTLTQERTREKQRAEKLLEDAQIKLSAVISDIFGKSGRAMLDALIGGQRNPHALAALAYRNMRAKTSVLQEALTGHFTDHHAFMLGMMLARIDALTTQIDTLTTRIGEAIAPFAAQVAQLDEIPGIGITAAQDLLAEIGTDMSRFPTPGHLVSWAKFAPRARQSAGRSKAATTGKGNPWLGGTLGEAATSAARTKTFLASRYKRIARRRGKQRALVAVGNSLLTIIWHLLSDPAARFTDLGPDWHDRLAPLRRKRQLIAELERLSGKKVTLNDAA

SEQ ID NO: 228718 - protein, 426 aa, unidentified
MADQNSGGTSFVAIDIGKAFHAVLVERPDGAQQRFRMANSAEDYGRLVTFLRTLPGTVRVALEPTGNFHRTLAFRLLKEGLSVVSVSSVAGARYREAMFNSRDKNDPKDATVILQLLKHGLVQHYHEPLLAGHHDLQELAKTYRQVTLARKRLADSLLNHYLPLYFPEIARYWESTRVEWFVAFLSRFPTPQAVRALSLPGFIEVAWPLIGRKINKRAKLEELYELAQASIALPVAVDSPAIDTFRLQLAHFARLAELRRELEAQAHRLLKDRPDYQCLCSLPGVASVLAMVILAEGGDLRRFHHHRQFLKYCGLDLAKSQSGQFRGREMLSKRGNALLRMAFWMAAQRAVRMTENSFRDKYERYMKQDPGNADVRRKALTAVAAKMARVAYALVKRLEPYRGYHEHALPSGSIPLTRAVGAPATP

SEQ ID NO: 228719 - protein, 325 aa, unidentified
MNKFTNYYGIDISKDVFDVFDSLDHHRQFANNPSGFKKFTCFIEPGSYCVMEATGVYHVQLADFLFEKGVYVSVVNPLVIKRFIQMNLRRIKTDKADAEMICRFAQSNVQQFYKPSPVYIRECRILQENIDLLIKSRTMLKNRLHALMHKQDKHRLIVINPIKKSIKDLSVQINRLEEEMLLLIRAHDSDLYTRLQSIPGIGKSTAMFMIVMSDGFTKFESAKQFNCFIGLSPVEKSSGTSVRGKSGISKQGNGKLRNLLFLCSFNACKSNKSCKDLYDRITSKGKSKKLALIAVANKLLKQSFAIAKSGLVYDENFRSVKPMIN

SEQ ID NO: 228720 - protein, 371 aa, unidentified
MSEITRALIARVGVDLAKQVIQVHAVDASGRRLVARAFKRDQFLAWCTQLPAGCQVAMEACSSAHYWARKLRALGLDARLIAAHFVTPYRMEGKNGKNDATDAAAICEAASRPCMRFVPVKTCEQQGVMSLHRVREGLKEERTACINQIRGVLTEFGLVFGKSSKVLRAVLADVIEDASNELSTVARLVMQRAFEHWRELDEHLRWCDKQVGQHVRASSAAKRALQVFGIGELGASALTAGVGDFKQFKSGHQFGAWLGLVPRQDSSGGKIRLSGITKRGDDYLRTLLIQGAKSTVLNADKRDDPTSRWLRQLTARVGWQKACVAMANKNARILWAVMTRDEGFNRKHVSVKPQAKRSIQTAPPGGATCLA

SEQ ID NO: 228721 - protein, 358 aa, unidentified
MSDVSKGQPQMTAGLDLGDKYSYLCLIDQQSGEIMEEGRLRTSPETFKRRFASGQPMRIAIEAGTHSPWVSRVLEECGHEVLVANARKLRLIYSNKRKTDEIDAENLARLARVDPKLLYPLKHRGEESQTHMAIIRSRQALVGCRTQLVNHVRGAVKSFGARLPKCPARSFHNKAVEHIPDTLWPALGPILEQIGSLTERIRDYDRKLEAISEERYPETKLLRQVVGIGPLTALTFVLTVEDPYRFEKSRSVGAYLGLVPARDQSGDSDPQKRISKEGDEMLRKLLVGGAHYILGPFGSDSDLRRHGEKIASRGGKNAKKWAVVALARKLAVLLHSLWISGEVYEPLRNTHRSEAQAA

SEQ ID NO: 228722 - protein, 394 aa, unidentified
MKHYIGIDNSKLTHSVFIIDENGNLMKELDIENNYSGFEKLRILLTDYENPVIAFELPHGPLIDYLRKLPYKLYSLNPLKVKRFKEIYSVSGDKTDKVDSNAIAQYIRINEKQSRELIFNSPEIETLKILGISHERFTKEHTRYSLRLMFILRQYLPLYDDLFSTSAPQILLKLVQKYPKWSDLASESKENLIHFFVANRYRKIKCMKKILQKIRDYEHCIMPEVEIALSIEAIAIANILLSLKTQLSLIEKKMADITQAHRMGEIFYSLPGAGKILATKLLGLLGDNKNRFSKANQAQSLFGTAPINYQSGGYHKVMMRRACNKRGKSILYTFAFSSLRYSKWAREYYDKQRKLGKNHSVVVRALSNKWLKIIFSMWKNNCTYNQDQQLLAVA

SEQ ID NO: 228723 - protein, 387 aa, unidentified
MIAHYIDEKFQKEFTIQNNKNGYNYLLNYLNRVNQPKLIFESTGIYSRAMVRFCRVNQINYIELNPLEAKFKTSSLRSWKTDQSDAHKLAQIAPFLNDSDSLNNTNDDIYFELRERARFHLEFENEQNRLKVEIIEILHQTFPGLEKLFKNRYSMIALNIAEIFTHPDFVQQNDMESIISTILKSTDKGLSQRKAESYGETLFKLANDSYPNVNSSSFLVKKAQLLIQKLKKSIGQLSQLDKEMIQLAQELDCFEIIYSIPGIGDLTAAMIIGELGDISRFKSNKQLNAFVGIDIKRYQSGGTHYRDTINKRGNKKARRLLFLVIMNIIRGQHRYNNHIVDYYYKLRKQPNEKSHKTAVVACINRLLKIFHYLIMKHKLYDYEISPH

SEQ ID NO: 228724 - protein, 309 aa, unidentified
MTVTIVETRVQAGAITGGVDTHADVHVAAALDPVGGLLGVQEFPATPAGYAQLLGWLGGFGTVCLVGIEGTGSYGAGLARHIAAAGVRVVEVDRADRQDRRRQGKSDPLDAVSAARAALSGRAAGAPKGRDGAVEAIRALMVAKRTARAERVQTINQARALVLTGPDDIRARFAGHATEALVAELAALRPRPGSMVRYHTLLSLRELGRRAQFLDQQLGRLDELIAPLVTARAPGLLARYGIGPHTAAMLLIAAGDHPGRLRSEAAWAHLCAAAPIPASSGKVKRHRLNPYGDRQANHALWQIVITRMS

SEQ ID NO: 228725 - protein, 359 aa, unidentified
MSKCSTKTQKVYVGFDVSEKKIATFAICGEKTSKDNPEISNDPEAIKQFLKIFPDPKNVCVVMETGTHSLWMSELIRKQGFEVIVAHARDLALIYGTDKKNDQLDAEKLARLAQADRKLLHPVEHMTMERRTDLMVVKSRDLVVRQRVQTINAIRGFLRSCGCKMIEAGYTADSIKKCCSALPAEVKPAIIPLLQHICYCDRIIKDYDRQIRKLCQKYHETDILRQIPGVGELTALAFVLIIGNPRRFKNAQRLCAYLGLVPKQDQSGDTDKQLGITKQGNKLGRRLLIQASHYIMGPFGKDCKLRSFGQRIQSRGGNSAKMKSFVAVARKLVTVMFALWMNPDVPYDPNFKKHGKAAA

SEQ ID NO: 228726 - protein, 318 aa, unidentified
MNVIGLDVSKDTIDATLITTKGSKDYIKISNSTEGFENLINWIKTKRIRKIAISMEATGIYYEQAAEYLSALYTIFVINPLKIKEYAKSQFSHTKTDKADSKLIAEFANRHLDKLTPFRSSENPILYKLVNLLQQLKEQQKETLNRLHTAKDIYIKSTHEAIIELLEEKIDQTSKRIEGMIKQKESLNIEYQNLQTIPAIGKETAVILLRHLTDKNFETANKFVAFAGLSPKIEQSGTSVNKKGRLSRYGHRQLKRALFMPALVAYRMNAFPQLVSNLEAAKKPKMIIIVALMRKLAKIAFYIHKTKKPFDKARHQMV

SEQ ID NO: 228727 - protein, 369 aa, unidentified
MMIAVGMDVHKNMSTAYAVYAGNGEENEKHRRFLNSFNTEFSEFPSTIKQVEKIAAFMRGHECHVLLENSTKTHDVYWMLKNKGIDVTVAQAQDLYRITRSVKKTDHNDSVELAGYMRRRLHGENEFAECFIPSPEWMTKRELCRGLSAEKEYLADTKRRIRAHLLLHGIHLAKEYSDITCKNALAELSSIKDPYLMMQVRFATAAAERISIGERTLLYLFSNDKMFDLISSIPGFGTISTAYMTSLIVDIDRFPSSSKFTASFGVVPKMRSSAESNPRCSTTHRGDDLARYLLMFNVLAHVKHDENSVVTKMYRRLVNNGKAKREAMVAASRKLLTVLYSVLKSGIPYTSDQERLRLAKETEEEEKDI

SEQ ID NO: 228728 - protein, 339 aa, unidentified
MKVTTFGLDLAKRVFQLHWVDVETGEIGRRQLKRAQVLEWFANRAPAVIAMEACGSAHYWARKLTGLGHEVRLIGAQFVRPFVKSNKTDAADAQAIWEAVQRPGMKFVAVKSEAQQSVLMMHRMREQLVKMRTMQINQLRGLLYEFGVELPQGRANGVARIPAELVKLDGVLPAMVVETIRGQLQRIAALDQDIGQIEKKLKLWKKDDAASKKLMDIPGVGLLTATAAVATIGDAKAFKSGREFAAFVGLVPRQSGTGGRVKLLGISKRGDVYLRTLLIHGARAVITHGKEREPWLEQLLARRPLNAVVVALANKMARTIWALLAHERTYQKGYVARVA

SEQ ID NO: 228729 - protein, 349 aa, unidentified
MQSKSQIRSIGIDLGKTTFHLVALGTRSQVVIRKKFSRSQLLEYTANLPSSLIGMEAGVGSHFLGRALREQGHEVRLIPAQFVRPFVKSNKNDYRDAEAIAEAVERENMRFVPIKTEDQLDLQALHRVRDRLVARRTSVINQIRAFLLERGISFRKGPASLRRQMPEILENVDARLSTAMRRLLDFLWQEWKGLQLQIESLNTQLEQIASSDPSCVRLQQIPGVGPLVSTAVVSAIGNGAAFKKGREFAAWLGLVPRQWSTGGKAKLLGISKRGNPYLRKMFIHGARAAVLRVKREGSSLGKWMSGLETRTARNVVIVATANKLARISWAVLATGNDYQPLHKAVVFSN

SEQ ID NO: 228730 - protein, 349 aa, unidentified
MTEQRRSYAGECVYVGVDVHKETYTVTCVCHQQIVKTATVQAEPAGLAASLLRWFPGATLYSAYEAGFSAFVLHRVLTTAGITNIVVNPASIAVAANDKVKTDRRDAKKLAIDLADGRLRGIYIPTEAEELARLLPRTRAQIVEHRATIARQIKAKLHPFGLIALSSRRRISNRYLREIAAWSLAPELRVSLTLLAEQWRFATRQLIEIRRLLQEQAAAQAELETVYRSVPGIGAVVARTLATELGDMTRFANERALFSYTGLTPSEYSSGASVRRGHISRQGSGRVRHLLIETAWRALPRDIVLQEIFDRIAATRGKKRAIVAIARRLTGRIRACFRQGTTYAVGTYA

SEQ ID NO: 228731 - protein, 351 aa, unidentified
MERYIGGDVHAASVTFSVRNEAGKIVRRDVVETNGQALVGYLSQQAGNVHLCIEEGEWSQWLHEILSPHVAEFVVHRAQWSPGSKSDRHDADGLSERMRTGKVGVPVYKDRKQFGALREASRRYTMLTRDQARVKSRIKSFYRSRGIPCAGEAVYKPGVREERMEALPVSQQATLGLLGRELDALVALQGEAEKAMVHESHRHPMARILETAPGLGPIRVAQLLPIVVTPWRFRTKRQFWSYCGFGIVTRTSSDWVQEQGRWVRVPVRRTRGLSFSHNRQLKWIFKGAATTVIAHSDANPLRDHYDGLLAGGTKPNLAKLTIARQVAAIVLALWKTNERYDPEKVSGPQSG

SEQ ID NO: 228732 - protein, 355 aa, unidentified
MAHSSYNPRNYETFIGLDVDKNSFSFTINDQFQMRKSKRIPSNPEHLYNYIQKHFKHKNVICAYEAGPTGFYLHDYLSANGVSCLITSPASIPKASNEKVKTNRIDSLNITDYLMSGKFKPIRVPQGVYRELRDLVKICENYAKDRKVAKQRIKALLLYSNLYPALKDPHQNWSSNYINDLKQIECSFAVRQRLNMLIEDLEYARRKLLSVHRTIKSFCRDHDEINQYIHYLNSIPGIGFTIAVMLLGKIGDPMYLQNPRELAAFIGLTPKESSTGDDINRGSITQMGDKTLRFLLVEAAWVAIRKDTQLDQFYHRIRNKNHPKAASKIAITAVARKLTQIIYRVLKDKREYIKH

SEQ ID NO: 228733 - protein, 343 aa, unidentified
MKLMRIGVDLAKNVFQIHGVDCHELPIWRQRLPRDRWLQTVLKKIEPGCEIGMESCGGAHHWARQLQARGFRVKLIAPQFVKPYVKSNKNDANDAEAICEAMSRPSMRFVAVKTIEQQDIQATHRIRAGLIEQRTAKANQIRGLIAEYGLVAPKELLILRRAIPCWLEDADNGLTARFRRLLNGLWDDLRALDERVGQLDSEISAIAASEPTAIRLQQLRGVGPMIATALIAAIGDARQFANGRQLAASLGLTPKQHSSGGKDRLLGISKRGDAYLRTLMVHGARSALRTAKSKDDRLSQWVVRLAERSHPNVAAIALANKTARMAWAMLRNDTDYQPDRAAA

SEQ ID NO: 228734 - protein, 394 aa, unidentified
MIIIGIDIGKNKHEATLIDEKGNIIGKSIKFENSTAGFNKLISSINNYNISNDKFVFSMEATGHYWLALFSKLVESDYNVQVINPIQTDACRKFYIRETKNDSKDSFLIAQVTRFNGYSKTTLPDEVMISLKELTRFRTFLVDDISDYKRKATVVLDKIFPEYTQIFSDTFGKTSKEILTKYPLPKDILNEDLESLAKVLSTSSKGRLGYSKAEQLQNLAKESFCIKFATEALVMEIKSILSTIEHLQNQVSKLDEKITVLLRSLGTTIETIPGIGPVLGAIIVSEIGDINRFSHASKLVAYAGIDPTVKQSGEFNATKNRMSKRGTPYLRRALWTASIVAAFNDPNLHEYYLKKKNEGKHHGTIIGAIARKLIYRIFIVLKDNIPYQCNKCEA

SEQ ID NO: 228735 - protein, 422 aa, unidentified
MKKHMYRTTDVRVADWAMIGKQTHEQHIVFGVDIAKEDMVGVLMRQDRSVIVTLKWQHPQESKALIEQLATKLELASLEVVQEPSGTYGDALRLLFQKAGLPVFRVSPKRTNDAKEVYDGVPSLHDAKSAYIIGRLHLDGASGLWEELPGQRRELNALLGVLDMHQKHFEHNRNRLAALLSRHWPEVTSLLEPASVTLLALLTAYGEPRQIAANKEQAGKLMRRIGRIGLSQKKLKQVLASAGSTIGVPCMDAELYWLRELAQEARRGQVAVGKAKKVIEAMVSSDPTMKNMGLVLGKTSAAVLVAKQGSPLEYPSTGSYLKSLGLNLKEKSSGKYQGQLKISKRGPSMSRKYLYFAALRLFQREPIVNAWYQDKVRRDGGKKSKAVTALMRKLAKSIWHVARGETFDAAKLFNVQTLRLTV

SEQ ID NO: 228736 - protein, 387 aa, unidentified
MYFVGIDISKFKHDCAIIDELGDVITPSWSFHNDREGFSLLRELLDALEGEKKIGLESTGHYGQNLKLFLENNGFSFMEFNPLLVNRFVRSKSLRKTKTDSIDALMIAQYLMTVEYKPYPSSFYHTEKLKSLTRFRDSLIRQRSKQLVELTNVLDKVFPEFKPFFKGKFSVTALYILSHYTSPEKISNMNSKSYESLRRLSRGKFSMVNFVELKTLARNTVGSTRDYLLQEMEIIIDIYNQLQSKVEEVEQLINDCVLVLDPPMLTIPGIGVSSAAVILSEFGDLSKFDSPSKLLSFAGLEPGYFQSGISESVGKMVKHGSSHLRYAIMNCAQTVINNEPTFAAYYAKKRAEGKEHRIALTHVAKKLLRVIYTLQTKELPYNPDLIR

SEQ ID NO: 228737 - protein, 373 aa, unidentified
MGKCKRYVGLDVHAATIAVAISERRGQARSVGVIENSPAAVKKLLKKLGDRKTLRVCYEAGPTGYGLYWQLTKLGIECDVVAPSMIPKKSGDRVKTDRRDAEKLARSHRAGELTAVWVPDLAHEALRDLVRHREAARSDTSRAKQRLLKFLLRHGKRCESRAWTHPWWRWVQKERFDFVAQDVALEDLIAEVLRQQQRVERLDLAIDKAIDNAPAHMQAIIEALQSMRGIARLTAVTIATEVGTFARFTHPRQFMGYGGVVPSEHSSGSRQRKGAITRTGNAHLRRVLVEAAHHYRHRPWLNNRLKKVHEHQPAEIVEMAWKAQVRLHRRHFALSARGKPAGKTITAVGRELLGFIWAIGSYAEQHAEEHKAA

SEQ ID NO: 228738 - protein, 338 aa, unidentified
MTIETLAIDIAKNVFQLHGVNGNGRVILKRRVMRNQLLEVLAQVDPCTMVVEACTGAFWWARKFEALGHQVKIISPQYVKPFVRRQKNDGNDAEAICTAARQPHIPFVPKKTVEQQDIQALHRARQRMVNHRTAVVSQIRGLLLDRGFPIAKSITCARRLIPELLADLANELTPMARDAIADLYDLVRDLDRRIASFDKKIEQVFRGNESCQRIAKIKGVGPKTATAIIAAIGDGAEFKNGRHMAAWVGLVPRQFSSGDRTTLMGISKRGNQHLRSLLVHGARAVVRTAPCKTDLNSQWVNQLRERRGFNRATVAVANKNARIIWAVLRTGEPCRAAF

SEQ ID NO: 228739 - protein, 358 aa, unidentified
MRIIGVDLHTRQQTIAMLDPETGELVEKTLKHEGEAVRQFYSALPHPVLVGIEATGSMYWFLELLEELGIERQVGHPTEIRAAEPRKQKHDRRDAALLLKLQVENRFPSIWMPSAELRDLRALLRHRHQWVRMRTRVQNTLQAIALSHGLRRGPSLWSQAGQQAIASLQLTPHAAQRRTELQALCSRLDKQIDELSERVMDQALQRPGAKLLMTHPGVGPVTALATDVFLGDPARFDNGKAVVSYVGMIPSEYSSGGRQRLGGLSKQGNPLLRFLWCEAGIHAVRQDPELKRFCRHKLQQKGLGKTRVAVARKLGIRLWIMLRDQIDYQEFCRRGQMRQKSGGARAGMPERVHSPARS

SEQ ID NO: 228740 - protein, 381 aa, unidentified
MTTAAAHNEQENTLEATLFVAFELSEKTWKLGFTTGHGQKPRERTVTARQQERVLDEIVQAKRRLGLPETATVVSCYEAGREGFWLHRFLQGHGITNHVVDSSSIEVNRRRRRAKSDGLDVRKLLSMLMRYHHGERHVWQVVKIPSVEAEDQRHLHRDLETLKQERASTMTRIEGLLSSQGLRVTSLTKLPEQLDALRLWDGSPLPPGLRRRVLRVYAQYTFLSEQIAAVEAERRALLQTSPEASIDKVRQLMQLKGIGINGAWLLVMEFFGWRAFKNRREVGALAGFTPTPYQSGESAREQGITKSGNRHVRWMTRELAWSWVRFQPDSALSCWFRERFGGGGKRLRRIGIVAVARKLLIALWRFLETGVLPAGAVLKEG

SEQ ID NO: 228741 - protein, 334 aa, unidentified
MQQQLSVVGIDLAKRVFHVAGMDDKGKIVLRKRLTREALLPFITRLSPVVIGMEACGGAHYWARRFREHGHTVKLIAPQFVKPYVKSNKNDPADAEAICEAMTRPTRRFVPIKEVEQQDLQALHRARERVVKARTALVNEIRGFLGEYGIVLPQSVTKFRSGFLATLEAERAKLTALGQELFGQLYEACGALEKRLAYYTAKLEAISAAHPVCQRLETIPGVGPLTATAMVAAVSDVTHFQNGRQCAAWIGLVPRQHSTGGKPRLLGISKRGDVYLRTLLIHGARATLRWIGLKTDRRSQWGFCRKFCSEGHAGAVALVCAEIKQRESRTVRPQ

SEQ ID NO: 228742 - protein, 355 aa, unidentified
MSDVKFIGLDVHKTSISAAVLDGSGKLIMQAVLLTNAAAVLGFVRGLRGSLRVTFEEGTHAAWLHRVLQSEVAEVVVCNPSKNALLKSGNKSDQIDARKLADLLRANLLKAVYHDDSRTLTLKELGRTYRSLTDDTTRVMRRLKALYRSLAIDTGGKKLYTRRHREQWLSQLKQPGQRYRAERMFEQFDQMKALRRQVRGDLIEEGHQHTATALLSSIPYVGPIRSALLIARVQTPFRFRTKRQFWAYCGLALETRSSADHQVIAGELKRKTKPVFIRGLNLNHNPDLKNIFKSAATTASASPGPFRDFYENLLTKGMKPEMARLTLARKIAAISLSVWKKGERFDPEQLKTQAA

SEQ ID NO: 228743 - protein, 406 aa, unidentified
MEVVHPRCSGLDVHKKSVVACVMVPGRKQVRTFGTVTAELLRLADWLQEEGVTTVAMESTGVYWKPVFNVLETTGLELLVVNAQHIKAVPGRKTDVKDAEWIADLLRHGLVRASFIPSRPQRELRELVRYRKTVVEQRSHLVQRMQKLLEGANIKLSDVASDIVGVSGSAMLRALAIGESDLDRLVELAKSSLRNKREELRLALEGSFGSHQRFLLGKQLDQLEFLDRQIADLNLEVEQRLRPFEALLARLDAIPGIGQRNAEQILVEVGTDMSRFPSAAHFASWAKLCPGNDESTGKRRSGRTGLGSRWLRSTMVEAAWSASRVRNSYFAAQYHRLVPRRGKRRAAVAVAHSMLIAIYHLIKDGTIYQDLGPNHFDELDRQRITHRAVRRLQALGYQVTLQEASA

SEQ ID NO: 228744 - protein, 356 aa, unidentified
MKIHKVQEFVVKNKEVFVGLEDSKTTWKIAVRCERQLIHQVSMEATYPVLIRYLRNKFPECTIHLIYEAGFKGFNLYDKLTEDGIDCVVIPPHMVTEPKVNKVKTDKRDARRLALILENHDFKDPCQVPDKERREDRQVTRTLIAIQKDIIRTRNRIRKLLDFHGIEVPFPDRWGRDEFRALKKLSLSEPLRISLDVLLTELEQLWAHQTTLRTALRALCKKERYKKAYDIARSLPGIGWYTAIRFVLELGEDLSRFTSGKKIASFVGLACSEYSSGETEHKGGITGMGSGFIRATLIENSWAAIKKDPVLLAKFSRVWKASGNRKKAIVAVARVLIVRLRACILSGTPYACGVVA

SEQ ID NO: 228745 - protein, 450 aa, unidentified
MPKKRQNREVKLPVLRPDAAGIDIGAEEIFVAVPADRDSQPVRRFPTFTQDLNALADWLTKCEIRTVAMESTGVYWIPLHQILESRGFEVYLVNAQYVRNVPGRKSDVSDCQWIQYLHCVGLLRASFRPPAEICAIRSLWRHRESLIQMASQHTQHIQKALDQMNLQIHHVLSQITGWSGLRILDAILDGDRDPVALAELCNWRVRTSRDIVAKALEGDYRPEHVFTLKQSLAGYRYYQNQIAEVDEELNKYLRDLPNAVEGQASPPPRTKTRVYQKQHNDPAFDLRGELYRIVGVDLTDIPGINELTAHTIVSEIGTDVSRFRNASAFASWLGLCPEKQVSGGKVLYTKTRPVKNRIANALRLGAHCLYHANNYLGEFFRRMRRKLGAAEAVTATAQAGANLVSRASNQRGVQRERVSAPRPGSDQTSGGQTPQTGCQVGVPDCPPATK

SEQ ID NO: 228746 - protein, 361 aa, unidentified
MIMSFTKPIEHANLITKEGNLMNPLYVGIDVSIVHFMLPNGDKHSNFSVANSHDGSTQLVKRICSALTSESLDTVSIGLEATSVYGDNLVYFLREDASLASFNRKIHVLNPKQVNKFKESYNDLPKNDWIDSFVIADCLRFGRINKEVYIGDYHSKALQNLTRARYFAVCNLTKEEQRFMNVLFKKYSTMTQEKVFSDTFSTTALAVYDEFESTEALAYMDLQELTAFIIKKGKNRFPDPDAVAKAIQKAARSSYRLPKTVNDSVNQVLSISITSMKALESQIKEFDKAIATQMELLPNVLISIPGIGPVYSAGIMAEIGDINRFNNQAALAKYAGLAWTQHQSGGFEAQNTRLIHSGNRF

SEQ ID NO: 228747 - protein, 401 aa, unidentified
MQTVRDNTSRVKRFRELKATLRTNRTRLLVGLDIAQAEHVVHLRHAHTRVVTPALPIPNTTRGFAQLWARIQQAQRATGCREVVCGLEPTGTYHEAVARFLEGQGADVVLVSSAVAYWNRRTQDGTWDKHDRKDAANCADLLEQGKVLFYSQPDGPLAELRRLVKCLRRARAELASCKARWRTTLRPALGPMGEPLPNRLRAELPVVLQAWEPGGAGRPAVPKGRLALGLATACADLGAQVTAVQARIAAIEQALTPLAERLPAYPLLRTIPGIGPTVGAILLAEIGDIAWYTKFSQLRKLAGLDIVRVQSGQFAGQARISKCGRGLLRWALYHAAMGMARTTAGRARPAAFKAKRQGDRYAGFKAIVELAAKVLRVVWGVWRSGTPYDPLRTGGLRRQPR

SEQ ID NO: 228748 - protein, 334 aa, unidentified
MDEHGSIVDEFKFENSFEGISYLTGKAKPGPAKAVVESTGNLWIRIYEALESIGVEVKLANPFKTKAIASARIKTDKLSARILAHLLRGDLIAECYVSSKETRKVNALLRQRASLTRNQTMVKNQVHSLLDRYDFKSDWSDMFGVHGMEWLRGLQLDPVDRCILDTHLRHLECLRRETGILDSEIAAKASESQEAKLLMSFTGIDYYSAMLVTSEIGEISRFPSSKHLVSWIGLCPSLHQSGNSTYMGKMKKDSNRRVRSILIQAAETASIHDPRMKTLYDRVAARHGHNKAIVRVANKMTSITWHILTNKEPYHQTKDRLYTSKLKNLTRVAA

SEQ ID NO: 228749 - protein, 369 aa, unidentified
MGEYSEAFVAFDVAKTKHAVAIADGGRGGEVRFLGDVESSPTAVERLIRKLAGRYGKVHFCYEAGPTGYGLHRQIEALGHACLVVAPALIPKRPGERVKTNRRDAVTLARLHRAGELTGVWVPDATHEAVRDLVRAREAAVDDRRRKRQQLLSFLLRHGRLYSGGGHWTLAHRRWLAKQGFEHPAQQIVFQEAIDAIEDANQRLRRLEQQLAAIVPSWSMAPVVEAYQAMRGASFVVAVTFAAEIGDVRRFDNPRQLMSFLGLVPAESSTGATVRRKGLTLAGNRRARRVLVEAAWTYRYPARVGETMRVRLEGLPKAVRDIAWKAQIRLCARYRRLSAAGKKLPVVVAAIAREMAAFLWAIGREVAPA

SEQ ID NO: 228750 - protein, 467 aa, unidentified
MSATKGRRPQRRRRTAGQLPPGFEQVNLSAAGIDIGAESHWVAVPVDRDPTPVREFSSFSTGLQALVEWLVNCGITTVAMEATGVYWVPLYELLEARGLRVVLVNAKHFKNVPGRKSDVLDCQWLQQLHTFGLLRGSFRPEAAIVTLRTYLRHREMLVQASAQHIQHMQKALTLMNLQLHHVLSDITGETGMRIIRAIVGGIHDPVELAKFRDPRCHASPEKIAAALTGTYQADHLFVLQQALELFDVYAAKIQACDRAIERTLGALPPKVDIQQTPPPAARPLQKPRGHQMRIRVREPLYAAAGVDLTQINGIASHTALAVVSEIGTDMTRWPTEKHFTSWMCVAPGTKITGGKVISSRTRTAANRVATVLRTAAASLLRSDTALGAFGRRLAARIGEAKALTALTRKLAVHIYNTIKLGRLYKDPGSAAYDSQHRSRVIRSLTKRARNLGYELVRIEPAPASTVS

SEQ ID NO: 228751 - protein, 415 aa, unidentified
MALKIVYKICCGIDIHKNFVVACIAKTDMQGVTTYERHHFSTYTKGLKQLLKWLLDRNCKDVCMESTGKYWIPVYNVLEHDCSIVLAHPKYVKAIRGKKTDKKDAKWIADLFKHDLVAGSFMPPADIRQLRDLMRYRFKLTCFKSSEKNRYQNCLTVSNIQLASVVSDTFGKSSQKIIAKILENPDDTSFDIGSLIHGSMKDKLPELELAIDGYITPEQAAKLKIIKEHFDNLEARKAELEELILALANPYQQEISIILTAPGFKNTFTAIGIISEIGTNMEAFPSAKHLCSWAGLTPANNESAGKKKSVRVSKAGCYIKPLLVQCANAAFKSKKHPEIRDRYLRIKKRRGHKKAIIAIARMLLTALYHMLKNGENYNSDLYQKSDILPTTREITVEQAILMAQFQGYRIKSATD

SEQ ID NO: 228752 - protein, 337 aa, unidentified
MTIVFVGIDLAKNVFALHGVDEAGKARLVRPAVRRDQLLETVAKLPPCTIGMEACSGAHHWARQFMAFGHTVRLMAPQFVVPYRLSGKRGKNDKADAAAICEAMQRPNMRFVPVKTELAQARLAVHTVRQGLVAGRTATINRLRGVLSEFGQVMPLKAKTVRLEAATRAEALPQWAQTACMDLLAEIRRLDEQIDTYDQHIRLMAQADERSQRLMGMPGIGPTTASALLAAIGNGHDFDNGRQVAAWLGLVPGQYSSGGKNRLGHITKAGDSYLRTLLILGARAVLAAANGKHDRISRWAQALAERRGYWKAVVAIAAKNARMAWAMLAKGEAFKPA

SEQ ID NO: 228753 - protein, 345 aa, unidentified
MGPMYYIGLDVHKQKISFCVKDSSGKLFAEGWIPATRFDLDRWMNTLPQPWSAALEATMFSGWIYDHLKTHAAALKVAHPLMLRAIATAKKKNDRIDASKICDCLRCDFLPESYMAPTAIRERRRTLRYRNLLVRQMVQMKIKISSLLMEAGVSYNKHKLHQAGYFRELLATNLDINEGLRPLLQLCRETVVRLSKTENGLVRSLREDPVLQYRVERLMSIPAIGPITALTWALEIGEVHRFSSIKKAISYCGLCGDEQSSGNAVQRTPISKQRNKHLQTVLIEAAKMAPRYSPTLALLYDREKQKGNANRATLAVARKLGAYLVAIDRGQTHFLILDQETQTAA

SEQ ID NO: 228754 - protein, 366 aa, unidentified
MRKISTAAAKQMKNLRDQKLTIGLDLGDRSSWYCVLDAAGEVLLEQRLGTTAKAMKEVFGGMPRSRIALETGMHSPWVSRLLGELGHEVIVANARNVRLIGESRRKDDRLDARTLARLARIDPQLLAPVKHRSAQAQVHLSVIRARAGLVRARTALINTARGVSKSYGERLRGCNPRNLNPEKAEGLSPELQAALKPLLAAIESLSEQIEEYNERIECLARENYPEVALLKQVKGVGTLIALTYRLTLADPYRFGKSRDVGCYVGLQPGRRNSGQSQPQLHISKEGDPYRRTLLVQGAQHILGPFGADSDLRRWGLKLAERGGRNGKKRAVIAVARKLAVLLHRLWVSGEVYEPLRNSGQLVAAAA

SEQ ID NO: 228755 - protein, 338 aa, unidentified
MEAYAGIDLHSSNNYIGIINQDNEKLFGKKMPNDLNRIISVLEPYKTDLKAIVIESTYNWYWLVDGLQEQGYPVHLANPAATKHYEGIKHTDDKWDSYWLAELKRLNILREGYIYPKADRPVRDLLRRRMLFVKNKTMHVLSFQSMITRQLGIQMSGREIYSLSPENANDLFDTPNLAVMARNSIETILFLKKIVNKIEKDVISQVKVRKEFELLKTIPGIGDILALTIMLEVGDIRRFLKVGNFSSYSRCVNSVRLSNGKKKGENNRKNGNRYLSWAYVEAANFSRRFCPKAQRFFQRKMAKTNKIIATKALSNKMCRASYFIMRDQTPYDVDKVFR

SEQ ID NO: 228756 - protein, 419 aa, unidentified
MLTARWFVGIDWATEAHEVCVLDPEGQVCDRRSVPHSATALQAFVDALLERAHGDASTVAIGIEVPRGALVDVCVERGFGVYAINPKQLDRFRDRFTAAGAKDDRRDAHVIGDSLRTDPQAFRRVRLDHPLVIQLREWSRVDEDLAGDLTRMTNQLRDLVYRIAPGLLTLCPAADERWLWTLLRDAPTPADQRRLSLRRLERLLRDHRVRRLEAAQVREVLQQPSVYTAPGVVDAVAAHIQLLLPRVDLLAGQRRDAEKQLERLLDALDAQEPAAGDQREHSDVAIVRSMPGIGTRVAARMLAEASQPLVERAYHVLRATMGVAPITKQSGRRRTVSMRYACNARLREAGYHWARTGAQKDPASRAYYAQLRARGHSHGRALRSVADRLLRVLMTLLNHGQLFDLTHGQHAPAAIGAGA

SEQ ID NO: 228757 - protein, 345 aa, unidentified
MSDKILKYSSGIDVSGDDFKVCFNQIDYEQRIKVKGTRSFPNTLSGYQSYDSWLQKKHKDKTISLTITLEATGVYHEKLAYFLHQKGYRVSVVLPNKAKKYLEALGLKSKTDHLDAKGLAQMGAEQRLEAWEPFSEHIYELKTLCRHRARLQKLKTLISNQIHAHEHMGYITKAVIRQLKQTFKSFEKQLLKIEQEIELTLKKEEELDRKVRLIADSISGVGLMTVVTIVSETNGFRLFTSQSQLTSYSGFDVVERQSGKRSGKTKISKKGNKHIRKALYFPSLNVVRLQTGTFSQFYSRVYERTAIPMKGYVAVQRKLLCLIFALWKKDQAFDPNFHKLEQEVV

SEQ ID NO: 228758 - protein, 407 aa, unidentified
MMVGIDVSLRSHHVQFMDENGTSLSSFSVSNDRLGAETLVKRIENCVQKRKSTKMSIGMEATSNLGWHLAHYLRNAFADQNQVTTQVYMINARKLARFKKGYDNLPKNDRIDAWVIADHLRFGRLPHEMKDIVQFDALQRLTRTRFHIMHSITRDKTFFLNQVFLKFPSLRQDNPFSASFGATSLAVIQELEPEQIASMSIEDLIDFLQDKGKNRFHNAEEIATYLKKIARASFRLDKAMADPVNLSLSSTLSIIKHMEGEVKKLDKEISKIVNTIPQTLSSVKGIGPVFTAGIIAEIGDVSRFKHHNALAKYAGLVWDQSQSGEFEAEETRRMRTGNKYLRYYLIQAANCVRKHDSEYKAFYAKKYNEVPKHKHKRALVLTARKLVRLVFTLLKTKQLYIPPERRG

SEQ ID NO: 228759 - protein, 323 aa, unidentified
MQGKVPSEHSAETKIYAGIDVCKAWLDVHLHPIGQAFRVANTPAGLKALKRRLAGMRIGTIVMEATGKFHRLAQRHLYAAGHPVAVVNPKWTLQFAKAIGQFAKTDRLDARVLALYGESIGPRALAPAPEALEALQELVNARTAAMAEQTALSNRQGTSQTAFLKAELTRRLKAIAKHVERLEAEIARRVKADPVLQHRIELLLTIPGVGLVTAMAMAIGLPELGSCTGKAASLLAGLAPLADDSGQRTGERYIRGGRASVRSALYFAALTASRFNPPLAEDYNRLIAKGKEAKVAITALMRKLVVLANTLITEDRPWQPIQP

SEQ ID NO: 228760 - protein, 350 aa, unidentified
MIIIGVDFHPEFQEIASVDTETGEYQEKRLAHPEEAEQFYRSLAAVSKAVRVGMEASGHGRWFERLLEGLGLELWRGDAEVIRAKRGRKQKTDREDARHILKLLLKDDFPRIWVPSWENRDVRQLLWHRHRMVQARTRVMNQLQAVALNEGLRCKKRLWRAGGRQQLESFQLAPWASRRRRELLELLDRLNPTIAELSQAIEQEAEKCPEAKRLKTHPGVGALTALAFVLIIGEAERFGCGKQVASYLGLVPQEESSGNRRRLGHITKQGSSIVRFLLVEAAQVTVRSLPEWRSKYHHLMMRRGRKTAKVAMARKLAVRLYWMWRKGWDYEQWKKFGSHVGQSGNRYGVQ

SEQ ID NO: 228761 - protein, 347 aa, unidentified
MNASAKVVGLDIAKDVFFAVGLDGNGKPVFKRKLSRDQVLAQFAQMAPAMIGIEACAGSHYWARKLVEMGHDAKLIAAQHVRAYVTGNKNDMNDAAAIAEARSRGATKYVPINTVAQQDLQMLHRARSALMTERVAMINRIRAFAGEYGQVFPKRVERFRDGLKAWLNDPGNGLSGMALETFRELKAQLDDKDERILAYDRRLNQAAKSELAKKLMKVPGVGPLTATAVQATIADPHHYKSARDFAANLGLVPREHSSGGKQRLFGITRRGDSYLRTLLIHGARSALRTANGKPDKLLQWAAKLAERSSFNVAATALANKMARVIWALIAHGRAYVPAWSKDTPRPA

SEQ ID NO: 228762 - protein, 429 aa, unidentified
MQESSSSAPAEGVAAYVGMDWADQRHDVILRAASEPAKVEYRRLPQQPEALMEWVAELQQRFAGKGKILVALEQSRGALIYHLMGYEFLELYPINPSQLASFRATFSPGGAKDDRPDAELLCELLYCHRDRLKAWKPDDELTRKLTFLNEGRRKAVDQRTQLANEIKSQLKVYFPLALEVLDNDCSTALAADLLLQWPTLDSLQKQRAHKLRKFFYAHNCRQEQKLLERLELIKAAKPLTRDLAVIEPTALRVQLLAQQLKSLLPYIARYEKQIAELFDAHPDSFLFRDLPGAGSAMAPRLLTAFGTDRERFEHSMEISSLSGIGPVRRASGKKSGKHATVHFRSACPKFLRQSFHEFAACSIRYCSWAEACYETQRKRGKGHHAAVRAVAFKWIRILFACWKQRVPYDPQRYQQTLQTRGSEYAKITA

SEQ ID NO: 228763 - protein, 452 aa, unidentified
MSPTSAAPLPLGIVHPHAAGLDIGKDEIWAAVPAGAQTPAVRAFGTFTPDLLALADWLAAAGITTVALESTGVYWIPIFELLEARGLEVCLVNARHIQNVPGRKSDVQDCQWLQQLHSLGLLRASFRPEAELVALRAYLRQRAMLIEHRAAHIQHMQKALLQMNLRLTQVLADITGTTGQAILRAIVAGERNPRKLAALRHHRCAQPEPEIAKALTGSYRPEHVFALKQALALYDTYTAQLADCDREIAQHYATLKPRFDPDDPDQPLGPDAKTNTHSKNAPDFDVRRELFQLVGVDLTVVPGLHVSSVQQFLAEVGTDMSKFPTVKHFCSWLGLAPHNDITGGRVKRSRTLPTHNRAGQVLRVAAQAVGRGRSGLAAYYRAQKTRLGAASAITATAHKLARILYHMLKDRKSYQPLTQEAFTHQHQMRERRALEQRAAKLGLRLQPEGAAI

SEQ ID NO: 228764 - protein, 351 aa, unidentified
MNILAMDLSKSNTVTCFYDSQTGKSKYGKVKTTPQQIHDLIVKYSPDRIVFEICSAAGWVFDTADGLCADIQVANPNTQAWRWKNVKNKNDRNDALKLAQLSAMNQLPMVHMPKPAVRQKRSLIQYRQTLVARVVQIKNSIRSILDKQGYSITRGKSGWTKKQVEFLKGLSLPIERCDIDNLWRGQLYVELEMLCSAQKALADVTGKLDDMAKSDKNIRLLQTAAGVGPRLAEAIVAFIDEPERFKSGKQVGSYAGLTPRQYQSGSMNRQGKISGQGNKLLRALLVEVSWLGLRHNKWMNETYHRILRGSPSRKKIAITAVARKLLVRCWAMLRDGRPWRDIEAETEKQAA

SEQ ID NO: 228765 - protein, 332 aa, unidentified
MVSTLIPVGIDVSKATLHGAILPPDRPKPYYQTFENTDDGYVAVQAWLVEHGVTQAHVCLEATSIYGHGVATALHQQGHRVSIVNPVRVHGYAKSQLKRTKADRADATLIAQFCRDLKPNPWQPAAADIQALQDYTRRLDALTEMLTQEKNRLAICPDALKPGIERHITFMEEEIKALKKQVREHIKAHERLQTQAELLISIVGIGPDTAARLLAELGDLSAFGSARQLAAYAGLTPQEHTSGTSVNGKTRLCKIGNARMRKALYFPAIAFLRCAPELQPWQDRLKAAGKTKMAIIGAAMHKLIRIVYGVLASGQKYDPAKLLPPKAPTANP

SEQ ID NO: 228766 - protein, 435 aa, unidentified
MIAAEIENCAGIDVGKRWLAVCTLVGPVNAEPRKELRRFGTNVADLEGLRDWLVQEGITHAVMESTGSYWKPVFNILEGALTVYLVNPHQVKARRGHKTDNKDGYWQAHLLRHAMILPSFIPKRGIRELRDLTRRRKKLLGTASSEKNRVQKVLEDANVKLGNVLSDLFGVSGQLMLDALLRGKAQPQEIAQCAKRSARRKIPELIAALEQHGMSDHHRRVIRLSVDHMAFLEKQITELDEAIMAKIEEEDLVRQWELLQSVPGISPTSAATILAETGADMQQFGDEQHISSWAGVCPGNNRSAGKSKSSHTNKGNPWLRSALTECAQGAVRKKNCFLKDKFWRIATKHGGKRGPAVIAVAHTLLRFVFQVLATGQPYREQGASPLTPQQQERMIRHHIRRLGKLGVAVRVGPAPRTAPKPKVSRKRSAVVHANA

SEQ ID NO: 228767 - protein, 315 aa, unidentified
MSPIFVGIDVSKARLDVAIGRSGERESVVNDEAGIKTLLKRLGEIKPALIVLEATGGVERSVTRALASAELAVVVVNPRQVRDFAKATGQLAKTDRIDALVLARFAEAVRPAVRPLPDELTIELRALIARRRQITEMIVAERNRLSGASKSVRKRIDAHIRWLEAELDRADKDLDQSIRQSPIWQENQDLLKSVPGIGPVISRTLLAELPELGQLNRKQIAALVGIAPLNRDSGTMRGRRTIWGGRASVRAVLYMAALVASKRNAVIRAFYQRLRIAGKAPKVALVACMRKLLTILNSMIQHKTRWSENFSVQPC

SEQ ID NO: 228768 - protein, 355 aa, unidentified
MPSLAEVVDAVIGVDTHRDTHEAEIADATGTPIATVQISNDSAGYAHLLAWIAEQAPGPRLAVSIEGTRSYGVGLARAVTAAGLMVVECEQPDRKQRRGKGKSDPIDAHLAVLAALRLDADRLPSPRADGDREALRILLGARHDISTASTAQTNRLRALLLCGDDRDRQSARGALTDAALTTLARRRLPSGASRDHAVRHAEIRRLAIALSEAGRQLKANRKQLQAIVDELAPGLTARYGIGPVSAAQAIVSFSHPGRCRSDAAFAALAGTSPLPASSGRTVRHRLNRGGDRALNRAIHTIALTRMRSCPTTRAYVARRTAQGKSTREIRRCLKRYIARELYRTLTNAMTPAQAT

SEQ ID NO: 228769 - protein, 321 aa, unidentified
MNPTKAYVGIDVAKGWLDVAQRPGGEAWRVTNDERGIADLVARLKALRPTLVLLEATGGMEIPAVAALAAAGLDAVVVNPRQVRQFAGATGRLAKTDAIDAQVLAQFGEAVQPEVRPLPDTATQELAALVARRRQLIEMLTAEKNRLRLATKKVRRNIEAHIRWLEGELLDLDDGLGDVIRSSPVWRERDDLLRSVPGVGPVLSSVLLAHLPELGRLNRKEIAALAGVAPLNRDSGQFRGRRTVWGGRSQVRAALYMAALVATRFNPAIRAFYQRLGAAGKPKKVALTACMRKLLTMLNAMARHQTPWQTMDLTLDLKDSC

SEQ ID NO: 228770 - protein, 390 aa, unidentified
MQTEADRPEAPTAMCNHLGAIFVSLELSRSTWLITSLSPGGGEKVSKKSVRGGDVAGLLERFAQLRKKAHARTGRNFPIIVIQEAGLDGFWIHRVLQNEGIESHVVDPASIAISRRRRRAKTDGIDGEALLRTLLAYKRGEPRVCAMVKVPTAEEEDRRRLCRERKVLTNERVLHVNRIKGLLFSQGVSGYEPLRRDRRQRLDELRTGDGRPLQKHLKAQISRELDRLELLLEQIKAVETERDALLAAQQVAAPAPTAMLLDVKGIGPEFAAALWLEGLFRHFDNRRQIASYAGLAPTPWQSGSVDREQGVSKAGNPRLRTTLIQLAWLWLRHQPQSALALWFEQRVRRNGGRLKKTTIVALARKLLVALWRYVTAGVVIEGAVMKTVGQ

SEQ ID NO: 228771 - protein, 318 aa, unidentified
MDQAFIGIDVSKDSLDAAVYTGKHRWHFSNDEAGISQLIEEFNKLTPTLVVIESTGGYETPVAYALQKAKIACAVVNPREVRDFAKATKKLAKTDSIDAQVLAHFAAVIKPEPRSLSDEQAQELEAILARRRQVVEMLTSEKNRLHQARPTVKEDIQIHIDFLEKRLQNYDSNLEGMIEESPVQREKYHLLQSVPGVGPNLARTLLIDLPELGSLNRWQVAALVGVAPFNHDSGSKRGKRATWGGRPTVRSALYMATLVAARFNPIIKQFYTRLCDTGKKKKVALVACMRKLLIILNSMLKHHMPWTITKSELSFTYV

SEQ ID NO: 228772 - protein, 618 aa, unidentified
MSTTTPLDRIGVGIDTARYGHRVSFLRPDRQPAAKPLTVMENRDGYEALKERLNRLHEEHPQAHMHVRIDAAGQYAVNLELFLRDLKLPMTISVGEPKRNKDYQKAHFPKRTTDDTESQAMARFAVVELPDATPAPSDPMILLREVAGRLQAQVKQTTRAINRLHNLLARVFPELATLTEDIGVGWVLKLLDKYPTAERIAAAHRSSLEKIPYLPAEQAEALHQAAQQSVASLRGDVAEALVRDLVEQLRHSQRAEKKLRQMLIAAFADLPASPHVQVLTIPGIGDATAAVLVAKIVDIGRFATPDHLVSYFGVFPEESSSGVDKRGKPLPPGTLVMSPKGNDLVRGYLWNAARAAIRWNPAIRALYRRLRARGKRGDVAFGHCMRKLLHLVYAVWKTNRPFDEKHFPWEGSSDTSLSTTTPLAADADATPSANENAVGHKRDLPAEAVVTTAASTVEPVPSAVKPAPQGTLATRPKVDLACLREHVTIEQVLQHLGLFTSLRGRGQQRRGPCPVHSQPAAPERTFSVHLGKNVFQCFHADCALKGNALDLWAAVHRLPLYEAALHLAETFQVPRNREEEPVRGTSSPRTATASPSAPVAATANHEAKQQQHSNRLAY

SEQ ID NO: 228773 - protein, 401 aa, unidentified
MLGKLAKKCKKYQVFVGIDIHERLCVAAILNMLTGEANYVEFFTTKASIVAFAKAHLQKNMVVGIEATSNSFFVASILKEYVAEVIMITPEKHKDGVKTDKIDAYRIAVSLAQGTFNPCWIPPDDIQSLRELIGLWMALNDLIIRLKNRIYSVLMAYGIKVSSKDLSSKKAEEEIRQAIEKLPFCAAYKLSKNFKNLKSAEEDKEELSYYLANIAKDNPQVHLLITIPGISFVAALVIISEIGDISRFSSPKRLTKYAGLTPAIYQSGKRSYTGGITKAGRRRLRWILVQAANNAVRVEGRLRKFYLRLKEKKGHNKAIVACARKLLTIIWYMLTKGEVYRDCLERLYTKKKRITEKKAEKFVAPFLSDLASEVIEFLRREDAPPPIMENVEVIERQAKNT

SEQ ID NO: 228774 - protein, 357 aa, unidentified
MSHTTYSSTTIPALTIGLDLGDRLSQAYAVDAAGTCVEERAVATTAAALTAFLAERPPCRVVLEVGTHSPWISRLVALFGHEVFVANPSAMYGARRRRKRNDRLDAEFLARQGRADVRLLYPIQHRSAPAQQHLEVLRARDQLVRTRTAWINHVRGAVKALGTRLPAASAEAFPTRADAHVPDALRPAVLPLLTLITTLTTAIRSYDAQLEALARTTYPETARLRQIAGVGPLTALAFVLLIEEPTRFAHSRDVGAYFGLVPRLDESSTLTPQLRITKAGDPLGRRLLVSAAHYILGPFGPPCALRRHGEALMQRGGTNAKKRAVIAVARKLAVLLHHLWRHQLTYDPQHGGASRAA

SEQ ID NO: 228775 - protein, 423 aa, unidentified
MKTPNTQTFAAFVGIDWADTKHDICLQESGSDRREFGCIEHQVQCIDEWANSLHQRFGGPIAIALELAKGPIVYALQKYDFLVLFPINPLTLAKYREAFKPSRAKDDPSDAELALDLLVRHPERFAPLKPQSVAMRTLICLTERRRELVNDKTRLTNRLTNTLKQYYPQALDWFDQHDTVLFCDFLTRWPTLLQAKRAHQGSLKAFFHAHNAHRPKLIAGRLAAIKAAAPLTQDPGVIVPCRLHAMVLLEQLRVALQAIEQFDQHIAELAPTLPDYRLFAGLPGAGPHLAPRLLVAFGEDRQRFQRAEELQKYAGIAPVTERSGKKSWVHWRWQCPTFLRQTFVEWAGQTINKSFWAGAYYYQQRAKGSTYQAAVRALAFKWIRILHRCWMTRTLYDETKYLNGLKRRQSSLLNNLVNNPQSA

SEQ ID NO: 228776 - protein, 410 aa, unidentified
MKVLNRRCAGLDVHKAEVVACARVFAGRKVVQEVRRFGTTTRELMALGDWLESLRVTHVAMEATGVYWKPVWHVLDERFALILANAQQVRNVPGRKSDVNDATWIADLLAHGLIAASFVPPRPIRELRDLTRTRRQAVGEVVRHQHRIDKILQDANIKLSSVLSDPMGVSGVRMLKAIIAGESDAGKIAELGSSRLECPRGALIEALSGRVSEHHRYLLGWHLRQIEQLEGDIADLDARIEAQIAPFRATIERVMGVPGVKATTAPAIIAEIGTQMSVFPSAGHLLSWARIVPRLDESAGKKRSRRVKKGGAWLKPVLVQCARAAVRKRGSYYGAQYRRLKARVGDKKAIIAVAASILTAIYHIVRSGTAHRDLGADYLARREHDKAAIAQRLARHIRALGYQVDLRAAA

SEQ ID NO: 228777 - protein, 348 aa, unidentified
MTISMIGLDTAKAVFQVHGVDERGRVALKRQLRRGELILFFEQQPRCTVILEACGAGHHWARLLSGLGHEVKLIAPEAVRPFVKKGKKNDAADAAALCVAGSRPEMRFVPIKSVEQQAVLALHTARSLLVKQQTMLANALRGLAAEFGLTAAKGMGKLAELIALVSMDKSLPAAGRRAMAELYAHGREVADRLAALEAKITSHARHDETARRLATIPGIGPITASLIAATVGDNIGAFRSARHFAAWLGLVPRQYSTGGKVRLGRITKAGNAEIRKLLVLGATSMVWRAAHWNSRAGLWVQGVLARRPVRLVTVALANKMARIVWALMTRAEVYRAQGRALATVEAAA

SEQ ID NO: 228778 - protein, 463 aa, unidentified
MCAELRFQAQISVFLSTETYLCNDATRSCLRDSVNVGLHYFFIGGFLLALKIVYPVCCGMDVHKSFLVACIASTDSAGVTTYKSKRFSTFSHDLRLLAAWLSNNNCRDVCMESTGKYWIPVFNILEPTCNIVLAHPKYVKAIRGKKTDKRDAKWIADIFKHDLVSSSFIPPYDIRQLRDLMRYRYKLTNFTVGEKNRAQNCLTVSNVKLDDVFSDVFGKSSSTILDRLSLCPNGNFDVAPLVNGKCKSSVEKIQAAVDGSICPEQLQKLAIIRSHINAIYECKSNLDLLICSIADKFRAQVNLVSSVPGIQFFSAVSVISEIGVDMSVFPTAKHLCSWAGLVPQNNESAGKKKTTRISRAGAYLKPLLVQCALTVCKSSKHPEIRNRYLMLKKRRGHKKAIIAICRMLLTAIYAILKTATPYNPNLYRSQNSTPKSRTFTPISAIAFLKSHGYVVVDCDGVMT

SEQ ID NO: 228779 - protein, 310 aa, unidentified
MDATYVGIDVSKEKLDVHLRPSAEAFAVARDGKGLHELVERLRGVAPELIVVEATGGFETIVTAALAAAALPVVVVNPAQVRHFAKALGQRAKSDPIDAAVIADFAAAVKPQLRPLPDVAARLLAELVGRRAQLVEMLAAERQREERVANARVRKSLKRLIAALAKELKTIEDDIDGLIRSSPLWREKEDFLKTFPGVGETLARVFLADLPELGQLDRRKIASLVGVAPFTQQSGHWKGKSMIAGGRAAVRSAVFMAAMSAIRCNDVLRAFYQHLLALGKPKMVALIAVARKLLTILNAMLRDQKPWQHA

SEQ ID NO: 228780 - protein, 351 aa, unidentified
MIIIGVDYHPSDQYIALVDTETGEYVERQLNHSAGEAEKFYRELATRGVSVRVGIEATGYSRWFERLLAELGMELWIGDAAKIKTKRVRKQKTDREDARLLLRLLRENNFPRIWVPSPENRDLRQLLWHRHRLVQMRTRIMNQLQALAMNEGQRRKKKLWSEAGRTQLEKLPLAPWAARRRQDLLELLDRMNPSIEELTAAIEREARKWPEALRLMTHPGVGPLTALAFVLIIGTVERFQCGKQIGSYVGLIPCEDSSAGHQRLGHITKQGSSLLRFLLGEAAQAAARCDADWRRRYLHLALRRQRNIAKVAMARRLGVRLYWMWRKGWEYSEWIKFGSHAGQLGTGNGVQ

SEQ ID NO: 228781 - protein, 466 aa, unidentified
MKHNRRRSPGKPRVSPTVLDRLNPNVAGIDCGSAEHFVAVPPDRDPTPVRSFTTFTTDLMRLADWLMACRVTSVAMEATGVYWIPIYEILEARGIEVLLVNARHLKNVPGRKSDVSDCEWIRELHSVGLLRGSFRPTDAIVALRAYLRHRQTLIESAGTYIQRMQKALVQMNVQLPLVVSDITGVTGLRILRDIVAGHREPHRLAEHRDHRCRASKTEIIAALTGNYRAEHLFALQQNLELFDACQAQLEACDRVIDAHVQTLTVRRPPAATPLPPPRVTKKPRDNEPRFEIRARLHQLTGGVDLTQIDGIAPYTALKLIAEIGTDMSRWPTEKHFTSWLTLAPKNKISGGRLLSSRTQPSANRAAAILRMTVMSLNRTQTALGAFYRRLAARIGKPQALTATARKLAILVYRALNGQLVYQDPGADAYDLQQRTRILRHLRQRAARLGFELVNRESGEILPAGVS

SEQ ID NO: 228782 - protein, 342 aa, unidentified
MKITTIGLDIAKNVFQVHGIDAAEKVVVRKQLRRGQILGFFEALPRCLVGMEACATSHYWARELTKLGHQVRLMPAKDVKAYVKRNKNDAADAEAICEAVRRPTMRFVQIKSVEQQGQLMLHRARDLLMRQRTQLINALRAHMAELGIVAAQGREGVKELVKIIASEQDARLPVDAHTSLVVLAAGLQALQTMIGSIERRIIAQHRSDEASKRLRSIPGIGIVGATAIAATVPDPKVFRSGRDFAAWIGIVPRQDSTGGKQKLGPISKQGDQYLRRILVVGAHAVLKRARHQPEKYPWVTRLLERRPFRVVAVAVANKMARVAWALLARGGSYRAPALAAAA

SEQ ID NO: 228783 - protein, 391 aa, unidentified
MGRGKSIIARPESVIGLDVGKSSHWAFGIGRDGEVTVNGYVDNREAALDALFASAEPGTTVVVDQVHNIGALAISRARLAGLPVAYLPGLAEHNAAKLFAGDAKTDERDAEVIAKTALGIPDALRPVPGGSELVAAARRLASQRDFIVADSTHDKNRLHAVLLESCPEFESLVDLSDPAQVNLLAKVGGPWQIADADPRTVGALTRGADRSEVNALVASTSTSTRPLPAVVEAEGRSVRMLAARIADDDAEAAELDREIAALLAGDETFRCLLTVPGIGVRTATELVVTIDVSNFRDDSKLASYCGLAPKDRDSGSSISSVTTSRGGNRRLKNLLIFSCNSLTHSKNRFGEYYRMLREKRHMPHGKALKAVARKRLRVIYAIMRDKVPYAA

SEQ ID NO: 228784 - protein, 421 aa, unidentified
MKSAMNTLPNALPEQAVNDVTAGLDWARDDHAVSVVNARGQEIDRCTVEHTAAGLRELIARLGRNGVGEVAIERPDGPVVDALLTAGVTVVVISPNRIKNLRGRYGSAGNKDDRFDAYVLADTLRTDRARLVPLTPDSPATVVLRRACRTRKDLVGHRVAVANQLRAHLRNAFPGVVGLFAEIDSPISLQFLTRFDTQDRADWLSPKRLGAWLASVGYSGKKDPAALHAHLVAAPRGATGHDATLNAQITHALVAMLTTMVEQIKTLSGQISDQLTAHADQHIFTSLPRSGRLRAARLLAEIGDCRARFPTPEALACLAGAAPSTRQSGKLRTVGFRWACDKQLRDAVTDFAGDTRRDNPWAADLYDRARARGHDHPHAVRILARAWLFVIWHCWQNSTAYNPDQHNALQRVLNPTEQKAG

SEQ ID NO: 228785 - protein, 401 aa, unidentified
MRAVCGLDVHKDTIYLCILCSDGVIFEKVFGVLTYQLREMRRLMQSYGVSEVTMESTATYWIPVWRVFEPYFQLKLVNPYFIRQLPGRKSDVKDAQWIAECTMKDLVRGSFVPPERIQQLRQYDRRIFDLDAEIVRKLSKLDGIMQRCNIRLSNYVSNTDTKSYKDVVDALCKGVINPEELVSKVHGRIVNRHGRDTILASLTGVVSDAEKDTMRQLRREITLAEEHKTECQDKMVSICRTHYPREFERLMTIPGIKERAATSLIVEIGVDMTKFQTAAHLASWSGLKPRNDVSNGKYKSRRITHGNVFLRKTIIECAWAASRTKDCFFCRFSYHQTVVRKKNKMKVIVAVARKLLIAVWHVLHEETDYVDFKPDCTSPATNGRHAIYRLWKGYYLCGGHA

SEQ ID NO: 228786 - protein, 410 aa, unidentified
MELLHRRCCGLDVHKETVVACLRLVADGKVTTEVRTFQTTTADLLRLSEWLAANDCTHVAMEATGVYWKPVWHILDDGEFELVLANAAHVRNVPGRKTDVNDAMWLAELLAHGLIRASFVPDTQTQEMRNLLRTRKQLVREQSSHVLRVQKILEDANIKLDSVLTDLMGKSGRAMIEALIAGETNPAKLASLADRRAKASHEEFREALRGRVTKHHRFLLRLHLNQIDALDAAMATVDAQVEANLGPFRTAVELLISIPGIKNLGAHVIVSEIGIDMSRFPSHAHLISWAGICPHNDESAGKRRSNRLRKGAPWLKTTLVQCAWAAVKKKDSYLQAQFYRIKARRGPKKAIMAVAASILTAIYHMLKDGTMYKDLGRNHFDRRSTDKQKQRLVKRLAELGYVVEIKPLAA

SEQ ID NO: 228787 - protein, 366 aa, unidentified
MKKISTVQAFGNEILKGQKLTIGLDLGDRWSFYCVLDEAGKIILEQKVATTPEAMKQTFGKIPRSLIAMETGTHSPWVSRLLTELGHEVIVAHAQKVELITKSNRKDDRHDARTLARLARIDPELLGPVRHRSAKAQIHLTVIRARAELVSARTALVNAARGLVKSYGQRLPKRGTYQVSRELATGLSAELRDVLGPLLQEVESLNERIQEYDERMEKIAKEDYPEVSLLQQVKGVGTQISLTYVLTIEDPYRFPKSRAVGCFLGLRPGRRNSGESEPQKGISKEGDRYLRTMMVQGAHYILGPFGEDSDLRRWGLKLAERGGKNAKKRAVVAVARKLAVLLHRLWVSGEVYEPLRNSQKAMRAVA

SEQ ID NO: 228788 - protein, 386 aa, unidentified
MQKLNDLSRSLTPLAPDGTLIAVIEMSQSGWLVAGIVPGVERQPLKKLAVDESALLKLLHRWRDEAEKAGRRIERIAVAFEAGRDGFWLARWLRARSIEAHVIHASSVAVSREHRRAKTDRLDTELLKRAFLGWLRGERDHCKMVAIPTTKDEDAKRPNRERESLVGEQTRIVNRMKAALIRLGIRGFNPKLKKAAGRLEDLRTPEDEPIPPNTLAELRRDMERRRLVSDQIRQIEEARLDRLKQAPGEGPHAMVRLLARVIGVGIETADMLVQEVLSRNMRDRRAIARYAGLTGSPDESGTKRREKGLARSGNARVRRGMIQLAWRFLMFQKNSALAQWFRARTENARGTRKLMIVALARKLLIALWRLVREGVVPDGVVLRPAQ

SEQ ID NO: 228789 - protein, 384 aa, unidentified
MNKHNILFIGLDTHKVSTEVAHVEDQRGAKPVHFGKINTTKAAITKLARQYQSKYPHATLHFVYEAGPCGYWIYRLLTSLGHCCYVVAPSLIPKKPGERVKTDKRDALKLAKLLKDEELTPIYVPEPEDEAIRDLSRSRETAMKDLKDAKYQLKALFLRNNITCKVNDNWSLQHLRWLTELILPHPSQQIVLQEMIQIITERIAREKRLANELFHQVKHWRFYPVVKALQAVRGVRLLIATGIIAELGDLRRFDHPRKLMSYLGLVSKEHSSGDKRRLGSITKCGNGRARRLLVQGAHTYKHKANISTELQKRQEGLPKEITDIAWQAQLRLCRRYNRLMNRGKHRNVVVIAIAREMAAYIWAIAREVVISPVNPRLRISRVPA

SEQ ID NO: 228790 - protein, 403 aa, unidentified
MAAICGIDWADDWHDVRVSDADGMLLAQRRFSHNEDGITALLALLGAHTVEVASIERPDGLLVGRLLAAGITVLAIHPNQVAAARDRFRAAAGKTDTFDSYVLCELARTDRHRFAALAPSSDDTIALQALVRAREDLVAARVALANQLRAQLDAFWPGARRIFADVDSPIGLAFLERYPSPHDARGLGPKRLQAFLARHRYSGRQPAHRLLERLRSAPIADVGELESDARRATVLGLVAALTPIVEQIGQLTSQIAGAVRTHPDGPIFRSLFRDPKSIICAAGLLAEIGDNRARYPTRDSLAADAGMAPIAIESGKRRTATFRRACDKRLRNHIATLADSTRHWHPWAHHIYTHARQRGADHPHAIRILGRAWTRILWRCWQNRAPYNPNQHGNLTRLLQANG

SEQ ID NO: 228791 - protein, 346 aa, unidentified
MATSIERPDYQLFVGVDIAAATFTATWSCDAQPIPRPISFKQTPVGFAAFQQHLHQTGIAPGATLIVMEATGSYWITLAVTLHEAGYVVSVVNPAQVHDYVKSLPRKGKTDALDAHYLTQFACERRPAPWTPPPAIYHELRQRLAARDVLLEMRKLASNHRHALAQWPVVIESVRTQLDETIADLNRRMTQVEAELAALLQDGAWAESAALVLSITGMGRLTTAWVLVTTLNFTIAPTPESLAAYAGLAPLPRDSGSSVRGRRRIGHGGNRRLRTALYLATLSAARHNPLIRTCYQRLCAAGKPKKVARCAAARKLLHLAWAVVKQQRPFDPMYQAHPRAKQGAVA

SEQ ID NO: 228792 - protein, 342 aa, unidentified
MQISTIGLDLAKNVFQVHGIDANEKVVVRKQLRRSQVLAFFKALPPCLVGMEACATAHYWARELRKLGHEVRLMPAKDVKAYVKRNKNDAADAEAICEAVRRPTMRFVTVKSAEQQGRLMQHRVRDQLVRQRTQLINALRSHMAELGIIAAQGREGLKEVLAIVADASDSRLPMDARASLMVLAAQLQACQTLIGTLEKRIIVKHKSNDRSRRLQTIPGIGVIGATAIDATVTDPNAFRSGRDFAAWIGLVPREDSTGGKQKLGRISKQGDRYLRRILVVGAHAVLRRARQQPEKYPWLTALLARRPFKVVAVALANKMARIAWALLAKGGTYRAPQLAAAV

SEQ ID NO: 228793 - protein, 430 aa, unidentified
MAYRITGIDVHKKMLAVVVSDVEIEGEFQFERRKFGSNPEQLRSLAKWLLEQEVEEVVMESTAQYWRPVWEALERYWKPIREKREGARRRSGTLHLAQALSNRGRRGRKRDFPDAERLVKRLVARELTLSFVPDAEQRLWRTVTRKKYQLTRDKVRLQNQLEALLEEAHIKLSSLVSDLLGASARRMLQALAEGETNPAALATLADQHLRATPEQLCDALGACTELKPVYRRLLKMALEQLQFLEQQMGQLDKEMANLLSQHQDAVQRLAEVPGLGVDSAHQIIAEVGPTAATFPSEGCLSSWVGACPGQEESAGVNYSHRSPKGNRHMRRLLSQTANAAVKAKGSIFELVYRRSVPRLGHNRAIGAIAHRLCRLTWLIPHQGVRYEERGPAVSQKSKQARTARMIRQLRRLGYRIEAPNAQHPSSAQVQ

SEQ ID NO: 228794 - protein, 388 aa, unidentified
MQVIGDRPEAASAIRTNLGAIFVSLELSQSTWLITSLLPGSSEKMSKHVVHGGDIAGLLERFARLQEKARARTGRNFPIIVIHEAGLDGFWIDRALKNEGIESHVVDPASIATSRRRRRAKTDKIDGEALVRTLLAYKRGEPRVCAMVKAPTPEEEDRRRLCRERKVLVTERVKHVNRLKGLLFSQGVCGYEPLRRNRRRRLDELRTGDGRPLPKHLKAQISRELDRLELLLEQIKVVETERDALLAAQQIAAPTSAAMLLAIKGIGPDFAAILWSEGLFRHFDNRRQIASYAGLAPTPWKSGSIDREQGVSKAGNPRLRTTLIQLAWLWLRHQPQSALALWFEERVVRNGGRLKKVTIVALARKLLVALWKYVTAGVVIEGAVMKVA

SEQ ID NO: 228795 - protein, 348 aa, unidentified
MALTIVETRAITGGVDTHADVHVAAALDPIGGLLGVREFPVTPAGYASLLGWLGGFGTVCLAGIEGTGSYGAGLCRHVTAAGVRVVEVDRSDRQDRRRQGKSDPLDAVSAARAAQSGRARGAPKGRDGTVEAVRALMVAKRSAAGERTQTINQARALVLTGPDDLRARFARHTTAALVAGTASLRPRPGDVVGYATRVALRELGRRAEFLDGQLERLDELIVPLVTAHAPGLLALYGVGPNTAALLLIAAGDHPERLRREAAWAHLCAAAPIPASSGKTVRHRLNPGGNRQANHALWRIVFTRMGSHPATRAYVERRTGEGKSKAEIIRCLKRYVAREVYPHLRRAAG

SEQ ID NO: 228796 - protein, 428 aa, unidentified
MDQVNRSRLEEFRQLRQEVRHSEEYLIVGIDIAKDRHYAFFGTATGKTLLKRIVFSNDHEGFRKLLDQAEALRVQHGLKKVVYGMEPTANYHKPLGEYLINLGRRVVLVSGVTVARNRESLDGRWDKHDGKDSANVADLISQGKCLYYEHPSAELRGLRGLLSLKRRLKKQEHGYRVRIRNQLIAQYFPEMDREYERLGAEGLSIVRWCLPASQIAQLDIDPFIERVTSRRITMEKRGRLEEVWEKAAESIGCEEVPGVDHEAKIMVEGLKQIRAMIKETEDKIKELCEEFPEYHYILTIPGFGPDVSSKVLGAVGDPDRFQNGKQVLKMGGLDLSADRSGKDSDKAIPEISKRGKADLRYALYQAALVGSLQNRDVMIYYTNKIRGREREKGIHVKMRVKLAAKLLVIAWTLMKKKEPFNPAYLNAE

SEQ ID NO: 228797 - protein, 386 aa, unidentified
MSLRAAVEAPTTAAATRSIIYLGMDVHKDSITIAVLPEGAKVPTRLDRLPNDLPKLKRWLERVARDGELRSCYEASGAGYVLHRALQAWGYACEVIAPSLIPQRAGVQRKHDKHDAAALARLDRAGELVAVRIPSEADERVRDVVRCREVFQREILKSRHYLLKFLARRGFVFREGTNWCTPHLQWLQHLTTDASPLAPEDRLVYREYHALLLYKLQRRDELDRQIEQLALLPTLAPMVSRLQCFRGISLHSAMVLATEIVDWRRFERPAQLACYLGLVSREDSSGDRHRLGSITKAGNSHCRHVLIQAAWSYRHRPQTSVDLKRRQQDQPPAVITHAWKAQQRLHQRFTHLSYRKRPQIAVVAVARELIGFLWAAMQDVPRAQAA

SEQ ID NO: 228798 - protein, 324 aa, unidentified
MIDAILGIDVSKNTLDVSISSCTKVRTKSFANSSDGWHHLMDWLITQKIQRVHACLESTGRYSLGIACALYEAGHVVSIINPAQIRDFVRTKLGRNKTDGIDASRIREYCELFKPSPWAPPSEAHRRLGELQTIRSGIIAGLTEWKNRKNSGIVDAEAQALADATISHFTSQLGAVDKAIALTIDNDSNLRSKRDLLLSISGVGDTLAGVVLAELPGPDVLRSSGEVVAYAGLNPRQHQSGTSVDRATRISKIGNAVLRAALYMPALSAMRYNPAIMALVTRLKSRGRLKPKQIVVAAMRKLLVLCFGVLKTGKPFDPAIAMGC

SEQ ID NO: 228799 - protein, 353 aa, unidentified
MTHATTTSFPRTIGMDLGTRRSSYCVVDPGGDRVREGSLKTERHEVREFLESEPRSRLVIEASGPSHWIAELAESLGHEVIVSNPRDFRLIAESHRKTDRNDARILASFGQFRPELLRPIQLRGVKCQVARSTLAARSHLVAQRTELVNFVRAQVRNLGDRLPTCAAYAFHRRAADLIPAPLQDLIAPLLGLLERLHDAIKSYDKQIEHLCEHSFPETAALRQVSGVGPNTSLSFVATIEDPKRFPRSRDVGAYVGLVSKSRSSGQREPDLRISKRGDASLRRLLVNSAAYIVGPRGGDCDLRRFGERLQGRGGQAARGKARIAVARKLAVLLHRLWITSEVYDPHRHSACAA

SEQ ID NO: 228800 - protein, 343 aa, unidentified
MQDVATVGLDIAKQVFQAHGADASGETLFNTKIKRENVLEFFSKLKPCLIGMESCATSYYWARQLLEFGHDVRLIHTRYVKPFVKRGKTDANDAEAINVALTQKTMRFVPVKTLNQQAAITIFRTRSLFVSQRTQLVNALRGHLAEAGLVAAKGIQNYSKLLKLMESAADTVLPAVMKQALTDICDQIHRLNDLVTKLDKEIERRVQHDENACRLLTIPGVGPKTAMCVIATIPDIHRFPSGRHFSSWLGLTPRTHSSGGRSVLRRITKMGNSELRTMLYLGGTVIMMRDSKTPIGRWAARLRARRPYKVAAIAVANRLARIIWALLTNGGVYDPTYGREASA

SEQ ID NO: 228801 - protein, 343 aa, unidentified
MDKNTMIGVDLAKNIFQLHIATMTGAVLSKKKLSRDRFKEFMKSHQPALVVLEACGSAHYWADTLGEMGHDVKLIAPQYVKPFIKRQKNDAADAEAIVVAAQRPEMRFVATKTKEQRAKAVVFRSRERLVHHRTEQVNALRAVLYEHGYVIPQGIASISRVEDILGGQNCDLPDLVCEECRELLEQIASNTKRINAKTDLIKQLAKETDMARRLQTIPGVGPMTAMAIDAFAPPMDLFKNSRGLSAWLGLVPRQYSSGGKERLGHVSKAGQADIRRLLIIGAMSRLTWLGRKSIPEGSWLGKMLARKPKMLVAIALANKMARTIWAMLTKGTDYRDPTISATA

SEQ ID NO: 228802 - protein, 346 aa, unidentified
MLYAGLDLSRQRLDVHVLDEEGRTVEVLAVHPDADALRTLANRVLRHGQEVSAVIESMTGSRFVHDTLERFGWDVMIADAVKAKGVAPLAAKTDKIDAHVLAELARRDLVPEIWLPTPGVRAERERARFRLHLVHHRSALKCRIHATLMTFGHTVPVTDLFGTSGRALLAGLALPEPWAGTLATSLAMVDELDERIDECGRELARLGADHPYIPLLLTVPGVGPLLAYTIASEIGDIARFASPKKLTGYTGLCPIVRQSGNHDFRGPLAKNGPKYLRWALVEAATHAARHPHYRDRYERNKKRLGRQRGAKVARIDIARQLAEAIWHVLTKNEPFAPVGPAILLVA

SEQ ID NO: 228803 - protein, 344 aa, unidentified
MEVAIGVDPSKSSLAVAAVDPLGRVVGTAEFTNDPRGHRALLRWARERGPDRVIGIECSLSYGATLSRLLLRSGEDVREVPTTLTHRQRRRRASQGKSDMVDSVAIARIVASGEVLPSAHRLEVLTDLRALVEYRDQLVRARTQVANRTHADLVNVLPGYERQVPNLRAKAHRTTARSLLRGDRSVRGELGRKRLDELSRLEREIAAMDRRIQATVRKTGTSLTSIPGVGPFIAAKILGEVGDPSRVRSKPAFAVLSGTAPLSASSGQVQRHRLNRGGNRQLNWALHYIALVQCRIMPEAQAYMDRQREAGKSHKEAMRCLKRHLSNVVYRHLVADARRAELAA

SEQ ID NO: 228804 - protein, 340 aa, unidentified
MERSIIGIDLAKNVFQLHGGDATGRVLWRQRLRREELADFLSRQPASLIGMEACGSAHHWGRVLGAQGHTVGLMHARYVKAYVKRGKNDRRDAEACYEAVQRPDMRFVPVKSVEQQVARSLERSRELLVKQRTQLVNAIRALLAEMGIIASAGVRGFKTLADRIEAGDPAIPPLLLSALRPLLAQWRSASDSIDALEARIVACAKADERMRRLQQIPGVGPLIAHALVTAIGDPQRFATGRDCAAWIGLTPLTHNSAEKTRIGHISRQGDHTLRRLLVLGAANLTRRARAKPAQASAWLQGLMARRPIKVATVALAARIARIAWAMLRSGDTYRGATVRA

SEQ ID NO: 228805 - protein, 324 aa, unidentified
MSDAIVGIDVSKETLDAYCARGQRKQGRTFANSPDGWMLMRAWLKALGSKQAHVCMEATGRHSLGVALALHDAGHIVSVVNPAQIRDFGRTKLGRNKTDKVDAALIREYAELFKPPPWTPPSPAMRRLCELQTMRTGIIRSRTEWKNRSGSGLADSTATKLAAATITHFTSQLEAIDRAIGETIDQDAELRGRRELLLSVIGVGETLAAALMAEMPEPGVLRRSGEMVAYAGLNPSHHRSGSSIDRPTRISKIGNARLRSSLYMPALSAMRFNPAVAALVARLKSAGRLKAKQIVVAAMRKLLVLCFGVLKTGKRFDPAIAMPA

SEQ ID NO: 228806 - protein, 351 aa, unidentified
MLIIGCDFHTRYQQIAMAEETTGELLLEQRLDHESGAARAFYRSLQGPVRVGIEATGPIHWFERLLRELGHELWIGDSAKIRASEVRKQKTDERDAALILDLLLAKRFPRIWVPTPAERDLRQLLWHRHKLVRLRTMLGNQLHFLAMSQGLCRKKKLFTKKGRAELGNLTLGPWASRRREELLKLLGQLDPPIAELDRAVLEEAQRRDDAVLLMTHPGIGPVNALAFVLTIGPVTRFPCSRKIASYLGLNPTEESSGGRRRLGGISKQGNTMVRWLLIEAVHHAVRQDPALRQDYQRLKFRRGHAVAKVAIARKLAVRMYWMLRSGADYARLVRRQGSPGATLMNAGSSLG

SEQ ID NO: 228807 - protein, 462 aa, unidentified
MMNIQEQREMVEKANRILSEMRSFTWRDLETQGKFSKNEKLSFISDDMLIVGCDIGSETHYVRAIDTRGRELSKKALAFENDAEGFQKARDWAVQLAAANDKKQIVLGLEPTGHYWFCLAAWMISNGISVVQVNPYAVKQTKELEDNSQQKDDRKDPKLIANLVKDGNYGMPYLPEKVYAELRRLSMFREQLMEDRNRHMNRLHREMKIYFPEYKDAFGKIDGAFCIAVLKEAPFPEDILRLGAEGLRDIWHKAKLRGRGYSRAEEIVKYAETSIGLEEGTAAGKEAVRWFAEKITELDEELAEIENKLEGKCGEIPHAENVLEIPGIGGKILAGILAEMGDITRFDDVKEIQKLSGLGLVSCSSGKHKGETRISHRGRKRLRYWLFQAARSAVAHGEEYKWIHAHYTTRAGNPLQKMQSLVVIACKLLRVIYTMLKTGKKYDPEKLLKDIRYPESVQSTAA

SEQ ID NO: 228808 - protein, 368 aa, unidentified
MGNERKRFVGIDLSKRTYEAVAITADPQTITRWNGKLDSRGRKCLLEKLNAGDIVALEAGTASFTIAKEIQGKPEIMVLVLNAANLAIIYASLKKTDKEDALKLARLVQKYTPEELPVVPIPTDQEMERRALVAHETRFRQDRVRLINRLHAVFLRAGFPDHTKSQLGITASREELIVSELDGFNLAEAMNLHHMIVEYEKILEDLDNQINDTVVACGEDAKILLSIPGFGIKTTMAVLAYAGDMRRFENPSQLVNYIGFSPRLYASGDIERVGSITKRGNPQVRWLLIQSAWCMVQSKAANPLKDRFEAMLKRGKSKSVAIVALARKLLELVFILLTRREKYRFIDPSLYTIKLRRAGFNLVGVESC

SEQ ID NO: 228809 - protein, 411 aa, unidentified
MLMIVLLARSTTPCPSMARSRLAASNTMWTGRRGLIGAWRRPQLRCAHRPVLSPSNQKGNRTMIVLGIDAHKRTHTVVAVDHLGRQLGSKTTTATTTADHLAIIRWADQFGDERCWAVEDCRHLSRRLERDMLAAGERIVRVPPKLMAHSRDSARTYGKSDPIDALAVARAALREPNLPTAHLDNESRELRLLVDHREDLVAERTRHINRLRWHLHDLDPTWEPDLRSLTTFKHLDITAARLAGLDSVIARIAADLVARIRQLTVDINDLRVELEARTETTAPNLRQIHGVGPLAAAKLIGEVAGVERFKSRNAFARHNGTAPTPVWSGNTSRHRLSRSGNRQLNAAIHRIALTQARSHPGAIAFLARRTDAGATRKEALRSLKRRLSDVVFRAMLADAELTQHHPTQHAA

SEQ ID NO: 228810 - protein, 447 aa, unidentified
MDERYEVYCGLDVGKSKHHTAALNAVGERVFDKPLPQDEARLREVFTGLQQHGRVLVIVDQPDAIGGLPIAVARDCGCPVAYLPGLAMRKAADLYPGKSKTDARDAFIVAETARAMPHTLRAVDRDSEVLALKVLSGVDAGLPHECTKAINRLRSLLLQIFPALERVFPGTVLPRSLVLELFIKYAEPTGLRVAGSNVLRWARNHSRKDPVNLIDAIFATLGEQTVTVIGTEAVELVIPRVAAQIKELKHQRAIVAEGVEKLLDDFPLSQVLMSMPGVGIKTEATILLTIGDAATFTSPGHLAAYAGIASVTRRSRTSIRGEFPARIGDHRRILRSRLLQRVHSNPLGSQLRSNPWRRRSGRPLRCLPHWLRHGGDRDALSLWTRRCICSRLRRCPQHLHSLASATTLGIVLQQPARRRNSNAMEGYPRLRRRPRPHVRRSLVRHQA

SEQ ID NO: 228811 - protein, 340 aa, unidentified
MGDVTLIGVDLAKRVFHLHGAAEDGSVVFRKKLSRVQFEHFMKCHPRCIIAMEACGSAHHWGRLIAGFGHAVRLVPPVYAKQYVKRHKNDAADAEAIAEAASRPTMRFVAVKPQTQQAQAMAYRSRDMLVRQRTQLINALRGHLTEFGVVAPQGITQIKKLAAAIDAPEAELPELVRQLAHDYIDMIKDLTARIAVLDRTLQRVTAADEKTAYMRTVPGVGPITSAAIEAFAPSLESFRRGRDFAAWLGLVPKQHSTGGKERLGRVSKMGQRDIRRLLISGAMAVIRWEIRKGDDADPWIARLLARKPRLVAAVALANKMARMIWATVTKKQDYQIPAAA

SEQ ID NO: 228812 - protein, 427 aa, unidentified
MPYKIAGIDVHKRMLAVVVADVAGPGEYQFERRKVGTSPDQLRLLAQWLVEQEVEEVVMESTAQYWKPVWQALERYWKAACQKREGAGPKCGTLHLAQAKSNRAPQGRKNDFADAERLVKRLVAQELVLSFVPDTEQRLWRTVTRKKQQLTCDRVRLQNQLECVLEEAHIKLSSLVSDLLGVSARRMLQALAEGETNPETLAALADRRLRATPSQLCDALGACQQLNQVYRRLLKMALEELKLLEQQQDQLDKMISELLALHQDAVRRVAEIPGLGVDSAHQVIAEVGPTAAVFPSAKNLASWVGVCPGEEQSADQSQSSRSPKGNCAMRRILNQAAHAAVKVKGSIFEVVFRRLKARLEYQEAIWAIAHRICRLIWKILHDNVRYEERGPEVSAKSKQIRTAKMIRQLRALGYRVEPTNLPAGSPA

SEQ ID NO: 228813 - protein, 338 aa, unidentified
MKLYGGMDLHSTNVVTQLIDEGDKVLYRKKQSCDLDQILKGLEPFKDNIEGIAVESTYNWYWLVDGLMAAGYRVHLVNTAAVKQYEGLKYTDDDSDAFWLAHLLRLGILPTGHIYPKESRGVRDLLRKRGQLVRQRTAHILSIENLYARNSGDRLSCNAIKCLTEEQIQQQFADPNVALAIDSNRILMNALDQQIKVLEQALLKQTKLNPRYRKLLTIDGVGEILALTITLETGDIGRFAQVGNFTSYCRCVGSEKLSNGKKKGQGNSKNGNKYLAWAFVEAANFAIRFNEQAKRFYQRKAAKRNRVVALKAVAHKLARASYYVMRDQVPFDSTKLFV

SEQ ID NO: 228814 - protein, 346 aa, unidentified
MKKIFIGIDFSKEKFDATVIKAEGVEERAARQHEVFDNKVGGFRRLLKWVRSVVDEHDTGLWLFCGENTGGYSKALCNYLYGSGYDMWLENALSIKHSSALQRVKSDKADSGIIAEYAMRNYDQMRLYKPLSRNLERLREVFLYRHNLVKLKASMMTRKGEKQLTQEKSDISRFMSMSSKHLISEFNKKIAECDKRIQQIIDEDEELQRNFEIITSVPGVGIQNAVCLMVYTDNFGRFDYDSRKIACYYGVAPFGRQSGTSVNTPAHVSPFANKLIKSLLTQAALASVNFCPKMAIYYHRLVEAGKKKQVAVNNVKNKLLHVIIAMVRKGEKYNPDYDYHAAIEAA

SEQ ID NO: 228815 - protein, 433 aa, unidentified
MNTPHPYDLIIGLDRADKKADLCLIDTQTSDRSSTTIDTSPEALWEWLLQLREQHPQARVALCLEQPAGHLIGFLEAYDWITLYPINPITLQKFRETFVTSRAKDDTKDAFYLAELLLCHADKLKSWAPEDSQTRAVQQLVFHRRSVIDERTGLTNRLQGLLKQYFPQALLLCGEDLWRPLATRFLLKWPSLQSLQKVKPATLTQFYYLNGSRSQRLLEQRLALVAKAVPAIEEHVVIESFVLRIQLICRQLQHLHQTVATFDRQIAQAYEQHEDHAIFASLPGAGPTLGPRLLGSMGSQRERYPAAGNLQCYTGVAPVTKQSGHSCYIHRRYLCPKFHRQSFHEYAKESILWSRWAAAYYLQQRTKGSSHHTAVRALAFKWQRIIWKCWQDHKPYDEQIYLAALRRRRSPLVALLNKVELGKSPFKNPVKKN

SEQ ID NO: 228816 - protein, 332 aa, unidentified
MYLGIDVHKRYAQVAVMDEAGKIVEEVRVENANLDELAQRYAGAQAVLEATSNYYHIHDTLSEHLDVTVAHPKKINQIADTDKKTDRVDAKELARMLRLNSVPESYVPTEEVREARALVRGRQTLVENRTKYANKIHGLLSDHGITEDVKPLNVKGRESLRELSLPVPWDTLLESYLDLIESLTEEIQKLDETIEERAGSLKKTQLLMTIPGVSYYTALTIYAELGGIDRFDGDKEVVSYVGLNPVIRESGDSRIEGSISKRGSGRVRWLLVQAANTAVHTSNDEYLSQFYDRLASRKNSQKAIVAAARKMLVSIYHMLDRGEVYDPPGVTA

SEQ ID NO: 228817 - protein, 353 aa, unidentified
MNNPISENEVILGVDTHLDTHVAVLISTNGNLLGSLAIATDTSGYLKLVTWANSFGMLKRAGVEGTGIYGAGLARVLRDHGIAVLEVNRPDRSKRRLQGKSDPTDAERAARSVLSGSATAIAKTQSGVAEAMRVASVARRSAVRAKTQAINQLRALLVSAPQDIRERLWKSKPADCAKGCARLRSLGTTEFLNTLTTSLCLLAKRWLALADEVEQLDVILENLTRQHARRLREQFGVGPHTAAVLLSTAGDNPERLKSEAALAALCGVSPLLASSGKTVRHRLNRGGNRSANNALWTIAMVRMRGDPKTQCYVARRSAQGLSSKEIQRCLKRYLVRELYPLILADLAESARSC

SEQ ID NO: 228818 - protein, 399 aa, unidentified
MNSVGIDISKGRSTIAVMRPFGEVVISPFEVRHTGSELSKLARQLKSLDGETRVVMEATGNCHVSVAKLLHNAGLYVSVVNAKLVHDYGNSELRRVKTDRKDAVKLADYGLDRWLTLPRYITRLLLKNCYRQYRQYSKVQTVLKNNLISLLDTVCPNANRLFSSPIRGDGSEKWVDFVAEFWHCRCVSEKSERAFTSKYLRWCRKHGYNFREAKAHTIYAEASGHIDVMSKSETTKLLVEQAVAQLRATSTALAVLKHEMQSLASMLPEYPVVMDLFGVGPTLGPQLIAEIGDVRRLYSKKALVAYAGLDAPPNDSGDVTGRHKSMSKIGASSLRRTLFLVMSVYLQTAPLDEPVYQFMDRKRAEGKPYRVYMMASANKFLRIYYATVKAYLEPLERTA

SEQ ID NO: 228819 - protein, 344 aa, unidentified
MAIVGGLDIHRRQITYDWIDTTTGETRRGQLSPATRLELRGWFARFTGQQADFALEATTGWRFVAEELECAGFRAHLAEPADTRALRGPKRRAKTDRTDARHLRELLRAGTLPESWMPPAHIADARTQVRLRRALVGERTGWYQRIHAILFHHGLPERSQLLTADGRAWLARAELPAVARQAVELALRMIDHLEVELDTLDAQLAGIARVQPGCQALQRRYGIGWLTAVAIWAEFGDVRRFANSRQAVRFTGLDITIAESDGKRARGHLARQGSPVLRWALHEAAMCAARPSSPDHTYYLQVKQRLGGKRAALSVARKLAREAYHTLRELGDQALVPADLPTAA

SEQ ID NO: 228820 - protein, 354 aa, unidentified
MEQIFSEAEVILGVDTHLDVHVGVVIDQVGRVQGTHSIPTNALGYQELLGWVQQFGSLKRAGIEGTASYGAGLTRFLQAKGITVIEVNRPNRMRRRSRGKSDPTDAESAARAVLAEDASSVPKAQSGLAEALRMLNVARRSAVKGKTQAVNQLRALLVSAPQSIREAALKVKPEQCIAACMEMDCGDEKNPVMASLKMTLRLLARRWSALHGELKELDQHLFRLTKMAAPRLLERFGVGPQTAATLLITAGDNPTRLRNEAALAALCGVSPLQASSGKTNRHRLNRGGDRQANNALWTIALVRMRGDARTREYVARRTGEGLSKKEIFRCLKRYIVRELYPLILADLKDAAQMA

SEQ ID NO: 228821 - protein, 477 aa, unidentified
MQEKKHIGLDLGVKSKSKVYIVDQAGEKVRPGFYIQTNPQELDYMMKQALKGTSNEASLDLIMEPTNVAWFKVAVYIRREYPQVKIYRVKSEKVQDLRKFYRKHTKTDSLDARALAKMPVVDFDSLEEVYIRPKDILALNTRCKQRAKLVKEATAKRNSISDQIELGFPHLVDCFSSKFTTPFIRFCEKYVNPFKVRRLGKEKLLKILIKLGFRQDVSTLAENIYQRTEEACILLGSEDSIIDYDDFQDRIRSEFRIFKALQKEIDKVTKKLEDLYEKCFPEKRLNSIPGIADVLGAVITSTIGNADRFSSARSLVGYMGYYPKEDSSGLSSKKGLRMTKAGPNIAKGSLYLASNVGRLIDPQLGKIYYEQMVVRGNPHTKAVCRVVTALIPRILRVMKEDRDYVICDLEGNPISKKEGRKIVKEQFFVPEEVRQRLSNRKRMPLNKKGRTKPQYVRGSKAPQIRVDSSPGIAFSLN

SEQ ID NO: 228822 - protein, 343 aa, unidentified
MDVYVGMDVHRKRSQVAIVDAAGAQQRNRNLANDPAKLVPILGTLPPGTPVAFEAAYGWGWLVDLLEELELEPHLVHPSRCKAIASARLKNDKVDAATLAQVLRADLLPEAWIAPQATRDLRALLRHRASLVRLSTSLKNRIHAVLADRGIGEDRILWTRPGRTWLAELELPPMPRAIVEDCCGLLDALATPIGRLDREIVTLAKPDPGVQALMALPGVGRLTAMTLVAEIGDIGRFPTARKLCAWAGLTPQVRNSDRTVRHGHITKQGSPWVRGILQEAAQTAKRHPMFALAYAQLARRRGSHIATVAIAQRLLARSFHILTQLETAPAPEKASTGRARVFA

SEQ ID NO: 228823 - protein, 301 aa, unidentified
MTFFLGCDVSKSKVDVALVDQTGSTLWTDKISNQADVLAGYFLTVAGAYPETDVSTVVESTACYHHPVCEATYALSLACKVLNPIITKQQLKATVRGKKTDKTDAVMIARLGLRGEGWLYEPETYRATKYYARAQQKLSTFAQALKLYDQHVIQIFDKELGDDSRASIDTAQAALLAAKTSLAKDATDSLPDDLAKLLRSIPGVGPIVCASLIGEIQNIQRFGSSKALIAYAGLDPKIRQSGHTLNVTGRLTKRGSPHLRRNLFMAASVARRHDPYFKSLYDRKQLRCRIYPRIACDHTDF

SEQ ID NO: 228824 - protein, 382 aa, unidentified
MTGTEPHAWETGRMDDITYVGLDVHKATVCVALAESGRGGEVRQVGVFENRPEILVKLAARLSKGGRRLSFCYEAGPCGYGLHRLLTGCGHDCVVVAPSLIPVKAGDRVKTDRRDAVMLAKLHRAGELTSIWIPDAAHEAMRDLVRARATAGRVLSKARPHLQSFLLRHDQIYRGARAWTLAYRRWLTTIRFAHPAQQIVLQDYIHAVQDAEARVDRLTRQIEELLPNWSMSPVVTALQAMRGVALVVAVTVVAEVGDFRRFANARQLMAYLGLVPCEHSSGATVRRGGITKAGNTLARRVLIEGAWTYRMPARVSRKLHDRNEKLSPVIRDIAWKGQMRLCSRYRRLAAAGKPKVVVTTAIAREMVGFVWAIARIAQPTPG

SEQ ID NO: 228825 - protein, 353 aa, unidentified
MKPKKEFSAGSLAAIGVDIGKEVFHIVGLGIDGKIAFRKKVRRFGFEDAFEKLPLSIVGMEACLSAHFVSRVLRQLGHQPRIIPAIYVRPFVKGQKNDYNDAEAIAEAALRPNLRAVQEKSQDQLDLQACHRVRSRLVSRRTATINQIRAFLIEQGITVRSGARALRNSLFAILENRRDEISPRMAGLILGLYEDWCRLDKRIETVTNAIEELSQVEPKCQRLMSVPGIGPIIATGIVAAISMGEAFERGRDFAAWLGLVPRQHSTGGRSVLGRISKRGSKYLRTLLIQAAKVLLMRPHNWPRYSFGAWLTAAASRLHKNKLAVALANKLARIAWSVLHNERAFDLRPDAMAI

SEQ ID NO: 228826 - protein, 344 aa, unidentified
MEHFAGLDVSVKETSVCIVDGTGKVVREVKVASEPEALLPVLTNPAYHFKLIGLEAGPLSQWLYGALAEAGLPVICVETRHMRAVLKAQINKTDRNDARGMAQMMRAGLYRPVHVKTLRSQKLRMLLTHRKLLQSKAIAIDNDLRATLRNFGLKVRMVGTLKFETRIKELVGNLPDLAMLVEPLLTVRRALREQFGILHRRLLAVVRNDEVCRRLMTTPDVGPVVALTYRATVDVPARFRNSKAVGAVFGLTPSKYQSGEINRTGAISRCGDEMMRVMLYEAAQSMLRSNKWSWLKVWAMKIAKHRGMKKAIVALARRLAVIMHRIWVDGTEFRWSREQAAVAA

SEQ ID NO: 228827 - protein, 316 aa, unidentified
MQSILNLGADVDSRTVMVACSAGSFKPHRIANERNALQAWLRTVPRGSRLAMESTGSYHELLADLAHQAGLQVYIVNARDLRRYGQGIGRRGKTDRIDAEVIARYIAREHQELHAYVPPTDAQRMLARLIGRRAKLVRAKDSIRQSLGGLPALQSEARRLIGHIDRVIARLDLLMQRTVQQTPAVREAAGHIVTIPGIGVLTSTCLGHRFTRLPYTTSDAVVAATGLDPRPEDSGQKEGRRRLSKRGPAEERRLLFNCARSAAQRKPWRSYYDAQLAKGLSKTAATVVLARKMLRVAFAVYKHRQPFNPLLVGGGT

SEQ ID NO: 228828 - protein, 388 aa, unidentified
MIYVGIDIAKLNHFASAISSDGEILIEPFKFTNDNDGFQLLLSKLDPLDKDSIIIGLESTAHYGDNLVRYLVACNYKVCVLNPIKTSTMRKNNIRKTKTDKVDTYIICKTLMMQESLRFVTFYDLDLMDLKALGRFRQKTIKQRTRLKIQLTSYVDEIFPELQYFFKSGLHQKSVYALLKEAPTPEAIASMHMTHLAHLLKVNSHGHFDKEMAQQLRVLAQKSVGANDSALSIQVTHSIQQIELLDSQLERVEAEMTDIMKFNDSVIMTIPGIGYINGGMILGEIGDIHRFSTPNKLLAYAGLDPSVYQSGNYQAKKTRMSKRGSKVLRYALVNAAHNVVKNNATFKAYYDAKMAEGRTHYNALGHCAGKLVRVIWKMLTDEVEFNIE

SEQ ID NO: 228829 - protein, 333 aa, unidentified
MSEQKTKEALGIDISKLTIDAGLHHGGLHEQFTNNRKGFKAMLKWLSKLGIETDDLIICFEHTGWYCLKLSHFLYDLNINFHCANPLEIKRSIGLKRGKNDKQDSFEIARYAWLHREELESSEPMSERLIELQRMMALRTQLVKQMTGLKNQRSGMKVVTDSPSTDFSILTIDQSLHHTKGLLLKLEKKMLELIKADKKMQTNFEMSRTVKGVGPILAMQMLLHTHNYTRFETWRQFSAYCGLVPYENSSGTSIKLRPRTHSISDRAMKSLLSLCALSAIRCDAELKAYYQKRVEEGKEKMVVLNIIRNKIVSRVFATVKRGTPYVSLSKHAA

SEQ ID NO: 228830 - protein, 359 aa, unidentified
MPTEAVTRLYAGLDLHKSNVFCGIKDQEGKPIYRRRLPAELPVILEALVPYRGQLEAVAVESTFNWYWLVDGLQAAGLPVRLANPAAMGQYSGLKQTDDESDALWLAEMLRLGILPEGYIYPPAERPVRDMLRRRMLVVRQATQTLLSLQSMVVRHTGQSVSARKLQDWTLSELRATFVDPYSQQTAAAMLELLGEQRRIQHRLEKQVLAVVKQHGPFVRLLSLPGIGNILGLTITLETGPIQRFGSAGQYASYCRTVDSRCVSNGKTKGQNNRKNGNEYLAWAYVEAANFAQRYSPRAQAWFARKQARAGRVVAVKALACKLAKAAYYLLRDDVDFDEARMFGASSGGGRQPVKGVGL

SEQ ID NO: 228831 - protein, 355 aa, unidentified
MAGLVPSLTRQPLKKLRSDPDALLGLLLRWRDQATKAGGRIKRMVVAFEAGRDGFWLARWLRARGIEAHVIHPTSIPVSREHRRAKTDRLDTGLLMRAVLGWLRGEPKHCSMAAIPTIAEEDSRRPNREREKLVGEQTRAINRIKSTLVRFGIRAFKIKLRQASKHLEELRGPEGEPLPPNTMAELRRDLARLQIIRAQITEIERARLERLKRVPRQGTNPMIRMLTKVMGIGIETADVLVHEVLTRKLRDQRAVARYGGLTGSPDESGIKRRERGLARAGNARVRRSMIQLAWRWLMYQKTSALAQWYQARTAGAKSGLRKAMIVALARKLLIDLWRYVTIGKVPPGAVLRPAT

SEQ ID NO: 228832 - protein, 403 aa, unidentified
MNMNAVGIDVSKGKSMVAILRPYGEIISKPFEVKHTVSGIRSLIEQIQSIDGESRIVMEHTGRYYEPLVRELSKADLFVSAINPKLIKDFGDNSLRKVKSDKADAVKIARYTLDSWTELRQYSLMDEIRNQLKTMNRQFDFYMKHKTAMKNNLISILDQTYPGANTYFDSPAREDGSQKWVDFANTYWHVDCVRKLSLNAFIDHYQKWCKRRKYNFSRSKAVEIYEASKELVSILPKDDLTKLIIKQAVEQLNTASQTVEQLRTMMNEAASKLPEYPVVMAMKGVGKSLGPQLMAEIGDVSRFTHKGALTAFAGVDPGVNESGSYEQKSVPASKRGSSTLRKTLFQVMDVLIKTKPQDDPVYLFMDKKRAQGKPYYVYMTAGANKFLRIYYGRVKEYLSSLPE

SEQ ID NO: 228833 - protein, 324 aa, unidentified
MIDGILGIDVCKNTLDVSISSYTKVRTKSFTNSPDGWRHLLDWLIAQKIQRVHACLESTGRYSLGIACALYEADHVVSIINPAQIRDFVRTKLGRNKTDGVDASHIREYCELFKPSPWAPPSEAHRRLGELQTIRSGIIAGLTEWKNRKNSGIVDAEAQALADATISHFTSQLGAVDKAIALTIDNDCDLQSKRDLLLSISGVGETLAGVVLAELPGPDVLRSSAEVVAYAGLNPRRHQSGTCIDRATRISKIGNAALRAALYMPALSAMRYNSAIVALVTRLKSRGRLKPKQIVVAAMRKLLVLCFGVLKTGRPFDAAIAMRG

SEQ ID NO: 228834 - protein, 417 aa, unidentified
MDVLHDRCAGLDISKRDVKACLRTPGTRRNQRRSEVRTFATTTNDLLALRDWLVAEQVSLVVMEGTGDYWRAPYYLLEDALNVELVNARQVKAMPGRKTDVADAVWLAQLAECGLLRASFVPPEPIRQLRDLTRYRTVLTEERTREAQRLEKELEDAGIKLSSFATDILGISGRAMLEALIRGERDAQVLAEMARGRMRSKIPDLAQAMIGRFGDHHAFLCRMHLDRIDAISRDIATLSTRIERVMAPFRDQLTRLDGIPGISLRVAEVIIAETGGDMSRFPTAGHLASWAGVSPGNHESGGKRKSGKTTKGNRWLRDALGTAAMAAARSKNTYLGAQYTRLVRRLGSKPKALVALEHSILTSVWHMLTDGTGYQDLGADHFLRRDPERERRRAIAALNKLGYTVTLNPIEPTTKAA

SEQ ID NO: 228835 - protein, 429 aa, unidentified
MNSTQNKKIEQVKDTTLVVGIDIGSESHYARAFDWRGFEYSEKAFQFTNTDAGFDELLEWIEEIKVANGKKEILAGMEPTGHYWFNLGVFLKDHHVRPVLVNPHHVKKSKELDDNSQSKNDRKDPKVIAGLVKDGRFTDPYIPEGVYAELRNASNLRFRLDSEMTSIKNRLARWLAIYFPEYRQAYRKVEAISGMISLKAAPLPEDILQLGVQGMNGIWRQAKLKGAGMKRAASLFAAAQRSIGINQGSMSARMEFQVLMEDYERKQSQLESIRSLIDQLMEQIPEAKKLLEIKGIGPKTVSGFLAEVGDVRRFTDPKQLQKYAGLAIVENSSGKHQGQTTISRRGRKRLRYLLFEASISLVATNPEFREIHRYYTTRTENPLKKMQSLTAIGCKLIRIFYVLLTKNLEYDPQKMRNDIRRPSEKEKAA

SEQ ID NO: 228836 - protein, 361 aa, unidentified
MSNHNQTDRSLAAAKEKQVIKLGLDVHAKQITVCRQIDGSLPQPAQRLSWEALIEWVEKQVASGAEVWSCYEAGPCGYGLHRTLTALGVHNLVVAPQRWDEKRKRVKTDARDARELVDRLDRYLRGNHQVFSVVRVPTVEQEQRRCLVRQREAALKERTRCVLRAGGMMLTQGVHAPTGWWRPAAWAQFQRTLPAWLRAQVAPWQRQALVYADQVAAWEAKARQLSAGRALPKGLGTLTAALLESEILDWSRFQNRRQVGSYTGMCPSENSSDERRQQGAINKHGNPRVRHQLVEAVWRLEHWQTDYPPLRLLREAKGSRARKRAVVAVARRLAIDLWRLATGQTTAERLQLEMIIAPSAE

SEQ ID NO: 228837 - protein, 349 aa, unidentified
MDHIGIDVHKRDSQIYILAEGGEVIERRIRTEPERFDAVLGTRPRARIVIEASTDSEWVARCLEALGHEVIVADPNFAPMYATRTRKVKTDRRDARALAEACLLGAYRPAHRLSDPQRHVRGRLVVRDALVRTRTRYISIIRALLRQHGYRVPSGSADHFVHRVQGLPLPGRLRSVVAPLLALMRPLNAQLTYSDATIEHLAVQDPRVPRLRSVPSIGPVTAAAFLAAIDDVQRFPHAHQLEAYLGVVPGERSSGDTQRRGAITKAGHSRTRWLLIQAAVSILRRRPPQAEELRTWALGIAARRGKQVAVVALARRLAGILYALLRDGSVFESQHVRPPRPPAAALVNV

SEQ ID NO: 228838 - protein, 511 aa, unidentified
MALLYRRCAGLDVHRDSVAACIRIRANGKYEEQRETFRTFTADLKELARWLKGHRVRQVAMESTGVYWIPVWNILESSKYRFELTLVNPTQVRALAGHKTDQIDCGRISEFLQHGRPAGSFIPPPAIREARALERRRVHLQQDRNRVINRIGRLMQTVNIKLSSVIGNIVGLSGLRILRAIARGQSNGTKLAELAHASLSGKKAQLIASPEGCYSEHFRYLLGELPEELDHLTKKVDDVTSRLALYMAAHAELIDRMCAVPGINKITAWTILAEIGTDLSPFPDAKHLASWAALCPGNNESAGKRKQGRTRKGNRYLRRVLVQAAWAAGHSKGTFLSSLFFRFARRQGMKKAAVSVAHRMLLILYPIISNGASYQDRGDDYFDRMNPAKTAHRLLSRLERLGYDTTGVAARPASPEVAQAAPAGKRRGRPCKCAERGSPCPHGNAGHPSPEPTAAPLQTRPLSSLQLELRRAGVIPPGYECGMCANARIPCIHIRPKLRPMKPPLGTPQIE

SEQ ID NO: 228839 - protein, 391 aa, unidentified
MAAQFEVIHPCCAGLDVHPATIWACARRLGPDHRVTESIRQFGTTTAELLGLADWLQGHGVRIVAMESTGVYWKPVFNVLEDRFPIVLANAQHLKKVPGRKTDVIDCQWIAKLLQCGLVRNSFVPPRSVRQLRDLTRRRTQLTRERAGVVNRIQKVLEDADVKLAGVASDVMGASGRAMITAITRGTTDPEALADLARGSLRKKIPALKEALSGLVTDHHRFLLREALDQISAPDRLIRKLTAEVERALEPESFSTARQLLVTIPGVDLRAADVLIAEIGVDMSKFPTAGHPCSWAGLSPGNDQSGKRRRQAKTTKGSQWLRTTLVQVARAASHTKKTKLSAQFRRQGPRLGKKKASIALAHKILVIVHRMLKDHTAYQELPARPYPCPEA

SEQ ID NO: 228840 - protein, 420 aa, unidentified
MKVVYQTCCGVDVHKSFLVATIIKTTSGVEPSYQKKRFSTFNNSILQFKNWLIENQCRDVCMESTGKYWVPVFNLLEDDINVTIANPKWVKAVKGNKDDTKDSKWIGDLFRLGLVPGSYIPCKPIRILREFTRYRYKLISCRTSEKNRYQNALTVCNVALDSVVSDIFGKSATSVIDYLIEQSDNSINHEEIASRLLRSLKKKSDSVIESIEGYQMTDSQKYRMRLVRAHLDYITSTINDIDTMLDSLIAPYENAVQLLCTIPGVDRNSAITVISEIGTDMTPFSNSKRLCCWAGLTPGNNESAGKKKSVRITRAGVYLKPALVQVAHAAVKSDKSPYYKKKYERIMKRRGKKRAIIAIARMILTAIYQMLSAGETWNPTDLYKIDMPEPLKEKQKEKAIKQAKKLLISEGIISESQLAS

SEQ ID NO: 228841 - protein, 353 aa, unidentified
MSCSLINNADKYYVGIDLHKKYSYITITDMLGYIQYQGKYLNRDRSLVPALLKWQQRKPISTVLESTYGWYWLAEEMEDKGVAFQLAHPAKVNAIAGKKKTDAVDAKILADLLRTNMLPIAYVPSKEERSIKELLRFRLTLVRSLATVKRRLRDILAKQNINCDYHNILGKKATLWLRSLDCPYPYQDEIKLFLQQAITLKQQIKEVEALVLKHCEQNDQVKLLETIPGIGSVLGLTLVTEIGDFHRFQNDRALASYAGVVPSVKSSGGKTYLGRTSHGNPYIRWALSEAVTHLKTHDSGVAELYDRVYQKKGSKGKARMATMNKLIRIIYAMLTKNRPYQSPDKTVTSPANF

SEQ ID NO: 228842 - protein, 343 aa, unidentified
MSDVTTIGVDLAKTVFQIHGVDVSGVIVIRKQLRRRQVLLFFRKQPPCLVGMEACATAHYWAREIAALGHEVKLMPPHYVKPYVKRNKNDAADAEAICEAVTRPTMRFVAVKSAEQQSVLMLHRTRELLVRQRTMLVNAIRAHMAEFGVVARTGLPQVKELLAVIADEEDERIPPLARTCLKGLARQLRSLEREIIGAERRIHAWHRTNEESRRLETTPGIGPITASALASSIANPSIFKSGRSMAAWIGLVPRQNSTGGKERMGRISKQGDQYLRWLLVAGAMTVIRHAKRRGTTDPWLADIITDKPTKVAAVALANKNARIAWALLRQGGTYQKPVTVPVA

SEQ ID NO: 228843 - protein, 424 aa, unidentified
MKVTYQTCCGVDVHKSFLVATIVKTTGGIEPSYQKKRFSTFNNSILEFKQWLLDNHCHDVCMESTGKYWVPVFNLLEDEINVVIANPKWVKAVKGNKDDTKDSKWIGDLFRLGLVKGSYIPCKKVRILREYTRYRYKLVSYRSSEKNRYQNALTVCNVALDSVVSDIFGKSSTSIIDYLLEQSGTSINHEEIASKLLRSLKSKEDAVIESVEGYQMTDAQKYRMRLVRAHMDYITAEINDVDKMIENMISSNPDFENAVQFLCTIPGVKRDSAITIISETGTDMSQFSSSKRLCCWAGLTPGSNESAGKKKSVRITRAGVYLKPALVQCAHAAVKSDKSPYYKKKYESLVKRRGKKRAIIAIARMILTAIYQMLSTGEQWNPSDLYKIDMPVALVEKQKAKAIKQAKKLLQREGLLPPDEPLAS

SEQ ID NO: 228844 - protein, 325 aa, unidentified
MEDKKLCCGIDVSHGKLDVCYQNNLGELFHLQVANNNKGFEKIFEHTGPDYHFVMEATGVYYIRLAFYLHQQGCKLSVVNALSIKRYIQMHLERNKSDRKDAGWICRYAIEQCPPYWEMPDSAYFECKQLYNTIREYTEQAKRFNNQLHSLRLLPVPSKDTIKSLEKVKRQLAKEIDSLEQKLEALLQQWQPAQLKSVGSIKGIGKRATAMLIVFTQGFKNTHSHRQLISFAGLSPTEYSSGSSIHGKPRIYKRGGKNLRDILYMCAMNAIKTNTACKILFERLKANGKTGKQALIAVCNKLLKQVFAVVKNNTMYQPNYCSVKP

SEQ ID NO: 228845 - protein, 442 aa, unidentified
MPKCVAAQSLPLSNDEGRVVMKLTYPICCGVDVHKTFLVATIIKTDGLVPKYHKKRFSTFSRDLLAFKQWLLDNNCKDVCMESTGKYWIPVWNILEDAVHVVVANPKWVSAVKGNKDDTKDSRWIGDLFRMGLVPGSFVPNKKIRVLREFTRYRYKLISMRSSERNRFQNAFTVCNSTLDAVLSDMFGKSATAIQNYLLDTDVVNPAYCASLLQRTAKKKSADVMAAVEGFKMSAEQKERVRIIQEHFSDINARVARLDAEINKMVSEYESQISLLCTIPGVDRNLAITIISEIGTDMSEFGSSKRLCRWAGLTPGNNESAGKKKSVRITRAGVYLKPALVQAAHAAVKSTKSVYFKSKYERISKRRGKKRAIIAIARMILTAVFAMLKTGEVFNPCDLQKYDMPEQLKRKQIVSSAKDAVKFLVSLGVLQEDTVSLAALTG

SEQ ID NO: 228846 - protein, 391 aa, unidentified
MFYIGIDIAKKNHEASIIDSSGKSLSKSISFPNSAKGMEKFNNFIAEFGVTTNNCIIGMEATGHYWISLFSYIVDLGFTCYVINPIQSDAFRKMYVRQTKNDSVDSFIIAQIMRFGEFSISNFSDENTFALRNLTRYRFALVDECSDWKRKLVAILDQVFPEYSSLFSNIYGVASKELLSKYPLPEDMLSIPAEELGNLLYECSKGRLGINKAEEIQSRARETFGIKFAKRSFSFQIKQIISQISFLEEQLKEIEIEISCLLEDICPVITTITGIGSILGASIVSEIGNISRFERANQLVAYAGLDTRIKQSGDFSATNTKLSKRGSPYLRGSIWLAATVAAFKDSALSIYYQGLRARGKAHGTTIGAVARKLTNIIFAVLRDQKPYTPNI

SEQ ID NO: 228847 - protein, 371 aa, unidentified
MQSNSTTKFIGLDVHKRTISVAVADEGASGEVRFYGKIENTVLAIGKVIKKLTAPDTELRFIYEAGPCGFSLYRYLMGNGLKCIVTSPAMIPKRSNDRIKNDRRDALTLARLYRAGELTAIYVPTPEDEAVRDLTRARRDAREADRKAKQRLNSFLLRNDCIFTGKKKWTKAHYLWLANLRMEHPAQKITFQEYIDTIHECTQRIARLTEQIKQVAEEWRMTGIVKALQSLRGVSLLTAVTTVAEIGELSRFQNPKELMAYLGLVPSEHSSGESVKRGGITKAGNNHARRALIESAWTYRYPARISRALLKRQEGLPASILQISWKAQLRLCGRYRRMVARKKPMQVVVVAIARELAAFMWAIFREAEAVA

SEQ ID NO: 228848 - protein, 364 aa, unidentified
MERENCNRLAEFRQLRKDIRGSDEHLIVGLDVAKERHNAFFGTATGETLYRRLIFDNDKDGFERLLLQAEAMKVQHGLKKVLFGLEPTANYHKPLGEYLIKNGHTVVLVATDAVKKNRSLLDGRWDKNDKKDPANVADLISQGKCLFYEHPSQEVRDLRNLLSFQRKLKKLEHSTRMRMRNHLVAQYFPELDTCCNWGANEGLAIVKACLDPAVISALQHDEFLRKIQTRVITLAQQRRLSTVWQRAFKSIGCEFGLSAEYEAQMMVKMLGQIHMSIADTQQQIKTVCEKFPEYEYLLSIPGFGPDISAKTLGAIGYPFRFDNASQVLKLVGLDLSASRSGKNSHRLYPKRANQNSDMPYTRQR

SEQ ID NO: 228849 - protein, 391 aa, unidentified
MSMYFIGIDISKYKHDCCIISAANQKVVSKVTIKNNKAGFNELLTIIHSLANPADIRIGFESTAHYALNLELFLENSLLTFMEVNPVLISEYKKSKTLRRTKTDSVDCESIARWLMTVEYKPHSKGFYHAYSLKSLTRLRDKLIRQRSFYLVKITNVLDHTFPEFKPFFNERLSKTALYLLENYGSAEKMARMNSASYEKLRSVSRGKFSPQQFLRLKELAANTVGVNNSIFDVELNSLLSLYKSLVKEIDTIEKEINKLIEEVHPHYMSVPGIGPLSAAVIYSEYGDISNFTNPGQMLAFAGIEPGINESGTESHGGKMVKRGSSQLRYTLINCCLPLIRFDMTFATYYAKKRGEGKPHRVAITHVAKKLIRVIYALESQDIDFNAQELR

SEQ ID NO: 228850 - protein, 425 aa, unidentified
MNYKQNEKINQVKESTLVVGIDIGSTKQYARAFDWRGIELGKVFTFSNSREGFESFKAWMQHLQDKYKKLDAIVGIEPTGHYWFDLGAYLEDEGILLVMVNPYAVKQTKELDDNSQSKNDRKDPKVIAKLVTEGRYSAPYTPDGVYADLRIMVTNRKRLIREMTQIKNRFARWFAIYFPEYTDVFGDYEAQSSMLLLKKVCTPEAIVELGAEKINQIWRDAKLRAVGMKRATTLCETAKRSIGLKKGSSAARYEMKLLLEDYEYKKAQLDAVMEEIEKLCRKIPESEQMLAIKGIGVITVAGFLAEVGDVGRFESPRQIQKLAGLSLRENSSGKHKGQTIISKRGRSNLRAVLFNAAIPLIATNPEFKSLHEYYTTRANNPLKKKQSVIAISCKLIRVFYAILANGVTYDAQKMLSDIHRQPQVA

SEQ ID NO: 228851 - protein, 595 aa, unidentified
MGEVFGDEHITCVAERERYEQPNGLGFSGGARIGRHGYQADSSFQNRRDLVKLLCQRLLGYTTTTPELRPEHGLVRPSPCCNLVPGHRRCRYWWCVQLAAHDPDEQAGYPHDWAGAFCCPFTPGGTAMSTHPTHKKRQLDELACVHPNAAGLDIGGAEIVVAVPPNRDPQNVRVFRTFTPDLHALVAWLVACGIDTVAMESTGVFWIPIYELLEQAGITPYLVNARHVKTVPGRKTDWNDAQWLQKLHALGLLEASFRPDAEIRCLRTLVRYRAELVERRAPHINHMIQALKHMNIQLSLVLTDITGVTGLAMLRAIIAGERDPQQLARFRQPGCKHSEADIIKALTGTWDDAQLFVLQQSLDLFDYYTAKLAECDSKLEQQYQTMESRAEKDAPLPDLPPAKPDSKSKNALSFNARAQIARVTGVDLVAVMGISAITAQTIISEIGTDMERFATVKHFCSWLGLAPHNDISGGRILRSRTMKVRNRANQAFRQAAQSVAKSDSSFGAYYRAMRARLGPKQAIVATAHKIARTVYHLLKTGEPYQEQSAAEYDHKRRERERKHLERRAQKLGYILIAIPPTAPEAPPEPGESSSF

SEQ ID NO: 228852 - protein, 397 aa, unidentified
MRVPGLRGRVKTTRTFAAFTGSLEAMIEWFVEQGVTAVVMEATGSYWKPVWYLLEEHPGFESMLVNAHHVKILPGRKTDVLDAEWLAELLEHGLLRGSFVPPAAIRELRDLTRYRKRMVQAHTSECQRIQKTLEDAGIKLDSVASDVLGVSGRAMLAALVAGERDPVVLAELAKGPLRRKIPALRHALQGRFNEHHALMIGMALEHTSYLEASIARLDDAVDALFAARTREDGVPFTRARDHLDTITGVGKRAAETIIAEIGVDMTRFPTAAHLASWAGLAPGNNITGGKRRSGTTTKGDVWLVDVLHQCAWAASHTRDTYLAAQFWRLARRIGKKKAATAVAHSILVICWHLLANDCDYDDLGGDYFTRRNTDRQRDRLIRQLHNLGYRVTLEQPA

SEQ ID NO: 228853 - protein, 512 aa, unidentified
MKPKYRRCCGIDVHKKSVTVCVFPPTGQPGADLRKRNFPTFTRDLKQLRTWLKNCKVTEIAMESTGQYWRSVWNLLEGHFEKLILVNPQHIKGLNGYKTDPKDAEWIAGLLDSGKLRGSWVPPREIRELRDLTRQRVHLLEDMNRAKNRIEQLCQTGNIKVSSVATDLFGVSGRHMLKAIVEGKHDAGWMADYARGALRGKKRELELALDGSFTGNQRWLLEQELRQLEWLEAQVRVLEQEIERRLAPFEEPMRRLITVPGIDRKTAWTLVAELGVDMTIFADAKHLASWAGLCPGNRESGGKRMSGRTRKANRYVKSALCQAAWAASHTKQTYLSAFYRRLQVRKGAPKAVMALAHHMIAIVYNVLKRNEEYVELGGDYYDQQSKPKVVSRLVKRLTRLGYAVSLEPVQPAAAPTVAGSLPVLAATEPPVRSAPSSDSFPAPLAQSVSNPVPARQPGETLKPPIPTDNPVAVARKRGRPCLCEARGIICKHRRGLTPNSLKGFTVTEGTFS

SEQ ID NO: 228854 - protein, 353 aa, unidentified
MNKVKKLSFLGETIYCGLDVHKTNWKVNIRNKEMELASFSQDPSPDLLNNYFKKNYPDAALEVVYEAGFCGFEIQRSLTKLGIKCIVVNAADVPATDKDRKRKDDKRDARKLARELSDGDLKGIYIPDKLMEHARSLVRQRHRLVQDQTRCKNRIKHMLMFSGIKIPEVEERWNKKYITQIQTFAYESMYLKSAVELSVEEYLQIRRLLSQATRTLRKLSLEPLFRSIQTFLRSIPAIGLINGMVIQTELQDIRRFKTLDSLCDYAGFVPDIRSTNDKKTVTGITKRCNEFLREALVESSWMLIRKDPAMLMKYNEYKKRMNPNKAIIKIGKHLLSRIRYVWSNQKEYEIGLL

SEQ ID NO: 228855 - protein, 400 aa, unidentified
MANTPGSKFFVGIDVSKEKFDVCCIDDTGEKLFRLSTEMNRSGFEGLIKKIFSYGGSTDNVVIGMESTACYHIPLFSYLTSEGYSVVVINPLLISNYMKLQLRKTKTDKKDAQVIAQYLVEQREAYSQSVMRSDITELRDLSRQRESLVDQMTAQKVDIKRILSVTFPELERITNIFTKSMLRLLSQYPSASAIKNTRRAKIAKALIPGSYGKQTDESVDVIRKAAKTSIGVVSQAKEVVLKQKVAILIQLQEHLSQLSEILIELCQSQMGEDVEILTSMKGIGNQSATNFLIELGGGVDPYKSPKQVIAMAGLDPSVYQSGKHEGKGRISKRGNRHLRRIIWLMSTKVIIFNDFFKEYYLKRRDDGLPYKKAVLATAHKLIRTIFAMLSNKTSFKVRAS

SEQ ID NO: 228856 - protein, 342 aa, unidentified
MKYVGVDLHKQTISACVVMKECGRKKVAARKRLECRDEAGIAAWFGELGKHEVVVEATASYEWFVKLVEPLAHRVLLAHPKKLRVIAESKRKTDKLDAQVLAEFLADDAIPLAYRPGPRVREHRTLVRYRHYLQRRITSVKNKLRHVLAKYNADVRHLFTSEGREHLASVKLSPCDRFVADELQAELRQHQKRQAKANRQLRQFAAKAPLAEQEARAVLDSIPNVGPVTSDVVLAELGDWRRFRSQADVASYAGLAPGFRESAGKTKQLGITKEGSRLLRWAMIELAWRMVRTSRKWGRHYTRLEARIGAKKAIVAIARRLLGVIFSLLRSGQKYALALEAA

SEQ ID NO: 228857 - protein, 351 aa, unidentified
MLIIGVDYHPSDQYIAFADTETGECGERRLNHSEGEAEKFYRDLQSRAASVRVGMEATGYSRWFERLLAELGIELWIGDAAEIKTRRVRKQKTDSNDARLLLRLLLEDNFPRIWVPSPENRDLRQLLWHRHRMVQMRTRMMNQLQALAMNEGQRRKKKLWNEQGRAQLEGLPLAAWASRRRKDLLELLDRMNPTIEDLTRAIEREARRRSEAARLMTHPGVGPITALAFTLIIGTPQRFGCGKQIGSYVGLIPAEDSSAGHQRLGRITKQGSALLRFLLVEAAQAAARGDADWKRRYMHLAMRRQPNIAKVAMARRLGVRLYWMWRNGWEYAEWVKFGSNAGQLGTGHGAK

SEQ ID NO: 228858 - protein, 346 aa, unidentified
MSYSTTIGVDLAKNVIQVSVVSGHGKELLNRSLTRKKFAELLGKQNSALVAFEGCASAHYWARTAVRLGHEVKIIPAKAVTPFRQGHKTDSNDALAVAEAARRPNIKDAPMKSAEQQGLQAIQRARELLIHECVALSNHMRGILLEFGITIPQGFASFLRMLPEILEDAENELPDLYRPTLNRLHQRMLNLRVDIEAMTKEIEQLVKAHPVCQKLTALEGIGPICALSLYAVLGSGKAFAKSREFSAYLGLTPRQFSSGGKTNIIGLSKKVGNRRMRALLIQGALTYVYRMKEPKCAKDRWLRDLIDRAGPRRAAVALANKNARTAWALITQGTEYQRLQPLEVAA

SEQ ID NO: 228859 - protein, 366 aa, unidentified
MGWMAPLRHRRAKLVFSENHQEREPSMSEITTIGLDLGKHVFQVHGVDAEGTTVLRRQLRRGQVLAFFSRLPRCVIGLEACATAHYWARELAALGHEVRLMPAQYVKAYIKRNKNDAADAEAICEAVQRPTMRFVPVKTAEQQASQLLHRGREQLVRQRTMLVNALRAHLAEFGIIAAQGLRNVGQLIAMVRDDDDRRLPDLARQVLQVLADQIEQIEAAITALERQLLSWHKSNAVSQRLASIPGIGPIIATAIATTVADPNVFRSGREFAAWLGLVPRQNSTGGKTRLGGITKRGNRYLRRLLINGASANLLRSKATKADPWVIGLRRRRPPLVVAVALANKTARIAWAVMLRQKEYQPRAVAA

SEQ ID NO: 228860 - protein, 446 aa, unidentified
MSKSTKEKKKKISQFPIIHPNAAGIDVSDNEMVVALPIKGYIEVVCFKCFTEDLLSLASLLKKHGVDTVAMESTGVYWVSLFEILQDQGFEVCLVNARHVKNVTGRKSDESDAVWIQKLHSCGLLNASFQPDNLARALRSMTRHRKSFVRTCSTYLNRMQKALELMNIKVHTIISDIDGKTGKLIIEAILNGERDAKKLALLRDRGIKASEEDIIRSLEGHWQREHLFELKQCYQMYNSHQKMIKECDEEIKKQLEEMIASKNDGELPVIQPSKKRKRQYKNRIGFDMTAYLKKLIGVDLTEVTGISEMTALTIVSEIGTDISRWPTEHHFTSWLGLAPNTKESGRKIISSHILKKKQNAGESFRTAANSLYNNKGPLGNFYRRIKAKAGPGKATVATARKIAIIVYKMIQTQTPFNPDALEKYQQNHKQQLIKQLKRRIELLEAA

SEQ ID NO: 228861 - protein, 348 aa, unidentified
MEKIIRIGIDTSKNVFVLHGVNAADQPVLRRKLRRRQVLEFFSKLAPTRIGLEACGAAHHWARELMALGHEVLLLPPQYVKPYVQRGKNDAADASAICEAMSRPRMRFVPVKTTEQQAALMLMGMRDQLIARRTQLSNMIRGYAGELGVTAAKGLDKIEPLLAQIATDPAVPEFAKELFATLAEQYAELKPKLCRIEAQLLAWHRHNELSRRLAEIPAIGPIGASLLAMKVANPRTFRTGRDFAAWLGLTPKDHSTAGKQRRGVITRAGDEALRATLVAGATAVIQQVRKGRGKPSPWLLTLTKRKPPKLAAVALANKTARIAWRLMVSGERYNRNHRAAASAASIAA

SEQ ID NO: 228862 - protein, 339 aa, unidentified
MQVTTVGLDLAKNIFQAHGITDEGEIVFNRPLRRAQVLTFFKRLDPCLIGIEACGTSHHWARELSQLGHEVRLIPPMYVKPYVKRGKSDAIDAEAICEAVTRPTMRFVEIKTVDQQALLSLHRARSLIIRQRTQLINALRSLLAEFGIYIARGLARVISFAHGVVEGVELELPAIAQDVFRNLCQQLGALHEQVRWYEARLRLEAKSDARVRLLQTIPGVGAVTASALAASIGDGHQFRNGREFAAWLGLTPANKSSGGKEQLGRITKMGDQYLRQLLVIGMTSLVRQTRSHPERASKWLTSLLERKPARLATVAMANKTARIVWAVLTKNEPYTPRTA

SEQ ID NO: 228863 - protein, 403 aa, unidentified
MNSVGIDISKGRSTIAVMRPFGEVVISPFEVRHTDSELSKLARRLKSLNGETRVVMEATGNYHAPVAKLLHDAGLYVSVVNAKLVHGYGNNDLRRVKTDRKDAVKLANYGLDRWLTLPRYIPEEDTRLLLKNCYRQYRQYSKVQTILKNNLISLLDTVFPNVNRLFSSPARADGSEKWVDFVAEFWHCRCVSEKSEKVFTNKYQRWCRKHGYNFSEEKAHTIYVEASGHIGVMPKSETTKLLVEQAVAQLRATSAALAALKHEMQSLASMLPEYPVVMDMFGVGPTLGPQLIAEIGDVRRFYSKKALVAYAGLDAPPNDSGDVTGRHKSMSKVGASSLRRTLFLVMSVYLQNAPLDEPVYQFMDKKRAEGKPYRVYMMASANKFLRIYYATVKAYLESLELTA

SEQ ID NO: 228864 - protein, 312 aa, unidentified
MNCVGIDVSKDRLDVCILPDEQRFSVARNPKGLEELIERLGAASPKLVVIEATGGLETVVAAAVGAAAMPLAVVNPAQVRHYAQALGKRAKNDPIDAFVLARFGSDVKPEPRSLPDDMTQLLADLVSRRRQIVEMIGAERQREKRAVLPRVRKSIARLIKALEKELSDLEGHIDDTVRGSPVWREKEDLLASVPGVGAKTARVLLGEMPELGMIGRREIASLAGLAPYVRQSGKWKGKSTIEGGRKTVRSALFIAAMVAVRHNPVLKKFYERLTQAGKPKVLAMTAVARKLLTILNAIIRNRQPWRQVSVPA

SEQ ID NO: 228865 - protein, 449 aa, unidentified
MLNPVSGHLHVGVDIGSRCHAVAIGLSDGRLLEEFEIAHSAAGFSDFFSRIEAQSESHPYPVVVAMEGYGGHARPLDGLVAERGWSLFNVNNLKLARFKEIFPAAAKSDRIDTRKTLELLQLREHLPVAADVLQEVVARPEENDVLKRLTRRRRRLVNERVRLTSVLHSDLQAAAPGLVEITRDVANLWFLNFLTCRKDLRKLARIRRASLLKLPAIGACYADRIQTWQTCACFSRDAALVGTMIRQDALRVLELKHQIKALDDEIARVAETSSAARRLASIPGFGAVCSAELAGEIGTIARFNNEASLALYLGMAPLDHSSGKLRGSKSPKHVNTRAKAAMMNALDRHRKEVLQSQRYYETKRAAGKTHNQAIRALGRHLCRVIFKMLRSDRPYWIDPRRDPADTPIKASDREPEADRQNGPPGGGPSKVRSSPLAAIGSPACTAGPA

SEQ ID NO: 228866 - protein, 316 aa, unidentified
MESAFVGIDVSKDKLDLHVRPSGYGQSFNYDESGLKSLVRTLQEVPLIESIVLEATGGFERHVVAVLLSHQLPVVVVNPQRVRHFAKAEGQLAKSDPIDAALLSNFAQKLRPPARPIADESLLELRDLLARRLQVVDMISAEKNRLASAPRKSIRQQITEHIQWLQKRLASIDHDLHSRIQSSPTWKNKDELLQSVPSVGPATSSSLLIQLPELGVLNRHQIAALVGVAPYPWDSGRFKGHRITMGGRTAVRSALYMATLVATRHNPLIRAFYQRLVQSGKPKMVALVASMRKLLTILNSMLKHNRSWDPSYEKNS

SEQ ID NO: 228867 - protein, 317 aa, unidentified
MNSKNNQNEINVGVDTGKTQLDIYIRPLDIYFVVSNDEIGIEEAIIKIKMHKVTRVVIEATGRLEQAFIMACAKAKIPFVIANPVRIKRFAGVINQKAKTDKLDAKLIAHYAEMVKPELSKLKAEDIRLMSDLLSRRRQLMGLQTMEKNRLQIMPKEITSSINPVLTVLKNQLEKIDNKLHKLIESCDDYKIKNDIVQSVPGVGNVVAFNLISEMPELGYITNNEASSLVGVAPFNRESGTYKGKRMIRGGRAQIRTAMYMAMMSAIQCNPVFKAKYQRLVAAGKPKKVAIIACIRKLVITLNSMVRDGVYWDPQMN

SEQ ID NO: 228868 - protein, 348 aa, unidentified
MEHIGIDVHKNQSQICILTSEGELIEKRIVTDRKRFARVFESRSRDRILIEASTESEWVARCLEELGHEVIVADPNYLPMYGHRSRRIKTDRRDARALAEACRHGIYRLAHRTSDERRHLRGRLAVRESLVRTRARYISLIRALLRREGLRVRSGSAERFVERVGVVEVPALIGQEIEPLLAVMDHLDTQIALADRQLTTLASQEGEIRRLCTVPGIGPVTATSVVATLDTAERFRGAHQVEAYLGLVPRERSSGEKQHKGRITKSGNNRTRYLLVEAAWVLLSRVKQAQAQPLQAWAKRIAARRGKRVAVVALARRLAGILYAMMRDGTEFDAGHFATATDRKRMTA

SEQ ID NO: 228869 - protein, 375 aa, unidentified
MAKTKSVRPPFVVGGVDTHKDLHVAAIVDENNRVLGSDFFATTRQGYRQMLTWMASFGTVARIGVECTGSYGAGLLRHLQNAGITVLEVTAPDKMERRRRGKSDTIDAESAAHAAFSLIRTVTPKTRSGMIEALRVLKVCRKTAVAARRIALQMIQMNIVSSPDELRDQLRNLTRMQLIRTLAAWRPDVTAYRNVQDAYRIALKSLARRYLELHDEIADLDIMIASIVDELAPELIKRNAIGYESASQLLITAGDNPQRLQSEPGFAALCGVSPAPVSSGKTNRHRLNRGGDRAANSALHIIAIGRLRTDTKTQEYVAKRVAEGHSKMEALRCLKRYIAREVFTLLRNQNRQINSTQIGVETAGITAQWSASSGV

SEQ ID NO: 228870 - protein, 405 aa, unidentified
MGKATAGQTTGRVVVGMDPHKRSVTIEVMAGDETVLGGGRFATTAEGYRAMQAYAGRWPDRVWAIEGCAGIGGHVASRLLGDGEQVVDVPPKLSARMRVFATGQGRKTDATDAHSVALVGTRRAGLRPVVDDQQLAVPRVLVDRRRSLGDDHTRMVAQLHHLLLQLIPGGAKKDLSAAQAKALLASVRPRDAAGKARRRVAAELIADLERVYQRKKAANKELEALLAETGTSLLALNGIGPSGAARLLVEVGDITRFPSRAHFASWTGTAPIDASSGDQVRHRLSRGGNRQINRVLHIMATVQLRNPSPGRAYYDRRKADGKTSMEAMRALKRRLSDIVYRTMLGDAIHPTHAGAAAAQRTGPGGHSGAATNSSAVDSNPGIDASEKSLPGPATEQPTTPLPTAS

SEQ ID NO: 228871 - protein, 312 aa, unidentified
MEFSSDIERGCGIDVHKDTVVATIAGKGLKKQTKEFSTYTGSLTCLRDWLTDNCVTHAAIESTGVYWKPVFNIIGNDVKLILVNARHIKHVPGRKTDIKDSEWICQLLLSGLLRASFIPPKDIRELRDMTRYQLKLQQQITAEKNRIIRELEDANIKLSSVLNDVFGSTGSKVINAIVEGENDPEGLVQFYHKRMKVSRNEFKEALKGRLTEHHRFMLRQMKKRILSIEEQMEEIDCEIDKRVAPYENVIELLTGIPGVKRKGAIGIISEIGIDMSVFENEHHLASWAGLSPGNNESAGKKKVLELLPVTNT

SEQ ID NO: 228872 - protein, 340 aa, unidentified
MNATTYGLDVAKRVFQMYWVDAQTGEIVNRRFGRDELIGFLAQRPAGRVALEACGSGHWWARKIKALGHEVVLLHAKFIRPFVQTNKTDAADARAIWTAVQQPEMRTVAAKTEDQQAMLSLHRMRALLVKFRTMQVNQLRGLLYEFGATFRAGRVAGLAEIRARMAELADALPEAMLCSLQDQLQRIDALEQDIDRLEQRIGAWQKQEAECRALAEVPGIGKLTATALVATMGDAKTFKSGREFASFLGLVPRQSGTGGKIRLGSISKRGDPYLRTLLIHGARSVMCHAKLPTTWQKGIQARRPANVAAVALAHKMARTAWAILAHGQAYRKDYVSVKPA

SEQ ID NO: 228873 - protein, 345 aa, unidentified
MSESYSGRQFVGIDLHRRRSVIVRMTTDGDPLECIRISNDVERLSTVMARAGEAPEVVLEATYGWYWAVDALQELGAHVHLAHPLGVKAFEYRRVKNDERDARDLADLLRMGRLPEAWIAPPATRELRELVRHRAKLVGIRSNCKAQIHAVLAKCGIQISMTDLFGLAGTELLDRLQLPKPYAARIASLRRIITALDFEIDAFAGQVRARLARDPGFVAVQAIPGIGPILGAVFVAEVGDVHRFTRAEELTCWAGLTPKHHESDKHVHRGRITKQGSRLVRWAAIESVQILPKTSVVGRIRDRVGDRRGRNIGVVAAARRQLEFVFYALRDHHVRALQGTRPVAA

SEQ ID NO: 228874 - protein, 352 aa, unidentified
MRYLGMDVHGKSTVWCLVDERGEVVREGRIPTTAPALTALMRELAAEGEVLAGQEVGTLTYLVHDAVTAAGTTILSFNAHQLRMIAASRKKTDRRDAYWIAKALQSGMYPHPVYVPTGEIRELRAVLSRRRVLKAEHNRWRYRGRAYLRAAGCPAAPGAAALRTALRPGHEPQTGSVPWLAESVALCQRQEAALRLELQRVDAALAARIRAIEAIGRLLTVPGIGPLTATTIYAWVGDVRRFPNAKALAAYAGLVPTVRQSGGVSTYGGITKQGAPALRVTLVQAAHVLLSRCRSAEAAPLQAIGLRIRGTRGRRKIAVVALARHLLRIAYYLLRDGTTYEAARLGTMTPAA

SEQ ID NO: 228875 - protein, 391 aa, unidentified
MIYIGIDVAKDKHDCFITNSEGEVLFNAFTIPNNADGFHDLFQKISSLTNDFSNVKVGLEATGHYNYNLLGFLIDKGLPTFVINPLHTNLFRKSLSLRQTKTDKVDAHTITLMMMSGVNLQSYSDTSYHNEELKSLTRYRFDKVQERAKLKTSISRLVNILFPELEKLVPSLHMVSIYALLAEFPSSAQIASCHLTRLTNLLANASKGHYNKEKAIEIRNAAKHSIGSNMPAKSLELKHTIRLIQELTSEIDEIECFIKSIMDEIRSPILSIPGINYRMGAMIIAEIGDFNRFSSPDKILAYAGLSPSTYQSGQLDGCYSHMEKRGSRYLRYALFNATKFVCIWDNQFSAYLAKKRSEGKHYNVAISHAAKKLVRVIYQLEKSGQLYHRAA

SEQ ID NO: 228876 - protein, 310 aa, unidentified
MENIIVGIDVSKDRLDVAVRPSGEFFVVERNAAGLEQLIKRLKAISPRIVALEATGGFETVAAAALASAELPVVIVNPAQVRSFAKAIGQRAKTDPIDAAVIAHFAEATKPEPRPLPDEATRLLADLVARRRQIIEMIGAECQREKRVTVPRLKKSINRLLKALKKELASVDADIDDAVRGSPAWRDKEDLLASVPGVGPTIARTLIAELPELGQLGRKQIAALTGLAPFTRQSGQWRGNSFIGGGRAPVRAVLFMGAMVAKQHNPVLKAFFDRLVAAGKPKMVALIAVARKLLTILNAILRDNRPWQTA

SEQ ID NO: 228877 - protein, 476 aa, unidentified
MHDLGAARGTSSRGDQSMSRTRKTNRCEHSTSNDKPQPLPILQPNAAGLDIGATEIYAAVAGDRDQKPVRCFGTFTVELLALAAWLRQCGIETVAMEATGVYWIPVFQILEARGFEVCLVNPRYFQNVPGRRTDVSDCQWLQRLHSVGLLQGSFRPPQQVCALRSLTRHRDNLIQLASTHILHMQKALDQMNVQLHHVLSDITGLSGLAIIDAILDGERDPAVLAELRDGRVQASAETIVQALTGDYRAEHLFTLKQSLECYRHYRKMVASCDREIEQLLKKFEARVDATTKPLGTPKVRRKPVRNQPKFDLRKHLYRIFGVDLTEIPGISVLTAHTILSEIGPDLSKFPNDAAFTSWLGLCPHNDITGGRVVSSKTRRVKNRAALAFRLAANALWRSQSALGDYFRRMRAKLGAPEAITAAAHKLARIVFHMLSTREPYDESLVRNHEQQFRARAEARLRAQAKALGYSVIAATA

SEQ ID NO: 228878 - protein, 468 aa, unidentified
MTPRKGKDFRTSPRDDPLTVTHRHAAGIDIHAAVHFVAVAAADLPEGFINPDPKLPAEVRKFGANTGDLEALAAWLKDCGVTTVAMESTGVYWIPLYELLASQGFAVLLVDPRQTKHAPGRPKSDVLDCQWIQRLHSYGLLTGSFRPADEIVQWRGFQRQREMLIRYAAQHVQHMQKALEEMNVKLTEVVSDIVGVTGMKIIKDIVRGVRDPRRLAKHRHEKCKATEAQIASALYGNWRKEHLFALTQALQMYEFYQRQMRACDAEIETCLRGLADKSKGAKLPPSSRPLDRRRNAPRFGARALLFRMAGVDLTVIEGISETTALVVLSEIGLDLRKFPSEKNFVGWLGLCPQHRGSAGQISNRRVRRGANRAARALRMAAQACHHAKNALGAFYRRIQARCGAPKAVVATARKIAERVYRLLKYGHDYVRQTEQRYEEAFRLRTLKAMARKAEQMGYHLVPVVPATP

SEQ ID NO: 228879 - protein, 348 aa, unidentified
MSKISQYVGLDVSLKETSICVIDEAGKIVWRGRTDTTPEAIASAVKQHAPNAVRIGLESGQLSTWLFHELKAVGLPVICVDARHAKAALSLKVSKTDANDALGLAQIMRVGWYREVSVKGLDCQAVRTLLVVRAQLVSQVTTLKNCVRGVLKTFGLVLPKGLRSQFPGRVRAAIDGHPVLGAIIEPTLLVLEATRAQLIVYDRAIIQRARSDDTARQLMSAPGVGTVVALAYMTGVEDPARFKRSSSVAAYFGMTPRRYQSGEVDRAGHISKCGDGMVRGLLFEAAKVLLSRSARPSALKTWGEALGKRIGPKKATMAVARKLAVILHRMWITGTTFQWNAEAASLAA

SEQ ID NO: 228880 - protein, 356 aa, unidentified
MNQVESVRSGHVVVGVDTHKHIHVAAVMDTIGGIIATLTIATDTGGFRQLVDWAASFGRILTFGVEGTGSYGATLASYLRRHGHKVVEAGRPDRRLRRINGKSDTIDAENAARSVLAGFATAVPKTADGDVEMIRQLKIAHDSAVTDRTAAIITIKAMIVHASDELRHETATKSPLMLARHLAALRPRALETPEDALRHSLRSLARRWLGLDTEAKEMSAMIADLVVRTAPQLLDQFGIGVDTAAEILIVAGDNPERIKSEAAFAKLAGISPIPTGSGMTSGRHRINHGGHRQLNAAIYRTVIVRMRYHQPTIDYVARRTTQGKSKRDIIRCLKRYVIREVYHLIKINPRTGEIAS

SEQ ID NO: 228881 - protein, 415 aa, unidentified
MDVVADRVAGIDIGKADVKVCVRVPGRRAGSWQRQVRTFATMTKDLLALRDWLAAERVRLVAMESTGHYWKPVYYVLEALVGPEQCWLVNPEHIKKVPGRKTDVSDSEWIAELAAHGLIRPSFVPPPPIRELRDLTRSRAALVHERTRYVQRLHNQLEDAGIKLSLVASDIMGVSGRAMLAALIDGERNPERLADLALGRLRSKNAALTDALTGRFSEHHAFLCQLLLDQIDHLDAAITRLDQRIDTAIEPFRGQIRRLTTIPGVSQRTAEVIIAETGGDMTKFPSPAELASWAGLCPGNNESAGRHLSGRTRHGDRWLRGALGDAASAAARTKNTYLAERHRRLLRRRGKKRALVATARSILQAAWQIITHDVDYHDLGPDHYLTRVNDPARRAQRLVHELHALGYEASLNPVA

SEQ ID NO: 228882 - protein, 309 aa, unidentified
MKQSIVYIGIDVAKAHLDVAWQEQSRRFANDKCGQAALIKWLKQSTFPVQLICEASGGYEQALVESLEHTDITASVVQANRVRQYARAAGILAKTDKVDARVLAAFGAAMQPKATPPLCPEQKRLRQYEAQRRHLSAVLVAEQNRLAQLSYAELRVLSRSLISKIKKQIATIDARINALIAQDKQLCQKAQKLTSITGVGARTAALVLAQMPELGQLNRRQAAALGGLAPFNRESGTLRGKRTIFGGRRALRSGLYMAAMVAARRNPILCSFYQRLRAKGKPHKLALTAVMRKLLLVLNQNLKPITSPA

SEQ ID NO: 228883 - protein, 423 aa, unidentified
MEVLHECVAGLDVHKDNVVACVRTVSGDKTTREHRTFDATTDGLLALLEWLTSCRCELVAMEATGVYWMPVWRILSDGAFKLIVVNAAHIKAVPGRKTDMKDSTWLADLAAFGLLKASFVPDEEQHELRALMRTRKQLVREQTRHVQRIQKTLTEANIKLDSVISDIMGRNGRRMIEAMITGVRDPRKLAALADQRLKATPKQLYDALHGRLTEHHRFLLQLHLGQWDTLDATIKGVDREVATRVFRMDTEVTADKANFSDLIDQLVTIPGVSRLSALTILSEIGTDMSRFATAGHLVAWAGMCPGQNESAGKRKRTRLRKGAPWLKTMLVQCAWAAKRKKDSYYKAQFFRLQSRRGPQKAICAVAASLLTAIYHMLKDGTIHQDLGSGYFDQRPPEIKVKRLVNQIAKLGFEVTLQPIAKAA

SEQ ID NO: 228884 - protein, 366 aa, unidentified
MKKTSTVRVNGNMIFKGHQLTTGLDLGDRWSNYCVLDEAGEIILEQKVAMTPEAMKQIFEKIPQGLIALETGTHSPWVSRLLTELGYKVIVAHAQKVQLITKSNRKDDRHDARTLARLARIDPELLGPVRHRSAKAQIHLTVIRARAELVRARTALVNAVRGLVKSYGQRLPKCGTQQVSRELAAGLHAELREVLQPLLKEIESLNARIKEYDERMERIAKESYPQVELLKQVKGVGTQIALTYVLTLDDPHRFAKSREVGCFLGLKPGRRDSGESQPQMHISKEGDRYLRTMMVQGAHYILGPFGADSDLRRWGLNLAARGGKNGKKRAVVAVARKLAVLLHRLWVSGEVYEPLRNSQKAMRAVA

SEQ ID NO: 228885 - protein, 356 aa, unidentified
MSREVKYIGMDVHKEAIVIAVQNARGHLVMESIVETKASSILQFIHGLQGELHITWEEGTWAAWLYDLLQPHVHQVLVCNPRRNALLKEGSKNDKVDAGKLADLLRTGMLRPVYHGEHGLRTLRELARTYQTLSQDLNRVMNRLKALYRGWGIACGGTQAYAPRYREEWLGKIKHVGVRRRAELLYQQLDGLQGLRRTLRPELLAESRKHKAAKLLRQIPCIGPIRAARLLALMQTPHRFRSKRQLWTYSGLGIETRDSAQYRFVRGELQRGKEPQQIRGLNQNHNHEMKEIFKGAATRASCGMGPFREFYVSLLDKGMKPEMARLTLARKIAAITLILWKKEERFDAQQVKTQAA

SEQ ID NO: 228886 - protein, 395 aa, unidentified
MFIVGIDVAKRSHEVCMITSDGQTVQRPFSIRNNCTGYNLMLEKIRKHTNIKSQIVFAMESTAHYWLALFTRLRKDGYHVILLNPIQTSAMRDMFIRKIKTDAKDSFIIAELIRFGRYAENNVAQDRLLALKELCRNRFYLVDMAGDLKRKLIALIDRVFPEYEAQFDTIFCKSSVAVLKKYPTPQKLSNAHLDKLTELLWNSSNGHFGEWKARELKELARNSFGVEDCDGAYSTLILLMLDQIQSLSGKADALEKEISRLFQSFDTTVTTIPGVGPIIGAVILSEVGDISRFSSADKLAAYIGVDPSVNQSGEFQAAHAHMSKRGSPYLRRCIWMASQVAVQRDPMFRAYYEKKAAEGLKYMTIIGHVTRKMTAVVFAILRDHKVYEPVLPTAA

SEQ ID NO: 228887 - protein, 338 aa, unidentified
MENFAGVDLHKRVSQLAVLRKEREPSQLRFLNDLATVEGVLRRLPARTHIALEATGSWWWFVEKARSMGHEVSLSHPKQTKAIASARLKSDKVDALMLARLLRADLLPTVWIPGEKERQIRELLTHRARVVRQRTAIINELQALYAKRNIDFEMIAKRARAVVAGAQDLSGYGPSIVERDVELLRVLNEQIRALDKELERIAQHDAQARRLMSIAGVGPLTAVAVCCWVGDIERFADAKKLASYFGLAPRVSQSGERERHGHITKEGNRMVRSLLVEAALSSIRYSKGPARKHYLGVLKRRGKKIARVAAARKLLGAIFHMMKEGIDYPEYLKRSSAQ

SEQ ID NO: 228888 - protein, 326 aa, unidentified
MAGTTKNSSRPVLGIDIAKKTFDAALLRGEKLSVRGFDNNAKGFAKLSRWVDGQGVDQFHACMESTGVYWEPLANHLHQAQQRVSVVNPLRIHGFAKSELARNKTDREDAARIARFCQLHAPYPWQPLPAERRKLRDLTRHLHAVRKARHQHRNRREGTPPEWLLQSLKRTIAHFDEEIELLWKEIRAHIDGHPELKRQRELLETVSAFGEITATLLLAELPDIERFASARQVAAFAGVTPKHRHSGSSVRGRTQMSKMGQARIRHALYMPAIVARTHNPIARAFADRLEERGKCPMVIIGAIMRKLLHIAYGVLKSGKPFDPQHA

SEQ ID NO: 228889 - protein, 367 aa, unidentified
MKNTIVHHEGAASPKVARTKVKLSGSVIKIGLDVHARLYVAVAQYDQLLPKTARRLAPSEFVPWVEQLLGAGHTLYVVYEACGFGFNLYRELEALGAHCYVIAPRKLDEQCTRVKTDPRDATVLCQRLSRYVEGNTRELAVIRVPTEVEEQARHVSRQREQLVRHRQKLEAQGRSLLVNHSLPAPAHWWKNQTWSRLSKHLPAWICVRLEVHRPALLTLEQQISVLSAELEAAAPADVPAGVGKLTTVVMTREICSWERFTNRRAISCYTGLCPGEHSSGTKRVPGSVTKHGNPRLRAALVECAWRMVRFQPQYPPVKKRLSVLAKGAPATGAQRKKAIVAVARHLAVDLWRVHTGRCTAQQLGLTC

SEQ ID NO: 228890 - protein, 341 aa, unidentified
MIYVGMDVSSKSFMVHAIGEKKKTLFRGEVSPTRSGLDKMLRELGPQQKVVAFEAGNQMKWIALHLMKKESVKLHVVHPNEVKWITESKGKTDKVDAKKLAELSRGDLLPRPVHIVEGKVRELRELVSARHLLQSKRIALINSLRGFVRQEGLRLPVKFFQRKDWKGELSAFKGSSPLKRVIESYMSAIEALASSEKELTERICEIDDNRIELLKSIPGLGELSSRVLLSAIDDAKRFDDRKAIANYGALTPTIYQSGSVTRLGRINRDGRHEVRRVLIQSAHTITRMKSPAVKPLKEFFERISKRRSKKIAIVALSRKLLTTAYGVMKTGTTYDPAKLAA

SEQ ID NO: 228891 - protein, 434 aa, unidentified
MKNDIDRIKRYREFIAEIRQVNHYLIIGIDISKSSHHAFFGTASGKTIKRRLVFKNHLAGFCNLVEVSNALLLQNGLSKLAFGMEPTGNYHKPLGSWLIGQGYDVFLVSGIAVKRNRELLDGRWDKNDKKCAANIADLLIQGKCLYYDLPDPDIDSLRSLLSLRERMKKTSHILKMRIRNNLIAKHFPEYDSICTNCPQISFLVVKHCLSPKKIAAMEFGKFALTVTSSKYSRPQERHLLAAYSLARDSIGCEVTEHTQYEASILVDQFLQTKKLIGKIESRIDKIASRFEEYPYLLSIPGFGVYITALVIGKIGNPFRFQNKKQVLKMGGFDLSAFRSGKSSNNAYPVISKKGSSALRYGLFQAAVIASARNSYFIKYYTNQLKGRERDRGIKIKMRVKLAAKLLVTAWTIMKQKVPFDENLFGTVIQAKPNS

SEQ ID NO: 228892 - protein, 329 aa, unidentified
MDSRSSFPIVGIDVSKATLAVCYQVEDHLKHVEVSNSKAGFQQLVKTCGAHCLFVMEATGTYNLALAYYLHEQGGQVAVLNPLVIKRFIQLHLSKGKSDRKDAQWLLRYGQQQPVKVWQPEETVLVECRQLEQVTEQLLKQKTMVGNSLEALQRQPIISKLAFQHLQQTLKALTQQVAAVEAELLTLLEQRFAPEMTLLCSIPGIGRKTAGMLLLFAGGFTRLDNYRQLIAMAGLSPREHSSGTSIRGKVRITKMGGGLIRGKLFMCSFSAKKTNVACQALFERLVAKGKNKKLALIAVCNKLLKQAFAIVNSGVPYQADFCSKLAGKA

SEQ ID NO: 228893 - protein, 415 aa, unidentified
MNNSKSQKTRFIKNEMIVGIDIAKHIHYARILFSDGSESLPFSFNNNKEGFEALVGWFEFQKNKWQQESIIIGLESTGHYWEALAFFLESTPGIKLVQVNPKHVKKTKELYDNSPGKTDRKDAGIIAMLISMGRYQRLILPRGHFAELRSYAKLREQKVVELGVQRNILHSVVDRVFPEYGDIFNKIESKTSLAILKKYIVPERIVRAGLKRLSAFIWKASRGQHSVERAKILMEAASITIGSNEGLEARTFIISRTVETIERIQKDIAVIGGKMNAVLHNIPYANRLLSIPGIGSISLAVILGESGDFGRYERAEEVIKLAGLNLFEISSGKRQGRRHITKRGRSLLRKSLFFVALRTVKTGGAFREDYLRLTETNQMQKTKALIVISKKILRVFFALVRDGVEYKQLILQLAA

SEQ ID NO: 228894 - protein, 343 aa, unidentified
MQTITTIGLDIAKSVFQVHGVDAAGQVVIRRQLQRRHVLAFFQKLPPCLVGIEACASSHHWSRELQALGHTVRLMPPAYVKPYVKRQKNDMADAEAICEAVTRANMRFVPTKTPEQQSCLMLHRTRHLYIRQQTAVINSIRGHLAEFGIVAPVGRKGVTELLHVVADPSDKRVPEVARACLAALGTQLLSLKQQILEFDRMIMAWHRSNQTSKRLHYIPGVGPMLATALVASVADPRTFRSGRNFSAWIGLVPKQHSSGGKERLGSISKQGDRYLRSLFVAGALAVIRYAKIHGTGHRPWLAALLGRRPTKVAAIALANKIARMAWAMMAKGERYKQPAALAR

SEQ ID NO: 228895 - protein, 343 aa, unidentified
MEHYAGIDVSLESASVCVVDATGRIVREAKVASEPEALIAWFRKLGIELTRIGLEAGPLSQWLYAAMRDAGLAVELLETRHVRDAFKAMPVKTDRNDARGIAQLMRLGWFRPVHCKSLPAQETRALLTARKLLQAKENDVEMSLRGVLRGFGLKVGRTTPRSFAARIRELVDGHPTLMAIADALLAARDVLGAQLQGLERRLRSLARGDTRARLLMTTPGVGVIVALTFVAAIDVPERFHSSKSVGAHFGLTPKKYQSGETDVTGRISKIGDGSVRTALYEAANVILTRPVKGSTLKSWAARLAKRAGMRKAKVALARKLAVVLHRMLVNGASFVAEKAATAV

SEQ ID NO: 228896 - protein, 475 aa, unidentified
MAFVRASGFNRKQRKDLARRLRSEDPGLEVMHPHAAGIDVGNSAHYVAVRPDRDPDPIRRFECFTTDLHRLADWLQQCGVTTVAMQSTGVYWIPLYEILDARGLEVYLVNARHTKNLPGRKSDVQESQWLLKLHTYGLLRNSFHPPAEIRVVRTYWRQRGDHVHAVSTCIQRMQKVLTQMNIQLANVISDLSGWTGQRIVRAILAGERDAETLAALSHPGIRATRDTIAKSLEGTWQPDLLFVLQQEVAMYDSYQQRIAECDQALEQHLKSIGDKVAETRPNPEPAPMTSPSARPRRRRKAGSHAPQFDIGHELHRISGVDLTRIDGIDVGVAQTLISEVGVDMTRWNTEAHFASWLGLCPDNRISGDRVLRKGTRHVVNRAATALRLAATTLLRSQSYLGAQYRRLRGKLGAPKAITAMAHKLARLVYRMLKWGHEYVDKGLQYYEERHREQQVQLLKKRAAKLGLQLVAPEVP

SEQ ID NO: 228897 - protein, 322 aa, unidentified
MAEPAEIQSVLGLDVSRNTVTLCDGRTRHTVTIANDADSLRAALLPYQGTATLAVCEATGGHEDTLLGVLLELAVPAHRADPAKVKAYIKSFGKRAKNDPIDARWLSRYGRDRAATLPRWQPVDLTQQKLELLVARRLDLVAMRVQEQNRLKARRSRLIADNICDHLAELERHIEALNAEIDTLVGESRDLALRAEQLRSVPGIGPVLVPLLLAVMPELGTLNRRQVASLAGVAPHPKDSGKASSHRSTTGGRRQIRPALFIAALAACRGDNPLATAYKALLKAAKPKRVALTAIMRKIITIANARVRDALPHQNEIMPINA

SEQ ID NO: 228898 - protein, 325 aa, unidentified
MILGIDIAQEKFDLALYQGKELVASGQFANNAAGFKKLSKWLNNKAAGQVKACLEATGRYGDALALYLYQAGHQVSLVNPARIKKYGQSQLQRNKTDKLDARVIADFCRTQEPGLWRPPAPEKRELQEMVRRLSALIKEQTREHNRLTAGLQSQVVKESITANLEFLAAQIAKLEQQIQQHIEQHPGLKRDKELLTSIKGIGAKTAAIILAELPEVDHFDHAGQAVAYGGLNPEQHDSGSSVHKRSKLTKTGNQNLKTALYFPALSAIRHNPIVKALARRLEEKGKEKMVIIGAAMRKLLQLAYGVLKSGQPFDPDYATKIQAAI

SEQ ID NO: 228899 - protein, 376 aa, unidentified
MDTSTAAGSILHCALELSKNTWLLGIQFPDRPQPSLYPIKGGNTEDLMAKLTAARDRCAKLNGRAPSIVLCYEAGYDAFWLARFLKARGIECLVVDSASMQVNRRARRPKTDRIDVGKLLRGLIAWLQGDRHVWSVVRIPSVDEEDLRRSHRERDYLVHERTAHINRIKGLLFAQGIRGINVKRQYKTLNVDKLVTGNGHPIPPRLASEIVREIARLALVQEQIATLERERDERPTPCTATEKKRAQLMYLNGIGPAISAVMTREVYYRQFDNRRQVAGFLGLAASPYDSGEVERSQGISRAGRGQVRGTMIQAAWLWIKHQPKSTLTRWFLERTMGQGGRVKRIMIVAVARKLAIALWRFLEHGLVPQGAILSSK

SEQ ID NO: 228900 - protein, 318 aa, unidentified
MSLKIVYKICCGIDVHKTFVVACIASTNDKGITSYESLRFSTYTSGLKTLLQWLLNWNCKDVCMESTGKYQIPVYNILENDCSIVLAHPKYVKAIRRKKTDKKEAKWIADLFKHNLVVCSFMPPVDIRQLRDLMRYRSKLTCFQSSEKNRLHNCLMVSNIQLGNVVSNTFGKSAQSAQAIPDKLLENPADTSFNLEPLVYKSLKKKLPELRDAIDGYITPEQAGKLKVIKAHYESLESRKAELEELILALAAPYQQELAILQTAPGIRNDFTAIGIISEIGSNMEAFSSTKHLCSWACLTPTNNESAGKKKSVQFSKA

SEQ ID NO: 228901 - protein, 393 aa, unidentified
MLYLAIDQHKNQMTINIRNEQGDVIQKGQISTAHAEVDDFFAALVKKARKHRGYMAIVEVCGFNDWLLEKLKKTRCSEIVVIQPDNSAVNKTDKRDANALGELLWNNRKRLQGGQRPNGIRRIFPADPTDAQVRQLANFRQHLVKQRTRVINKIKGIFNKHNMAQDAPTEDCSTKKFRQWVAKVALPVVDRFEIDKHIQTWELYDKQIIEVESELVKRSETRVKDVLRLKAIPGISAMGAITLLSRIGDIKRFKNPDSLANYFGLTPGCHNTAGKHRVGGITKRGNTVARHVLNFAVNHLVRKDPAMKAWFKKIKSKRGAKTARVAVMRRLATIIWHILRWEKPYQFRYDPPTPAPKKGDRRSPKEVFGGMGNRNHSPGKRGTPLKCRCKTRA

SEQ ID NO: 228902 - protein, 481 aa, unidentified
MSKQKKHPPKSGEEKAKASQGKRVRRRKGMCLENRPVLEPNACGIDIGAREIFVAVPPDRDENPVRVFSTFTEDLEAMARWLVSCGVTTAAMESTGVYWIPPYDVLEQHGVKPCLVDARGMKNVPGRRTDWHECQWLQFLHSVGLLRAAFRPDGDVCAVRTLMRHRSDLVQMTSQHIQHMHKALTQMNLQIHHAISDITGSTGLAIVDAIVNGQRDPLELAKLRDPHIQASEETIRKSLKGNWRPEHLFTLKQSRRMYQHYQEQITACDEEIEKLLVAFQPRVDPAEQPLPPDRKRKQRGRKKKNANPKTGFDLRTESYKLFGVDLTQIPGLMTMVFTLFSEVGRDMSRWKTAGHFVSWLALCPDNDISGGRVLWKGTRRVHNRAGDLFRMAAYSLHHDSTPLGDYLRRMKSKLGPAGATTATAHKIAIIFYTMVKKQVEYDATLWAERDAEREKRFEAKLKRQAQQLGYKLVPIEEKPAA

SEQ ID NO: 228903 - protein, 345 aa, unidentified
MHYIGLDVHSKVTMMCILDDNGNKTERKLPGSLRDLVASMVKVKKELGGPIKVCYEASSGSGWLFDQFTAMGLKTQVAHPGKLRLIFRSKHKNDRVDAAKLALLLRLDQVPLAHMPSAAIREWRAFIAYRSRLVVGRGACKNRLRALLRSVAIVPPRGLWTKKGLAWLAAQELSPFQRVQRELLLQELADAQKRIREVEKELKTFADTMPSVALLMTMPGVGIRTAEAVVAYVDNADRFRRNKSVGSYFGLTPCEDTSVKIRMGHITKDGPGLVRRLVTEAAWMAIRRDPAVRAFFERVQKGDPGRKKIALIATAHHLLRVMHAILRTGQPWRTTAAKNADAAAA

SEQ ID NO: 228904 - protein, 478 aa, unidentified
MTPPKDYCLEAPCPPTPLLPPLPVLSDALQVCHPHAAGIDIGEAEHWVAVPPGRDPQPVRRFGTFTADLDALADWLLDCGITTVAMESTGVYWIPLFELLEARGVQVFLIDPRQAKRAPGRPKTDRLDCQWLQRLHTYGLLAAAFRPADEICVLRSYLRHRQMLLTYGAHHIQHMHKALQQMNLKLSQVVSDLTGVTGMAILKAILAGERDPLTLAKLRNPHCQHSEDEIAKALQGTWRAEHLFALRQAVDLYQFYHQQLTLCDQQIQTHLGTFADKSHGQPLPPKARRHKKANEPRFDARTPLYRLAGVDLTTIEGIEEGTALVILSEIGTDMSRWPSVKHFCSWLGLSPQHKISGGKVLSRRVRPGAQRAAVALRLAARTLHKARTALGAFFRRLRSRLGAPKAITATAHKLARLVYTLLKHGSAYVQQGLDAYESQYRERKVKAMARQAKALGYTLVALGTPEVARLDAVTAPTP

SEQ ID NO: 228905 - protein, 387 aa, unidentified
MQKPHDNSKASPAAFMQDYTLIAVIELSLSNWLVAGLIPGVSREPLKKLEPNPEDLLKLLHGWRDEAIKAGRPITRIAVAYETGRDSFWLARWLRERGIDAHVIHATSVTVSREHRRAKTDRLDTAMLKRGFLGWLRGERGHCTVAIVPTMEEEDAKRPHREREGLVHEQTRVVNRMKSVLIQFGVRNFNPKLRKARVKLETVRTPEGKSLPPNTIAALRRDMERLKIIKEQIKAIEQARLQQFEQKPEALSNRMVYLLVRIYGLGWETADLLVHELLSRTLRDRKAVARYAGLTGSPDESGSKRREKGLSRSGNARVRKIMIQLAWRMVKFQPDSALVQWFKQRTENAKGSRKPMIVALARKLIIALWRYANDGVIPEGFRLHSAA

SEQ ID NO: 228906 - protein, 368 aa, unidentified
MDDDITVFVGLDVHKDSIAVAVAPAGRSAPRFVGTCGARLAELIKAVSHLGKPANTLLAYEAGPCGFALARQLVAAGWRCQVIAVSKVPVRPGSRIKTDRRDALTLAGYLRAGELTPVVIPDAGDEAIRDLSRAREDAVRARLKARQQINAMLLRHGQRFPGKTRWGPAHERYLSDIAFGHPAQQIAWAEYRSAVTDAHQRVQRITAALREQAEHWRFGPVVHALMCFKGIDFVAAVTLIAELGDLYRFEHPKQLMAYLGLVPSEHSSGESRARGSITKTGNSHARRVLVEAAWSYRNSARMSRPVTERNQGQPKAVRDVAWRAQLRLCSRYRRLAARGMHANKVCVAIARELAAFVWEAARCAQPQR

SEQ ID NO: 228907 - protein, 361 aa, unidentified
MAATNSVGVDPHRTTFTATALDSRGGKLGHAHFPNSRAGHAAGLAWAAQFGPADRWGIKGASGLGRQLAEFLVAAGCDVRDVPPHKTSARQYGRHEGKTDRLDSHRVAAETQTNLRLAPAFKQAVSAAPDAVRERIALWHSARTSLTKIRVQLLGELDALVHDLPEDLRAQLRPAKTVSARVNSLRRLDTSAVTDPTVALRLRLIEHRVAMLRDVLEQDKVATAELSELVDETNSTLTTLVGIAPRAAAEIIVEVGDVRRFSEAGFARFNGTAPIPASSGEGEHAPIRHRLSRGGNRRLNAAIYRIAMIQLRYEPRARQIHDQARAHGHTRREAMRVLKRHLSNAIYRTMLRDARRSGGLT

SEQ ID NO: 228908 - protein, 352 aa, unidentified
MKEYIGCDSHQRYSVFVRVNEGGQAGAAERVENDRATMRQYLRRLPAGSAVAVEASGGWYWLVDEIEGAGLIAKLTDPKEAKQRMRGRNKTDEIDARGLAYLLYDERLPEVWIPPAELRDLRGLLRTRLSMRRVTTSLKNRISAAIRRYGLREDECSDLFAGTGRVHLSSYIGWLPLQTRFAAQEEWALLDETEKRIKRLEDRIADRIGKVGWVRMLKSLPGVGDILGATLWLEIGDVKRFHSAEHLASYAGLTPTVFSSGGKTHMGPTPKSANHYLKWAFVEAASATIRQKNKYAFTHVGRVYERIKKQKCSAKAKVAVGRHLAEASYWILTRKQFYREPAPALVASSKNG

SEQ ID NO: 228909 - protein, 344 aa, unidentified
MPIVGGLDIHRKQITFDYLDTATGEVRRGQIAPADREHLAAWLAGRFTGQDVHFAVEGCTGWRYVAEELAAAGVTAHVAEPADTAALRGRKRHAKTDKTDSRHLRQLLADGRLPECWIPPSHILECRALLETYHDLRVEHTAWTQRIHAALFHQGAPQLGGQRLRTGEGLAALQAIAAQLSPAGQLQIAVALDKLAALDRHLDVLRRRLLEAARQLAGARELHARLYGVGPITAVALVCWLGGAGRFSSSRKAVRFAGLDVTVWSSDRKGPPGRLSRQGPAVLRWCVYEAGKTHARGSAPDHGYYASVKDRIDGKRAAISEARKIIRQAVHILAELGDGALAAA

SEQ ID NO: 228910 - protein, 346 aa, unidentified
MLIVGCDYHPRWQQVAWFDTETGEIGEQKLVNGDGEAARWYGQLPVPSLIGLEATGNSQWFLDLLNQLGHEVWVGDAAEIRASYVRRQKNDRRDAGHVLKLLREGRFSRLWVPSAEQRDLRQLLIHRHKLVQIRSRVKNGLQHLAMNQGMQKKSRLWSVAGQKAFRQLPLVGWAQCRRQDLLQLLVYLDQQIAPLDQAAQQAAEQDPQARLLLSQPGVGPITALAFVLTIGDVTRFPRGKQVASYLGLIPREHSSGGRQRLGAISKQGNSFLRMLLVEAAHSVVRLDEGFRKQYAHRCHSKPKGIAKVAAARRLAVRLYWMLRTNTPYPEIVRIESSPRVPLVGKS

SEQ ID NO: 228911 - protein, 407 aa, unidentified
MIYGGIDVAKHSHEVCLVNDSGDIVLRMHLDNNHKGMNKLLQALERLGLKPDDVKFCLEATGHYWLPIYCYLTNQGFELHVINPIQSDALRNLYVRKTKTDQKDALLLADLLRLGRAPETRLPSETTLKLQSLSRLRFEFVRQVGGLKNRVLGILDRIFPEYPDCFSDVFIRTSRELLKSYPEPEELAEVDLSELSAFLKEHSRGRFGEERAKKIQSLAKGTFGITMALDAFTLQLRLLVEQIEFIEEQIRVIEDAINEVMEELRPSKDTPYRHVIETIPGIGPVLAAAIIGEIGDISRFPNPRALVAYAGLDATVRASGLFEGTRNRMSKRGSPVLRNSLWLAAVSARRFNPALRAYYEQKRSQGKHSNVATGAVARKLVHLIYSLWKDNRPYDPDYQWSPPGKNT

SEQ ID NO: 228912 - protein, 461 aa, unidentified
MKKKNPTGKQKGSVQKKVDWRALEIVHPDAAGIDVGGSEHWVAISPDRDPEPVRRFGCFTADLREMGQWLVEKGVRSVALQSTGVYWMPVFEVLEQQGLEVYLVNAQHTKNVPGRKSDVQECQWLLKLHAFGLLNNSFQPTDEIRIARTLWRQRGNLVAEASTTIQRMQKALTEMNVQLGNVLSDISGLSGMKIIGAILEGKRDPWELAAMVEPGVKATPEDIAKSLEGNWRKELLFVLRQHVELYRIYQKKINDCDLQLRKHLESLGSKVDLKKQPMGPRPQGKKKSRNAPSFDLRTELYRITGIDWSQINGIDVLTAQTVIAEAGTDLSAFPSEKQFASWLGLCPTNEQSGGKILNRRTRKVVNRATVAFRNAALTLLRSQSYLGAQYRRLRTRLGAPKAITAMARKLACLFYRLIKHGQPYVDKGTEYYEDRYREQQIRSLSKRAQKLGLELVIPKIS

SEQ ID NO: 228913 - protein, 341 aa, unidentified
MSIVGAFDVHRRQLTFEYLDTGTGELKRGRVVPADREHLRQWLARFDGHDDVHFALEGCTGWRYVAEELAAAHVTAHLAEPADTAALRGRKRHAKTDKADARHLRVHLLAGDLPECWIPPEHVLEARATVRLYKDLVDERGAWHQRIAATFFHQGVPAGVSAAKPAGRAAAADADLSPAGRQAVEAALRQVDRLTAELDPLRRQLDMYSRRQPGCAALRRAHFGIGAVTSVAIWAELGDVRRFTSSDHVVRHTGLDITVHSSDIKRPPGKLSRQGPPLLRWALYEAAKSASRPAAPDYGYYTATRERRDGGLATLSVARKLARRCYHTLRELEEEALAPAA

SEQ ID NO: 228914 - protein, 301 aa, unidentified
MSHKTAATVAHTIGIDTGKNTLHLIGLDDQGAIVLREKIARGRIAARLANVPRCLIGIEAGMATHYVARELGALGHDVKQVPPAYSKPFRQGHKNDFRDAHAIAEAVQRPSTRCVPVKTDDQLDLQALHRVRSRLVGQRTAVINQIRGFLLEHGIAVRQGLRFLRQQLPDILAKRSDVLSPRMIRIMEDLSGDWRRLDERIEHITKEIEVLAGTDVNCGQLMTVPGIGPIVASATVAAIGNGAAFARGRDFAAWLGLVPKQMSTGSHDPWPHHEARKSLSAYALRPRRSRHSAPTEELGKA

SEQ ID NO: 228915 - protein, 282 aa, unidentified
MEQVIIGVDPHKLSATIEVVEEHETVLATGRFGTDKAGYAAMRETVSRWPQRVWGVGGSNGAGRPLAQRLLADGELVVDVPAKLSARTRLFDTGHNRKTDAHDAHAVAVVALRTNGLRVLSYDVELEALRMLVDRRGEATRAKVQTVNRLQRLLSELTPGKVKKDITALQAKAILASVRPRDLAGRTRRRLAAEQLAELIVVEKKIKVLTKELKAMMLARGSTLMDLPGVGPVVAARILADVGDVARFTDRNRFASWTGTAPLDASSGEQVRHRLSERVTGG

SEQ ID NO: 228916 - protein, 344 aa, unidentified
MQTMYYIGLDVHKRMISYCVKDGSGAIHAEGAIPATRFDLDRWMKTLPQPWTAAMEATVFTGWIYDHLQPHAAALKVAHPLMLRAIAAAKKKNDRIDANKICDCLRCDFLPECYMAATAIRERRRTLRYRNLLVRQMVQMKNKISMLLMEAGVSYNKQRLHKAGYFRELLATNPAIDEGLCSLLRLCRETVVRLSKTESALVRSLERDSLLIDRVERLMSIPAVGPITALTWALEIGDPQRFPSIKKAISYCGLCGAEKSSANTAQRTPLSKQRNKHLQTTLIEAAKMAPRNSPELAMLYDKEKQKGNANRATLAVARKLVAYLMAVDRGQRNFQVVQTNCIAA

SEQ ID NO: 228917 - protein, 344 aa, unidentified
MEPITTIGLDIAKSVFQVHGVDAGGKTVVQRQLKRRQVISFFRKLKQPCLVGIEACASSHHWARELVALGHDVRLMPPAYVKPYVKRHKNDATDAEAICEAVQRPNMRFVPVKSPEQQAGLMLHRTRHLFVRQRTAVSNSIRAFLAEIGIVAPIGRRGLDELLKLIAEGKDQRIPPPARTCLIALSIQLDALREQIRILDRRIVGWQRTDEMAKRLVALPGVGPALATALVASVADPRVFRSGRDFSAWVGLVPKQNSTGGKARLGNISKQGDRYLRSLFTAGALAVIKYAKQHGTQHRPWLAKLLDRRPTRVAAVALANKLARMAWAMMASGEAYREPVALAR

SEQ ID NO: 228918 - protein, 269 aa, unidentified
MTLTDGFDAITDELRKYPVVLVLIEATGGLEAAVACSFQTEGFDVAVVNPRQARDFARTMGYLAKTDHINARVLAQMAEVTNRHPGRERFIRAMLDAERQVLAAMVVRRRQLTAMLIAERNRLYPVHPQSRKSINIIIKALAARLSSIKGVGTMTVAALLAEVSDLGSLSRRAISALVGVAPINRDSGTMRGRRTIFGGRGGVRTALYIAALVATRFNPVIKAFYTRLLAAGKAKKVALVACIRKLLTILNAMLRKNEEWDESYHHVSL

SEQ ID NO: 228919 - protein, 412 aa, unidentified
MDRLIQRCAGLDVHKASVTACVRVPGQDGDRQSQTRTFRTTTAGLVLLRDWLASHQVTVIGMESTGVYWKPCYYLLEDDFEVWLLNAAHLKHVPGRKTDVGDAAWIGQLVEHGLVRASFVPPKPIRQLRDLTRYRKALIQERTREAQRLHKVLEDAGIKLACVASDVLGVSGRAMLEALIGGTTDPEVLAELARGQLRKKLPALREALEGRFRAHHALLLGHLLAHLAYLDEAVEQLSEEVARRVVPFSPLLALLLTIPGVDRRTAEVLLAEVGTDMGRFPSAGHLASWAGLCPGSNESAGKHYSGKTRKGSKWLRSALVQAANAAARSKGTYLAAHYARIKGRRGHKKAVIAVAHSILVIAWHLLTRNEPYSDPGAGYFLQRESTEAYERRLVRQLEKLGKKVTLEPTEAA

SEQ ID NO: 228920 - protein, 422 aa, unidentified
MSYCPVAGIDVSKRFSDMCILSPDNKIFAQEKIYHDETSINRANALLQKAERLFFSKPVIVMESTSHYHLILFQFFSEHGYDVIVVNPLQSNSMKDFSIRKRKTDRVDAFKLAMMYRTKTLRPSQIPQTATRALRQLCRHRAELLNDVSSYKNRLTALLDQTFPGYDKVFSDVGGVTSCAVLARFPTPTILLVEEESELVEVIAAASKSGYGFAKKKAGLLISAAQKAQTLGIHSCADETLIVCTIQMLRTLSESVLQIETAIDNLLAQIKEMRNNVSLLQSIPGVGSHSAALLLGEIGDISLFKKPKQLAAYFGLDPTERQSGSFRGTKNKLSKRGSPYARAALHMGVVNSICKRGKDSAANPVLLSYYEKKCKNKPAKVAQAASMHKLVFIIFAVLRDQKPFELKTPEQHAVEQGFVKAA

SEQ ID NO: 228921 - protein, 339 aa, unidentified
MKLYCGIDLHSNNNYTVVQDEQDRVMYRKRLSNVLSVVLAELRPFQAGLEGVVVESTYNWYWLVDGLMEAGYRVHLANTAAIQQYSGLKYSDDNSDAQWLAHLLRLGVLPTGYIYPKETRPIRDLLRQRSWWVRQRTSHWMHVGNILTRNQGHRFSVRQINDLTGEQIGQVFPDRERTLAVESSLKVLGVLDHQIAAIEKQIKSRLRLDPSYRLLETVYGIGEILAMTIRLETGEVGRFPQVGDYASYCRCVGSQRLSNDKKKGENNRHNGNKYLAWAYVEAAYYAARFYPQVRRYVEKKTAQRNHALALKALAHKLARACYYVMRDQVPFEPARLFGS

SEQ ID NO: 228922 - protein, 406 aa, unidentified
MIFVGVDWAEAHHDVHMEDEDGKRLGGGRLPEGVDGIARFHELVGDHVEEPGEVVIGIETDRGLFVTALVAAGYEVFAVNPMSTSRYRDRHSTSGAKSDPGDAKVLADMVRTDRHNHRPVAADTETVQVVKVLARAHQTMVWSRTRQTNLLRSTLREFYPAALIAFDSLNSGDALEVLRMAPTPELGKTLSLSKIAAALRRGGRQRRIDDRASEIQSALRSEQLASPAAVSRAMGASVTASVAVIASMVASIDTLAEELEAAFEQHPDAKVVLSLPGLGTILGARVLGEFGDEPNRYCTAKSRKNYAGTSPITRASGTKRVVLARFARNHRLADAIYLWAFAAANASPGARALYDDRRAAGDTHHAALRALGNRLVGILHGCLESHTVYDESIAWAHRTAPLAEVA

SEQ ID NO: 228923 - protein, 331 aa, unidentified
MQAGESILGIDISKDSIDSVLRSPRGENHRVFPNNHKGFTSLVTWIHKQPEPVVHVCMEATGSYWEGLAEYLFEHGYTVSVVNPYQIKRYGDHLLNRNKTDKADASLIAEFCDKDRERLRLWKPISPEIKTLRSMERRLNELQDMKQQEQNRLQSGFSDPVVIESLQENIELLEEQIKNLKQKIKEHIDQHPELKRSQKLLISIPAIGEQTANKLIAEIGNIEDFASASQLAAYAGLAPKQFRSGSSVHKQTRISKQGRNELRRCLYMPAVVATSYNPIIIDLKKRMLDSGHAMMEIIVAAMKKLLHLVYGVLQHGKPFDPNYAKISEVNP

SEQ ID NO: 228924 - protein, 341 aa, unidentified
MNYQFYLGIDVGKSSFDFALIDEEGTIHLQAEVSNTSASIAGWIIELQDLFPLINIWEKMLICMEHSGYYNALLLKHLDSRENHNIWVESALQIKRSMGIQRGKNDKIDALRIAEYALDFQRKARLWEPKAKNIERLSLLISHRDRTVKNLQSLTTPLKEEAGFINQILHQEMEEISRPSIVALEKSLAEFNLRIEKILKEDIELSQQAKILTSIPGIGSVIASKIIIATEGFTKITNPRALACYSGIAPFEHRSGTSIRGKTRVSHLANKDLKKMIHLAAMVTIRKGNIMHNYYMRKVGEGKNKMSVINAIRNKLVHILMACIRNNTTYIKNFNHSLEIT

SEQ ID NO: 228925 - protein, 356 aa, unidentified
MNDAKYIGMDVHQATISVAVRNSRGNLVMEAILETKAETILQFIRGLRGSLYVAFEEGTWAAWLHDLLQPHVARVLASDPRKNALLKAGNKSDRIDARKLSELLYLNKLSPVYHGEQGIRTLKELARSYITITRDLTRVMSRLKAIYRGWGIPCAGQQVYAPRYRAEWLSKISEAGVRRRAELYYQQFDVLAALRQGTRRELLAESRKHPAMRLLRQIPAIGPIRAALLIALIQTPNRFRTKRQLWAYSGLALRTYTSGEYRFVAGQLKRSKKVLAVRGLNINHNHDLKNIFKGAATRAAATAGPLQGFYQACVARGVKPHLARLTLARKIASITLLVWKKGARFDAEHLKQQAAY

SEQ ID NO: 228926 - protein, 389 aa, unidentified
MNEHILYIGLDTDKNHIDLAVAEPLPGGEVRYWGKVANEGAALDRVMKRLQRGGRQLKVCYEAGPCGYGIYRRLNAKPDVSCEVVAPSLTPRRPGVRVKTNRRDCLTLVKLLRAEELTAAWVPDAAHEAMRDLIRARAAAVEDLVRCRQRIAGFLLRQEIRYAGKPWTGKHRVWLGRLEFAAPAHRLMFAEMLEGLDQAMARRARLTDHIAELVPSWSLAWLVEALQALRGYRLVNAASLVAEIGDPRRFASPRELMGYLGMVPSEHSTGDTVQRGGLTKTGNRRARKILIEAAWTYTRAAKTASSRALGQPVAVRAIAEKARHRLSGRYRRLTARGKLGVVAIAAVARESLGFIWAIAHAAAPLPAAGPGINDAGRPAAGAGRGSRSR

SEQ ID NO: 228927 - protein, 457 aa, unidentified
MGKSLHIQGLKGTKFSQQLRGVNLEQVLIVAIDAAKLHQKALICNYFGDILAKPFFFSVNQSGMQTLYHAIEQAVASTGAVRLFLGIEATGHYYEDIVREMAKQGYLVQILNAYTTFEERASALNWCKTDDLDLVAIAHALKSNKATEFRLAEGLQRQLHVLTRARRSEIRKRSTLRMEIRTLMDIVWREFQGYADHQNGRARKIKVFSNFWGKASLFFMEHYPHPAAICKLGETGLRRLSIQHNLKLRVAAIRKLLLVAAESLSSDEQTLRPELLLLRMKLQDLRAFDAKIDTLEQEIEALLLQTDGRVLLTVPGLGVSTAAELYAEIGDVSHYTHAGQLIKKAGTNPVVKQTGGSAGSYGKISKQGNSHLRYVAYLAGRSLCLHNPDLKPFYERLKSRGKHPRSIFVAMGNKMLKIAFAMLRDKKPFLSTKPSCPFAKEINKKLRFSCFITLDVA

SEQ ID NO: 228928 - protein, 344 aa, unidentified
MQIVRIGLDLAKYVFEIHGVDAHGKTVLRKTLRRHAVSTFFANLPPCLVGLEASNGAHFWAKALSDLGHDVRLISPQFVTPYVKSNKNDRNDAEAICEAVGRPNMRFVPVKSPEQLTVQAVHRIRSRLVADRVRLVNQVRGLLGEHGIVVAKDIGNLRRALARIVGDNEDHALHDLVRSLMGELREELIELDARIGGYDRKIRELYRNSEICQRLGKVEGIGPVTATALVAAVGDRSSFKNGRQFAAWLGLVPKQRSSGGRARLFGISKRGDRYLRTLLIHGARSALGRVRDKQDPRSLWLGRMRQRRHPNVVAVALANKNARIAWSLLASDSAYDASLSVGAA

SEQ ID NO: 228929 - protein, 379 aa, unidentified
MEVFIEKCAGLDVHSETIVACVIKGKRENDVYTETETFPTLTKDLFRLLKWLESHEITHIAMESTGVYWKPVFNILEDFFDITLANAQRIKNVPGRKTDVSDAEWIAKLLRHGLIEKSFVPPQDIRELRDLTRLRKKWIGHLTSEKNRIQKVLESSNIKLSTVISDVFGVSGRRLLNRLIEQGYVDEADVEKDIHGKLVSKKQRITDSLFGTINEHQIFLIRQSWHHIEYLEKLISEIEERVDQLLRKYEEEVQLLITIPGIKKDTAAVIIAEIGVDMGQFPTSQHLASWAGVSPGNHESAGKRKSTRTVKGNPHIKSAMCEAAWAVSRSRNRWLATKYWSLAARRGKKKALVAISHRMLRVIYSMLLNKEPYKEPLIA

SEQ ID NO: 228930 - protein, 430 aa, unidentified
MEIVYPRACGVDVHKSFIVAVICISESVKPRYIKKRFSTFNNQLIQFRQWLIDNNCQNVCMESTGKYYVPVYNALEDHISNVVVANPKWVKAIKGEKDDNKDAKWIADLFKFGIVRSSYIPEKNIRILREFTRYQFKLVNIRSSEKNRFQNALTVGNCKIDLVFSDVFGKSASSIVDTILSDEPYTSEDILSKVHGRCKSSDEDILSAVEGTDLNHYQKSRIRIVQKHMEYVDSLLDEIQHHINIMVSAYENYIQLLMTIPGVSRKSAIIIISELGIDVSQWSSHRKLAAWAGLAPGCNESAGKKKSVKISKAGVYIKPCLVQVAHAAVKDKNCDYYADKFSRISKRRGKKRAIIAIARKILVVIYHILKTGEVFNPSDMADVETTKQQRIEYIKNNLRNAFNQLSRTGLSDEEILQFIIKKSSNSPQTE

SEQ ID NO: 228931 - protein, 416 aa, unidentified
MELIALYKRVIGLDIHQAQITACALIEETDGSTRIEQRQFGGFKRDRRELADWVASLRPDEVVMESTGIYWKSPHAALEAVGIRAKVVNARHVKNVPGRKTDVGDAHWLATLARAGLLRGSFVPPGKLRELRLIARQRQKLVGQLASEKNRLHKVLTDSGIRLSVVVSDLHGQSARAMVKAIIAGQSPHEVLKFASRRLRASREELFDALQGELTAGHLFVLDELMRHIEEIEARIARFDFRLLGELESERNTLALLQTIPGIDLIGAAMLLIEIGTDMDAFGSADRLASWVGICPGNNESAGKRKSGHVRKGNLYVRRLLCEFAHAASRTTSVFKSKFQALVVRRGHKRAIIAIGHKILRTIFFMLKRREHYRDSATDYEALSVQRNAPRWIKALTKFGFIAKTRSGRASCRERV

SEQ ID NO: 228932 - protein, 383 aa, unidentified
MTGAEPHAEETGLMGTITYVGLDVHKATVCVALAASGRGGEVRQLGVFENRPELLLKLAARLSKGGRPLSFCYEAGPCGYGLHRLLTGCGHDCVVVAPSLIPMKAGDRVKTDRRDAVMLAKLHRAGELTPIWIPDAAHEAMRDLVRARATAGRVLSKARQHLQSFLLRHDQIYRGVRAWTLAYRRWLTTVRFAHPAQQIVLQDYIHAVQGAEARLDRLTRQIEELLPSWSMAPVVAALQAMRGVALVVAVTVVAEVGDFRRFANARQLMAYLGLVPSEHSSGASVRRGGITKAGNVLARRVLIEGAWTYRMPARISRKLHDRNEKLSPAIRDIAWKGQIRLCSRYRRLAAAGKSKVVVTTAIAREMVGFIWAIARIAQPALQG

SEQ ID NO: 228933 - protein, 447 aa, unidentified
MANERDGFPVLRRDVAGMDIGSEEHWVCAPSRTGGGREVERFPATTPGLERMIVWLQDRGVRAVALESTGVYWIAPHEMLEQAGFEVLLVDTRELRRVPGRTKSDRRDCEWLQRLLSCGLLRSAFRPPDAVCLLRTLVRDRATLIAERADWLRRMQKALDQMNVRVHRAVADLDGATGMAIVRAIVEGERNPHRLAALRHHRCQKTVAEIAEQLSGHWRDDHLFSLQQGLKMYDAITDRLADYEHEILRQLAALAQTDDTPPPLTNVNKARTLKTRGEEPLRQALYRMSGVDLTTIDALGVETVNVILSEYGWDLSRFPTEKQFISHLRLAPHRAMSGGKPVRNQRKQHRGSARVTAALRMAATSLRRSQSALGAYYRRIAQRLGADVAVFATARKLAQWVYRVLRWGQAYVDEGAAVYEKRYRQARMKRLADSAKQLGYTLVPAEA

SEQ ID NO: 228934 - protein, 422 aa, unidentified
MLQETQDREEIIQRVAALDIGKAEVVCCVRVPDESKSGRRLQEVEAYSTMTGSLLRMSDRLRCLGVTRVVMEATSDYWKPVFYVLEAAGFETWLVNAKDVKHLPGRPKTDKLDAVWLCKVAERQMIRPSFVPPPEIRRLRDVTRYRIDLVGVRGAEKNRVEKLLEDAQIKLSVVASDIFGVSGRAMMTALIAGERNPKTLAQLARSRMRTKIGALEEAFTGHFTDHHAFLLAKMLARIDGIDADLAELDTRIEAMIAPFAAAAARLDEIPGIGPVAAAIIIAEIGLDMNRFPTANHLASWAKFAPGVKESAGKKKGRGTTGHGNRYLARVLGEAAVGAARTDTFLGERYRRIARRRGKKKAIVAVGRSILVITWHLLSDPEARYTDLGPGFFDQRINAERRKRTHIHQLEALGYKVTLEPAA

SEQ ID NO: 228935 - protein, 360 aa, unidentified
MFTERTSVGLDVHARSVAAAGIDGVTGELFQTKLTPSHEHIRSWLGGLPGPVAVAYEAGPTGFGLSRALTAAGIRCEVVAPSKLQRPSGDRVKTDAKDAVHLARLLRLGEFTAVSIPTVDQENARDLVRAREDARGDLMRARHRLSKLLLRQGIVYSGGKAWTDAHDAWLRRQRFEGSALQLTFESDYDAVLTVKARRDRLDVAIAVMAADSEFTPLTQRLGCLRGIGTLTGFALAVEVGDWHRFTGNTIGSFVGLVPSEYSSGQSRVQGSITKTGNSHVRRLLVEAAWHHRARYAVGKTMRERWELATPAARARGDAGNRRLHARWDTFRARRKRSVIANVAIARELAGWCWSLAVLEE

SEQ ID NO: 228936 - protein, 400 aa, unidentified
MLSIGIDVSKGKSTVCGMKPGGEIVYTPFEVQHTREGMSELVSLLRSSGEEVRAVLESTGSYHCPVVAALLENGIFVSVVNSLRMKRFCSQSIRKVKTDRIDAMQIALYGLAYWQELQPTKLPEDTYRELQLLARQYYQMTSLLIKAKVDFNAICDQVLPGMQELMSDHAGRHKLSDFVLRYCHTTHILEMGETRFRKDYCKWAEKKGYRNRERMAALIFATAQNGIPVLPNAPSTQIVITEAIRVLHTVEASRDAILTQMQALAKTLPEYSLVREMPCIGDTLAPRLIAEIGDVRRFHSKRALIAYAGIDAPPYQSGKFCANNRHISKRGNRYLRKTGYEVMQSYVMHKPANDPIFTFIEKKRGEGKSGKLAMVAGLNKFLRVYYGKVTELYRSLPAIE

SEQ ID NO: 228937 - protein, 343 aa, unidentified
MQTVTTIGFDIAKSVFQVHGVDAVGKVVIRRQLKRRHVLVFFEKLPPCLVGIEACASSHHWSRELQALGHTVRLMPPVYVKPYVKRQKNDMADAEAICEAVTRANMRFVPTKTPEQQSCLMLHRTRHMFIRQQTALINSIRAHLAEFGIVAPVGRRGVTELLRVVADPNDKRVPDVARACLAALGAQLLSLKEQILEFDRMILAWHRSNQTSKRLHYIPGVGPMLATALVASVADPSTFRSGRNFSAWIGLVPKQHSSGGKERLGSISKQGDRYLRSLFVAGALAVIRYAKIHGTEHRPWLTALLGRRPTKVAAIALANKIARMAWAMMAKGERYKQPAALAR

SEQ ID NO: 228938 - protein, 347 aa, unidentified
MRPKLLMENDYILRQCVGIDVSKETLVVTMCMFSFAEEAHYSDVKTFKNNKTGFNQLVKWSRKEAYTDKPLRYVMEATGVYHEELANHLVKIGCTVIIMMPNKAREFAIWEGMISKNDTIDSRALALVGCVKRSMRPWQPSKEIYHELRAMTRFAQDTKKLRLALKNHLEALEHSHQAEKSVVKHYEAMVSYLDKRLKMNLKNMKEKVASDEALNKKVENIITAPSLGFTSVITVIAETNGFALIQNRKQLTSYAGFDVKDNQSGNVEGTSRISKKGNSRIRAILYMPAVQVQLRSRHLKEAYDRIVLKHPDKKMIAVTAMERRLLLLIYALWKSDKPYDEDHNKKK

SEQ ID NO: 228939 - protein, 425 aa, unidentified
MKKTDYLSTLFVGIDIGSRTNVVSAIDFNQDFFIRMKPVPNAKEGAETLESLLVDVLSVHHEFNHVIIGLESTGFYGVHIANYLSASDLLAPFGTEVYCLNPKEVAKYKESFNSLDKNDGIDSFVIADFARVGRISIKPWRGAQYLALQRLTRHRLHIAECIAREKTYVLNNIFLKFSEFAMLKKEDHPFSNKYGATAEAILEQYVTNDDIIEASIEELGELIESKSRGRITDPEETVKILKAAANGSYRLDKVVAEPITLSISSSFNCIRAFEKELKAIEKAIEHTVQGLNPVEYQVLKSIPGIGHVYAAGILAEIGTIKAFTGNGALAKYCGIVWKENQSGNFRAEDTKMSKAGNRYLRYYVIEATGSVINNCPEYKDFYDKKFAETTTHQHKRALALTSRKFLRMLFGLLDKSQLYSLERSR

SEQ ID NO: 228940 - protein, 424 aa, unidentified
MTYRIAGIDVHKKVLAVVVADVASEGEVQFERLTFWTAPEQLKVLAEWCVEYGVQEVVMESTAQYWKPVWEALERYWQPVVRTAADATPMTGSLHLAQAQSNRGRGGRKNDFGDAERLVRRHVAQELVLSFVPSAEQRLWRTVTRQKQQRVVARVRLRNQMEAFLEEAHIKLSSLVSDLFGQSGRRMLRALAEGKTDPAEIALLGDHALRATQAQLRDALSAARELHPVYRRLLNQSLEDLRVLDQQIQELDQEIAALLKQHQDAVQRLAEVPGLGPDSAQQIIAEIGPTAAVFPSAKDLASWVGVCPGDDISAGQSHSTKSPKGNKNMRRILNQAAHAAVKAKGSIFEVVFQRLRRGLDYKEAIWAIAHRLCRLIWLLLRRGVPYEERGPAVSAASKQMRASRMMRELRRMGYRVDPPQPQNA

SEQ ID NO: 228941 - protein, 363 aa, unidentified
MVSPILAQWTTLSEDFVLLGAIMDTVSLIGIDLGKHCFHLHAQDGSGRMVLRKKLTRNQMFTLLSNFPSCTVVMEACAGAHWIARRLQTLGHEAKLISPQFVKPFRQGNKNDFADAQAICEAASRPSMRFVSPRNEAQQVVSALHRVREALVRNRTGTINQIHAFLLEFGISLPRGMAVIRRLPAVLEAEALPPRLVAVLERLQAHFKYLDEQIGQVEHELLTQLHEDERSERLLEIPGIGPITASVLMSELGDARQYGSARQFAASIGLVPRQYSTGGKPTLLGISKRGDKGLRQLLVQCARVIMLRIERRTDSLGVWVRSLLARRHSNVVACALANKLARIAWAILAKGTHYRSAPTALPA

SEQ ID NO: 228942 - protein, 316 aa, unidentified
MYFVGIDISKFKHDCAIVDEFGDVITPSWSFQNDREGFSLLKELLDALDGEKKIGLEATGHYGQNLKLFLENNDFSFMEFNPLLINRFVHSKSLRKTKTDSIDALMIAQYLMTVEYKPYPPSFYTFEKLKSLTRFRDSLIRQRSRQLVELTNILDKVFPEFKPFFKGRFSATALYILSHYASPEKISNMNSKSYEPLRRLSRGRFSMVDFVELKTLARNTVGSTSDYLLQEMEITIDIYNQLQSKVEEIELQIHDCVLALAPPILTIPGIGAASAAVILSEFGDLSKFNNPSKLLSFAGMEPGYFQSGTSESTGRW

SEQ ID NO: 228943 - protein, 350 aa, unidentified
MMIIGCDLHTRYQQIAMLDSETGEVVERRLEHENGEARAFYAALTGPVRVGIEATGHTQWFEAMLAERGHELWVGDAAQMRASVVRKQKTDTRDAAHALDLLVTHRFPRIWRPSWEERDLRQLVWHRQKLVWMRGAVKNQLHALAMGQGVCRKQKLFTAKGRKELEGLALGTWASYRRQELLQLLDQLEQSLKKLDEAVEQQAKSQPQAVRLMTHPGVGPVTSLAFVLTIGPVSRFPRSRQVVSYLGLNPQEHSSGGRQHLGSISKQGNPMMRYLLVEAGHTAARFDPQLQRLYQRLKFRRGAAVAKVAIARKLAVRMYWMLRNPADYAQLVRMQGSPGGTLVGKPTSFA

SEQ ID NO: 228944 - protein, 482 aa, unidentified
MKKTNIYQNQSQELLHLFEEAGSGEKVMCVPMDYAKKDHLVMFCNGHGDILRKPFSVKNTPEGIAYINDQVTRSCRRRGIEKKHVFFGGEDANSFAKNFVSTLRYKGFVVANVNAHDAKKQRENMQASTDRIDLMGIATMLLNCRANCCPAQSGIYRNLRTLVRHRRRLVQMLTEVKNRVHGIVDELFPGFLNEKNSGIVPFTQSSLYLMQDRFSPKQIRRRKRQKLIEILKRFGTSKAEHTAAKLQQYAGKVLHAPVEYVDTMQLSLAQHVKHIGCLKESVAQMDKEIALNLAQTQGAFLTSVRGIGLVLAAGVSAEIGDPNEQKPLNNLASYSGIIPRVKQTGGLDGKTYTGPVAKRCNRILKDYVVKSAYHLGLHGPQDLMADYKRRDASGQHADFGIGRRYLRMAISLMRTSQVYLPPNLRKDDYTPEQRAGYYLMSWPYLREKWKKVGALEAAFTNNRPLGLWRQIVQEIYDIKLKL

SEQ ID NO: 228945 - protein, 315 aa, unidentified
MFVGIDVSKDWFDAAWQAEGQLRTQQFAYTDEGIEQLMEQMPPEAVCVMEATGTYHARLALKLFEAGRGVSVVNPLVIKRYGQMKLLRVKSDRADAQLILGYAQQERPALWQPASEQVQELQQAHGWLNDLIGQRVRLLNRQHAVSHRAKPSAFVVGQMAAQLQQLNERIDECERHLEVLVKKSFAELYERLLTIPSIGAKTALELIIVTDGFTRFEDVKQLGAYIGVSPTTLRSGSSVKGKGSIAKLGQGRMRQLLYLCTWTAKSCNPACKKLHQRLKAQGKPAKVINIALAHKLLRQAHAVATKNVSFSAEMA

SEQ ID NO: 228946 - protein, 400 aa, unidentified
MIDTGDIDVFLGLDVGKGEHHATAVTPAGKKAFDKRLPNTEPKLRELFAKLQAKHGTVLVVVDQPASIGALPLAVARDMGCPVAYLPGLTMRRIADLYPGEAKTDAKDAFIIADAARAMPHTLRAIDGEDETIAELEMIVGFDDDLAGEATRVANRLHGLLTQIHPSLERVLGPRLQHPAVLTLLERFGSPAQIRKAGRRRLVTLLRPKAPRMAERLVEEIFAALDEQTVTVPGTEAATLIVPSLAGSLTAVLDQRKLLAGRIEELLEDHPLSKVLTSMPGVGVRTGARILIEVGDGSTFPTAGHLAAYAGLAPATRSSGSSIRGEQPSRRGNKQLKRAFFLSAFAALGDPASRAYYDKKIAQGKHHTQALLCLARRRADVLFAMLRDGTFYEPQPVRAT

SEQ ID NO: 228947 - protein, 371 aa, unidentified
MMNVTTFAGLDVHARSIKAVALDVVTGEVRSATFGYDACAVAEWIRSIDPGARCVYESGVTGFDLQKKLSSLGVDCVIGAVSKMIKPAADRRRKNDRNDAEFLARMLSVGNIVEVWVPDDECEAARDLARALDDAWEDLRRQKQRLSTFLLRHGLVFDERTPSGQRKGNWTGAYWSWISSISFAEKADNDAFAFYVDAVRQAEEDKRRLEKLVADEASRPRWKKRVDSLRCLKGIDVMTAADIVFEAGEFARFRNARSFAAWLGLTPSEHSSGEKVAQGGITKAGNKHLRRVMVEAAWHYLNASPHSKGPAPGQAPDPAARRHASKGVRRLVGRRAALLERGVHKNKANVATARELACWCWAVGSMAEGAR

SEQ ID NO: 228948 - protein, 358 aa, unidentified
MQSKSKELDYSGVNIYSGIDTHLKNWRITIMIEETYYKTFSMDPNAVTLASYLKRNFPNGNYFSAYEAGFCGYSVHRELVKSGIKNIIVNPADIPTTDKERKQKNDTRDSNKIARSLQSRDLEAIYIPSIATQELRSLVRYRKSIVNDISRNKCRIKSFLYLHGFKIPVELDSASRHWSSNFTKWLEGIRLSTDYGHSVILRTLDTVTQFRKSLLDINKELRRIAKTEEYATAIKYLTSIPGIGLIVAMTIISELENILRFKSLDRLCSYIGLVPTTKSSGESQRIGGVTPRSNKPLRAVIVESAWIAIRNDPALALVYSNLCKRMKPNKAIIRMAKKLLSRVRYVLKNQTEYKYAII

SEQ ID NO: 228949 - protein, 405 aa, unidentified
MTVTPLGATGVAGVIGGVDTHADTIHVGVLDSIGRELGDREFATTPAGYAAALAFVAAFGVVIALGVEGTSSYGAGIARAGSAAGIEVREVIRPERSVRRMRGKSDPIDAYQAARAVLSGHAVAAPKDENIEALRALHKARRSAVKARTAAMNQIHQMLITAPAPVREKYRELKQKPLVSALAGCRPSTHEPTARAVLTALKALAKRHQFLTAQADELRQQIRDLARDANPHLMSLYGVGPTTAAQLLITAGGNPDRLRTEASFAALCGAAPVPASSGKATRHRLSRGGDRAANNALHTIAVVRMSSDPRTRSYVHAQRAKGRDDAEILRLLNRALAREVCKSLTRGLAAPGLGDLRPARQAKNITLRTAAKAMDTYPSKLARIELGTFPDYDLAQRYRDWLEAA

SEQ ID NO: 228950 - protein, 325 aa, unidentified
MGAKIMATADVVVGIDVAKEQLEVMVLGVAWTSTQFDNDVDGHTALAAALVPLGVQLVVLEASGGYEAAAACALQGAGLSVAVINARQARDFAKCLGRLAKTDSIDAQTLADLARLLLQQPDTARWIRPLAEEQQQELAALVTRRRQLTAMLTAERQRLVAAKQPQVRTSVTAMIKAIKAQLDGVERQMQQQVRQHYRAADQLLQSMTGIGKVASATLLAGLPELGKLNRRQIAALVGVAPYAKDSGTMRGRRQIAGGRFEIRRLLYMVALVAVRRDPGLKAYYQRLVATGKKKKVALVACMRKVVTILNAMMRDQRLFVPTATP

SEQ ID NO: 228951 - protein, 391 aa, unidentified
MSVDAPRPAQPAIRTDLGAIFVSMELSRKTWLITSLSPGGGEKMSKHLVPAGDVFGLLRRFAELRRKAAARTGRDFPVIVIQEAGLDGFWIHRVLQSEGIESHVVDAASILTSRRRRRAKTDRIDGETLVRTLMAFKRGEPRVCSMARAPTPQEEDRRRVCRERRTLVGERVTHVNRIKGLLFAQGVFGYEPLRKGRRERLEDLRTGDGQPLPMHLKAQIMRELDRLEVLLGQLKTVEAERDALLKPETDKATSPAAMLTRLKGIGPETAAVLWSEGLFRQFDNRRQVAAYAGLAPTPWQSGSIDHEQGVSKAGNPRLRTTMVELAWLWLQNQPTSALSLWFHERVRRLGGRMRKTTIVALARKLLIALWRYTTAGVVIEGAVMKAAPATT

SEQ ID NO: 228952 - protein, 342 aa, unidentified
MTEYKITGIDLAKTKFHLAALDFDHKLALKKGLHRDDVLFYISTTFPKGSTFAMEACGGCHFWGQQLESLGFQVILLKPKDVKPYAKAKQKNDINDALAICKAALDLELKHVHLKSQEEQTVAYLHKARQNTIRQRIQRSNSILTSLMEFGVVVKCSKSAFGKEAETHILDAFEKGAIPKAIFNQMMLDALEIKALLKRELALDKEIRAYNRESEIAKILETIPGIGTVNASILSIQDMKGYASGREFSASLGLVPKQFTTGGKVKLGGITKQGNRYIRTMLIQGARAILMRTYKDNIPQNRIYDFATKLKEKKGFNVACVAIANKLARIAHACATQKQTYS

SEQ ID NO: 228953 - protein, 426 aa, unidentified
MIPAVIERCAGIDVGKTFLTVCLLTGPADGEPKAETRKFGTFHADLQALCRWLTEEQCTRVVMESTGCYWKPVFNILEDSVAVSLANGQDVKGRKGHKTDWNDCRWLAHLLRHGLIRASFIPPKPVRDLRDLTRRRKQILSNAVSERNRVQKVLEEANVKIGSVLTDVFGVSGQLMLDALLEGKATVEEIADLARHTARRKIPEIIQSLEGNRLDGHYRMLIKLSLEHLAFLEQQLQQIDAEILLRAEGPEFRQAFQLLQTVPGIKQDGAASILAEIGPNMAQFPSEAHLSSWAGVCPGNNCTGGKAKPARIPRGNRWLRTTLVECAWAASKTKDCFLKDRFWRLAARGKKRALVAIAHTVLVLLYRSLSTGQPYQERGVVEVNERKRKRLIQHHVRRLGRLGIAVSSLRLAGPDDSGYVTATPTP

SEQ ID NO: 228954 - protein, 315 aa, unidentified
MAKQLPLVNVGVDVSKDQLDVYLLERDLLFSIPNDEQPIAALIKRLARYRLERIVIEATGRLEHAFVSAAIAKGLPVVVVAPLKVRRFAQAAGQLAKTDAIDARLIARFAAALKPATRPPIDANSQIIKDLVVRRRQLTSLRTTEKNRRSVMPEALTPSIDRIIESLDREIASLEQLIQNAVEQHVTWRHKRDLLTSMPGIGPSVASTLIGDLPELGSLSRRQIASLTGVAPFNRDSGNFHGKRRIRGGRAHSRTALFLSAMVAIRYNPDIKRFYQRLLQTGKHKKVALTACIRKIVTALNAMLRDDKPWHSSFA

SEQ ID NO: 228955 - protein, 330 aa, unidentified
MGFRYFLGVDVAKAKLDCLLLDSVEQRRRSKVVANTPEGFEQLVKWLTKQGVGCQQVHAVLEPTGVYHERALFALSQAGIAVSLVNPAQLRRFAQGLGIHTKTDACDSAVLARFGEMIKPAHWQPAPSKARALRALLARRDVVAQDLQRERNRCEALVIEDTPERVRQSLTDTITFLEQELQALQKSIDEHIDDDPDLKRIWDLLQSIPGVGQRVADHFTALLAGRDFRSAEQLAAYLGLVPIEWQSGTSIKGRPRMSKAGPASLRQLLYMPAVVATRHNPHVKALYQRLLAKGKAKMSALGAAMHKLAQLCFGVVHTGQPYRADWPGRA

SEQ ID NO: 228956 - protein, 400 aa, unidentified
MHRVDQAWAGIDAGKGHHHVVVVDGEGRRLLSRRVANDEPGLDAVIGTVLAQAENVTWAIDLADGPAALAITLLLERGQQVLFLPGIAVNRISDAYKGEGKTDAKDAAVIADQARMRRDLRELRLDDTSIAELRMLTTHRADLAADRTRTINRLRIRLLGIFPALERALDFTNRGPLVLINRFQTPAALIATGQEELERWLRSQKVRHADKLANAAMRAAEAQHVRVPGEAMAGELIARLATIVIELDRQLTEIDKLIADRFHGHPHAKVISSMVGIGDLLGAELLAATGGGLGGFASADHLAGYAGLAPTPRDSGRRVGNLHRPKRYNRQLQRVFYASALISIQRSPASKAFYDRKRADGKRHSQAVLALARRRVNVLWAMLRDGCPYEEGHTRATLTA

SEQ ID NO: 228957 - protein, 347 aa, unidentified
MRFYTTQHKFYCGIDLHAKKMYLCILDGEGEVRLHRNINTERETFLAVIEPFREDVVVAVECMFTWYWIADLCIQEGIPFVLGHALYMKAIHGGKAKNDKIDSRKIAVLLRGGMIPQAYVYPQKMRATRDLLRRRNHLMRKRAELYAHIQNTRSQYNLSDFLGRIAKPQNREGVVERFDDPSVQNMIATDFAVITAYDPIIAKMERDIISMARHHDPVAHALLNTVPGIGKILSLVILYEIEDIKRFPSVQDFASYSRLVKSAKESNGKKYGTSGKKIGNAHLKWAFSEAAVLFLKGNEQGKRYRDRLIKKHGKGKALSILAHKMGRAVYFMLKNKKPFDQNTFLRL

SEQ ID NO: 228958 - protein, 495 aa, unidentified
MGQRVKRKPAPVDRSAPEVIPDAEHELVIERVAAVDVAKATGKVCVRLPGKAGRRFSRVWDVPARTGSITELGEQLAESGIEKVTVESTSDYWRIWYYLLEAAGLSVQLVNARDVKNVPGRPKTDKLDAVWLAKLTEKGLLRPSFVPPAEIRRLRDYARLREDLTHERTRYWQRLEKLLEDASIKVSVVASRLDTMSARDMIEALTAGERDPRRLAELARGKMRAKRAELITALDGRFDDHHGELAGLLLAQIDALSAQINTLTSRIEDLIAEMPAAAAAADDGGGGGEDTDITAPGTGDGSDAGSPPSWGAPEPTGGAPGRIDPAVEAGCARLSAIERLDEITGVGEHNAQVIIAEIGLDMSRFPTPGHLVGWAKLCPRTIQSGPVTRGGRTGKGNPYLKGALGQAAAAAARTDTFLGQRYRRIVKRRGKLKALVAVARSILVTVWHLLAYPLARFHDLGPDYHDSRINIERRTRNHIAQLIALGYRVTLEPAA

SEQ ID NO: 228959 - protein, 368 aa, unidentified
MKQPLIVHSKEAAASTVAAVQNSLRPAVIKLGLDMHLRTYVVVAQYDHAALRPPRRCGPAELVPWVEGLLRQGHTVHLVYEACGFGFGLCRALEKLGAHCYVIAPHKLDEQRTGVKTDARDAATLCQRLSRYLEGNTRELAVIRVPSEEEEQLRHVHRQRETLVRHRTRMQAQGRGLLVTHSQPAPPLWWRSQTWNRLSKVLPAGLVARLAVLRPVLAILDAQIGTLTHELEAAAPADLPHGLGKLTSVSLTREVCDWRRFRNRRQVASYTGLCPGEHSSGDKRVKGHVTKHGNPRLRASLVELAWRLVRFQPTYPPVQARLSVLAKGARATGSQRKKAIIAVARHLAVDLWRLHTGQCSAAQLGLQN

SEQ ID NO: 228960 - protein, 373 aa, unidentified
MQENSKIFVGLDTSKMKVSVALAEEGRRGEVRFLGDIDNTSDAIRRLIRKLTGKFCELLFCYEAGPTGYGLHRQITALGHACSVIAPSLIPKRPGEHVKTNRRDALTLARLHRAGELTTIWVPDPGHEAIRDLVRAREAAMEDLRKKRQQLQSFLLRHGRIYPGLRSWTLVHARWLSNLTFEHPAQYLVLREYRQAIEDAEARLERLTQQVADVVSTWSMAPVVEAYQAMRGVAFLTAVTFVAEIGDVRRFETPRQLMAYLGLVPSERSTGEQVRRGSITKAGNPRARRVLIEGAWTYRYPARLSRALQVRQERLPKTVRAIAWKAQMRLCARYRRLMAAGKRQTLVTTAIAREMAAFLWAIGHEVEPRSAAA

SEQ ID NO: 228961 - protein, 399 aa, unidentified
MNDSGKRYIGLDVHKHYLIALGVDGDLNVVLPARRVELFRLEAWMKKNLTQQDEVALEMTTNTWQLYDELCEHAGSVLVVHPPHVALITRSQVMNDKIAASILARLLAKGLLVGVWIPPQEIRELRGLVAQRRKMTNLATQAKNRLHAVLQRHHLVPPAGNPFGASNQEWWQSLPIGKLEKFNLQSDLETLQFAEKQVKGMTTIMEGMAAEQEPIGRLLHLAGFGVVTAVTVWAAIGDIRRFAEPRYLVGYAGLGTRVHDSGMTSRSGKITKAGRRDLRTVLIEAANVVANSHPHWKAELARLEPRLGRNKAIVAIARKLLIAVWYVLQGKTDKYAEPESVAQKMLKFAYAVGKANRPKGQTAAQFARVRMDALGLGGELTSIPWGSKKPIPLPPSTKK

SEQ ID NO: 228962 - protein, 427 aa, unidentified
MSAANETRQQPIAAFVGIDWADQKHDIALRAAGLEAKVERSKIAHQPEALSDWVLALRERFADQGKILICLEQSRGALIHFLMGYDCFELYPINPKQLDSYRKAFRPSGAKDDPTDGELLCKYVSLHHQELRPWRPDDEQTRKLALLCEKRRQAVDARSALSNQLKSELKQYYPLALAVLDNDLTTVLAADFLLQWPDFASLKKASAHKVRSFFYGHQCRSEKKIQTRSQLMESAQPLTRDSAIIEAGALTAQMLARQLQALAPYIRQYDEQIAQLFSQHPDRVLFDNLPGAGDALAPRLLSAFGSNRDRFDNVLEPLSFFGLAPVTERSGKTTFIHFRWACPKFLRQTFHEFAGCSVRFCDWAAAFYDQQRARGKDHHVAVRALAYKWIRILFRCWKTRQPYDPQRYRAALAHRASPLATDVKNSP

SEQ ID NO: 228963 - protein, 408 aa, unidentified
MVIFVGDDWAEAHHDVYVMDEAGARVVSRRLPEGLEGIRGFHDLVADHVEDPGEVVVGIETDRGLWVNALAAAGYRVYAINPMAVSRYRDRHSVAGAKSDAADAKLLADLVRTDRQNHRPISGDSPQAEAIKVLARAHQSLIWARNRHTNQLRNALREYYPAALAAFGDLADRDTLAVLSRAPTPDAGARLSVAQIGALLKRGGRQRNLEGRATEIHQALHAAQLTAPAPVAAAFGATTRATVGIIGALNEQITNLETELGARFEQHPDADIYLSMPGLGDVLGARVLGEFGDDPNRYATAKSRRNYAGTSPITVASGTKRAVLARHVRNRRLYDAIDQWAFCSLSTSPGCRAFYHQRRAKGDLHHQALRALGNRLVGILHGCLQHHTRYHEHTAWDHRQPTITQLAA

SEQ ID NO: 228964 - protein, 384 aa, unidentified
MYYVGIDISKYKHTFVIASHLGEVIQKPMDFDNSHLGFAQFLDKLKPFDSNQLKIGFESTGHYSANLKQFLHDQGYSFYQLNAHLVKKFSLSLSSRKAKTDKIDCLAIAKFLMTVDSKSHTSLSYHISFLKSLSRHYYRLNKYIGKTKVELVNYLDKAFPEFTRYFSSIYTKTPLTILFKANSLNSIANMSMSRFDSLNKLSRGNFNYSKYIKLKQAAKFSVGVKDKFYWSLLHLTIKRIQTLENEKEKVEDHINLIMKDINSPITSIPGMGTTSAAIILSEIGDIFKFSNSRALIAYAGLDNSVHQSGIESSYGKVSKRGSKYLRTALYNVSFPIVNNSKLFYDYYFDKKSRGKSHTLSLIWVSRKLLRIIYFLLKNNQEFSD

SEQ ID NO: 228965 - protein, 298 aa, unidentified
MPYLTLVELTRSPRKQIPSFWESFSLPLPAISFSLAGEERSYGQICILAEGGELIEQRIRTEADRFAAVLGGRPRARILIEASTDSEWVARCLEGLGHEVIIADPNFAPMYATRTRKVKTDRRDARTLADANLLGAYRPAHRLSDAQRHVRGRLGVREALVRTRTRYISLIRALLRQHCYRVPSGSAEGFVHRVGAMALPGQVRSMIAPLLAVMLPLNRQLAYSDQVIEHLAVQDPRVQRLRTVPSIGPVTAAAFVATLDDAQRFRHAHQVEAYLGLVPREFSSGDSQRRGSEATSRA

SEQ ID NO: 228966 - protein, 343 aa, unidentified
MGKVSTIGLDIAKSVFQIHGVDVNGAVVIRKRITRAKLLEFFAALSPCLVGIEACPTAHHWSRQLQALGHTVRLLPPSYVKAYLKRSKNDANDAAAICEAVMRPSMRFVATKSEEQQSGLMLHRSRQLLVCQRTMLSNAIRGHMAELGIISAKGRNGTAELLKIIANEQDDRIPAAARFSLDVLARQYAAVRAEIVAIEKRIHAWHRSSEESRRLEEIPGVGPIVATALVAEVGDWKVFSSGRSLAAWIGLVPRQHSTGGKERLGRISKQGNRHLRWLLVAGAMAVIRYARQHGTKRLWLARLMDRRPIKVAAVALANKIARIAWAMMVRGERFKEPKLLPAA

SEQ ID NO: 228967 - protein, 345 aa, unidentified
MNSSKLIAVDLAKNVFQLALANTHYHVTQTKRLTRTQLHTFFFNHPPVQVVMESCGTAHYWARTLHAMGHQVSLLPAQHVRPYVRRNKTDANDAMAIIEAARNREIKAVPVKSEYQQALQSLHRLREQWKATRVARINALRGILREFGVLVPMGPRAAIATTRAAVDTLPTLLHASVFGILAELTDLQTRITALEKQLKQVVKDDPVIQQFMQINGIGLLSATAMRASVQSPTQFKNGRQLSAWLGITPREYSSGDKRYLGRITKKGDKYLRTLLIHGARSVMARNKIRLRDNEKLTHLQQWASQLEKRVGHNKATVALANKMVRILWATWMHQREFDGNYMSQH

SEQ ID NO: 228968 - protein, 353 aa, unidentified
MDRSITVGLDMGDKQHRICKLQGEREVVGRATVANTVEAVRGYFEKLPPCRIGMEAGTHSGWVSRILEELGHEVLVGHPRKLRMIWKSHQKDDNRDAEMLARIARFDPELLHPIRHRGEEAQRDLDVIKAREKLVKVRGMLITHVRGVVKGIGKRITKCSAETFHLRLGEEMPEELAGALRPLMETIAELTQRIRGYERELNRLCREKYPETEGLREIAGVGPITALAFVLTLEESSRFEKSRSVGAFVGLVPKRDQSGETDKQLRITKAGDGYLRRLLVGSAHYILGHFGPDCELRRFGLRLAERGGKNAKKRAVVAVARKLAVVLHHLWRSGAVYDPFYHNNTKRRGELAA

SEQ ID NO: 228969 - protein, 367 aa, unidentified
MKKDNTVRKSSGEKTRASGRLTIGLDLGDQSSRYCILDERGEVISEGSVATTKKGLAQVFGSKPRSRIALEVGTHSPWVSRYLADLGHEVIVANARRVRLITDSSRKDDRLDAKTLGRLARIDPELLSPIRHRSEQAQADLMVIRARAALVEARTMLVNSARGLTKSYGERLPSCGTGQVGENLAEPLSVPLQGALKPLLAVVESLSERIREYDGQIEQTGKQRYPETELLKQVHGVGTLTALTYVLTVEDPHRFRRSRDAGAYFGLRPRRRESGASRPQLRISKEGDAYLRKLLVQCAHHILGPFGQDSDLRRWGLELAVRGGKNAKKRALVAVARKLAVILHKLWVSGEVYEPLHVRKGGKAVAA

SEQ ID NO: 228970 - protein, 388 aa, unidentified
MKQKFIQYGVGIDVSKKDLAVCFLAKTEEEALKIRSSRKFANTPAGILELMKWVEKYRKEKCLRLRIYLEVTGVYHEQVLFHLHEAGYEVSLLMGKRVKAYGKSLGEESKNDQKDSYVLGHMALSRQERLWQPASKHIVQIRSLTRHRRSLVQSRVAYQNQLHAVTYSARPSAVVKESLEQLISQMNLQIAQIEQEALSLAQVDEDLYKKICLITKSLKGLGIITMLEVISETNGFSEFKSINQLIKYAGYDIIENQSGNRAGKTRISKHGNARLRAAMYMPVLSILSRKVEPFYALYLRVLKRNPGIKKKAMVALQRKLLIIIYTLWKKNEAFDPEYQWGKDSKTENNSTKKSSSDSKPELHGIAQPELASNTKIEKIEKISNFSCK

SEQ ID NO: 228971 - protein, 442 aa, unidentified
MARKPSKQRFTVVHPDCAAIDVGGREHFVAVDPRHENPVQSFTSFTDDLLKMANWLESLGIKVVAMESTGVYWIPIYEILSERGFDVYLVNARATRQITGRKSDVLDCQWIWQLMTHGLLRGAFRPDDLTCCVRSLVRQRASKVKDQAQTLNRMQKAMSQMNIQLANVISDISGVTGMKILRAICAGERDPVQLAELTDRRIKAGKEAVARSLHGNWRREHLHALTQELAAYDFLEQQIADCDDAIKAALEQLPVLQNKPEPSKKPLRSPHRNGAQQTVLHQTLWKVLGVDLTAIPTIGVDTALVLAGEIGTDLSRFPSSQHFCSWLGLAPPTRISGGHRLAGGGPKIVNRAAQALKQAASNARNDKGFIGASHRARLTRMDTSCAIKATAHQLARLVYNLLTKKQAYVEQGLEEFEARSQDRQVRALLRKARKLGYQLVAA

SEQ ID NO: 228972 - protein, 416 aa, unidentified
MALNVIYEVCCGIDVHKMKLVACLKKGRKLEIREFSAKTKDIKLMTDWLESNKCEMIAMESTSVYWKPLVNIFEMREMEYMVINARDYKNVPGKKTDIQDSEWIADLLQHGLLKSSYIPSREQRELREIIRYRKKISEERARSLNRLQKMLEGANIKISSILSSIEGKTSMSLLDYVLNNDELLDEEKAKELIVGNIKASIEDVVDAMEGIITPLQRELMQDVLDHISQATARLTKLDKMVKKYMVNYVDAIKRLQSIPGVGQTTAEIIIAEIGIDMNQFPTAGHLAKWAGVCPGNNESAGKRMSGKTSKGNKILKSTLAQAANSAKKNKNSFYHAQYQRLVVRRGKRRANMAVAHSILIAVYHMLKNGEDFKDLGADYYNKFNTEKKANSYIKKLAALGYEIDLLKTQAESKIPA

SEQ ID NO: 228973 - protein, 423 aa, unidentified
MGTIIPICCGVDVHKKFLVATILTGDHLIPECKQKHFGTSYRCLLDFRQWLLDNNCLDVCMESTGKYWVPVWNVLEDSFHVVIANPKWVSAVKGSKDDKKDSRWIGNLFRMGLVPGSYIPGKEIRILRELTRYRSKLVSMRASEKNRYQNAFTVCNLTLDGVVSDMFGKSATEIANYLLNTDTVDPEHCVSFLKGTLKKKADAVIEAVEGFSMTPEQRERVRIIQGHFADIDKRIAQIDDLINRQVAEYEPAISLLCTIPGIDRRHAITILSEIGTDMSEFGTSRRLCSWAGLVPGNNQSAGKKKSVKITRAGVYLKPALVEAAHAAVKSAEIQPYFRIKYERIMKRRGKKRAIIAIARMILTSIFAMLQTGEVFHPSDLQQYDMPENLQKKRTLSAAKDAVKLLVSLGLVVEGSISLVSLAG

SEQ ID NO: 228974 - protein, 450 aa, unidentified
MAKRKKKGKTVKTLHTLQPNAAGIDIGATEIYIAVPEDRCSETVRHFGTFTEDLHQAAQWMKQCNIESIAMESTGVYWIPVFQILDRYGFDVSLVNARHVKNVPGRKTDVQDCQWLQYLHSVGLLRGSFRPGQDICAVRSLLRHRDTMVKSASSHVQHIQKALTQMNFQIHNVISDIVGVTGLAIIDAIVAGERDREKLADLTNPRIKADRQTILKSLEGDFRPEHLFTLKQALSSYRHYQQMIRDCDLEIGNHLNSFDSHPDFDETSLPPSNRSKRKSKDTEPAFDLKSHLHRLFGTDLTQIDGVSTLTGQVILSEIGPDLSMFPTANHFCAWLGLSPQNKISGGKILSSKTRPGSNRAAHALRLSANALFRSKSYLGNYYRRMRSRHGAPKAITATAHKLARIIYHLIKNRKPFDETVFAEQERKHQERMKRSLIKRAKSFGLQVVPA

SEQ ID NO: 228975 - protein, 330 aa, unidentified
MMVTASCLPVVGLDVSKATLAVCYQVGELVKHLEVSNTKTGFQQLVKACGAQCRFVMEATGTYNLALAYYLHEQGGEVAVLNPLVIKRFIQMHLSKGKSDRKDAQWLLRYGQQQPVKVWQPDETVLVECRQLEQVNEQLLKQKTMVSNSLEALQRQPVISKLALKRLQRMLKTLTQQVALVEAELLTLLEQRFADQMTLLCSIPGIGRKTAGMLLLFAGGFTHLDNYRQLIAMAGLSPREHTSGTSIRGKVRITKMGGGLIRGKLFMCSFSAKKMNGACAALFDRLVAKGKNKKLALIAVCNKLLKQAFAIVKSGVPYQADFNSKLAPTA

SEQ ID NO: 228976 - protein, 417 aa, unidentified
MQYDPVSLADPPTNGLTCGIDWARDDHAITVIDSDARVVYRSVVEHSAKGLKDLITALTRTGVEEVAIERPDGPVVEALLNAGLTVVVINPNQIKNLRSRYGSAGNKDDRFDAFVLADTLRTDRARLHPLIPDSSATTALRALCRARKDLVIHRVGIANQLRAHLNRVYPGPVGLFDALDSPISLKFLTSFSCQDRADRLTPQRLGTWLTSVGYTGRTDPAVLHARLCARPRGFTGADGAAYVAITNALVTTLTNLVTQITELSDHIGRQLAAHHDAPIFTSLPRSGTVRAARLLAEIGDCRGRFPTPDGLACLAGVAPSTRQSGKMRSVGFRWACDKQLRDAVCDFANDSRHANPWAADLYNRARARGHDHPHAVRVLARAWLHVIWRCWQTHTPYDPTRHQALKTLLAHQTQATT

SEQ ID NO: 228977 - protein, 461 aa, unidentified
MNKKKLRGRHKGSVQKKVDWKALEIVHPDAAGIDVGGSEHWVAISPDRDAEPVRRFGTFTADLNEMARWLVEKGVRSVAMQSTGVYWMPVLEILEQHDLEVYLVNAQHTKNVPGRKSDVEECQWLLKLHAFGLLNNSYQPTDEIRIARTLWRQRGNLVAEAASAIQRMQKVLIEMNIQLSNVLSDLSGVSGMTIISAILRGERDPWILASLVQPEVQATPLEVAKSLEGNWREELLFVLSQQVELYRIYQSKIADCDVQLRKHLETFGSKVDLQTQPIGPKPKGKKGSRNAPQFDLRTELYRITGIDWAQINGIDVLTAQTVIAEAGADLSAFPTEKQFTSWLGLCPTNEQSGGKVLKRRTRKVVNRASGAFRTAATTLLRSQSYLGAQYRRLRTRLGAPKAITAMARKLACLFYRLIKHGQQYVDKGTEYYEARYREQQIRSLATRAQKLGLQLVIPETA

SEQ ID NO: 228978 - protein, 357 aa, unidentified
MLSSNVKYIGLDVHKEAVAIAVLNGAGKLVMESIVETKASTLLDFLHGLSGELHATLEEGTWAAWLYDVLKPHVAEIVVCNPRRNALLKEGSKSDKIDARKLAELLRSGMLRAVYHGENGLGTLRELARSYLTISKDMRRVMSRLKALYRSWGIPCSGKQVYTSRHREQWLNKITQPGVRRRAELLYQQMDGLSAVRHTVRGELLAESRKHQAVKILRQIPLIGPLRATLLLALMQTPHRFRSKRQLWTYSGLAVETHDSAQHRYVDGQLHRSKKPQQVRGLNQNHNHEMKEIFKSTALSASRCAGPLQNFYEGLLAKGMKPDMARLTLARKIAAITLTLWKKGERFDAEHLKSQAA

SEQ ID NO: 228979 - protein, 350 aa, unidentified
MWIIGCDLHTRYQQVAALETTTGELVERRLEHEGEAVRQFYAALPPGARIGIEATGHAQWFERLLAELGHELWVGDAAEIRAAAVRQQKTDARDAQLLLRLLVEQRFPRIWLPSVEERETRRLLLHREKLVRMRTMIRNQLHALAMNQGLRWRRKLWSAKGRRELEALPLGRWGSTQRRDLLALAEALDARLEALNQAVIAEAAQRPAALRLMQQPGVGPVTALAFVLTLGPVERFRRSKQVVSYLGLSPREFSSGGRQRLGAISKQGNTLLRWLLVEAAQTAARLDPELHRAYVRLKHRRGFRIAKVAVARKLAVRLYWRLRTPETHAQRVSPQSSPDTVMVEATPSNS

SEQ ID NO: 228980 - protein, 477 aa, unidentified
MAREQNAATEAKPNRKQRREQQRKIWTDNPGLDVVHPNAAGIDVGNSEHYVAIAPDKSAEPVRRFGCFTADLRELAGFLKEHGVVTVAMQSTGVYWIPLYDVLEEAGLEVYLVNARDTKNLPGRKSDVQESQWLLKLHTYGLLRNSFHPTSEIRVLRAYWRQRAEHIHTATECVQRMQKALTQMNLQLANVISDIMGVTGQAIVRAIVAGERDAEKLAKLRNWRIQASHEEIVASLMGNWREELVFALGQEVARYDFCQKQILECDREIERHLGSLPARPQEVSQPGEAALPPQKRKKATGNEPTFDLAGALVRIAGVDFTRIDGISVLTTQTVISEVGLDMEKFETEGHFASFLGLCPFNAVSGGKVLRRGTRKVVNRAATAFRIAAFTLKNSDSYLGAQYRRLRSKLGAPKAITAMAHKLAVLFYRMLRYGQEYVDRGQQFYEEKYRQQQISLLNRKAAQLGFSIVPAANAQATA

SEQ ID NO: 228981 - protein, 355 aa, unidentified
MKQSLQSNKLRFDGQVFFIGIDVHKKSWTITIRLNGMQLKTFTMEPNAKQLQKFLKKNYQGGHYFSVYEAGFSGYWLHHQLTELGIKNIVVSPGDVPISNKEKSYKDDAIDSRKLARELENNSLKAIFVPTPKQSATRQISRLYALQSNENKKIRLRIKSFLNYLGVEIPFEVGSRWSNRLINWLEKLELKNEGDRYYLDQLIKNMKAKRKELLATLKLIRKNYADHQVIKRLRTIPGIGLITAFTYYAEIMDIRRFDNENKLASYVGLIPSLKSSGNRTRVRGLNHRQNKLLKFRIIESAWVAIKNDPALTSSYVSYIKRMPKQKAIIKIARKLLNRMRSVWINQKEYQIGRMI

SEQ ID NO: 228982 - protein, 471 aa, unidentified
MSRAKSTISSLAQGEIRSTQGLPVVNPHAAGADIGTQQIFVCIPGPDQTQIVRSFGIYTADLHTLADWLVENGIQTIAMESTGVYWIPLFEVLEDHGIHCCLISGNLARRLPARHKTDVLDCQWIQTLHSLGLLTESFRPDADLIALRSLLRHRAQLVEHRSPHILHMQKALTQMNIRLDQAVSDVTGQTGLAIIRAIVAGERDPHKLAALRNPRCKKSEEEIAQALTGTWRAEHLFVLKQSLEFYDFYTRQIEACDLEIERTYSAIRPDWPDPSPDDQEPLPPNKRSSHSKNLSKESPVHVRQHLRRITGIDLTAVDGLSLDLAQKIVSEIGTDMSRFPTEKHFCSWLKLSPNNQITGGKIIRSSTGKSHNRARQAFLQAAASVAQSDCAFGAFYRRLKARVGPAQAQVATAHKIARVVYHLLKYQVEYRQTTAQEYEQQFREREIRHLQRKAARLGFSLTPIPEAGSVS

SEQ ID NO: 228983 - protein, 343 aa, unidentified
MEYYAGIDVSLESSSLCVVDATGRIVREAKVASEPEALIAWLQSLGFDLARIGLEAGPLSQWLYAGLKQAGLAAELLETRHVRNAFKIMPVKTDRKDARGIAQLMRMGWFRSVHCKSLPAQETRSLLGARKLLQSKLHDIELSLRGTLRGFGLKVGKTTPKTFEARIRTLVADHPTLTLIAEALLRARAVLLDEFIKLDKKVHALARQDPRARLLTTAPGVGSMVALTYAAAIDDPARFRSSKTVGALFGLTPKKYQSGETDITGRISKTGDAAVRTALYEAANIILERPVKGGWLKAWALGVAKRAGMRKAKVALARKLAVVMHRMLVDGTPFDLNRVTATA

SEQ ID NO: 228984 - protein, 355 aa, unidentified
MMIIGCDFHPRFQQIAFLDQETGECGERRLNHPQEAAEFYRSLPPGQVRIGLEATGSYRWFRRLMSELGQELLLGDPAAIRASVVRKQKTDKRDARHILTLLQEGRFPVVWQPSIKNEETRQLLLHRCRMVRMRTRVKNQLDSMAKNEGLLSKRVWCPRRRKEIEALPLTGWYAQRRRDLLDLLDELNRRIEPLDEAVEKAAWADESARLLMTHPGVGPVVSLAYVLTIGDWQRFARGKQVGSYLGLTPAEESSSDKRRLGHISKQGNTLLRWLLVEAASKAQSSDANWHRQYVRLSMTKHHGVAKVAIAHKLAVRLYWMLRSGQAWQQVMERGSPPQRLRPVAGDPGSHAGQSV

SEQ ID NO: 228985 - protein, 465 aa, unidentified
MKRDRRRPSPKPRTSPAALDRLHPHAAGIDCGAAEHFVAVPPDRDTTPVRSFATFTGDLHRLAEWLTACRVTHVAMEATGVYWIPVFEILDARGFHVILVNARHVKNLPGRKSDVVDCEWLRDLHILGLLRGSFRPADGIVALRGYLRHRATLIESAGALVQRMQKALIQMNVQLPLVVSDITGVTGLRILRDIVAGHRDPQALARHRNYRCRASETEIVAALTGNYRPEHVFVLQQNLPRIATCQHPLSACQAAIEAHPTRLAAASAPPASPLPAVRRRHTPPAPEPRFDLRTPLHQVTGVDLAQIDGIGPYNALRLLSEIGTDMTRWPTEKHFTSWLTLAPHNKVSGGRLLSSRTQPSANRAAAILRLAAMTLGRTQTALGAFYRRIAFRVGKAKAIVATARKLAILVYRTLKEGLVYHDPGADAYNTQHRTHVVRRLRQRAAHLGFALINLSTGQVVEGTVS

SEQ ID NO: 228986 - protein, 354 aa, unidentified
MSQKFESAIAVIGIDIGKNSFHVVGHDERGAIVLRQKWSRGQVEARFANMPPCLVGMEACVGAHHLSRKLNSLGHDARLMPAKYVRPYSKGQKNDFRDAEAIAEAVQRPTMKFVATKTADQLDLQALHRVRERLVSQRTGIINQIRAFLLERGVAVRQGLRFLRAELPNILATPPDVLSPRMVRIIEDLACDWRRLDERVEGLSNEIEAIARQDAGCERLMSVPGIGPIISSAMVAAIGAGDVFTKGRDFAAWLGLVPKQISTGDRTILGKISRRGNRYLRVLFVQAAWVVLIKPQIWERHGLKPWIEAAKKRLHHNVLAIALANKLARIAWSVLAHGRSFEASKLAAAVTQPA

SEQ ID NO: 228987 - protein, 322 aa, unidentified
MKKDTTYVALDDSKNSIVVGILRPRDTEPELRQIPNEARHLRRLFTRLTREGPVVACYEAGPSGYDLYRQLTALGVPCQVIAPALTPRKPGDRIKTDRRDAAKLVRLFRAGELTPIRVPDEAQEAVRDLLRCREDVQEDLLRWRHRLVKFLARHGRVYRDGRHWTQRHWAWLRSQRFDLPVLQRTYEEYRFTVEQLLARRAELEHEIVALAETEPYRERVGWLRCFRGIDTLSAMGLLTEIGAFHRFPHPRELMAYLGLVPSEDSSGDRERQGRITKAGNTHARRILVEAAWHYRGPSGCPPRLGARPRQSRSQRSVRIHCC

SEQ ID NO: 228988 - protein, 482 aa, unidentified
MKHSHQDKSQKVSPHKEQNSWQQMNRKQRREMTRKMHAEDLSLEVVHPHAAGIDIGNEAHYVAVPPDQDNKSVRCFGCTTAELKEMAVWLKQCGIRTVAMQSTGVYWIAVYDILEAAGLEVYLVNARETKNLPGRKSDVQESQWLMKLHTYGLLRNSFRPTQEIRTMRTYWRQRNDLIRSAARHVQRMQKALTQMNIQLANVLSEVSGVTGQAIIQAILAGERDPQKLAAFRDKRVKASEEEIARSLEGNWQEDLLFMLKQEQDGYEFCQKQMSECDERLQQYLRQREDRSKGAELPEENRKERLRKKKTNKPRFDLRTELFRMTGTDLTQIDAIDVRTAATVISEAGWDMSKWPTEHHFVSWLRLCPDNRISGDKVIGKGRLPINNRLSVALKIAASTLRQSNTYLGAQFRRLKTRLGPPIAIKAMAAKLARLLYRMLRYGMRFIDRGAQFYEAQHRWRQINSLKRKAANFGLKIIDAPAA

SEQ ID NO: 228989 - protein, 345 aa, unidentified
MNYIGVDLHKQTISLCVVIQEGRCRRVVDRANLRCSDTKTIAAWFKRHQPFEAAVEATAAYEWFVQLIEPLASRVILVHPKKMRVIAESNCKTDRIDAWVLAEHLALGKLPEAYRPTPRQRQHRTLVRYRMFVQRRITGVKNKLRHVMAGYNADVRSLFSQAGRDYVAAFPLSPADRFVVEALFEELDQRQARLRVVDRQLRQFAQQAPVAEREAREVLDSVPCVGPVTADVVISELGDVRRFRSAKQVARYAGLAPGQRSSSTKRHGLPISKEGSPLLRWAMVETAWRLVGRSRRWGVVYEKFKLRMSAKKAIVAVARRLLCVLVALLRSGQKYRLASEALAEA

SEQ ID NO: 228990 - protein, 332 aa, unidentified
MQFDFFIGIDVSKNELDFSVVKSGTELFHLKTTNSLEGIKSFIKIFKSKGYILSNALFCMEHTGIYNNPMLGYCTKQKAAMWLESAMQIKKSSGLQRGKNDRVDALRIAMFAYKNRDEVKLWEPRRYAIQRLKYLLSVRSRTVNVLKQLRVPIKEEQEFADRRVTKGQLNKRAIEILKIEIKDIENEIRHVIKEDKELKRIYEQIVSVQGVGMITATNIIVTTNEFKDITEAKKFACYAGVAPFEHSSGSSIRGKTRVSTMANKTIKTLLHMVALGTIRRDGELKKYFERKVAEGKNKMSVINAIRNKLIHRIFACVMQNRKYEKNYTHALA

SEQ ID NO: 228991 - protein, 370 aa, unidentified
MKTKTTPSVVPTSPANVTPGVPQCVIGLDLGDRSHHVCVLDAAGQIIREGALPNTRPALAKLLADFPRATVAIEAGTHSPWISRYLTDLGANVIVANPRKLHAISRNERKCDQRDAQMLARLARVDPALLHPIQHGSAQAQHDLLGLKLRDALVRTRVNLINAIRFTLKSLGHSVRNPSSESFHKTVLADVPADCLPVVQPLIAVLVQVTEQIKGMERDLVQRSKTDYPATQRLQQIAGVGPLTALCFVLKIGDPARFGRSRDVGAYLGLCPRRDQSGGTDKQLRISKCGDGLMRRLLVSAAHYVLGPFGPPCALREHGQRLAGTGSAREKKRAVIAVARKLAVLLLSLWKHGTDYEPRVTISTVVLTPA

SEQ ID NO: 228992 - protein, 418 aa, unidentified
MNTLASFEFTAYIGIDWADTKHDLCIQPAGSPDREFARIAHQPQDIEQWAHSMHQRFGGPIAVVLELSKGPIVSALQKYDFFVLFPVNPAMLAKYRQAFKPSRAKDDPSDAQFLVDLVLRHRDHFKPLQPQSIEMRTLVHLVEKRRRLVEDRLRFSNRITSALKAYFPQAVEWFSHKETFVFCAFITRWPTLKKVKRARRSTLERFFREHNVRRPLIIEERIQAIHNATALTEDPGVIEPCSLEVLALAEQLRITLELIKRFDDAIAQLVPRLPDYELFCSLPGAGPVLAARLLVAFGEDRERFQSAAEVQRYSGIAPVTERSGNTTWVHWRWACSSFVRQTFVEWAEKTVYRSFWAGTYYRQQRDKGANHYAAIRALAFKWIRILYRVWQSRSPYNETRYLQALQRRGSSLIVQESA

SEQ ID NO: 228993 - protein, 343 aa, unidentified
MQAITTIGLDIAKSVFQVHGIDAEDKVIIRRQLKRRYVLAFFQKLPPCLVGIEACASSHHWSRELKALGHTVRLMPPAYVKPYVKRQKNDAADAEAICEAVSRVNMRFVATKTPEQQSCLMLHRTRHLFIRQQTAVINAIRAHLAEFGIVAPVGRKGVEELLDVVADPSDKRLPEVARACIAALGAQLGSLKAQILGFDRQIMAWHRSNETSRRLDEIPGVGPVLATALVGSVADPKAFRSGRNFSAWIGLVPKQHSSGGKDRLGSISKQGDRYLRGLFMAGALAVIRYAKINGTKHRPWLTALLARRPTKVAAIALANKIARMVWAMMARGERYKEPVALAA

SEQ ID NO: 228994 - protein, 340 aa, unidentified
MSLYGGIDLHANNSVVVLLNEQDEVIYQKRLPNDLPTILGQLAPYHTELKGLVVESTYNWYWLVDGLMEASYLVHLANPAAIQQYSGLKYTNDHSDARWLAHLLRLGVLPEGYIYPKAARAVRDVLRKRAHLVRQHTANVLSVQNIMARNTGARFSVKRLRELTKQELATLLADETQVLAVTSSLMVLDCLQQQIKTLEKTVQKRLHHTPSYEQLLTVQGIGTILAQTITLETGAISRFPTVGNYASYCRCVDSTKISNGKRKGTGNVKNGHRYLAWAYMEAAQFALRFQPEAQRFYQRKLAKSRNNTILARKAVAHKLARACYYMMRDLVPFEATKAFG

SEQ ID NO: 228995 - protein, 338 aa, unidentified
MNNHSLIAIDLAKNVFQVCIMSTNNRVLMNKSFNRKGLTEFMLNQPSSTVAMEACYSSHYWARLFESFGHQVNLLPAQHVKPFVRGNKNDHNDALAIAEASQRPGIKAVPVKTLAQQDIQSLHRLRERCVSQRTSLSNQTRGLLSEYGIVFPAGFKSFKQTLAVLIDPSNTQLTAPLKQQLRYVADEFDRMSARLTELNQVLAQIAQTNPHCQRLMSIPGIGYINATALYSAIGNGSQFKNARELSVWLGITPKQYASGNKQVMAGITKRGNRYLRKQLIHGARALMRYCKKRDDQLSHWLKAIELRRGKNKACVALANKMARLCWTLLQTNQMYRSR

SEQ ID NO: 228996 - protein, 343 aa, unidentified
MPTFAGFDVSQAKTYISVVDDQGNELWHGSVTTSPDALALAVQEHAGGVLRIGMESGPLSPWLFHALKAKGLPIICIDAKAAKAGLQLQGPNKTDRKDANGIARIMQTGWYREVTVKEIEGHKRQTALTVRKQLIGMRTECINLIRGILKMYGKVLPSGKLPALKELMLVDDLLAKAISAVYGVLQTLGSEIKQIDKEIELLAGEDEYCKVLQTIPGIGKITSFAFAASIGDPKRFRKSRSVGAYLGMTCRRDQSGQKDVNGRISKCGDGMLRSYLFEAAGVILARTKSFSALKAWGLRIKQRSGWKKACIAVARKLAVIMHRMMVTGECFRFRNCAAAEMPA

SEQ ID NO: 228997 - protein, 402 aa, unidentified
MFFVGIDIGKRNHEAAIIDEQGKPIGKPIRFSNTKAGSEKLLQFINDHDLLPDNSMIGLEATGHYWLSVFSFLTALEFNVVPFNPIQSDTLRNFYIRKTKTDTIDAVLIAQVVRMDLPDQTYLPSEDIVRLKQLSRFRYSIVDQTSDLKRKVIASLDQVFPEYETLFSDMFGKSSTQLLLQSPLPEDLLEIDAQKLIDLLNEASNGRLTIEKSTQKVHQLRDLAQDSFGIRVATDVYKLQIQLLLQQILLLEEQLKTVEDEMAELVAAQDQYLTTITGIGPVTAAVILSEVGDIHRFECPNQLLAFAGLDASVHQSGDFTGTRNKLSKRGSPYLRRAIWQAAFIASNRDPALSLYYQNLRKRGKHHGTAVGAVCRKLVNIIFAVWTKGKPYEVHINPDLKTD

SEQ ID NO: 228998 - protein, 361 aa, unidentified
MYNAVGIDVSKGKSTVAVLQPAGVIIRKPFNVNHTSSELDELAKYIGSLEGETRVVLECTGRYHEPVVKTLSEAGLFVSAVNPHLIKNFGNNSIRKVKSDPADAKKIARYTLDNWIELRQYSSMDNTRTQLKTLNSQFSFFMKQKVAAKANLIALLDNTYPGVNKLFDSPVRDDGSEKWVDYAYSFWHVDCVRKIGLKTFTERYQAFCKKHHYNFQPAKPAELFLASKDLIAVFPKEASYKLLIQQSIQQLNLASSHVEELRSKMNELASTLPEYATVMGMYGVGKTFGPQLIAEIGDISNFSHREALTAFAGVDPGVDQSGTHNSKSKSCLHCFKQLLKMIRYINFLSRSVQKESLTMFT

SEQ ID NO: 228999 - protein, 346 aa, unidentified
MMIIGCDFHPSWQQVAWLDTETGETGEQKLLHATGEAKRFYAQLPKPALIGMEATGNSQWFIELIEDLGHEIWIGDAAQIRASYVRKQKTDKRDAAHILKLLVEGRFPRLWAPDREQRDLRQLVLHRHTLVLIRARGKNELQHLSLNKGMQRKRKLWSQAGLQLLRELPLKPWASCRREDLLGLLSMLHRQIEKLDGAVAQAAEDNPQAKLLMTQPGVGPNTALAFVLTIGDVRRFPRGKQVASYLGLIPREESSGGRQKLGAITKQGNRMLRSLLVEAAQVAVRCDAGLRKQYLHRCHQKPKAVAKVAIARKLAVRLYWMLRTHTAYPEIVRIESSSGLALVGAS

SEQ ID NO: 229000 - protein, 402 aa, unidentified
MYYIGIDVARLSCECAIIDNDGETVCKPFGIYTNKDEYSKLLDKLKKLNIPKSDSLCGLEATGNLWENLYEYLTSRGYKVMVLNPYQTNKYHEVMLKKAKTDAIDAYVIAGLLRSGHASQSHIAEDTIQSLRDLVRLRASYQANLKAYKRKAYSLLSLLFPEYLNCIKDPFAIVSTEVLINYPTAFDFKELKPKHILKIARHHQGNNFDEALASKIISLAKDSVYSGKARIARGTVLRSLLVQIKSLKEQIDMLSREIDDILKPKNPSLKGPGDNLSSIPGIGPNTIASILAEVGDIMRFSNQREFIGYIGLYPEIKESGESGKKPILTKRGSPLLKHALYMASVASIKHNPVMRGVYNKKRSQGKSPKQALIVVARKLACVIYSMLKSGHQYCESRVLVAA

SEQ ID NO: 229001 - protein, 404 aa, unidentified
MIFVGVDWAETHHDVCVMGEDGQVLEQRRVSHSVAGIGELHALVAGHAGEGEPVAAGIEVDRGLVVTALLAAGYQVYAVNPLASSRYRDRHATSGAKSDRGDAKVLADLVRTDRHNHRQVAGDSDLAEAVKVLARAHQSAIWSRQRQVNALRSALREYYPAALAAFGTDLAASDAVAVLALAPTPDAGRSLSRAKIASALRRAGRQRNTEQRTAGIQAALRAGYLQAPPAVAGAYGAAARSAIRLISAYTAEITELEEALSGHFEQHPDVKIVRSLPGLGTILGARVLGEFGDDRTRFASPQCRKNYAGTSPITKASGRSHVVLARHARNRRLADALEQWAFCSLTPSPGARAYYDQLRARGKTHRQALRQLANRWVGILHICLERGCTYDETAAWHHPQANAA

SEQ ID NO: 229002 - protein, 334 aa, unidentified
MLYAAIDIHKRAFQAAVLDPESGEVVEERFAADRESLARWAEQWRGRVEAVAIEATTGWRWVWRELVERGFEVRLAEPVQTRALLGRRRSAKTDRLDARWLARLLAKEMLPQSWIPPEQIQQLRDRTRLRKALAEDRRRWGQRLHAYLLHEGWPCSRSNLLRPPGLRWAAALQLSEQARLQVDSLLAVMAALQEQLETVDGELRRFARADERCQALQSIYGVGPILACHLLAEIGEASRFQRAEQITRLAGLDPVVDESGETRRRGHLAKAGSPHLRWALVEAAVHAHRPTAPDLALYRATRERRDTTVARLTVARKIGKRAFHALRELELTAA

SEQ ID NO: 229003 - protein, 338 aa, unidentified
MEYGAIDLHTRKTLIRIVGEDGAVVLDRTITTTREGLTQVFGGRARMRVLLETGTESEWVAQAIEAEGHEVVVADPNYALMYGVTVRAVKTDRRDVAALAEACRLGIYRAAHRVSAAQRRTRRRLRVREQLIRMRTQAINLLRAQLRQEGYRLPSGASATAVRRCRGLSLTPALGEDLTPVLALLDGLAPLITACEAAAATQAEADPVVRHLMTAPGVGPIVGLTYRAVVDDVARFRDASSSTAFLGLVPREDSSGTCRRKGAITKRGPTALRVLLIQAAWAIWRQRQGRAALHAWVERLAARRGRRIAVVALARRLARILYAMWRDGCDYRPVPLSA

SEQ ID NO: 229004 - protein, 368 aa, unidentified
MNEYKLKAAPTAVSKEQNSQKNPKANRILIGVDAHLKSYEAARKIDNGAVGVAQSFRSKEAFLLYVEKQREQAEEVVVVYEAGPLGYTLYRELKASDIECLVCAPRSGEQKRKRRKNNSIDARTLSSDLFNYLNGNEQALQAVRVPSEAQEQARVESRQHDALVEERKRIGAMGNSLLLSQGYGSWSNWWRPKAFERLSKGVAPWIVKHLGRWVGILRELDQQIQQAKAELTQHYQGPRPKGMGAPSLAQLNAEVLDWNLYSSRRKIGCLAGMVPSEWSTGEGQRLGAITKVGVPAIRRIITEMVWRMILFQPEYKPVQKWREVLEGPNRGLKKKAVVAIGRQLIVDIWRLQTGRISAQELNLIMVEG

SEQ ID NO: 229005 - protein, 315 aa, unidentified
MTTKNKEIYIGIDVSKATLDVAIWESEITWKFSNELKGWQDLAKRLAILKPQLIAIEASGGFEQPLVAELYGEKLPVAVVNPTRVRSFAKASGQLAKTDKLDAKIIAQFAQALHPKVRPLRSPDEERLNALVTRRRQIIQMITAEKNRRSTAHNSMNIRIQQHIAWLETDLKALDKEIGAIIQHSPEWKEKENILRSVPGVGPVTTSTLLAELPELGSRNRQQIAALVGVAPLNRDSGKMRGKRRVFGGRAPVRSALYMATLVATRSNPIIRRFYERLLAQGKEKKVALTACMRKLLVILNSMLRHHRVWCPITA

SEQ ID NO: 229006 - protein, 332 aa, unidentified
MYYIGMDLHKQDLVMAVEDEQGPVGRPRRIACRDVDAIQAAVERWRPFRAVVEASASYRWLYDLVSRQGEMVLAHPLRLRAIATARAKTDKLDAALLARLLRANLIPAAYVPPARYQRLRDLTRTRARLSYGATLAKNQIHALLARANVHPPLKTLFGPRGRRYLAGLDLGLSGNLARDELVRRLEHYGREIAAFDAHLEAVASEFPEAEALQVLHGIGRYSALLVVAEIGEPERFRNARQVGAYAGLTARVHQSGGHEHRGGISKQGSRWLRWILVQAAIKLVRRDERLANFYQRIRRRAGRNVARVAVARKLAGICWVRLRRWQREQAAA

SEQ ID NO: 229007 - protein, 387 aa, unidentified
MTAVVIGVDPAKRSNTIEVMDSRETVLVTARFDNTNADYRKIRTLVKRWPDRVWAVEGATGVGLHLAQRLISDGERVVDVPSKLSTRVRAIDSGHGRKNDPTDAHAVAVVGLRTKGLREVAADDQMVALRPLSERRRDLVRSRTQAVNRLHQVLMELIPAGAQRHLNAAKAKELVATVRPRDVAGKARRQLAVDLIDDVGVFDRKITTVDTRIQEAVAASGTHLTDIVGVGPVTAATILGEVGDIARFQTADQFASYTGTAPIEASSGEVVRHRLSRAGNRRLNSALHVVALSNNRYDPHGKAYYERKLAAGKGSKGSMRCLKRRLSDVVFRVLVQDRALVNPGGQMGATLTASAVDQIPKANTSDKPQPGFGTEATPTRRLTEAAS

SEQ ID NO: 229008 - protein, 344 aa, unidentified
MEHYAAIDVSLEWSSVCVVDAAGQIVREAKVRSEREALAAFFTESGLAFARIGLEAGPLSQWLHAGLVEAGLPAILIETRHVKAALKAMTVKTDRNDARGMAQLMRMGWFRPVHAKAPMVQEIRALLTARKLLVAKLRDVESSIRGIQRGFGLKVGAVSKGKFEARIRELVTGQVMLERVAEPLLRARAALRTEYTTLHRDLLRTVREDAVCGRLMTVPGVGAVVAMTFRSAIDQPERFAKSKAVGAHFGLTPKKYQSGEIDRTGRISKVGDAMVRTALFEAANVMLTRAVRFSTLKAWALRVAGRHGMKKAKVALARKLAVVMHRMWVDGTSFCWGEASVSAA

SEQ ID NO: 229009 - protein, 314 aa, unidentified
MSALVFVGIDASQSRLDIAVRPSTSFTIPHAAAAIAALVQQLCTLRPTLIVLEATGGMEIPLTSALATAGLPVVVVNPRQVRDFAKASGRLAKTDALDAQTLAQFAEVMRPQPRPLPDVAARALTALVARRRQLVEMLTAENNRLLSASSPIRKRVRTHIAWLERELEHTNTELSEAIRQNPLWREKDELLQSVSGGGPGLTSTLLAGLPELGTLPHKQTAALVGVAPLNRDSGTLRGRRTVWGGRAQIRAVLYMGAIVAARFNPVIRAFYQRLQRVGKAKKVALTACMRKLLTILNARLKHRTPWREVEAQHA

SEQ ID NO: 229010 - protein, 333 aa, unidentified
MVMAAIDIGKTLLQAASLDEESGLIGEARLTADRPSLHGWVDGFGGRLETVAIEATTGWKWIARELETRGVVVRLLDPGEAAARKGKKRRAKTDRLDARFLLSLLAAGMAPEAWLPPSEIQELRALTRTRKALVDERTAMAERVQALLFHEGWPCQRGRLLTRTGRQWVAALELEPVMRLLLDALLGVIDDLDRRLEPLEKELSRRAKQDRRLQALQRIYGVGPIVAGHLLAEIGDARRFTRARQVVRLSGLDPVVLESGNTKRRGRLAKAGPPLLRWALVEAAKHASRAGSPDHERWLRVRNRRGSKVADLTIARTIAGRAHRLLLQLEQTA

SEQ ID NO: 229011 - protein, 424 aa, unidentified
MTREMADYAALVGIDWADRKHDLCLQAAGSEKRERLVLEHRPEAIDEWACALRVRFSGQPVAICLEQHKGPLMAALSKYDHLVLYPINPLLVATRRRGLKPSGAKSDIADAEIILDLLTDNSAKLRPWHPDNARTRQIQALVEARRTLVENRVGTTNALTANLKLYFPQALGCFDDLASGLACDFLTQWPSLGQAQRAREATLTTFFHQHGVRGEDLIMRRIAALRAAMALTTDSGILVPALLRTKTLVAVLRAQLDGVSDYDTAITKAFDAHPDAALFASFPGAGPTFAPRLLAAFGADRERFASARAIQEYAGVAPVTEASGQSHWVHWRYACPRFVRQSIVEWAGMSIRYSFWARTYYQELRERGKAHNAAVRGLAFKWLRIVFRCWQDRKPYDEAKYLLSLQKRQSPLLQAAAKPLGQPA

SEQ ID NO: 229012 - protein, 381 aa, unidentified
MKIYVGIDIAKLNHFAAAISSDGEIILEPFKFTNDADGFQLLVSKLESFDKNSIIIGLESTAHYGDNLVRYLVAEFYQVCVLNPIKTCQMRKNNVRKTKTDKVDTFVIAKTLMMQDDLRFITFFDLDMMDLKALGRFRQKTIKQRTRLKIQLTTYVDQVFPEIQYFFKSGLHQNAVYALLKEAPSPKEIASMHMTHLANLLKVNSHGHFTKEQAKELRVLAQKSVGANDSAISIQITQTIQQIELLDSQLEKIEAEMTDIMKFNDSVIMTIPGIGYINGGMILGEIGDIHRFSNPNKLLAFAGLDPSVYQSGNFQAKTTRMSKRGSRVLRYALVNAAWNVVRNNATFKAYYDAKRAEGRSHYNAPWSLCRQACQSHLEDAH

SEQ ID NO: 229013 - protein, 466 aa, unidentified
MQPFYMGLDVSKGYADFMIIDHRKQPVIKGFQLDDTFSGHSCLYDVLSRFFVNHPDATLFAAMESTGGYEDNWYNALRHFQGVLNIRTARLNPLGVVHNSKADLKKNTTDKISAQNVAEYLVAHPEKVTYQQDDQMAGLRKQWGFIQMLTKQCTQIRNQFNTLLYTAFPELLNYCQDGVPDWVLKLSVKYPAAVKLKNARVNSVAKVPRITIQRAQKLIAQAKDSVASTTDPTTQQLIKDTARQILRLKQTIATQKLRMAKQCQLPEIKLLKSFIGISDWSAIGLLIEIQTIKRFASAKKLASFFGLHPVYKISGDGSGGIAMSKQGRAAPRKILYMVTLSAINSNPLIKQLYEKHQQRGKHNLSAIGICMHKIVRIIYGMLKNNQPFDPNIDLAHQQRTIEATTKGRVESKARRFQDYDDSAPVSRRQRKKRLERKQSHSVTDTKSGISAPVPLGNILADILPQV

SEQ ID NO: 229014 - protein, 347 aa, unidentified
MEKNAASEVQVFAGIDVSARKLSVAVGSETAEREAIQTFANTSKGHQALVGHLLRGKGRVRVCLEASNYSLDVALTLQAHRQVEVSVVNPRRARRFAESLGERSKTDPVDAHVLCQYARRMPWVPWVPPSGLALRLRGLTRAIEALVVTQTQEKNRQHALQASRALPTFVIRELQRHLDYLQLRITRLRREALRLIAGDPELDRRFRLMLTTPGIGETSALQILGELAVLPSTLDARQWVAFAGLDPRRFTSGSTVEKKPRISRGGSRHLRRALYMPALVAIRHEPNLRAFFQHLVARGKAPLQAVVAVMRKLLHAFFAMFRSDQSYDGCKLCPLQSAPDSSTLCAA

SEQ ID NO: 229015 - protein, 338 aa, unidentified
MDYYAGLDLHSNNTYLGILDEKGTKVYKAKVPNHLPMILRALRPYRESMVGAVVESTFNWYWLVDGLMEERYKLHLANPAAIKQYEGLKHTNDYYDAFYLADLLRLGLLKEGYIYPKKERAIRDLLRKRLMLVEQRTSHILSFQTLYNREKGSKFASNDVKRLREEEIEPLFSDEYVCLSAQANISLIRFLTKKIKELETAVLGYMRVLPEFVKLKTVPGIGDILALTISLETGDIRRFPKVGNYSSYCRCVNSQRLSNGKKKGENNRKNGNRYLSWAFAEAANFARRYCPYAKRFYNRKLSKTHKIVAIKALAHKLARASYFVIRDRVDYDPTKAFG

SEQ ID NO: 229016 - protein, 354 aa, unidentified
MKKEVLKQSLGIDVSKDSISITLAEVTPELRKHFESGADLANDSKGFSKLIRWLSCRVLDKERFIVVMEATGVYHQCLALYLYQRGFSVSVMQSGRVKRYAQSLQQRSKTDALDSKMLSMLGCERELPLWEPPRKVLSELKALSRERSALIRDRVTNNNRLDAITRSPFQHSREIARYKKRIKLLERQIKEVEEEMRELVEKDKELSRKLHYLRSIPGVSFISTATVVGETLGFAGITNAKQLTSYAGYDVVIRESGTYKGKSAISKKGNRNIRSVLHMPSMTAVRVNPTLKPFYHRLKGNKAKPIIALVAVQRKLLVLMYSLWKNETYYDPDYQQKRSSSLVELPCRIVSTLV

SEQ ID NO: 229017 - protein, 308 aa, unidentified
MAQNFIGIDLSKARLDIHDPQTGKDSCCPNARTGLRRFVRGLGPDDIPVFEATSGCDRLLIEELTLGKRRFVRVNPLHAWHYAQSLNLPKTDRVDARMLARFGTERQPAPTPLRDPARDELAELTGRRDQLKRMETEEKNRLARTANPIAARDIRASIKTLAQRIARFDAEIRACIAHNPKLSETARLITSVPGIGPVVAAGLMAWMPELGTLDRRAVASLGGLAPKARESGMYKGHRRLGQGRCHVRKLLYMAALSLWRNPGVVGDMVPRMRERGKPNKVILIALARKILTFANAVLRDRKPFQSNA

SEQ ID NO: 229018 - protein, 326 aa, unidentified
MEHELHYIGIDTAKEKLDVDVLRPDGRHRTKKFANTTKGHDELVSWLKGHKIDHAHICIEATGTYMEPVAECLYDAGYIVSVINPALGKAFAQSEGLRNKTDTVDARMLAEFCRQKRPAAWEAPHPLERALRALVVRHHALTDMHTQELNRTETAREVQRPSIDAHLLWLEAELKRLEKQIKALTDDDPDMKHRRKLLESIPGIGEKTSAVLLAYIGLKDRFAHARQFAAFAGLTPRRYESGSSVRGASRMSKAGHVSLRRALYMPAMVATSKTEWGRAFRDRLAANGKKGKVILGAMMRKLAQVAYGVLKSGVPFDASRHNPVAA

SEQ ID NO: 229019 - protein, 402 aa, unidentified
MVTAPTRFIGLDIHKEYFVAVGVNAQREVVFGPRRVSNYQLEEWILQHLTPQDALVLEMSANTYLFYDTLLPHVHSVIAVHPPNVPMVTNAWVKTDKKAAVTLAQLHAGGMLTGVWIPPHRVRDLRSLIARREKMVRLSTMAKNRLHSMLHRNHLVLAEKPFTPEQRTWWESLPLSATEQFLVRSDLDTLEFAQKQIEQVEECLKLESARDERIPLLVQLPGVAMLTAITILAAIGDITRFPTAKNLVGYAGLGTRVHDSGKSQTSGRITKAGRRDLRRAMVNAANRAVQHHVHWKKELERMEPHLGRSEAIVAIARKLLVVVWHVLSDQVVDRYADPRSVACSFLAHAYQVGVKNLPEGQSAVAFTREQLDRLGIGKELEKIPWGRKGRKLPPSKLLLEKE

SEQ ID NO: 229020 - protein, 346 aa, unidentified
MLYAGLDLSRKRLDFHLLDGQGVTVEVGAAPPDADGLRGLAKRLDRHGSPIRAAIESMNGARFVHDWLEQAGWQVEIADAQKVKGLAPLACKTDRIDAWVLAELCRRDLVPAIWLPDPHVRAERERARWRLHLVRHRSSLKQRVHAVLLAHGKPCPVSDLFGVSGRRLLARLALPEPWRSTVAASLRLIDQLDHEIADCEAELRRLGADHRYVPLLLTTPGIGWVLAYTIAAEIGDITRFASPRKLAGYTGLCPRVYQSGESDRRGPLAKQGPKYLRWALVEAAVHASTHPAYRERYQRTKARLGKQRGAKIAQVDLARRLAEAIWHMLNRDQPFAPAGATDPLAA

SEQ ID NO: 229021 - protein, 349 aa, unidentified
MCEMYFDPKETGMKYCGIDLHSNNCVVIISDEEDRIVFNKRLANDLGQIRAVLEAHREELAGVVIESTYNWYWLVDGLMDVGYRVHLAHPSAIKKYEGLKHRGDFADAAYLAQLLRLGLLAEGYIYPREQRGARDLARKRMQLVRYRTAQILSIEGILMRQTGARLKGEAVKRLTAEQVDEFAFAPDVALAVEANRAVSQALGQQIEALERRLKERVSLRPEYRLLKTVPGIGQTLATTIMLETGCIDRFAQVGNFSSYCRCVDSLRESNGKKKGEGNTRNGNKYLAWAFVEAANFALRYCPQAKRFYDRKKSQTNRVLAIKALAHKLARACYHMLREQKPFNVHLCFG

SEQ ID NO: 229022 - protein, 411 aa, unidentified
MTPTTHRSIGNTPTRRKTIGIDIDAETLVTAYLDVSQPSIPIRSYPNNPSGRQTLAQHARQFQPEIAIMEATGPLSLPVYDALRAAGIHCGVVNPRSLAALLRVATAKTDANDAVTLARAASFFHQLSWSNLPDAWQREQRERFAVLDRCDTIIRKETIRTRQALTAASCDLRGLASTSDPRTDAILRALIHPEDAPRIADSFRSERKRQKFRDALAAPLTRPLLERVVFTLNLRQVLRRHQEHQETQLWAESGTPAVWEATRFLQTVPLTDPLLAMRVLAEFGRDFTHRYRNVEAFCSACGVVPRAELSGGRVLKSRTEPRALRIRRPLVTKLRGYVLFRQGLPLAWSRWLDWLEARGLRVDQRAIALAHAMADAWYHVTKLQVAYDITTHFRNKIEWRTDRDTGEMVPA

SEQ ID NO: 229023 - protein, 353 aa, unidentified
MIAPFFSLRPERIPGGPTPRMTSKGQEKMNHPVAHASDEITIGVDISKERLDAYLHPKGVARQFTNDRKGHAQLIAWAAPYQPTRLVFEATGRYHRALEMALGKAGLPAVKINPLQARRFAEATGKRVKTDPIDAAMLARFGVTMRPEIPPAKDETIDVLAELLAARRGLIKDRTAASNRGKSLTLPMLKRQCEQHRKQIDNQIAAIDREWMSVLAANPTLKTRLDILLSIPGIGPATAIALLVDMPELGTMDAKQAASLAGLAPVTRQSGTWKGKSFIQGGRACIRQAIYMPALVAMRFNPPLKEKYEALRHAGKPAKVAIVAIMRRIVILANALIRDNRKWTLDMAAAGAK

SEQ ID NO: 229024 - protein, 350 aa, unidentified
MEHDSTLYVGLDVHKDSITVAYALGTGEVELLGKIGTTKTDIDRLCKRLQSKARRIRVVYEAGPCGYGLYRQLVQKGFDCMVCAPSLIPRKPGERVKTDRRDAVKLVRSLRAGDLSAVYVPSVHDEAFRDLARTWVSAKDDLKRARQRLKAFLLLHGVRYTGCADWGPAHRRWMSAHTFENAWQQFAFEELRRAIEDRLAQCDRLESALREAVVNWRFYPVVLGLQAMRGVQFTTAVGMLAELGDLSRFVHPRQLMAWLGVTPSEHSSGGKRSQGSITKSGNSYARKLLVEAAWSYRHPARVSPDIQRRHQGLLKPIVDRAWDAQVRVPTLSQTHRTRQAEEYRCGCGRP

SEQ ID NO: 229025 - protein, 433 aa, unidentified
MIKINYMSTLFVGIDVSSKSNVVCAIDFDENKYISSSFQNNQPGAEELAAMIADCMAHHKNLNAVVATLEATSIYSVHIANFLSTCETLMPYRPYVFCVNPKMTANYRKSYIGMDKTDPLDAYLIADFARCGRIKKCQPWRGSQFLALKRLTRHHLHLAECITREKTYMVSNLYLKFSELQLLDDDSQPFSNLYGATSSAVLTEYLSPQEIIDSSEEVLLQFLSLKSRNRIADLSKTSELLKKAARDSYRLDKCMYEPLNVSLASSFNCIHTYQKEMKLVDQAIEKSMNGMNPNAFTILKSIPGIGPVWAAGMLSEIGDINVFHSSDALAKYAGLTWRKSDSGDFSSEDNPITRAGNAYLRYYLGEAANSVRRHIPEYGEYYAKKYAEVTKHQHKRALALTSRKFVRLVFGLLVKNQLYTGEQLDAEYNIESN

SEQ ID NO: 229026 - protein, 326 aa, unidentified
MTQLSSPVVSPLFVGIDVAKDKLDLARSDSGELLTFTNDDRGIRAIVELLQAARPTCIVVESTGGLERPLLEALLDADLPVALVNPGRVRHFAIGIGVLAKTDPIDASVLMKFAQLAEPRLAQKRTQNQAELDELITCRRQLTAARTAQANARLTTRSTDAQKSIDAILKALDKQIELLDQKIRKLIDSDDDFKHLDRLLRSVPGVGPVLSATLVAELRELGTTDRRQIGALVGVAPFNCDSGKFAGQRSIHGGRTSVRCVLYMATLAAIRFNPVLRPFADRLRKTGKRAKVVIVACMRKLLILLNAMIRDNLTWSELNVVRTLDI

SEQ ID NO: 229027 - protein, 387 aa, unidentified
MQKPHDDSKACLTAFVQDSTLIVVIEMSLGSWLVAGMVPGVSREPRKKIAPNPEVLLLLLYRWRDEAIKAGKQITRIAVAYETGRDGFWLARWLRARGIDAHVIHATSVAVSREHRRAKTDRIDTAMLQRGFLGWLRGERGHCSMAIVPSVAEEDGRCPHREREILVKQRTSTVNRMKSILIQFGVRNFNPVLRKAPEKLESVRTPEGIPLPSNAVAALQRQMERFRVIKEQIKAIERTRLQRLQRDPAEKFNAMVFLLVRIIGLGIETAEQLVHEILSRNLRDRKAVARYAGLTGSPDESGSKRREKGLSRSGNGRVRKILIQLSWRLLRFQPQSDLVRWFKTRTANAQGSRKPMIVALARKLIIALWRYVNTGLVPEGFHLRSVA

SEQ ID NO: 229028 - protein, 311 aa, unidentified
MTMLADQVDVVIGVDTHKHTNTAAVVRASTGGVLDEATVSTTPAGHEELLAIARSHGSLRAWAIEGTSSYGTGLTRFLRANDEWVFELERPTRSDRLGGKKNDPLDAARSAREALARPDLGQPRSTGDRTALSVLLAARRSAFDGATVTERQMLAILVAAPETLRERFSKLTTTVAVAKAARMRIVNDGDAETVTTTTVVRSLARRSLELRSEAKEHEGALTVVIRRWRPDLLEQKGVGPIVAATVLCSWSHRGRFRSEAAFASLAGVAPVPASSGLTVRHRLNRRGDRQLNRALHTIVLSRIRFDEETQA

SEQ ID NO: 229029 - protein, 435 aa, unidentified
MRRSETALKGEVYMSYCPVAGIDVSKRFSDMCILSPDNKIFAQEKIYHDETSINRANALLQKAERLFFSKPVIVMESTSHYHLILFQFFSEHGYDVIVVNPLQSNSMKDFSIRKRKTDRVDAFKLAMMYRTKTLRPSQIPQTATRALRQLCRHRAELLNDVSSYKNRLTALLDQTFPGYDKVFSDVGGVTSCAVLVRFPTPTILLVEEESELVEVIAAASKSGYSFAKKKAGLLISAAQKAQTLGIHSCADETLIVCTIQMLRTLSESVLQIETAIDNLLAQIKEMRNNVSLLQSIPGIGSHSAALLLGEIGDISLFKKPKQLAAYFGLDPTERQSGSFRGTKNKLSKRGSSYARAALHMGIVNSICKRGKDSAANPVLLSYYEKKCKNKPAKVAQAASMHKLVFIVFAVLRDQMPFELKTPEQHAVEQGFVKAA

SEQ ID NO: 229030 - protein, 347 aa, unidentified
MNFYTTPHKHYCGVDLHARTMYVCVLSQQGVVLLHRNMRCDAQMFLLAIQPFREDLVVAVECIYSWYWLADLCAKEGISFVLGHALYMRAIHGAKAKNDRIDSHKTAALLRGGLMPRAYVYPAEMRATRDLMRRRLHFVRQRSSLLAHIQMTHHQYNLDSPGKRISYRSNRDGLGAGFEDVSVRDSIAADLALINHYEVVIAELELAVLRQARVHDPNAFRLLTTLPGTGKVLGLTLLYEIHDVRRFPSVQDFASYSRLVKCEKSSAGKSLGTSGAKIGNAYLKWAFSEAAVLFVAKCAQGKTLLSRLERKYAKPKALSILAHKLGRAVYFMLARNQAFDLERFAKS

SEQ ID NO: 229031 - protein, 356 aa, unidentified
MSKTNPVKIIIGVDTHKDIHVAVAINGIGAHLGTLAIPVSPKGYQNLETWARAFGSIHAFGIEGTGSYGAGLARFLQAKGHTVVEVNRPNRQLRHQNGKSDPLDAESAARAVLGGQANARPKSADSSVEMIRHLKVARDTAVKSRTQAMVTLKTIIINAPAALRQALDRIIGKMALIRHLAALRPGPILSVTASAKAALRAIARRWLTLDAEIRAHDADLEALTASCVPAMLEAHGISTGTAAEMLILVGDNPERIRSEAAFAKLCGVCPVPASSGKTNRHRLNRGGNRQANAALYRVVIVRMRNHQPTLDYVKKRKADGKGKMEIIRCLKRFVAREIFGYLCGAQRSVPSISKAT

SEQ ID NO: 229032 - protein, 346 aa, unidentified
MHYIGVDCHISTLDFAVVNETGRLVKGGSVATSVNNFMEFVRKVPSPRTIYMEEGTLAAWALEVCVCFREKLVITDPKKNHWIGSSGQKGDSIDALKLAQLARGGYIKEIHHPVGERRRFRELMEAYHDTVRSTTRVKNKVKAKFRQNGIQCTGDTVYSETHREEWKGKLPQDSTLLLILDGLWLQLDQSEQIEKKILAAAKAQAKRYPEIKLFQDIPGIGFIHAATVSAILETPHRFADKRKIWMYAGLGLMKRSSAGKLYSEKLSTDYNRLLKYTIKQAAGAALQAEDNPFRRKYLDMTLLHGIAPNLAKLTIARDMLATMWAMWKKGEKYNPEIRGKAVRKEG

SEQ ID NO: 229033 - protein, 400 aa, unidentified
MRTVFGIDVSKASSEVAILVNGERVHGYTMPNDIIGFSRLLEDLKTVSNPEIIFEATGVYSRRLQAFLEENSYDYTRLNPLEAKKQLDGLRVRKTDKIDAEKLASSQFVLNRKPTYVQEEVYQNLHDLSRFYQNLTEDIVRTKNRLHKVLQVAFPEIENLLSTPTGEQYWNLVSIFPTKHWVLELSEVELKEAIRNSTSKRISENRVGNLTEKLVGLAKQSYAGISKTSPMVEEVKYDAQELIRLTNRREQVLQQLIALAEPLPEYKILLSIPGIAETTATSIIGELGDIRRFKSANQINAFIGIDLKHYESGDFLGQEHITKRGNPYARKILYKCIHNIASASHTNPCHIADFYEKRKRQSQITSTKPHTIASIHRLIRTMYYLIMHNKLYDYTLAQSH

SEQ ID NO: 229034 - protein, 435 aa, unidentified
MLVVSPSQAEYMTRIRGLERERCLVVPIDVGKKSAMALIADHCHEVVVDPFTFDLNELGVEMLLAKTQAYAEFVGAASVRFGIEAAGHYHRGLVTRLDAAGRDVVELNPAIVKDARGRIGQRRVKTDIQDCLAMAEVLIDGLGHTPTQRTVAMLTQVAWAGQRLRKVEARGVLVRQIHAQVDLAFPHLTACYSHGLNMPSLRVILTHICDPARIVRLGPKRLREYVVNRGVRMWRPKAVEVVEAARLALAVPEGQRRAAQQFVARDMAMLEAIEAEIAECDHQLAQVLADTPAGVLLSIPGVGVTTASYYGAALGDPHRFRNADAAYRYSGLSPTSYESAGRRSSRVHISREGSVPLRHAIIALGHGLRTHEPDFTAYYRRLTSSGKPPLVALVAVGHRAHRLAFAMMRTQRIYDPDQWADAVEKGRAVKVANAI

SEQ ID NO: 229035 - protein, 349 aa, unidentified
MNHYVGLDVSLEETAICVVDGTGRIVKEARAASEPEALIAALREIDWPLERVGLEACSLTAWLHDELHSAGLPAVCIETRQANAAMKTMPNKTDRNDARALAQIMRTGWYRQVHVKTRQCRLWRSLLVARRTVLNEMRSMENVVRAVLREAGLKLGVPGRAAFAGRVRELTEGDARVTTLVEPLLAILATMLDQLAHLTKQVQDIVRQEAVCRRLMSVPGVGPITALAFRATIDRPDRFRRSRDVGAHLGLTPARYQSGETDIQGKISRCGDELARTALYEAAHTLLVRSRKWSALRAWGMKVAKARGMARARVAVARKLAVILHRMWSDGAEFRFGKEPSAGVARVSA

SEQ ID NO: 229036 - protein, 353 aa, unidentified
MKYVGVDWAYRQAQWCALTAGGEVAGEGRIAADRDGLARLVLELGDEVKACLEMMSGALWVRDQLVACGWQVEVADARKVKTVAPLAAKTDKVDARLLAELSRRELVPGLWLPSLDERALRERLRRRMHLVRLRTSAKGRIFGLQTQWGVRVSLARLRRADGLSLLERAGVPEVWRRSIGECLALIDFLDARIAPLDAELRPFAKADPRAVLLDTIPGVAELLALTIAVEIGEINRFTRPEKLVSYGRLAPRVRQSGESRARSGPLNKSGSRLLGWAAVEAAQQAWRESNPWHNLYLDVGRRSRHTNAAKAAVARKILIAAWHMLSRNEPFKPAPRTTAGTSVPASSSLALAA

SEQ ID NO: 229037 - protein, 343 aa, unidentified
MVVIGVDAHKRTHTMVAVDELGRTLGERTVAATSDGHLQAVQWAARWPGARFALEDCRHLTRRLEGDLLRAGFAVVRVHTRLMAAARRGGRQRGKSDPIDALAVAHAALREPDLPVACLDGPARTVKLLSDHRQDLVAERTRLCNRLRWHLHELDPGLDVPSRGLRRYHVLDGLAARLAVMDGVVARIAAGLVARCRELTSQVNALERELGTLVRRLAPALLAIPGCGVLSAAVIIGETATASRFRSRDAYARFTGTAPIPVWSGNTVRVRLNRGGNRAVNCALHMIAVTQARGIGPGKDYIAKQLAAGKTTTEALRLLRRQLSDTVFRALLADEHRQAHRTA

SEQ ID NO: 229038 - protein, 347 aa, unidentified
MVTVGGDSHKRSHTLVAVDENGRQLGESRVAATPAGHIEALDWAQQWPQRSWALENCRQLSRGLERDLLAAGERVVQVSPKLMGKSRRSSREQGKSDPIDALAVARAALREPNLPVAQLEGKSRELKLLVDHREDLVGERTRIQNRLLWYLHELEPGFEVAAGGLVRSIVQMEVRRLLKRHRGVVAEIALEQVARLVELTRSVKALQRRIELLAAELAPSLLRLPGCAGLCAAKLVAETADVRRFRSSAAFAMHNGTAPIPVWSGNHERHRLNRGGNRQLNVALHRIAITQLRLGGEACQYVSRRMSMGNTKREAIRALRRQISDEVYRRMRLDSLEQLLTTNAAAA

SEQ ID NO: 229039 - protein, 348 aa, unidentified
MWYCGLDLAGVSSYAFVTDARGVKEWSGPLETSRLAFERLVKRYRGGFSVAIEAGNQTAWVYEVLLKAGAQATVVNPVKVTAIAESRKKTDKIDAKILCELLRINGLPHPVHMPGAETRALRGLLTARRQLVRTRTKLCNFVRGLLRQSGVSLPARGLASQAAWKRLLAKGFEQMHMALIVAGYYDNFTVVTRSIRELDQQLAEKEQADPRAALLQTMPKVGRIAALTFLAAVDNVQRFPSSRKLIGYTGLAPTVRQSGEHAQYGPITREGRHELRGVWVQIAHLVARDQSSASRPLRRWYDRVAKKRGAKTALVGLARRLLVIAYQILKTETPYDAKKLSKRRTRAV

SEQ ID NO: 229040 - protein, 395 aa, unidentified
MEFLKYGLGIDMAMEKFDACISIIDKLQHVMIRSQCGFNNNKKGFEAFILWVTKNTELAIPAVYLMEATGIYYEQLAWFLHNKNRSVSVVLPNKAKKYKDALGLKSKNDRIDAKGLAQMACEQNNTTWKPLTGNIYLLRLITRQIQSVSEQSTVLKNQLHAMEYGMYRDKAIEKMYAGQLNLLQKNKKSLQLRVEQIVEKDEILKRKFKHIGKIKGLGLQNLAVIVAETNGFTAFENVAQLVSYAGYDVVENQSGKRSGKTKISKKGNNHIRRCLHFPAFNMIKYEVAPFKNLYERVYAKNKIKMKAYTAVQKKLLEFIYILWKKDEAFDPNYQDKKSRDVEPVSSFASVPQEPSIACGNKETKLKFIKQKITPAITRVTQDKHPSKYRRMPSFA

SEQ ID NO: 229041 - protein, 347 aa, unidentified
MRFYNQQHKYYCGIDLHARKMYVCILNQAGKTKVHKNIDTDPGAFFELIFPFLDDVAVAVECVFSWYWLADVCAQHKIPFVLGHALYMKAIHGGKTKNDKIDSYKIAALLRGGNLPVAYAYPAKMRATRDLLRRRMYLMRRRAELLTHIQNTNTQYNLPEIGKNLSKKCHRKHIAERFDDPAVKMTVEADLALIGFYDQLLPKIEQYIDQCAKQHDPNALYRLRTMPGIGYILALAILYEVGDIERFKSVQDFSSYARLIRPQKQSDGKWAGKSNKKIGNAHLKYAIGEAAKLLLRRSKRAVGYREKLEGKHGKAKSYGIFTHKVGRAVYFMLKNKKAFDKNRFFEA

SEQ ID NO: 229042 - protein, 433 aa, unidentified
MGLIVPTTIHPEREDQPLPYEWFVGIDWGSQQHQVCVLDRDRRLVGERTVDHDGASLAQLAAWLWAVSAGHPQRVAVAIEVPRGAIVEGLVERGFHVFAINLKQLDRFRDRHSVAGAKDDRRDAFVLADSVRTDRPSFRRLQLDAPHLLLLRELSRVEETLLEEFRRSANRLREQLHRFYPQMLQLCSAADEPWLWDLITLAPTPAHAMLLSEEQVQRVLKAHRIRRLKAPAVLACLQAPALPVAPGTPEAAQAHCGFLLPCLRVLAEQLQACSQQVSTLLRTMADEPGEEERPSDVAIVQSLPGVGRKITAWLFAEAAQPLAERDYQVLRTHGGVAPVTKQSGKRRQVVMRHGCNPRLRHALYHMARVAMQRDAHFSSVYAALRAKGQRHGQALRNIGDRLLRILMAMLRHRTCYDASRIRCEPVAQMGQKM

SEQ ID NO: 229043 - protein, 557 aa, unidentified
MAVFAQKPSLSFTRAVFAKFANENALFPSFSAFVSDTVSTVIHPVARKGFKGLPQPPVNNCAAPKMNASEKVLRPRHPSSGRIALDGSRSFVSHPTRIQTSSSGRPAAPFATSERIKAHEAPGIRSTHEGATMHNRKGPHMKDWKDITHYAGFDWAKDHHMVVIVDGQGQIVADFEFEHSLEGWKIFSEKTSPWPNLAVAIETNQGAAVDQLLQRGDTVYPINPVASESYRKRKAPSGTKTDHLDGWSLADALRVEGMGWKPLKPMDPLTQKLRLLCQDEVSLIEQRTSLVNKLQQALLEYYPVALQAFDNWTASFTWDFVIEFPTPQELVKAGKRRWEKFLHAHKLWRPETAERRLALFAQADQFKASDCILEAKSQLALSLCKLLRTLDQQLAQYRQQIEKLFKDHPDHDLFGSLPGAKKVLAPRLLAAIGSDPDRYGSQQVLQCYAGTAPVNYQSGQTHKTKIRWACDKFMRHTVHLWANCFRKSSAWGQTYYQKKRKEGMSHACALRCLGQRLLKILFRMITDRKPYDAEFHALNQKKHGSWVLTLVEKPTPQ

SEQ ID NO: 229044 - protein, 418 aa, unidentified
MTQGTTMNGTYKLASIDVHKSMLAVVITDVTAAGEFCFQRRKFGTLDSELRALSAWLEAEQVREAVMESTAQYWKPVWRQLEGQCRLFLAQAQSNRAPKGRKGDFRDAERLARRHIAGELILSFVPNPEQRLWRTLTRAKYQLTRERVRLHSQVESLLEDARIKLATCVSDLLGLSSRRMLHGLAAGQTDPAALAALAEPELRATPEQLVDALRAAGTMSPLHRQILCLFLERVELVEKQMAMLKGSIASALREHQQAVIRLAAVPGFGIDSAEQVVAEVGPQAATFDSAGQMASWVGVCPGREESAAVSTSDRSPKGNRVMRRVLNQVANAAVKTKGSVFQSLYRRLVPRLGHNKAIWAIAHRLCRLAWKILHQQVQYIEYGPQRDQKALQHRLAKLARQLRSFGYLVTPPRTEAAS

SEQ ID NO: 229045 - protein, 478 aa, unidentified
MARARKQVVRRAAEAEPGKQVRPAAQGDLLITHRHAAGIDVHAAEHFVAVAPEDVPAGFVSPDRKLPAGVRKFGTNTADLEAIADWLKACGVTTVAMESTGVYWIPLYDLLASRGFEVLLVDPRQTKHAPGRPKTDVVDCQWIRRLHSYGLLTGSFRPGDEVVRWRGFQRQRETLIRYAAQHVQHMQKMLEEMNVKLTEVVSDIVGVTGLKIIKDIVRGERDPLQLAKNRHESCKRTEAEIAAALYGNWREELLFGLEQALELYEFYQQQLRACEAKIEKCLRSMKDQSDGRSLPPSLRQRKPEKNEVRFGARALLFRMSGVDLTQIEGISETTALVILSELGIDLSAFPHEKNFVSWLGLCPQHRGSGGKIFKRGTRRGANRVARALRMAAQGCHRAQNALGAFYRRIQGRSGGAKAVVATARKIAERVYRMLKFGQEYVRQSQEAYQQAYQLRLMKSLAKRAAHLGYKLVPETIQT

SEQ ID NO: 229046 - protein, 452 aa, unidentified
MAKKSKRRCDTLPVLHPDAAGIDVGTSELYVAVSADRDPQPVRIFPTFTRDLHALADWLVQCGIRSVAMESTSVYWIPVYQILEARGLEVYLVNAQHVKNVPGRKTDVSDCQWLQYLHSVGLLRASFRPPGFICAMRSLWRHRGSLIQMAAEHVLHMQKALDQMNLQIHRVLNDITGVSGLRILDAILAGERNPLTLARLCHGGVKSSEDVIAKSLEGDYRPEHLFALRQSLAAFRYYQQLVLESDREIQLQLADLKTAATAKPTTPARTKINPHYARHYEPRTFDLRGELYRVFGVDLTNVPGISALTAQTILCEIGTDVCRFRNASAFASWLGLCPEKKISGGKVLFTKSRRVRSRVATALRMCAQSLHHAKDYLGEFFRRITRKLGRPQAITATAHKLARIIFHLLTTKEAYNESVFHKTEEETIRRAQYRLRRQAAQLGFQVIPAENG

SEQ ID NO: 229047 - protein, 426 aa, unidentified
MTAGQLHYLGCDRSDAHLDFTLLGADLAVPESVRVPARAANVEAWLGQWRRRFPKHQLCVCFEQPAANLIVMFSRFEFVRLYPVNPATLKSYRETFVVSRAKDDKTDGYWLADLVRTHRDQLPNWEPLSPAVRKLAALVEGRRDLVDQRTNWSNKLVSLLKNYFPEALDLIGEHAASALAVAFLRRWPTLQALQATRWSTVDRFYRDQHCVRSTALARRQEVIKQARPLTDDPAILEPATLRLEAILGQLEPLLIAIARYDQQIAAVFAVHPDRAIIASLPGLGPVLAPRLLAALGDDRTRLPDARALQCFSGIAPVLIRSGLSTVVTRRHACPRFIRQTFHEHAGESIRHSHWARAYYQQQKDRGKKHHTIARALAFKWQRILIRCWHDHTPYDDATYMRSLKDRNPILYQLALTTKLPREENAA

SEQ ID NO: 229048 - protein, 421 aa, unidentified
MEDKALKPPCWEFASSIIDWSAAKHDICVLNENGGVIATTVVPHTADGLLKLEALRQKLGVAPAECLVGIETAHTLVIDFLWARDYSHIYVIPPNVVKSTRGRYRQSGARTDTSDALLVADLLRTDLARLHPWRPDSLLTHQLRNRVGLVSHLTQTAVRLSNRLYAVLMRYYGAGLTIFSGLQTQIALQFLLAYPTPTAADALTFEQFKTFATEQHYPHPHKLAAAFARLKDAHPVSTAQTITVFEAEMQQLAQLLLEVVQAKRSQVRELQDLFMQHSDYAIFASLPGAGDILAPALLTKFGDDRQRFPNAESVQALAGTCPVTEQSGKRRVISFRTACDHDFRAIVQQWAKASLKHSAWAQAYWQQTRPQCRSDSHGYRCLGNRWLAIAWKLWQTHTPYDEAYHLQQRLKRQQPRPAEHQ

SEQ ID NO: 229049 - protein, 418 aa, unidentified
MNAETNKVERVIGFDSHPDTFTAALLQGSTPAAAVVQKIFNKVPLSQLQSWAQKQTDPQDLFVLEASGNSFHVVRVLTKVNRKALVLESGHLGKLKEAHANNDKISAVRIGKAYLAGTARTVWVPDLKTQERRDLFHMHRKAVKRTTQLRNRLQSYLSDNGVRLSKGTRLTQAATSDKIRKAHEWLPGQWQLIEGLLMELRHAEEQRKHWRSLIAQEVLTDPLLLSIVRLCGVREMVAFALGALVGDIKRFSDPKKLVKYIGLNPAFDDSGENQWTGGIRGHGRKDLRCLLIEAAQAILRCSKTPLARWGKKLLGRKGAINLTVAAIARKLAVAVWYLMMGRWTALEEIDKRLSQKVGKIISQVGTAGLKNLGKTRKTFRDQICQSLKSGRAYILDPDKKFTPKIQRPLTVAEEYGLR

SEQ ID NO: 229050 - protein, 362 aa, unidentified
MRESTTVTVGLDVHARSIRLAAVRADELLDERTLPFDEEQLERLLRRWPGVRCCYEAGPTGFGLYRHLVERGIDCSVVAPGLVPQRPGDRVKTDPRDARRLARLLAGGLLEPIYVPSPELEAARDLVRAREDARLDRMRDRQRLSKFCLRHGRLLPTTAWTVTRRSWLGQQRFEHTAQQLTFDTYLHAVDLVDARIEALERAIREAAAQGPWRQQVARLRCLRGVDTHTALALVVEIGDFGRFRSAEEFMAFVGLVPSERSSGEQRRQGSITKVGNAHVRRLLVESAWHARRRPTVGYQLARRQRGQDAAVIERAWRCQQRLYQRWQRMAVRGKPHQKIVVACARELAGFVWAIATDQPLRN

SEQ ID NO: 229051 - protein, 407 aa, unidentified
MRLFVGDDWAEDHHDVEVMDEQGKVLAKRRLPEGVAGMAQLHELVGRHLGEDAEGAEAAIGIETDRGPWVTALIAAGYIVYPVNPLQASRYRERHGVSGAKSDQGDSHMLADMVRTDSHQLRPAAGDSPEAEAIKVVARAHKTLIWDRTRHVQRLRHQLREYFPAALEAFEDLDAPDALELLGKAPDPARAARLTRAQVAAALKRARRRNIADKTDAILAALRGEHLGQPPALTAAHAAAARSLIAVITALNEQVKALQGQVEDHFGQHPDAEIYRSQPGLGAILGARVLGEFGDDPHRYVDAKARKNYAATGPITRASGKKKVVAARWIHNDRLLDALMTWAFASLTASPGARAFYDELRVKGLEHNDALRRLANRLVGILHGCLKSRTLYDEATAWSHRESSLAA

SEQ ID NO: 229052 - protein, 320 aa, unidentified
MESVNTYRSALGIDVCAQRLDWHRLPGSSSGTFANTPAGIRALVAEVQKAGVDIVVIEATGGLQRQAAAALAGAGIAVAVVNPRQVRDFARAAGQLAKTDQIDAKVLALFGLRLQPQPRTLPDAAALALADKLARRGQLVEMRAAEKNRRHRASTAMQKSIDRHLAFLEQAIKVLDKDLDNSLRGSPAWADKVALIEAVTGVGPQTVRRLLIELPELGKLDRHGIAKLVGVAPLNRDSGTRRGKRMIWGGRVNVRNTLYMAALSASRFNAPLKAFFTRLKAAGKPHKVALVAVARKLLTILNAMLRDRSAWNPKLVEKRA

SEQ ID NO: 229053 - protein, 347 aa, unidentified
MDYCAGIDVSLECSSVCIVDGGGKIIREAKVASEPEALIGWFGSLGLELARIGLEAGPLSQWLYAAMKQQGLAVELLETRHVSEAFKTMPVKSDRNDARNIAQLMRLGWFRPVHCKSMSAQETRAILTARKLVQSKLLDVENSLRGILRGFGLKVGKPTRAGFAGRIAELVKGHPNLEVIGEALLNVRAVLLCEFKAFEKRVRTMSRLDAKARLLMSTPAVGPIVSLTFAAAIDDPSRFTSAKRAGPLFGLTPKKYQSGETDYSGRISKLGDASVREVLYEAAHIMLTKPIKGCVQLKSWAMRIARRAGPSKAKVALARKLAVIMLRMLMDNAPFNQAAKPTTAAAK

SEQ ID NO: 229054 - protein, 356 aa, unidentified
MSYDVKYIGMDVHKEAIVITVLNESGKLVMESVIETKASSILQFLHGLRGELHVTWEEGTWAAWLYDLLQPQVQHIVVCNPRRNALLKEGSKSDKVDAQKLADLLRTGMLRSVYHGENGLRTLRELGRSYQTISKDLTRVMNRLKALYRGWGIACAGTQVYAARAREEWLSKLPQAGVRRRAELLYQQLDGLQALRREVRPEFLAESRKHKAAKLLRQIPCIGPIRAARLIALMQTPHRFRSKRQLWTYSGLGIETHDSAQYRFVSGQLQRSKKPQQLRGLNRNHNHEMKEIFKGAATRASCGRGPFREFYTGLLAKGMKPEMARLTLARKIAAITLTLWKKEERFDVEQLKTQAA

SEQ ID NO: 229055 - protein, 342 aa, unidentified
MKITTIGIDLAKNVLQIHGANERGKKVFNKQLRSKQVLAYFAQLPPCLIGLEACGSAHHWARQLQAMGHTVKLMAPQFVKPYVKTNKNDAADAEAICEAVTRPNMRFVPIKNANQQAVLSVHRARQGFVKARTAQGNQIRGLLMEYGITLPQGLGHIVKCVPAILEDGENELPGVFRQLLQRLADHLKELDYQVKELETQIQVWHRENDASRKLAGIPGIGPITASALVASIGDASNFKNGRQLAAWLGLVPRQHSSGGKQILQGISKRGDAYLRTLLIHGARSVIRVAAGKTNQTSSWLLNLVERRHKNVAAVALANKNARIVWALLTHQREYQSEFVSVR

SEQ ID NO: 229056 - protein, 323 aa, unidentified
MIISCPKAARRLRPEQFVPWVEELLRGGHTVHVVYEACGFGFSLYRQLMAVGAHCYVIAPRKLDEECTRVKTDPRDATTLCQRLSRYLEGNTRELAVIRVPTEAEEQARHVSRQREQLVHLRQKLEVQGRSLLVNHSLPAPAHWWKNQTWSRLCKLLPAWICIRLEVHRPALLTLQQQIDALTAELEAAAPADVPAGLGKLSTVVMTREICSWERFRNRRAISSYTGLCPGERTSGSKRIPGSVTKHGNPRLRAALVECVWRMVRFQPNYPPVKKRLAILAKGARATGGQRKKAIVAVARHLAVDLWRLHTGRCTAAQLGLTN

SEQ ID NO: 229057 - protein, 342 aa, unidentified
MSNVLEFTLGLDLAQASFDAAIAPAGSDVKLWRALAHTHIEQAPDSAAGIGALRDWLDAAAPAGRCVRIIVESTGSLSRRVAHALAQAGVGQASIVNPRRSKAFGDSLGVRDKSDRIDCAILALYGQVHAPQPTKLRSVAGEELRELTRLRENLVAERTAWINRMGEASSELARSTIKQTIGNLDRQVKQIDEQIDERIEKEEPLRLQVTALRRIPGIGPVTARTLTAELGDLRIYTRGQIVALAGMFPKEFTSGKTVQRRPRLAKGGGARLRRVLYMCATSLFHSKGVMREWIERQLNEGRKPMIVTTMAMRKLLLVARAVMVAGGHFNPSLLMPKEAESC

SEQ ID NO: 229058 - protein, 338 aa, unidentified
MNEFIKKKHYVGVDISNATLDLALMKENGFGEFKTDNSLKGFSLVPKWIREQGLELDDCAFCMEHTGTYGLLFCAWLAQQGILFCVESGLHIKRSLGMTRGKNDKVDAKRIADYAFTHRAKLKPYEMPSPLLVKIKQLLTYREQMVRIRTSLKNSLKSHKRYLPISGMDNIIVQIEAQIEQQDVIIVGIKKQITDIIKSDVELNKNHTLISSVKGIGVIIGAFMLVSTNNFTSFDNGRKYACYAGIAPFEFSSGTSIRGKTRTSKFGNKTIKTLLNNGANSAIRYDEQMRKYYQRKREQGKDHKVIVNAICCKLVNRMFAVVKRQTPYVEVYGQNFVQ

SEQ ID NO: 229059 - protein, 398 aa, unidentified
MFIMALDVSKGKSYIVIYKDERCIEEREIVHTPEQFDKLVPFLKNHQVEIVFEATGVYSKCWEHFFIKNNFPYSCLNPLEAKLQTATMRQRKSDKNDAHQLAQTHLTNKRSKTFRSSNNYNELRMYSKLYDEVHSNLLVQRNYLHSELQLVFPGLESIYSSNLTYFVLNIMEKYTHLETVQKTSPTKIKNDILKQTGKKLSEKQAKEKALWLKSISKEAYSVVEEDSFMVKEVKYRLKTIRSLKQQKDRTSKELIRFAETFTEFKYIESIPGIGPLTAALLIAELGDIRRFDTHKQMNAYVGIDLRTYQSGTIQHKDRIQKRGNSRARMILFFSIQNILKKQKNIRKHFIDYYYKLKKPPYVKKHKVAMIACMNKLLRTIHYLISNNGDCDYTKSPRG

SEQ ID NO: 229060 - protein, 333 aa, unidentified
MVEGTKGSHHKEGSTKMSRHTMICAGIDTGKCKLDVALDQSPDRLQVDNDGEGHAELVTWLRKRRVERIGIEASGGYEQAVVSALRRNGFVVVVFQPAQVRAYAKYQLQRAKNDKIDAALIATCTAEAKKIHPPPDPRLAPFAGLLTIIEQLTDDVARYKTRREMSRDEEARRFWSEEIARLKRLVRERLKQLVTAIRQHRDLAHRLDLIASVDGVGLRTAVAILVRMPEIGRITRGQAAALVGVAPYDADSGGHVGARHVEGGRERLRESLYTAALPAAFHWNPELIAIYRRLRAAGKPHKLALIACARKLIIFVNIVVARGTPWVPREALT

SEQ ID NO: 229061 - protein, 333 aa, unidentified
MNTESLSSSLLGVDMSKASFVAHLAGPTKARSALFTNECTGWAQLDGWLAQHHCQQVLAGLEPTGPYAAGLLWHLHCRGHTVCLLNARHLKNYGRSLGRKVKTDHTDAALIADYLRAHAAHLRPWQPPTQEILMLQGLVRRRQQVLGLLQAERNRTEGVTQPLIKASLQRQIGHLKTEVARLDRALEQHVLGHPKLQHSVRLLCSIPGIGPVVAAAILAEVPAISAFARARDLAAFAGLTPSVTESGTSVHRRGRLTKEGSALLRKMLYMAALQAVKRPTNALHCCYQHFIERGKSKMCAIGALMHKLIRIAFGVLKHDQPFVENFAKLQPLT

SEQ ID NO: 229062 - protein, 346 aa, unidentified
MEHYAGIDVSLELSSVCVVDAQGKIVRETKVASEPEALVAFFASLGFAVKRSGLEAGPLSAWLHAGLKRAGFDTVLLETRHVKAALSAMMVKTDRKDARGLAQLIRMGWFRPVHAKSMGSQEVRALLVARKQLLGRLIDVELSIRGILRGFGLKVGVVTRKGFEGRIRELVTGHITLERIAGAMLSARATLKVEYEKLHKIVLTIVREDAVCRRLMTVPSVGPLVAITYKSAMDDPNRIAKSKSAGALFGLTPKKYQSGEKDVTGGITRAGDEMVRTALYEAANVLLARITRFSKLKRWGMDVAKRRGSKRAKVALARKIAVILHRMWVDGTTYRWTDAQPTAVQV

SEQ ID NO: 229063 - protein, 314 aa, unidentified
MTLHPCCIGIDISKAMLDIFESDTGRHARIANSDDAIAAACRPWSERGATVVFEATGCYDTRLRTALDRAGIPHVRVNPERARHFARYAGFSAKTDRIDARMLAEMGRRGGLVPEPPIDPSREALRALHRRRDQLVADRKAERQRSADAIDDTERGSIDRHIAFLDTEVETLERAITRQLADDPNLRRLEIRLRSIPNIGPVAATTLIALMPELGTRSPKAIACLAGLAPINRDSGTHLGARSIAGGRKRVRDALYMAAVSASRSDKAFGAFYKKLRQAGKPPKLALIAVARKILTTANAIIRDDTPYRNTSTA

SEQ ID NO: 229064 - protein, 400 aa, unidentified
MNRTRTVAGLDVHKDSIYLCIMGYDQAIIWENTYGVLTPDLRQMHHDMRAHGVTEAAMESTAVYWVPVWTELCESMELRLVNPYFIKQLPGRKSDVQDARWIAECLLKNLIKGSFVPEPIVQDMRKLNRRIMDLCEDTTYNSNKLDAALQRCGFRLSNYVATTKSKSYRSVLKAIIDGQTDPDELLRLVHGRILNKHGRERVKAALTGSFSETDLIVLRQLKETLDLIEEQTADCQQELVRLCKEHYPKPYERLQTIPGVKERAATAIIAETGVDMKMFATAASLVGWCGLKPRNDVSNGRFKSRKVTHGNRYLRQILIEIAWAASRTRNCFFSHFSYLQTTVKKKNKMKIQVAIARKILVAVWHMLSKEEDFIDIYLKRQEELKRTEGQIKLLESYMAD

SEQ ID NO: 229065 - protein, 317 aa, unidentified
MTPADKPQFSHFAGIDVSKHTWDLHCLPADTHSAHPATTDGGQQLLQKLPTPGTCCIVIEATGGYERDLVAMLIAAQHHVAVINPKRARDFAKALGLLAKTDRIDARALALFAQSTEHRLTEKVSEKQSQLQELVTRRRQLVELRTMESNRQQMARGRQTLLSIKRVLELLDKQIDLLDKEIVKLIDSDDDWRQQLEHLASTPGVGAVTAATLLAELPELGRLNRAEIAALVGVAPCNHDSGQYQGQRHIRGGRADVRAVLYMATVTALRCNHSIREFAARLRHKAAKVRIVACMRKLLTMLNALLKKKQKWNAQLA

SEQ ID NO: 229066 - protein, 414 aa, unidentified
MELLHERCAALDIGKKDLKACVRAPSPTGKRSRRQDIRSFATTTHALLALREWLVAERVSLVVLEATGDYWRGAFYLLEDDLNVILVNAAHAKGLPGRKTDVCDASWLCQLGECGLLRASFVPPEPIRQLRDLTRYRTTLATERTREAQRLEKELEDAGIKLSSVATDILGVSGRAMLAALIDGERDAQVLAEMAKARMRPKIPRLVQALTGNFGEHHAFLCRLHLERIDQLTAAIGELSARIEEQMLPFARQLEYLATIPGVGQSVAEVIVAETGADMSRFRTAAHLASWAGVCPGHHESAGKRRSGKTRHGNRWLTGALGTAALAAARTKDTTYLGARYRRLIRRVGKKKALVAVEHSILIAVWHMLTNDVEYTDLGGDYFARLDPERAMRRIVRQANALGFTVRFDPIQAA

SEQ ID NO: 229067 - protein, 359 aa, unidentified
MDKTDYAGIEISAKELLVALRRDGKLKPWKSFPNTPQGHRAIVRYLARPERLLQVCLESTGVYGLDLALALHAAPGIEVRVANPRAVRHFAQALLERSKNDRLDALVLVEFAARLPFQPWPAPSAAALALHALARRLQALTELCTAEKNRLHATQAAQALPQIICQDLKQSIRFHQRALARLTREALKLIAQEAELQLRFNLLLTLPGVAQTSALQILAELAVQSADLDVRQWVAQASLDPREHTSGKSVHKKTRISKAGNAHLRRALYMPALLAVRHDPHFRAYYEHLLARGKLKMQALVAVSPRRPSCSTPSTGCSGTCCPSRAPRFISSPKPSSPTPLFPERRSHETENRRRRTLL

SEQ ID NO: 229068 - protein, 346 aa, unidentified
MNEYIAFDSHKHYTLMEREAVESRQVAQKRIEHSAGAIREALAGCQAGTTVAVEAMGSWYWIVQEIEQAGLVPALVHPRKAKLMMGMINKTDKLDVHGLNRLQRNGTLPTVWIAPAGMRDLREVTRTRMVLTQHRTRLKNRLLATLSKYGLDIEDCSDNFGAEARRQWPELQAKLPEQTRWCSELLWDQLELVDRQIGQQEKRLEELMEITPQIGLIKTLPGIGLILAGVIAMEIGDLERFARAERLASYAGTTPRVHSSGDKTRYGRLRPDVNRYLKWAFIEAGNCVALHASRKPERHVSQLYQRLRHKRGHSKAVGAVARHLAEATYWVLKLNEPYRDPSLGRA

SEQ ID NO: 229069 - protein, 350 aa, unidentified
MEEVSVIGIDLAKNVFVLCAQTASGEIAWRKRLKRRAFEQFMAATAPRCLVAFEACGGAHYWGRFLTALGFAVKMMAPRAVKAYRQGPHKNDWRDAEAAAEAGSRHPVRAVRVKSEAAQAVLVLVRLRALQIRQLVQTGNHLRGILNEFGIVLPKGHKRLREAIARLRQEDPASAALPASVRRTADRLCLQLAEQARRVTEATSELEAAIKDEEDCRQLRTVPGIGPINAAALSVALEAPQAFPNARAFAASLRLVPRQHQSADKQIMLGIGPLSANETRRHLVLAGQSLITMVRRFQQPPADKFLLWVYRLDRRKHRNVAAVAVAAKLARIAWALMAKDQIYQPRRATA

SEQ ID NO: 229070 - protein, 385 aa, unidentified
MMKLNDFSRSLTAFDQERTLVAVIEMSQSSWMVGAIIPGIERQPLKKLAPDEQALFKLLHRWRDEALKAGQEITRLVVAYEAGRDGFWLARWLRARGIEAEIIHATSIAVSREHRRAKTDRLDTGLLKRAFLGWLRGEPGHCSMILVPTLEEEDNKRPSRERAALVAERTRIVNRTKSTLARLGIRGINPKLQKTAERLAELRTPEGTSLPPHTLAELQRDLGRLALIRDQIRQIELSREQRVAAAPNRGVHAMVRLLARVVGISTETADMLVQEILGRPWRDRRALARYAGLTGAPDESGSRRREKGLARVGNTRVRHGMIQLAWRFLRLQKESALVKWYQSRTEGSPKLRKPMVVALARKLLLALWRLVMTGDVPDGVILRPA

SEQ ID NO: 229071 - protein, 361 aa, unidentified
MSNSIARDDPPVKVIVGVDTHKYEHVAVATNELGARLATFRAPANGAGYADLVAWACTLGDLEAFGIEGTGSYGVGLASFVRRQGWRVIEVNRCDRRKRRNNGKSDTLDAEAAARSVLAGVATGTPKTADGAAEMVRQIKIARDTAVKARTAAMTTLKTLLVNAPSRVREALEPLTDRKLIDRCAALRPGDIIDPTAAVKHALRALAARWRTLSAEIDQHDELLDTLTRAAVPTLREAIGIGPESAAEMMIVAGDNPGRIRSEAAFAKLCGACPIPASSGVTNRHRLSRGGHRQANAALYRIVIVRMRWHQPTIDYVRRRTAEGLSKRDIIRCLKRFVAREVHHALVDDYNRAGAASAEAA

SEQ ID NO: 229072 - protein, 325 aa, unidentified
MRKVGQTGVRRRDVPCFVGIDGAKAQLDIALRPSGERWAVPNDASGVMTLVDRVQALHPTLMVLEATGGLERAVTSALATAGRPVVVVHPRQVRDCARATGQLAQTDALDARALAHCADVIRPTPRPLPDTQTQERRALLGRRPPRIGMRTAEQHRLAGTNARLTQDIAAHMTWRNAAIATLDDDLETTLRASPLGREHDDRLQSAKGMGPVWARTLLLELPELGTLTRQQIAALVGVAPLHGDRGTLRGQRMIWGGRAHVRTVFYMGTLVATRFNPQIKVFYARLLAAGKGKKVALTACMHTLLTILNAMLKHRTPWQPQEVQS

SEQ ID NO: 229073 - protein, 419 aa, unidentified
MSFKIFKFNCCGLDVHKTWIYACIGITDSNNRTEYKQARFSSFTKGLNELCDWLAKYNCKDVCMESTGKYWIPVFNILEQHSFWLTISHHKYTKPMKGNKTDRKDAKWICDLYMCGMVKPSFIPPADIRELRDLVRYRFKLTCMITGEKNRAQNCLTVSNLKLDDVFSDVFGKSSRSITEHILQHPGEKFDIAPFVDSRCKTPITEIQAAVDGAISKEQVVKLRQCLDHIDELNKHISEVEQEILRLSDKYEAALNLIRTVPGFNKNPLTAIQVLSEIGGDMSVFPTAKHLVSWAGCCPRNDQSNQKIKSTRISRAGSYFKPVLVQVANALIKSKKHSEFTSRYKRIKARRGHKKAIIAICRMILTAIWHILTDLKPYTPEGFLESRPVNKEKVLSTSQALNLLKQRGYIIKGEPLAVS

SEQ ID NO: 229074 - protein, 371 aa, unidentified
MNRVFVGMDVHKEKIVVLGLPEEGNHSVMREAFGGNDLPRLVKRLQRLGKTSRVEACYEAGPSGYVPARVLHKAGIPCRVAAPSLIPRRPGNRVKTDARDALELALALRAGTLSFVRIPTQEQEQVRGLVRCREDIAKEVRRIKQVIAHWLFLHGHRVPKGVKSWTPGHRRWMRGLELSSLDRTVLDHYLDVAHTLGERLKLIEDQVVALADTEGFRNRVARLQAFKGFSKLSAMRVIAEVMEFARFPKATSFMKFTGLVPSEHSSSDRIRRGRITKAGNSHLRHVLVEAVQRAQTAARPGRSLSKRLGAVCGPYRQVALSALTRLHHTFWRLTRRGVSAGKVKVALARELAGFVWAMMTIPETPDTAGAA

SEQ ID NO: 229075 - protein, 475 aa, unidentified
MEELTEEPVELVARVCAVDIGKAGLVVCVRVPHETRPGRRVQEVREYAAVTPALLALADWLRCQQVELVAMEATSDYWKPVFYLLEAEGFTCWLLNAKHVKNVPGRPKTDKLDAVWLAKVVERGMCRPSLVHPKPIRRLRDVTRYRRSLVREQTREKLRLEKILEDAQIKLDSVISDLHGVCGRQMLQALVEGQRDPTVLAQMARGSMRRKIPQLPEALTGHFDDHHAYLCATMLRRIDALAADIAQLDTRIEELIAPFAQAVDRLDEVTGTGLRSAQELIADGANMAAFPTAAHLVSWAKFAPIDANSAGKKKGGATGKGNPWLASTLGEIVAGLSRTDTLRRCWPARCARRRGPRQPCTRTPADLDQLDADLVDEPGPDALLDQAGSAEYQYVTVAGGCPGEFDRSGHAVGDKRERTVFLWRSARSRWVGSWPTCSPPTSTGRSSPPSPPRSSPESSPGWPATGSAPATARRS

SEQ ID NO: 229076 - protein, 375 aa, unidentified
MPTNNASRPIVYLAIELSVSSWVVACRQPANEKIKLHRLEAGDTGSLLGLISNWRRKVVAEFGIDATVASCFEAGRDGFWLHRLLLAHGVINHVVEPTSILVTRGARRAKTDRLDAQGLLRVLAATFRGDHDACRVVNVPSVTEEDAKRPNREREYLVQERVRIENRIAALLATQGISKRPSLRSWDADLNAIQTGDGRSIPPLLKAELNRLRRRLVITLDMIREVEAERQQALETQNDAASQTIGALCKLRGIGDNFAAVLTREVFYRSFENRRQIASYLGLAPTPFQSGGMDRDRRINRAGNSRARKTLIQLAWLWLRYQPESSLAQWFRQRVGALQGRTRRIAIVAMARKLLIAIWRFTTFGIVPEGAIVAA

SEQ ID NO: 229077 - protein, 392 aa, unidentified
MIYVGIDVASQKHDCFLLKDTGEVFSKTSFTIKNDFEGYKKLHNSILQFVESTKDSNVRIGLESTGHYSKNILLYLIKQGYQTTLINPILTNMDRKASTVRKAKTDKIDAEAICKFLDKNRFDFKPYTLLSYHIDALKSLTRQRFSLVKQMTQQKLIFQRLVNVIFPELLSHFSNDYGESVLNILYSYPTPKKLAKAHKESITKLLHSRCKITSSEILELAKNSIGQSEEYLGFELKHTIDMILFYQSQIEIYNKQIEIELNETEYGKIITSIPGVGIITGAMIIFEIGDINNFTTSDQLLAYAGLDPSVYESGKFESSHNKPSKRGSKYLRWAIHQASSVIWQHDNTFKDYYLKKIKESKHHYVAIGHIDKKLIRVIFSLLKNKSMFIPQK

SEQ ID NO: 229078 - protein, 378 aa, unidentified
MPDVSSNAPVDVRLWVALDQHKLSIVAAVLPSAGGEPGLERIETTDKAIRRFIDRLGGPEGLAVCYEAGAGGFDLYRLLCSVGVACDVVAPSLIPVRAGDRVKTDRRDAKKLVRLYRAGALSFVHPPTPETEGLRDLLRCREDLRRARIAARNRVLKQLLRHGRIFREGKHAWTQKHREWVNRQRLDDPLAQAALEQMLIHVDGLDRQLALLDVRLEEIARSARWGDQVRVLVRFRGIATLTALGLIAEVGDFARFSSARELMAWLGMTPSEYSSGQQRHRGHITRAGNTHARRLLVEAAWHYRHPPRRSTRRPAPDERAWQAQVRLFARWRHLTAHGKTSTVANMAIARELSGFIWAAMTQPSRVSLPTAEPEEVVA

SEQ ID NO: 229079 - protein, 290 aa, unidentified
MKQNVSTVGIDLAKKLFHLVGTDTTGKIVWRKRLTRHALVPCMAQLPPVTIGMEACGGAHYWARQFQQHGHTVKLMAPQFVKPYVKSNKNDMRDAEAIAEAMTRPTMRFVPIKDVAQQDIQALHRVRERLIGARTALINDVHGLMLEYGIVLPTGVAKFRQAVVEKLEADKDKLTALSQELFWKLVQEFVALEDQIAFYQEKLETLATTHPECQRLMTIPGIGPITATALVAAVGDVGVLKNGRQFAAWLGLVPKQHSTGGQSLLLGISKLSSSELNDISSELFVVFRLW

SEQ ID NO: 229080 - protein, 428 aa, unidentified
MKYNTQNAKIKSITEKTLIVGIDVGSETHFARAFDWRNYEYSKKPLEFSNTEAGFMTLKAWMADFAEKYGKNVVIPGMEPTGHYWFNLGAYLQDNGMKPVHVNPHHVKKSKELDDNNPNKNDRKDPKTIAALVNEGRFSYPYIPTGIYAEIRSLSNLRLQTQEEITRIKNRIARWFSIYFPEIKDVYRNPDSVSGLMILKEAPLPQDIVKLGVDGINKIWRDAKLRAAGLKRAKTLVTVAEHSIGSQEAPDSARIELKNLLNDYEIYKNREEDLMSLTEEKLSEIPHIDKLLEIKGVGLKTVSGFVAEVGDITRFDDPKQLQKLAGYAIVECSSGKHKGESHISYRGRKRLRYVLYEAAISLIARNEEFKEVHRYYRTRKENPLKKMQSVIAVACKVLRIFYTILTKGVTYDGAKMMQDIKRPQMLAA

SEQ ID NO: 229081 - protein, 315 aa, unidentified
MRLSMKSIVGIDVAKEELVIYMGGSYYSIENTSKALDKWAKKHSDLIEKVDLFAYEPTGGYEKIAAAFFEEKGLPHARLHANHVRSYAKAMGQLAKTDAIDAKMIAEFAIAKNQGRTTTQTHPELIELTSRREQLIIMKNQETNRLETISSDVVRKQIKKHVKHLETKIKETGDKIKSYINKHDDLKAKTKHLRTIPGVGEITANSIVAYLPEVYEADSKSVSMLCGLAPVSKDSGKKQGKRKIFGGRSQVRRVLYMAALTAKKHNPVIKEFFDRLKARGKIFKVAITAAMRKLLTIIHSVANREEPWANEITLR

SEQ ID NO: 229082 - protein, 312 aa, unidentified
MKNKVKYLGVDCAKANFESNLEDSSMTQSWENTTEGVSSFISNIKQHCGQVVVIVESTGGYERLLLRSLYKEGIAVARVDPLRARRFAQSEGLRAKTDPIDARMLARFGREKNPALWQPPARSIELLRQFVSRRRQISDMLKQEKTRLEHAEGFSRKDILSMISILEKREHKIEQHIEAHIRSDEQLYELYQKLMLPKGIGPVTAYTVMAFMPELDSINQKRASSLAGLAPYTQTSGKYIGKARTAGGRKEIRRPLHMAAKSAIRYNPAIKKFYNSLKSRGKEEKVAVVAVMHKLMIVMHRIANDPEFIITT

SEQ ID NO: 229083 - protein, 377 aa, unidentified
MLSARPARVPSPPRHREETAIISIPHPTAPQLTIGVDTHLDVHVAHAADQLGRRVATVQVPTTPTGYQHLLAWARGLGQPVAWGVEGTGSYGAALARFLAANHQVVVEVNRPDRTARRRHGKTDPVDAQAAAKAVQAGDATVVPKAGTGQVEMIRSLRVARQTAMRARTQTINALKALLVTAPATLREQLRGLSVTRLVRAAADLEPGPITSPLAAAMLALRTLAGRHQALSAEIDSLTSELDRLTATAAPSLVALFGVGQDSAAALLVAAGDNPGRLRSDAAFAALCGACPVQASSGKTVRHRLNRGGDRRANNALWRIALVRMHCHPPTRAYVERRTKQGLSKLDILRCLKRYIAREVYHHLTDPPAPTPAACPK

SEQ ID NO: 229084 - protein, 423 aa, unidentified
MFKIIRFNCCGLDVHKTWIFACIGITDANFRTEYFEARFSSFPKDLRRLAAWLQKYKCEEVCMESSGKYWIPVFNALETTCKVTLAHPKYTKPQKGNKTDRKDARWICDLFMCGMIKPSFIPPPDIRHLRDLIRYRTKLTNMLTSEKNRAQNCLTVSSLKLDDVFSDVFGKSARSITEYILAHPGEKFNVAPFVDKRCKTPIDQIQDAVDGAICPEQAVKLRECLNHIDELNAHQNRIEQEIFTLVEPYSVHLNLIRTVPGMNKDPMTAILILSEIGSDMSVFPTAKNLVSWAGCCPRNDKSAKHVKSTRISQAGSYLKPRLVQVANALLNSKDHPEIRERYRRIKSHRGHKKAIIAVCKMLLTAIWNILSTGEAYNASGYLIQTPRPTDETKVLTQKQALELLRLRGYVIKDDPVEPEPLPA

SEQ ID NO: 229085 - protein, 425 aa, unidentified
MPYRIAGIDVHKKMLAVVVADVEVDGDFHFTRQKVGTTPTDLRALADWLVEQEVEEVVMESTAQYWRPVWEALEQHWRPRRRAREGASRLSGTLHLAQAQSNRGPGGRKKDFPDAERLVKRLVAQELTLSFVPDAEQRLWRTVMRRKYQVTRNRVQLQNRLEALLEEAHIKVSSLVSDLLGISARRMLQALADGETDPAALAALAAPPWRATAEQLCDAFTAAPTLHPVYRRLLKLTLEDLRLIEDHLGQLDQQMAHLLAAHHEAVQRLAEVPGLGVDSAQQIIAEVGATAVTFPSPKHLASWMGACPGNEESAGVNYSHRCPKGNRQMRRVLNQAANAAVKARGSIFAVAYRRLVPRLGHAQTIGAITHRLCRLIWKILHERVRYEERGPAVSAEAKKVRARKMIRELRSLGYRVDLISPAPSV

SEQ ID NO: 229086 - protein, 409 aa, unidentified
MDITPIYKRVIGLDVHQAQISACAIIELPDGSVTHERREFGGFKRDRKALAEWARSMGPDVVVMESTGIYWKSPYAALEAVGIVAWVVNARHVKAVPGRKTDVADAQWLASLARAGLLRASFIAKADLRSLRHIARQRQKLGGMLASEKNRLHKLLTDAGVRLGVVVSDLHGQSARAMVKAIIANKSVPAILELASKRLRASREEIFEALQAEEVTPAHRFCLAEIMAHIEELEGRMARFDAQLLRCLEAAGYTTPLRLLQTLPGIDVMGAAMLLVEIGSDMSVFGSAQRLASWVGMCPGNNESAGKRNSGRIRKGNAWVRRLLCEFAQAAGRSRCALKDKFQALNVRKGHKRSIVALGHKMLRTIYAMLSKNTHYVDKAVDYEALMVARNAPRWLQMLVKHGFVPAPT

SEQ ID NO: 229087 - protein, 450 aa, unidentified
MGDMLQQFKHLNPNAAGIDIGSESHFVAIPEGRDAATVREFSCFTSDLNSLADWLVQCGITTVAMESTGVYWIPIFEILESRGLEVKLVNARHVKNVPGRKTDVKDCQWLQQLHCYGLLAGAFRPADQICVLRTFLRQRGTLVQYASAHVQHMQKALVQMNLLLHNVVSDITGVTGMKIILALLAGERNPHKLAALRDCRCNNSEAIIAKSLVGNYRKEHLFSLRQAVELFQFYQRKITECDREIEHLLSQFDAKAAMSAPVKKKSKPRKGEPCFDVAGQLFRMTGVDLLRIDGISSLTALQVISEIGVDMNRWPSEKHFASWLGLCPGNKISGGKRLSGKSRLCANKAAVALRMAAQSLYHAKSALGAYYRRQRARLGAPKAITATAHKLAKLIYNVLKHGNEYVDAGQDYYEKRYQAKVIQNLRKRARDLGFELKENTIKTNILQVVT

SEQ ID NO: 229088 - protein, 316 aa, unidentified
MESPQPFVGIDVSAKRLDVAVLPAGTHFTVANTDEGIASLVRRLQELGPQIVVLEATGGYEIPVAYAMSEASLPVVIMNPKVLRHFAKSTGKLAKTDKLDARVLAHYAQAIQPPVRPLKDPEQMELATLMSRRRQLRDMIVMEGNRRRTSTPKVRGNIDQHLLYLRQLLEDLDREIHNAIRRTPLWHEKSEILQSFNGVGPKVSASLIADLAELGTAPRTQISALAGLAPMNRDSGQWRGKRTIQGGRPAVRQALYMAALVASRRNPVIREFYQRLRQAGKPSKVALTACMRKILVILNAMLKNRTYWNPQLPLAA

SEQ ID NO: 229089 - protein, 371 aa, unidentified
MSAILKAPDSVVIAIDPHKASWTAAVVDASSQPVATIRVPVSRDGYRALRRFASRWPDRTWAIEGASGLGAPLTARLRADGVDVVDVPAKLAARVRMLSTGHGRKTDDADALSVGIAARSARRLNSAAIEGTITALRAIVEHRDDLVKTRTQTVNRLHVVLTHLIPAGAQRDLTASKAAELLRGIRPRDTAGKTLRGLATDLVTEIRHLDRRIAKATADIETAVTASGTTLTELCGIGALTAGTILGRVRTIDRFRSAAAFATYTGTAPIDVSSGDVVRHRLSRAGDRQLNRCLHVMALTQIRQDTPGRSYYLRKRTDGKGHKEAMRCLKRRLSDVVYRQLRSDANRLEAGPGGHSGAALESSAASSNPAG

SEQ ID NO: 229090 - protein, 359 aa, unidentified
MKNTIIGVDLAKEVIQVCIYTNKKVHSNKEMTHKEFLAWLFMEKPTRIIFEACGTSNYWKQKATEAGHKPELISAKLVATVRQNQKTDKNDALAIVQASQLPDIQFINGKNVEQQQLQSMLRLRELAIKQKTASSNQIKALLLEFNIRVSPRNGGLNGVVQSVLEDAENGLSAEFRQALDAAWQHYSGLLVSIRIYDNCLESAISEHVDCKRLLKLEGVGTINAINLYITLACAELGAFTKGKDASACIGLTPLQYSSGGKTTLGSIGRYVKNSILRSQLITGAMAAVSHAVKRTAITKKDAWIQALVARRGKKCAAVALANKTVRTAYAMLTKGTEYKAELLPVVKKDILSTLELKHA

SEQ ID NO: 229091 - protein, 419 aa, unidentified
MQQRTFGKLGDISALTLGGGGIGQVWGPTTREEAMATVREAWEAGRNEMDPPLCGSTAMSHNEFKKISEPIEPQEASPMKPAMNVLGIDIAKHVFHAVGMDNTGEIVFRKRLSRHDLIPFMAKLPPVLIGMEACGGAHYWARRFREHGHNVKLMAPQFVKPYVKSNKNDSRDAEAIAEAVTRPTMRFVPIKDVDQQDIQALHRVRERLIGERTALVNEVHGLLHEYGIVIPKGVAKFRQAVIGKLESEKDKLTSLSQEMFWKLIEEFAGLEKQLAYYQEKLEALATTHPECQRLMTIPGVGPLTATALVAAVSDASAFKNGRQFAAWQGLVPRQHSTGGKDRLLGISKRGDSYLRKLLVHGARTTIRWVGRKTDRRSPWIRQLVERRGKNRTAVAVANKNARIVWALLTSHQDYQLATG

SEQ ID NO: 229092 - protein, 331 aa, unidentified
MKNSQIIGIDVSKSVLDVFIHSLNFHFIVENNPIGFAGLLEICCTRLSCKPDNLFLCFENTGRYSRSLAVFLSQANITFAMVPALDIKKSKGLTRGKSDKIDAKAIALYAWRKRDELVPTKLHSEQVAQLRQLISLRDKLIKHRTAYKNSLKDLKDCFFDGETIFIKESQLRLIDSLNHELGLLEKQIEDIIFSLADWKFNYNLIQTIKGIGPVLAKYLIIYTENFTRFTNPKSFACFAGIAPFEYNSGSSVKGKTRVHPCANKHLKSLLNIAAMCVVQLNGEYKKYYIRRTIEGKNKMSTLNIIRNKLVSRVFAIVKRQTPYVDLTNFAA

SEQ ID NO: 229093 - protein, 370 aa, unidentified
MGKSVVYVGLDVHKDSIVIAVARQGRKPAEKWKTIPYDGVRLQKALKMLVQDGQALKVCYEAGPTGFGLCRRLRKASIDCIVVAPSLVPGKPGDRVKTDRRDAKRLAHFLRSGDLTEVHVPDEAVEAIRDLERARGDAKCAERAARHQLSKFLLRHDRHWDGTAWTRRHLDWIRVQKFAYPAQQRVLADYLKAVEDLAERIASLTSALEELVQETVLAPLVKALQAFRGISVISAITLAAEVGGDLRRFATAGQFMSYVGLTPSEDSTGKRRRQGAITRCGNTHLRRTLVESAWHYRHAPAMSKELRRRNRGVAEGVRRIAWETQKRLHKRLYHLIHTGKSSQKAVVALARELAGFVWSVGREERLLAAP

SEQ ID NO: 229094 - protein, 359 aa, unidentified
MNDIAQRPQRHRVVVGVDTHKHIHVAVALDELGSRIEARSFAADRSGYEQLIDWAVCLGREVIFGVEGTGSYGAGLASAIRRRGIGVLEVLRTDRRDRRLRGKSDSIDAENAARAVLNGQAAAVPKNADGTVEMIRLIKVAKDVAVKARTSAMISLKQVLVNAPGELREQLEPLTKMALIRRCAALRPGPITDTITAAKHTLRAIARRWLALDTEIKAHEQILDQLTTQLVPDLVAAFGIGADIAAEMLIVAGDNPERVRSEPAFAKLCGVAPIPASSGMTTRHRLNRGGHRAANAALYRTVIVRLQHHQPTQAYYARRTAEGRTKAEIIRCLKRLLAREIWAHLRPLRQARRTLQRAA

SEQ ID NO: 229095 - protein, 401 aa, unidentified
MKTVLSVDVAKNKSMIMLMNSDGEILIDTKEIKHNLEDFEKAKEEIKEINPENLTVFMESTGTYHLPVERYFKENGFNTLVINSLTTKNNYDTIRKTKTDKKDCYRLAKLFFVNEVEYHELSKKDLYANLKAMTRQYFYLLQQNVSCKNRYKRLLNICFPELEKIFKSTRIYDDTALNFIKEFPHAEIVKEKQIDALYNNLYKTNGRNLNFYKRLSETIKIASANSYPGVDKEHKDVKNLSDMAKIVQNNNNVINELRDKMIETAKKSPYYEIINSFYEIGEILTAEILGKLGDITRFDSPKQLIAFCRLDPTIKQSRKSINVKGAISKRGNKYARYILFNCSQMVVKLGASNYPEHPVYIYYQNKKAEGKHYYESLTACSTKILRMLYSMCKNNKQFLEN

SEQ ID NO: 229096 - protein, 406 aa, unidentified
MFVVGACVARPRYATSEGCVGMAGAEPHARGRAMQKNIKVFIGLDASKMKISVALAEDGRQGEVRFFGDIENTADAIKRLASKLSGRYQQLLFCYEAGPTGYGLHRLITSLGHVCSVIAPSLIPKRPGEHVKTNRRDALSLARLHRAGELTTIWVPDPGHEAIRDLVRARESAMEDLREKRQQLQSFLLRYGRVYPGLRSWTLVHARWLSNLRFEHPVQYLVLREYRQAIEDAEARLGRLTQQVTNVVSTWSMAPVVEAYQAMRGVAFLTAVTFVAEIGDVRRFETPRQLMAYLGLVPSERSTGEQIRRGRITKAGNPRARRVLIEGAWTYRYPARLSRSLQIRQERLPNSVRAIAWKAQVRLCARYRRLMAAGKRQCLITTAIAREMAAFLWAIGHEVQPSSAVA

SEQ ID NO: 229097 - protein, 409 aa, unidentified
MNVLHERCAGLDVHKETVVACRRVMADAQVVREVRSFPTTTRGLLALADWLGEAGCTHVAMEATGVYWKPVWHVLEGEFELVLANAMHIKNVPGRKSDVNDATWIADLLAHGLIRASFVPPGPIQELRDLTRTRKQLVREVVQHKQRIHKVLEDANVKLASVVSDVLGASGRRMLRAMIAGEQRPDKLAALAGERLAASRETLAEALHGRVTRHHRFLLQQHLEMVEHLEKTVGEFEAQIEAALEPFRGVIERLVTIPGVSETAASVIVAEIGVDMQRFPTVGHLISWAGLCPGLNQSAGKVKSRTLRDGAPWLKTVLVQSAWAASRHKDGYLRAQFLRIKSRRGPKKAIIAVAASILTAAYYLVRDPVPYRELGSLYLLRLDHERAATRLTQRLRNLGYEVEIRKVAA

SEQ ID NO: 229098 - protein, 333 aa, unidentified
MLYVGVDAHKINSHITVMDEKGAVVMRREVPSTREGLQRALRRNGNKMKVVLEASYNWGPLYDWLDEVSEEVVLAHPAKVRAIAEARIKTDKIDSETLAHLLRADLIPAAYAPNRSIRAVKRVLRQRLFFVRVRTMVKNRIQALLSQHSVVRPDVSDLYGKEGMSWLKGLKLPEPDGQLLWEDISLLEMLNNRIASTEGLLQELSAGEESVKWLASLPGIGDFFSVLIRYEIDDVKRFHSPKKLAAYTGLVPSTYSSGNRTFHGRLTKQGNKWLRWAFIEAVSPAIRVSTQLRDYYEKVKRRHGTKGARAATARKLAELVWTVWTEGRCYERR

SEQ ID NO: 229099 - protein, 341 aa, unidentified
MKQAITIGLDIAKHVFQAHGADAAGHVLFRKRLTRAKLLGFLAAQAPCVVAMEACAGSHYWGREISKLGHTVRLIPPAYVKPFVKRQKNDAADAEAICEAAQRPSMRFVPVKDEEQQANGVVFRARDLLVRQRTQCINALRGHLSEYGYVFRQGITHAATLIAHVEDPNSFLPKSARVILRLLVDTFSALEAQIKELDAEINRRSRADPVAQRLMTIPGVGPIAATAITALVPAAGSFRAGRDFAAWLGLTPLQKSTGGKQKLGAISKRGERTIRRLLILGASAVIRQACRRGAPAGSWLAQMPPRKPEMLVTVALANKMARVVWALLVKGGVYRAPAAAA

SEQ ID NO: 229100 - protein, 425 aa, unidentified
MTTQMKTTQEITWIAIDIAKKWNIVLVEEPDGKQRHFKVANTKSDHDRFVAFLDQQPNLCKIAMEPTGDYHRPLGYRLLTAGLEVVFVSSLAVARVREALFNSWDKNDRKDAMVILHLLKQGQTQFYHEPLLCGIQDIQELSKTYTQIALARTRLYHSIQCHYLPLYWPEFQRYWHTSRADWVATFLGEFPIPAAVREHDCHTFVQKAWSLIGRKVNKRAWLEELYEMAGHTIGLPVCPDSIAIQTFQMQLVRYQSLLNLRDEVEALAEQNLQSNPDFILLKSIPGIGSILAMVIIAEAGDLRRFGHHRQFLKYCGLDLSKKQSGKTQGPAHLSKRGNAQLRYAFWFAGRVAVRMRENSFRSKYERYIQSDPTSRDRKRKALTAVAAKMARVAYAVVKTGKPYQAYFESAVPSGSIPLKRAVEVV

SEQ ID NO: 229101 - protein, 478 aa, unidentified
MFGGCPVMRITTTHTMKKLKRQNTKRNKAAAAASASHALGAACHPDAAGIDIGAEELVAAVPHGRGDAPNVRTFSAFTEGILALRDWLLSCKIKTVAMESTGNYWLCACAALEDAGIEVCLVNARHVKGVPGRKTDVIDAAWLQQLHAAGLLRASFRPQREILPLRYLMRHRSDLVAQAGQQVQLMQKVLTEMNLHIQHVFSDVDGMSAQAIITAILGGERDADKLAALRDRRCRSPLAKIKAALVGDYRAEYLFVLRQCQTRWQQLLASLAECDTELARLTAAIAGVTEEPLPAAGFAQRRVQKNMPAVLPVYEEAHRLLGVDLSAVPGVSGGVLCVLMSELGTAQHIREKFRSAEAFASWLGLCPDNRISGGRILKAGTRKVANRIATILRLAANSLGRAKGRMGEFVRRFKGRLGKAEGIVAGAHKLARIIWAMVVSGQPYDEAKAFDSTPAATARRLQNLQNQAHSLNMKLVPA

SEQ ID NO: 229102 - protein, 344 aa, unidentified
MNYYAGIDVSLESSSVCIVDATGEIVKEVKVESHPDALVKFFKAFGLPLAVIGLEAGPLSQWLYAGLTKAGFVTSLMETRHVNAALSATTVKTDRRDARGISQLLRMGWFRPVHAKSAGSQEMRALLVARKQLQHKLRDIELSLRGILRGFGLKVGKVTDKTFEARIRELVTGHPMLEQIAEAMLAARAMLLEQFNKLHKAVLKIARRDEACRRFMTTPSVGAIVAITYKSALDDPGRIKKSRNAGPLFGLTPKRYQSGETDITGGISRVGDEMVRTALYEAANVLLSRVTRFSALKRWGLEVAKRRGLKRAKVAVARKLAVILHRMWINGSTFRWTKTEAAHA

SEQ ID NO: 229103 - protein, 401 aa, unidentified
MNAEYSVFLGLDVGKSDHHAVALAPDGKRLHDAPLPNTEARLRALFDKLARHGRILVVVDQPASIGALAVAVARACGHQVAYLPGLAMRRLADLHPGTAKTDARDAYVIADAARALPHTLRRVDAGDEAFAELEVLIGYDDDLAAESTRVSNRIRGLLTQIHPALEHVLGPKISHPAVQELLSKCGGPTGLRKAGRRKLLALVASRAPRMGTRLVDAVFTALDEQSVTVPGTTAAETVLPRLADSLRQVLHQRDQVAGEVERILDAHPLAGVLTSMPGIGVRTGARILLEVGDASAFATPGHLAAYAGLAPVTRRSGSSIRGEHPPKSGNKQLKRAFFLAAFASLSHPPSRAYYDRKRAEGKKHNAALICLARRRVDVLHAMLRTNTPYQAKPADEPRLAA

SEQ ID NO: 229104 - protein, 372 aa, unidentified
MNYNTVYVGMDVHKESFTLCSMTIEDEKASHYQKTEADYKKVLKYLEFLRTIYGDNAKFICGYEAGCLGFTLYHQLISQHVECIILAPTTMLEQRSKKRIKTDKRDAEIIARSLAQHNYSPVHIPTETDNQTKEFIRMRDDHKAELKKIKQQILAFCLRHNYRYDGNSHWTAAHLCWLKSLQPEALYKETLNEYLLTYTTLNDKIERFDKRIEELASKDEYKESVQKLRCFIDVRTHTALSVLVEVGDFNRFASAKNFASYLGLVPGENTSSDDRNLLGITKAGNRHVRLLLTEAAQSYARGQIGYKSKDLKSRQSGNSAQVIGYADKANERLRRRYYKMVLGQSKKHNVAKVAVARELACFMWGMMTEHIS

SEQ ID NO: 229105 - protein, 405 aa, unidentified
MTVFVGDDWGEDHHDVHLMSSDGVRLEAKRLPEGVEGLARLHALIAEHASDPSEVVVGIETERGMWVQALIDAGYQVYAINPLSASRYRERTNVGGAKSDPGDAKMLADLVRTDAHNHRQIAGDTEEVNGLKILTRAHQRLVWDRTRHLNRLRSDLREFFPAALNAFDDLAHSDALSLLAKAPNPDQAAKLSITQIRAALKRGGRQRNIDSRAIAIQLALRAPQMTAPAAIAEAFAISTRSLAQIIDGLNTQIEVLEIELTREFEQHPESDIYLSMPGLGPILGARVLAEFGDDPQRYESAKARRNYAGTSPVTIASGRKRAVVARHVRNKRLYDTVDRWAFSSLRNSQGCRDFYDQRRAVGDLHHQALRALGNRLVGYLHGCLRTRTHYDETTAWAHRQSLVAA

SEQ ID NO: 229106 - protein, 400 aa, unidentified
MLNPHQALQLRVGVDVGSQCHSVAVGLADGSLLEEFEIPHTAAGFGDFFARIEGHAKRHSSPVAVAMEGYNGHVRPLDSLVKARGWRLFNVNNLKLARFKEIFPAAAKSDRIDSAKTLELFQLRDHLPMGGDVLQEVMATPEENDILKRLSRRRRRLVNECGRVINSVQADLQAVAPGLLQITGYVGNLWFLNFLTCRKGLLRLARMRRASLLKVSGIGATYADAIQAWQSRAFFGHDASLVGDMIQQDATRILELKQQIKALEEQMAHVAESSAIANQLASIPGYGSVCSAELAGEIGTIERFGSESSLALYLGMATLDNSSGKYRGSKAPKHVNARAKAAMMIAVDHHRKRVPQSQRYYEKKRAEGKRHNQAIRALGRHLCRVIFKMLSQERTYRIDP

SEQ ID NO: 229107 - protein, 357 aa, unidentified
MIAMKYYTSTTKFNCGIDLHARQMYVCVMDRDGKKLVHTNIRNNDFEFFLKLVAPYRHDLTVCAECMFGWYWLADACQAAGLHFVLAHALYLKAIHGGKNKNDRIDSEKLAHLLRSNLIPPAYVYPADKRPLRALLRQRILYVWRRSELLSRIQSHQLAYNRPTCRQNLYNRDAWTEQLLASEPDPVRQLALQNDLALIGHYDAQLASLEKALLKLTKQTASRDFNLLQTTPGIGDYLGLTLLHEIGDIARFPTVKDFLSYCRLVKGTVASAGKLKGLRGAKLGNPYLRWAFGEAAVIAKRDPVIIGPLAQRLEARLGNKFKANTVLAIKLARAVYFMLKHKTAFDPDRLVAVLSKN

SEQ ID NO: 229108 - protein, 361 aa, unidentified
MAKSTTIVAFDQHAATTVAAVLLPGQRTPALHTLTSDSPTILRFVQRLRATSIQCCYEAGPCGFELQRALTSHEIPCDVIAPALIPRRPGDRVKTDRRDASQLAVLYRAGALTTIHIPSEQEEAARDLLRCREDIRADLLRARHRLSKFLLRHGRRFTATKKAWTKRHAAWLQAQRWPIAALAQTHHAYVRAVDEAVGRLQAVDAELRDLLTLEPLRARVERLRCFRGIDDLTALTIAAELGDARRFSSAPRVMAFTGLVPSEYSSGAKQARGRITKTGNAHLRRVLVESAWQYRHHPFLGRALRLRQRGAPAAVIEQAWQAQHRLHRRYRRLAARGKAKQHIVTAVARELSGFLWAALTH

SEQ ID NO: 229109 - protein, 420 aa, unidentified
MNVNNPRPGRPVLADGRAVVGIDIGKRTHAATAISPQGQIIAQLASFPNTREGFDRLENEMLRPAGGPGRVLVAMEATGHYWMCPRAEFARRGYDTVVLNPIQTNARCNAQIRKTRNDRIDSASIARLVLSGEARASRVPNERTLELRLLTRHRRRLLRAIGDQERFAHTLVDRIFPEYADVFSEPFLPSGEQLIRQVGLAPDSLLQRKDQVRDVLRRTSRGRLGPDTIDQLLRAAQTSIGVQQAQGVVHQQLTSILDFRHTVREQIALIEGELERRVQQLKSPLLSLGISSILAATIHAESDPIADFACADQYVAYAGLDPSIHDSGDTLHRRGKISKRGSPVLRHSLYLAAFVVYRKHNCFQRIYSNHRGKGKGHRNALVIVARHVACVIWRLLTDDRPFTKRPPKTTVRSGKQHPNA

SEQ ID NO: 229110 - protein, 350 aa, unidentified
MTIRHYIGFDVHKKSVSYCAKVADGTVVEEGRLRATHDVLRQWVVKRQEPWHGAMEATLFRGWIYDALAPFAAKLQMGHPALMKAIFASKKKNDQLDARKIADLLRADLLPACYVAPTQMRELRRMLRYRNLVVAQAVQMKNRMSGMLMEVGAEYSKDRLHGREYFSQLLDRLEQVPESVKDLLRLSRGALDLFETVQRKLLDRLQKEPLLRQRVELLRTIRGVGEVTALTWVLEICDPRRFPSIDHAVSYCGLTSALVESADKPQRGPISKQRNAHLQTVLIEAAKLAPRWNPQLAAVHQRELQRGHRNRATLEVARKLVAYLLAVDRSGQPFQVRGTPTAAKEVQKVA

SEQ ID NO: 229111 - protein, 391 aa, unidentified
MIYVGIDAAKDKHDCCILGGNGQTVQEAFAFRNNHEGFEQLIAAIQRSSEAEGSGQIKAGLESTGHYSGNLEAFLRDSGVELVVFNPLQVNLYRKSQTLRKTKTDKVDAKCIAQLLMTAESNPVSVSYQIQELKALTRHRSRLVSQRTKLKVSISRLVVILFPELPAACNSVTQAAIKAMLLELPCARQIAACRIDRLTNLLRTASKGRYGRAKAEDIKSLAQQSIGANSPAAALELQLTLQHLDFLQKQVNELDKAIRAAVVQTQSPILSIPGIGPTLAGIILAEIGDIHRFSSPDKLQAFAGLDPSTYQSGKFKADKTPMVKHGSTYLRWALMQAARLAAVHCETFGRYLAAKQAQGKHYFVALGHTAKKLIRVIFRILSANEVFVPQT

SEQ ID NO: 229112 - protein, 358 aa, unidentified
MENEIKNLSFKDQMIFVGIDVHKKSWSVCIRDESMELRKFSQAPSPEILARHLKSNYPDASYRCVYESGFAGFSTQRELEKLGVSCMVVHAADVPTNAKEKQMKSDQRDCRKLAVTLSGNNLTPIYIPTNQEEEDRSIVRLRDRLVHDQTRCKLRIKSHLAFHGIAIPEKYEASSYWSKEFITWMEGIEFPSGSGKRTLLLLIESYKLAKQQVVKATLEIRTLSKEPRYINNVKLLCGVPGIGPTNAMVFLTELGDIKRFKHLDNLCGYVGLTPKIHGSGDSIYVGKITNRGNASLREALIESSWIAIRKDPALLMCYKEYCKKMPPNKAIIKIARKLLARIRFVLLNQKAYVLGKVQ

SEQ ID NO: 229113 - protein, 338 aa, unidentified
MKAVARIGLDIAKNTFQVHGVNAHGAVVMRKQLSRGEVLRFFANVPACVVGIEACAGSHYWARELKGLGHDARLMAGQFVAPYRKSGKNDANDAEAICEAVGRPNMRFVPIKNEEAQAVLTVHRARQLLVSERTALANQIRGLLGEFGIVMAAGLAPLRRRLAQIGAGQQTLPVLARETVGELHDRLRLFDACISQYDRKIEVIARGSEPARRLMRVEGIGPVTSTALIASIGDARAFTNGRQFAAWLGLTPSQHSSGGKSRLGHISKRGNVDLRTLLIHGARSVLQFTSKKTDRKSVWVEALKARSGTNVAAVALAAKQARIIWALLARGTEYQPAT

SEQ ID NO: 229114 - protein, 429 aa, unidentified
MNYTQNEKIEQVTDTTMVVGVDIGSQTHYARAFDNRGRELTKRVFSFQNDIEGFNSFNLWTETLKKENGKTDVLIGCEPTGHYWFAFAKYVKDHRKTLVMVNPFSVKKIKELDDNSPKKTDSKDPKTIAKLVVDGRYSIPYMPEGIYAEIRDLVYSRDRIMKQHNISANRIQRWLAIHFPEYLGLYTKFDTTSGLEVLERAPLPKDIIALGIDGIRKIWHDKKIRGRGVTEDRAKTLVEAAHNSVGLDGGIGSKSELYMLLEEHRLWSSQLEAINKVLEEVILKVRNVEKLLAIKGVGSITIAGFIAEVGDIRRFSSPKQIQKYAGLELVENSSGKHKGRSRISKGGRRKLRKILYQVMIPLLARNEEFRKIYDYYVTRVQNPLKRRQAMVAVSCKLIRVFYAVLTKGVDYDRIKMMSDIHHESDVIAA

SEQ ID NO: 229115 - protein, 309 aa, unidentified
MERFIGIDVAKDRLDVHVRPGGESFAVARDGEGLAALVERLRTLAPTLVVMEATGGYEVVVASAVGAVRLPLAVVNPRQIRDFGRATGKLAKTDRLDAAAIAHFAEAVRPPARPIADAEAQLLGELVARRRQVVEMIVAERNRRRMAQQRRVLKAIDRHLELLQSELSELDRDIGGAIRQSPAWQEDADLLASVPGVGKVTLRTLIAELPELGRLDRRKIAALVGVAPVNRDSGTMRGRRTIAGGRATVRSALYMAALVASRANPVIAPYYAKLRANGKPAKQALTACMRKLIVILNAILRDRKPWQTA

SEQ ID NO: 229116 - protein, 313 aa, unidentified
MLNEVIVGIDAAKSKFDVHVSPWGKRFSCPTTKAGLRLLSSRLSRTNPSLVVLEATGGYEFPIASALFKAGLPVSVVNPRRIRDHAKSIGKLAKTDSIDAAVIADYGTAHRQHCRPFKLREEQALKEVVARRGQLVAERTAEMNRLKQATNPVVVKSIRKNITNLTQDIKELAREIAKLIRENQSWRRRQEILTSHCGVGAVTSSVLIGMLPEMGEANRHQVAALAGVAPFNNDSGQKQGHKSISCGRPAVRTALYMATLTATRRKGVISEFYQRLIKKGKPRKVALTACMRKLLTILNAMIATDTTWRPKNT

SEQ ID NO: 229117 - protein, 311 aa, unidentified
MDAIYVGIDVSKDRLDVHVRPAMTLFNVPRTDKGIAALIARLLELQPTRVAVEATGGFERVVVAGLAGACLPVVVVNPAQVRDFAKSLGKRAKTDSIDAAVIAHFVEATKPELRPLPDEATRLLADLVTRRRQIVEMIGAESQREKRANARTRKSIVRLKAALAKELAEIDAEIDDNVKSSPAWRADEDLLVSVPGIGKTTARILLSHLPELGKIEGRKIAALVGLAPFTQQSGAWRGKSAIGGGRTVVRSALFVVAMTAARFNPVLCEAYNSLVARGKPKMVALIAVARRLLVTLNAIMRDRKPWQLKEA

SEQ ID NO: 229118 - protein, 394 aa, unidentified
MIMRICVGVDAAKQTHWACAVDEGGGVVLDRAVENDPEAIDGFVAELRALGGELVIGLDVIGSFARFLEAVLLAEGFALVHTPGIAVNRAGQGFAGGERKSDPRDARTIAELVRTRELRPILPDDDTVVALRLKVGRRRDLIREQTRRLSRVRALLCGIHPGLERVLDVTCKGPLLLLTRYVTPAEIRRAGRRRLVAHLARRPHLRGIEDLAGRALAAARAQRIAVPGEAATAEMIRELAAEALDACEKLARLDRDLEALLADHPDGALIRSLPGMGAVLAAEFIASVGDIRRFPSADALASAAGLAPVLRQSGRRTGWRRAFGGDKALKRIFYQSAFCAVSTSDPLSRAFYDRKRREGKHHTQALIALARRRVTVLWTMLRRREAFDPIRKAA

SEQ ID NO: 229119 - protein, 453 aa, unidentified
MEREEKRLEQFRRLHQEIRGSQQYLVVGIDISKDTHNAFMRTPTGKTLYRRLIFNNTREGFETLLLQVEAVRVQHSLNQVVFGMEPTANYHKPLGEFLINQDQQVVLVSPEAVKHNRPLLDGRWNKHDGKDCANIADLMCQGKCLFYEYPSSELRDLRNLLSLNRKIKKLEQGLRLRIRNHLVAQFFPEMDQYCHWGANEGLALVRWCLDPALMGTLSDEELGKRLHTQGRTLAQRKRLSALKDKAPSSIGCQFGDSVEFEGQSVVKLLKEVRQTLADTQEKIEQVCLKFQEYPCLLSIPGFGPTLSAMVLGAIGNPWRFQNGAQVIKMVGLDLSASQSGKSQGPASVSKTGKAEIRYALYQAAMVASNRDKHFVAYFTDQLRGREKEKGIKTKKRVKLAAKMLMIAWTLMKKQEIFDPKYLSTTAQPIIGQKTRQTDPGGIPEVQPGAARRL

SEQ ID NO: 229120 - protein, 368 aa, unidentified
MKNYTLEAAPTAGAQELKNQKAAKAKRIVIGSDTHLNSYQAARKIDNGPIGAVAKFRSQEELLLYVEKQKEQAEEVVVVYEAGPLGYGLYRALKARGVRCYVCAADSDEQKRKRRKNNTIDTRTLTSNLFNYLNGNERALQLVRVPTEEQEQARLASRQHDQLVEERKRLGAKGNALLLGQGFGSWKNWWRAKAFSRLSQLVPGWLKELLETWVDLLRKLDEKIGRAKAALAKRCRGPRPKGAGAPSLVQLQSEVLDWGLYSNRRKIGCLAGMVPSEWNTGDSQWRGSITKVGVPAIRRIITEMVWRIILCQPQYKAVQKWQEVLRGSNRGLKKKAVVAIGRQLMVDLWRLQTGRVSAQELNLLMIGG

SEQ ID NO: 229121 - protein, 464 aa, unidentified
MTAGKQLWRNRKEKKEWARRLQSEDPGLEVVHPHAAGIDVGNSTHYVAVRPDRDPEPVRRFECFTADLHRLADWLQSCGVKTVAMQSTGVYWIPLYEILEEHGLEVYLVNARHTKNLPGRKSDVQESQWLLKLHTYGLLNNSFQPVSEIRVLRTYWRQRGEQVRGAATCIQRMQKTLTQMNVQLANVISDISGLTGQAIIRAIVAGERNPLKLAMLSDPRVHASHEEIAKSLEGNWRPELLFVLHQEVDMYDTYQKRIAECDQQLQKHLSSFTRSLPIQPPTQKLKTKKPAAKNAPRFDLSSELQRVTGVDLTRIDGIDVMVAQTLLSEVGLDMSRWITESHFASWLGLCPDNRISGDKVLSRGTRRVVNRAATALRQAANTLMRSRSYLGAQYRRLRTKLGAPKAITAMAHRLARLVYRMLKYGQTYVDKGTEYYEERFRQQQIQLLRKRAAKLGLQVAEIHA

SEQ ID NO: 229122 - protein, 413 aa, unidentified
MEGLSPLYRRVAGIDVHKMLHVVTTVIEHPDGTIEQQSREFGGFKRDCRALASWLLELDVELVVMESTGIYWKSIYAHLERAGIQAWVVNAHFVKHVPGRKTDMNDSHWLAVLARFGLVRGSFIPPQDLRELRLVSRYRRKLTAMRASEINRLHKILDDGGIKLGGVVSDLNGLSARAMVTGLIEGKPITALLDMARGRLKPRREDLQAALDGDLTARHRFILKHIHEHIEILERSLAELDAYILAAMAPYQWAHRLLQTIPGIDQIASALILIEIGDDMARFGSADRIAAWAALCPGNNESAGKRKSGRTGKGSSVIRYIMCECANSAWKTRSSLASKYKSLMVRKTHKKAIIALAHKMIRLIFLLLTRKVAYHDPQIDYQAISAKKNAPRWIKQLKVIGQWPDNASTSATT

SEQ ID NO: 229123 - protein, 414 aa, unidentified
MGDVGWFIGIDWSSTQHRICMLDADGRHVAERDVTHDGIGLAELCAWLLERTKAEPAEIAVAIETPHGPVVEVLLERGFRVFAINPKQLDRFRDRFSVAGAKDDSRDARVLAASLRTDGRAFRRLTLDDPLVIELREWSRMHEELRQEQNRLSNRVRDQLWRYYPQALELGAGDLAANWFLELWQLLPTPAKAARATEKPIARLLQAHRIRRLQAADVLRILRQPPLSVAPGTTEAASAHIHTLVERIRLVNQQIKAAERRLDELCAAIEETTPGQICEPRDVEILRSMPGLGRIIIAALLAEACEPLRLRDYHALRVLSGQAPVTRRSGKTCIVLRRHACNNRLRNALYQWARVAMQHDPVSKRRYAELRARGHSHGRALRSLGDRLLYLLCTVLERQTPFDPNHKSSQTAAA

SEQ ID NO: 229124 - protein, 341 aa, unidentified
MDKELYFGVDVSKKTLDLAYYDGETIDWKNAHIKVSNDDAGFKKIGSWVAKVGKDFDTFLFCMEYTGLYNQNFRLWLESKEYIYGMVEPRKMHRFEPDLDDDQRSLDRIKTDELDAFRIAIYCEQNHKKILRNPSKLPSPVYFKLKRLLAERKQNTKQSTLYKQQLHDICAYDTDLSVERKKLLLKSMKENQKAIDREIDSYINEDASISKNYDLLTSIPGIGRIIALETIVLTENFTAISNPRKYACYIGIAPFKKESGTSVRKRTTVSKKGFSEAKADLSIAVLSAIKNNPSIRDYWIRKRKEKCGGIVLNAVKFKLVLRMFAVIKRGTPYVETDAYKN

SEQ ID NO: 229125 - protein, 326 aa, unidentified
MQHILGIDVSKDKLDVILVNDGKKYHKTIDNNQKGFKYLERWLKSRQVTKVHACMEATGQYGEEIAEYLYERDHLVSVVNPARIKRYGQSKLHRNKTDKADANLIAEFCSKEKPGPWKPLSPEIKHLRALVRRLQDIKAQYQQEKNRLKSGESDAWVLDDLALHVDYLQQRIKATENEMKEVFKQSEVLKNKLDLLTSIPGFGLLTAAILLAEIGDFSAFENAPQLAAYAGLNPTSHFSGSSVFKKTRVSKEGRSSLRSCLYFPALVALRHNSVVMDLAERMHRTNHHEMEIIVAAMKKLLHLAYGVLKTRKPFDPNYGAQFNFSS

SEQ ID NO: 229126 - protein, 391 aa, unidentified
MIYVGIDVAKDKHDCFITNSDGEVLFKSFTIANNRDGFETLFQRIQSVSDDLTKVKVGLEATGHYSYNLLGYLIDKGLPTYVINPLHTNLYRKSLSLRQTKTDKVDARTIASMLMSDVNLKSYSDTSYHNEELKSLTRYRFDKVKERAKLKSSVSRLVCILFPELEKLVPQLHIASVYALLSEFPSAHAVASAHLTRLTHLLSESSKGRYGKDMAIIFREAARNSIGSNMPAKSLELKHTIKLIRELTSEIDEIEIEIKSIMDEINSPILTIPGISYRMGAMIIAEIGDFNRFDSPDKILAYAGFSPSTYQSGQLDGAYAHMEKRGSRYLRYALYNATKYVCHWDPTFAAYLAKKRAEGKHYNVAISHAVKKLVRVIYHLEKTKQQYIKAA

SEQ ID NO: 229127 - protein, 341 aa, unidentified
MERYVGLDLSRKRLNWCWVDDRCEVVDEGAVAPQPHGLARLVLELGQDVLAVIESMTGARFIHDQLELAGWDVRIADAQRAKGMAKLACKTDRSDARTLAQLAALDLVPEIWLPDPRVRQERELARFRIHLVKQRTMLKNRIHQTLMTHGIACPVSDLFGVGGRQLLERSAMPPAWRESTDACLRLIADLDREIDRCAAQISRQQPDHPYLPLLMTVPGIGPILGYTIAAEIGDIHRFATPRKLVGYTGLCPRVHQTGERDHRRSLSKRGPETLRWALIEAAQHAARSAVYRDCYHATRERAGRHRGTSVANVTIARKLAEAIWWMLHRQQRFAPAGAIGV

SEQ ID NO: 229128 - protein, 416 aa, unidentified
MTTHRIAGIDVHKKMLAVVVLDAAEEGEWRLHRRKFLTTGEDLDALALWLASLEVREVVMESTAQYGKPVWRVLEPQCHLELAQAQSNRGPRGRKNDFADAERLVRRYVAEELILSFVPDPRQRLWRALSRTKQTLTRDRVRLQNRVEGLLEEMCLKLSSVVSDLLGVSARRMLTALSEGETDPAKLAAMAEPGLRATPERLCDALRAAPSLYPGYRHLLKQYLERIQRQDRHIAELDRELGVALKEHQDAVVRLADVPGLGADSAQQIIAEVGPQAAPFPTAANLCSWVGSCPGQEESAEQSTSDHSPKGNRSMRRILNQAANAAIKTKGTVFEAHYRRIRGRHPKKHNVAVWAVANRLCRLIWKILHHNVKYEERGSRPNPKAVRKRARRLVRQLRALGYCVQVSAPQPQAGTA

SEQ ID NO: 229129 - protein, 321 aa, unidentified
MSEPQAEVFVGIDVAKARLDVGLHPSGESWTVEHDEAGIATAVERLAALGPTLVILEATGGLEVPLVGALVAAAVPVQVVNPRQVRDFAKATGRLAKTDRLDALVLARFGAALRPEPRAIPDAALQEVRALVARRRQLQAMLVAEKNRRSSAPQRLHAQIDDHLAWLRRAVADLDRDLATTIHGTPAWQAAVGRWQSVPGVGPVVSATLLADLPELGTLTRQQIAALVGVAPLNHDSGAHRGTRSCWGGRAHVRTALYMGALVATRCNPAIRTFYLRLLGQGKPKKLALTACMHKLLTILNAMTRSGSTWTDQTASVEIAA

SEQ ID NO: 229130 - protein, 387 aa, unidentified
MPQPNDLSRSLVALDHNSTIVAVVEMSQSSWLVGGVLPGIERQPRKKLEPSPERLLAVLHRWRDEAVRAGRNITRIAVAFEAGRDGFWLARWLEARGVEAHVIHPSSVAVSREHRRAKTDRLDTELLKRGFLGWLRGERGHCSMVRVPTIAEEDAKRPNRERECLVKERTRLVNRMKGTLARLGIRNFRPTLRKAAEHLAALSTPEGSPLPPNVWGELQRDMARLGLVIGQIREIEKARQKRLEQQPETTPHAMVRLLARVVGIGIETADMLVHEVLSRPMRDRRAVARYAGLTGAPDESGARRREQGLARAGNARARRGMIQLAWRFLRFQRQSTLALWYRARTADSRIGTRKTMIVALARKLVIALWRFVTTGEPLEGVVLRPAV

SEQ ID NO: 229131 - protein, 352 aa, unidentified
MAKNDFDELMSVGIDIGKDVFHLVGFDKEGQLVLRKKIKRMALVATFEELPRCIVGMEACMSAHFVSRTLRELGFEPRIIPAVYVQPFNKGQKNDYNDAEAIAEAALRPNLKTVSEKTQEQLDLQALHRVRSRLVSRRTATMNQIRAFLIEQGITVRRSVAALRTSLQAILDHRDDEMSLRMRKLILGLQQDWIWTDRRIEMTTSEIKSVSESEASCQRLVTIPGIGPIISTAVVAAVGTGEAYDRGRDFAAWLGLVPRQHSTGGRTILGRITKRGSRYLRMLFVQAAQVIMMRPNNWHKFSLGPWLEAAATRMQHNKLGVALANKLARIAWSVLNSGKDFDWKKKEFATAI

SEQ ID NO: 229132 - protein, 447 aa, unidentified
MPQPILAVGVDPAKRLHRAVAVLFPDQVILDVALPNACDAVANLDDRLTELANQHGAELVYGLEDHRRYGRLFCQVLTERGRELRVVNPLWTSRQRAFYGQDKDDAIDGRSIAAVVLRRHHDLPLATDFGEVAQAVREAERSLQDLDKARTRLINRLHLQLSDTYTATYEGFFGKLRSPLALRFFRHFPLPQDLVGHNVEMLASLLLDLAGGKVGPHKGANRLIAMRSKAQTILESSATMRARPRSLALQLKAELIRQLCDELLANHDRVTRLNRMLRQQLLPATGQTITTITGISTTLAAAIIGETGSITRFRSPAAFAVYNGTAPARASSGGRDRHRARHDCNHRLKRAFYLAARAAVRHDPIAKTYHQCCTSRGLDYCEALKRVARRMSDLVYVLLKSGKAYDRLIVENAIEQRREQAAHAGSRRANKALSAPDQINSNAPLSQ

SEQ ID NO: 229133 - protein, 406 aa, unidentified
MDVIYPRCAGLDVHKQTVVACARLSGDGAPKQEVRTFPTTTSGLLALADWLESLGVHHVAMQATGVCWKPVWHVLEGHFTLVLANAAHVKNVPGRKTDVNDATWLADLLAHGLIRASFVPPTAVQELRTLTRTRKQFVRERGSHAQRIEKILEDANLKLSSVISDVLGKSGRAVLQALIDGQDDPERLASCVGRVKATRSELVEALRGRITAHHRFMLKLHLDHIDTLDKAIAQIETEVGLGLEPFRQAAKLLSTMPGISSVSAHVVVAEIGIDMSRFATPAHLLSWACLCPRNDESAGKRRSTRLRRGGKWLKTTLVQAAWAAIKVKGSYLQAQFHRLRARRGANKAIIGVAASMLTAAWHMLRNGTEWHDLGAAHFDRADATKTANRLIRRLQQIGYTVEATPA

SEQ ID NO: 229134 - protein, 411 aa, unidentified
MHYKQKHIYIGVDLHKKTHTAVVINCWNEKLREVTFENKPSAFDELTTYVKQLKKRGMTPVYGLEDVGGYGRSLAVYLLENRQLVKEVNSALSYAERKSYPTTQKSDSWDAESVAKILLNKLDILPDANPQDVYWTIGQLVTRRNGLVKGLISLKNQLHTQLSYHYPSYKKFFSDIDGKCALAFWEKYPAPHVLNGVLVEEFAEFLRKSSNNACSTRKAEEILALVHADGDTTRSYQEQRDFLIKSHVRDIQFNKKEIEYVEGELQGMMKRLDYQLETMPGIDLVTASSLVAEIGDISRFASADKLARFAGIAPVNFSSGGKGTNQKSRQGNRILHGLFYNLAVQQVQVSKGSKKPRNPLFYEYFNRKKEEGKTPTQALVCVMRRLVNIIYGMMKHKTAFRLPEQVEKQAS

SEQ ID NO: 229135 - protein, 482 aa, unidentified
MANRKKSTFQRLTNGRLNRTQRRELERKLSAQDPGLEIVNRNVAGIDVGNESHFVAVPPGRDAQPVQEFGSWTADLERMAEWLKTCGIETIVMQSTGVYWIALYDVLEARGFKICLANARHTKNLPGRKSDVQESQWLLKLHTYGLLRNSFRPPDEIRALRSLWRLRDRHVKEAGRAVQHMQKSMVAMNLQLSNAISDITGVTGQVIVRAILAGERDPAKLAQLRDRRIKATEEEVARSLEGNWREDLLFELGQAVATYDFIQKQTAECDQRLQTLLAELPARELEAAGRAAEAAGKPARKKRSGGKAKNKPPFDLQAELNRVCGVDLTSIDGIDVMTAQTIVAELGTDFSRWQDESHFASWLGLSPSRDISGGKVLKQGTLKVKNRVATALRMAANALWHSDSYLGARYRSLRTRRGAPKAIKAMARYLACLIYRMFTRGQAWVDRGAREFETRRTQRELSALQRKAAAHGFKLVNLQVPA

SEQ ID NO: 229136 - protein, 338 aa, unidentified
MKLYGGIDLHSNNSVIALLDEEDRTVYRKRLGNDLGMILEELAPYQTSLEGLVVESTDNWYWLVDGLMDSGYRVHLANTAAIVQYEGLKYTNDDSDARWLAKLLRLGLLPEGYIYPKKERALRDLLRKRSQLVRQRTSNLLSVQNLLARNCGDSLGANAIKRLTLDAVDELLPEPHLALAVKSNVVVMQTLDEQIKALETVIKVHARPRPDFQSLLTVSGIGDILGLTILLETGPISRFPQVGDYASYCRCVGSEKLSNGKRKGRGNTKNGNRYLAWAFVEAAHFAVRYDPHIKRYYQRKLSRSQGIVAIKTVAHKLARACYYVLRDRVPFDVHKAFA

SEQ ID NO: 229137 - protein, 323 aa, unidentified
MSAILFLVAVGVDIAKAHFDAARLADGKYKHKKFDNTPAGLALFAEWLAGFGGENPHICLEATGTYGIPLAEFLAGRGFHVSVANPAKVAAFGKSELSRAKTDKADAKLIARYALAMRPAPWTPPPAEIRDLQTLLRRAEQLQKMERMEQNRLDTADPAVAGSIRAVLATLDKELQDTQDKIRRHIDGSPTLKGRAGLLESIPGVGEATAAWLLTLLSEHYGFADAKQAAAHAGLAPVIRQSGKSAGQTRIAKTGDPLLRKALYMPMLSAWQHNPAIRAFCERLKAKGKSGKAIVCAAMRKMIHIAFAILKSGRPFDPGYQPA

SEQ ID NO: 229138 - protein, 386 aa, unidentified
MMVIGVDPHKSTHTATAVDPQTNRAVASVRIQASLADYRRMLTWARQFDQRRWAVENAEGLGRHLSSWLLARGEQVVDVPSTATARVRQLSRGGGRKNDQIDAAAAACVAALQGDGRPLEAEGVTDALALLDESRMNLAQSRVRLVNQLHALLRELIAGGAPRDLSATSAATLLRHIRPAGDVERVRKQIAAGLVTQIRAVDTLLKSNAQQISELVAASGSTLTGTVGIGAITAGRLIGRTGRAGRFPSPASFANYAGAAPVEIASADKARHRLSRGGDRQLNAALHTVAITQIRTPGSRGHAYYNAKIAQGKTAREARRCLKRRLADHIWRTMITDERRMATSPGGHPGAALTSSAAGSTPTTSSSDKSLPGPARADSTTLRSTA

SEQ ID NO: 229139 - protein, 424 aa, unidentified
MAGVVIGIDPHKGSHTAVALDVHEKQLGRLRVRASSRQVDGLLEWASGWPRRRWAIEGARGLGQLLAQQLIASGERVLDVPPKLAARVRLLDSGQINKNDPNDARSVAVAALRAHELPELAAEDHAMVMRVWARRYHDLARLRTQVVCRLHAVVCELVPGGVRKYLRASQATDVLDRIVADSPVAQAKLELARELVADLERIDAQRREAKGRTARAVAATRTSINDVYGVGPIVAGTVLGYVRDIRRFPTRDRFASYNGTAPIEVSSGDRKIYRLSRRGNRQLNHAIHMAAISQIRHHDSEGRAYYEKKIAEGMTGKTALRALKRKISDALYTRMIDDARHLAAKDPGGHTGNDSASSAAGSHPETPALRKSHSRATANSKTGTGQRPLRLRPAPDRRRTSRRAAGVQVEPRLGPHRGRRQDRP

SEQ ID NO: 229140 - protein, 331 aa, unidentified
MSIHAGIDIAARTFVLAWREGERLGGVREFAQSPAGHEAAAALLSRLAPERVVLEATGVYYLDLAWALGEAGLPVAVINPRRFHHFAALRAAPSKTDRIDAALLAEYAQRMNPPCWQAPDRNRRALRDIGRQINRLTQARTQAKNRLHALQATSATPPLLIEDERAGIAALDQRITQLSEAARKLVDAEPALAQRLMHLQAAKGIGLASALALLAELAVLPTELKAKQVARHAGLDVRLTQSGTSVDKPGRVSKTGNAYLRTALYMPALSAARHDPYARAFYRALIRRGKKKMQALCALMRKYLTGLWACMRSGEPFDSARLFSPQHLQNA

SEQ ID NO: 229141 - protein, 309 aa, unidentified
MEQAIVYIGIDVAKAHLDVSWAATLRRFPNEPTGHAALVRWLKTSATAVQLICEASGGYEQPLLESLAKNQLAVTLVQAVRVRQYARAAGILAKTDQIDARVLAAFGAALRPKPTAPLSVEQKRLRELESQRRHLSRVLSTEENRLAQLSCPELRALSGSLMRKIKKQIDAIEQRIAGLIAQDQVLDDKARKLTAISGVGLRTATLLLAQMPELGQLNRRQAAALAGLAPFNHDSGSISGRRAIFGGRRALRSGLYMAALSAARFNPILSRFYQRLRAKGKPHKLALTAVMRKLLLALNHTLKPIPCST

SEQ ID NO: 229142 - protein, 380 aa, unidentified
MDILHPRCAGLDVHKASVQACVRLLVEGEVIEHTQRFGTTTAELLALADWLASHGLTHVAMESTGVYWKPVYHLLEGRFELLLVNAQHIKRVPGRKTDVKDAAWIAQLLQHGLLSPSFVPPPEIRDLRDLTRQRTQLVRERATVVNRIHKVLEDANIKLACVVTDILGKSGRDMIAALIAGETDPDPLAELARGSLKKKRPALRQALHGRVRDHHRFLLRTLLSQEEHLEGQIARYSARIDEVMAPFAPATARLRQIPGIGRQAAEVIVAEIGTDMERFPTAGHLASWSGMCPGNHESAGKRHSGRTTKGSQWLRTTLVQVAWAATHTQRTMFAAGYRRWVKRLGKKKALVAVAHKILTVIYTLLKNQTDYREHGVPETA

SEQ ID NO: 229143 - protein, 368 aa, unidentified
MESQIIFGIDVSSKSSTVCVVNDRIKQGESFRISNDSFGYQKLYEQLNQYLITPLVVFEATGVYSLSLQAFLEDYHIKYLKLNPLKAKKLMDNNLRHNKTDKVDAYRLALIQFNAPQKLRDPQPREYHELQNASRYYEELTRSIVTTKNQLHRNLQSTFPQIEEILSHPSGRIYWALVSLFPHAGYVLEKNETQVTQMLNSISGIGQQRARYLTTRLYAFAREAYPYDSKDSIIVRAIQRNISNLFSLQQERDYVINYMEKLAKAVNARALSIYLSIPGVARITAVRLVAELGDLRRFSTSAQIDAFVGIDPGRYQSGEKDSSLGITKHGNHIARKILYRVITQMETVKATQPCHITDYYDKKKTIFK

SEQ ID NO: 229144 - protein, 413 aa, unidentified
MERIIERCAGLDVHKSSVTACVRIPEENEGLHQEIREFATTTRGLLLLRDWLASFEVGLVGMEATGVYWKPIYYMLEDDFELWLLNARHLKNVPGRKTDVKDAEWICQLVEHGLVRPSFVPPREIRELRNLTRYRKAQIEERTREVQRPEKVLQDAGIKLSSVATRVLGASGRAMLDALVGGTTDPEVLAELARGRLRSKLPALRDALEGSFSSHHDLMVGKLLAHIDYLDESIGDLSAEIEQVIAPFSEKVELLDTIPGVNRRTAETLIAEIGADMSQFPTHRHLASWAGMCPGNEESAGKRRSGKTRKGSKWLRSALTESARAAARSKGTYLAAHYARLRGRRGSKKAAVAVGHSILVICYHVLERGVPYEELGEDYFDRQRSGEAYTKRLVRQLERLGHKVALEPLPQSA

SEQ ID NO: 229145 - protein, 330 aa, unidentified
MSTNENNTTQRKSNEATFVGIDVAKAELVVHILPTNQQRTVSHSKEGIQELVKLFKEIEPQQIVLEATGGLERELLAHLVANGIPATAVNPRQARDLAKGLGELAKTDAVDARILARFAQLQCLPTRPIPSRETQEMSDLVTRKEQLIQMKTMETNRSHRATQKAVKQSIEKIISLFDKEIAAIDERIEKMIADNPDWSEKDKILQSVPGVGAKTSQVLISALPELGSLNRQEIAALVGVAPFCDDSGKRSGARHIKGGRAPVRSALYMAAFNAIRRNRTIKTFFERLIAEGKKYKVALVAAMRKLISILNVMVKTKTYWKEQNTTVENT

SEQ ID NO: 229146 - protein, 340 aa, unidentified
MGEITTIGLDLAKQVFQVHGIDADGTTVLRKQLRRSQVLSFFSRLAPCLVGMEACATAHYWGRELAALGHEVRLMPAQYVKAYIKRNKNDAADAEAICEAVVRPTMRFVPAKTAEQQAALLLHRGRERLVRQRTGLVNALRGHLAEFGVIAPQGLRNVGKLIAVVRDPSDARLPDLARQVLEVLAAQIEQLEGAVAAVEKQLMAWHKSNPISQRLATIPGIGPIIASAIAASVAEPGGFRSGREFAAWLGLVPRQNSTGGKHRLGGISKRGNQYLRRLLINGASANLLRSKATKADPWVIGLRRRRPSLVVAVALANKTARIAWAVMQRNENYQRMAAAA

SEQ ID NO: 229147 - protein, 350 aa, unidentified
MQTIYIGVDFHARQQTICYLTTDSGELLFHHLKHEDKALVRAFYAQFRGHVIVGLEASGYSPWFERLLEELGCEVWLGHATEIRRRARWRHKNDRRDAELILDLMVHNEFPRLYLPPLQSREVLRMLRYRQKLIKMRTIGKNSLQALALQSGLAKGPHLFTKTGLQELRSATMSPAMQWQREQWLQLLEPLNERLLETMRWLQQQSQADQRISRLRTHPGVGLLTALCLVHSLEPVRRFANTRKVTAYAGLDPVERSSAERQRFLGISKGGSRVLRFLLVEAAHTALRKDADLKRFYQRLAQRHGRPKAKVAVSRKLLIRAYIMLRDEIDYAEFQRRAVAARPVLPAHGL

SEQ ID NO: 229148 - protein, 398 aa, unidentified
MRTPPLQLRVGVDIGCRSHNVAIGLSTGEILDEFSIVHEPEGFRNFFSRIEQLEKKYGYPVAVAMEGYNGYARPLDTLVRTRNYRLFNINNLKLARFKEIFPGAAKTDAIDARKALELFQLRDYLPVAKDVLQEVMATPQENEILKRLSRRRRRLVNERVRVLNSLQADIQSVCPGLLEITGEAANLWFLRFITSTDDFRKLARVRETTIRKIPGIGAKYASVILDWQKQAQFGHDVEWVGEMIQEDAHRILDLHAKIQRLEDCMAEVATGSEIAQALATVPGFGDICTVELAGEIGTIDRFAGESSLALYLGMSNLDNSSGKQKGSKLPKQVNVRAKAAMMIAVDRHRKQVPQSQKYYEKKRAEGKKHNQAVRALGRHLCRIIFKILKEKRGYTIPT

SEQ ID NO: 229149 - protein, 360 aa, unidentified
MRIIGCDLHARQQTLAMLDTVSGEVVNRTLLHEGNEVREFYSELPRPVLVGIEAIGPMQWFLNLLEELGIECQVGDATKIRAAEPRKQKHDRRDAELILKLLAEKRFPAIWRPSQELLDLRALLLHRHQWVRLRTQVQNALQAIALANGLRRGPSLWSYDGQAKIAFLPLPPHTSLRRSALQALYRHMDEEIEKLTVQVAEQAEHRPGAQLLMTHPGVGPVTALATDVFLGDPQRFGDGKSLASYVGLIPQERSSGRRRRLGKITKQGNPLLRFLWNEAAAHAARRDPELKRFYRRKLVQKGMGKARVAVARKLGIRLWIMLRDQIGYEEFCRRGQKQSSAACAGMPEVGYGANRHRPVD

SEQ ID NO: 229150 - protein, 358 aa, unidentified
MQSNKKSFKGQKIFIGIDVHAKTWAVETLTESGFTKRHAQEASAKVLFDFLSKNFPDGEYHAVYESGFSGFSTYYQLKEYGIHCVVVHAADVPSTQYEQVMKTDKIDAGKLARALRKGDIKPIYIRERENLDDRAVVRLRKTIQKQLSGYKTRVKHLLHTNGVKLPARFDKPGTHWSRAFINWLKDEVVLLSSTRLSLDLLVNQVESIRKNLLEATRVMRILAATDKYKANYELLLSIPGIGFNVAMCLLTEIYDFKRFGNENCFAHYLGLVPTCHDTGDKHSTGGKTFRGNKLLGPMIIEACWVAIHKDYGLSQAYCSYKQKMKPQLAIVKVARKMSNIIFSVIKNGKKYEPYKWEE

SEQ ID NO: 229151 - protein, 404 aa, unidentified
MSVHVAPVTSSTIVVAVDVGKTSAVFSVTDAARHRLLAPSEFAMTGSGLANAAARAMAAAPAAVQVKVGVEAAGHYHRPVLDHRWPDGWEVLELNPAQVAEQRRVQGRRRIKTDVIDLEAITELVLAGYGRPVTDRDVVIGEISAWASHRSRRVATRSATKNQLLGQLDRAFPGLTLALPDVLATRIGRLIAAEFTDPARLAGLGVNRLIRFAAARDLQLRRPVAERLVAAARDALPTRDAAISRRILAADLVLLADLDDQIQSAETALGTLLPRSPYATLTSVPGWAVVRVSNYAAALGDPQRWPGPQQIYRASGLSPTQYESAHKRRDGGISREGSVVLRRALIDLGIGLWLNEPAAKNYAHALKDRGKPGGVVACALAHRANRIAYALVRDHATYEPTRWA

SEQ ID NO: 229152 - protein, 412 aa, unidentified
MSFPLPDALVFTGIDWAAETHAVCVMDAGGAIVAGFTIEHSADGIATLIRRLARYGQPGVMPVAIERPDGRLVDLLLEAGHPVVPVKPNAIKAWRDGEVLSGAKSDAGDAAVIAEYLRLRARKLKAAAPYSDQTKALRTVVHARGDLVEMRVAATNQLSALLETHWPGAKAIFADIESPISLEFLTRYPTPAAATRLGEKRMAAFCAQHGYSGRRTAAQLLARLRHAPAGATSQALTGALRDAVLAAVGVLTALNTAIKNLDRATATHLGEHPDGAIFTSLPRSGQINAAQVLAEWGDARPAYEHPDSVAALAGVTPITKQSGKHRSVHFRWACNKRFRAAITTFAGNSRHASPWAAKIYNDARASGKDHPHAVRILARAWIRVIWRCWLDSTPYDPAKHAAAARLTEPKAA

SEQ ID NO: 229153 - protein, 404 aa, unidentified
MIFVGVDWAETHHEVCLLDPTGAVLGRRRVPDGVAGVAQLHALVADHASEPEAVVVGIELDRGLLVSALVAAGYQVVAVNPLQASRYRERHGTSGAKSDRGDAKVLADLVRTDRQHHRAIAADSEGAEAIRVLARAHQSASWNRQRQLNSLRSALRAFYPAALDAFGTDLASGDALAVLALAPTPERGGQLSRARIATALRRGGRQRNLAQRAAQIQAALCAPQLATAPPISHAYGVMTRATVAVLASLNQQITSLEEALGEGFNKHPDAKTIRSLPGLGMVLGARVLGEFGDDQTRYPTAKSRKNYAGSAPITKASGRSLVVLARYARNRRLADALEQWAFCSLTRSSGARRYYDQLRARNKTHRQALRQLANRWVGILHTCLDRGVLYDEHLAWNHLQPTAP

SEQ ID NO: 229154 - protein, 400 aa, unidentified
MDYYLGIDIGKEHHQAILCNKEAKAIAPSIRFETTQDGFLELFAYLNKYLPEKDYSTIHAGSEATGIYWLTIYEKLKKQNIQVSVLNPMQVKAYRNEGIRGAKTDRLDALLIVKVLRFGNYRDSDIPPDDLFALRQLTRLRSDLVDMTSSIKLKVIGIFDQIFPEYTNVFSDIFGASSKTLLSEAMLPEKIAAIPTEKLTALLKKESHGKYGIQQARDIKKEAEQTIGVTLGIDAFSLSLEILLAQVIHLEKQVDKLNKEIQKRTEMRGETLTTIPGICKVQEATILSEIGNFERFRNDKNGAEKLVAIAGIDPKIKQSGKYIGKAKISKRGSSYLRKAIRQSAFVASFGKNKDPMFSAIYEKKISEGKHFEVALSHVENKMLHVIYSLLKSKKDYKPNI

SEQ ID NO: 229155 - protein, 360 aa, unidentified
MQTKVTKDLFKEQSFYVGIDYHKKSWKVAIFGEQYEHKTMSQNPDPNILAQYLKRNFPGGNYYAVYEAGFSGFNTCRELQELGINCMVIHPADVPTSQKEQQQKTDKADSRKLARSLRANELTAIDVPERKLEADRALMRQRFRIVKDIARTKNRVKSLLYQFGITIPERFASAAGRHWSKNYINWLKEIEIDELSLRQVLDNYIEIGTMLRKELLVVNRQIKELIIQPEYQNNFRLLLTIPGIGITTAMTILVQLGDIKRFKRLDDLCNYIGLVPKMYASGEKMVTGKMIRRGRKELKIMMIEASWEAIRKDPALMIVFNKLSLRMNKNKAIIRIARKLISRVRYVLTNQQAYELGVII

SEQ ID NO: 229156 - protein, 429 aa, unidentified
MNLVPVAGIDVGKRFSEMAILSPLNEVYARIRINHDSYTNFVRAFDLLKKTEKEFAVKPVVVLESTGHYHKILFHSLTKVGYAVHVINPIQSDSIKNIGVRKVKSDKVDARKIALLYRFEQLKTTKIPDEDVDCLRSLCRHYYKLSDQLTAYKNRLVGIVDQLFLSFTDVFKDIASATAMAILEKYPSPEDILKADRDEMVSLIRQTSRKNLKWATGKYELLCEKAVDFSPLSVNSIANIAMLKTNISMIRTLMRALKDALDAIYKLLDQDLKKDMPTLALTIDILCSIPGIGLLTAATIVAEVGDFSAFSKPDRLVAYFGIDPSVKQSGQFEGTKNKMSKRGSRLLRRVLFTTALANVRKKRNGKEHNPILYEYYRKKCLSKPKKVALGAVMRKLIAIIFAVIRDKKPFVLKRPEDHAKMLEAKNLAA

SEQ ID NO: 229157 - protein, 367 aa, unidentified
MAYRIAGIDVHKKMLAVVVSDVEVDGEYRFERVRYGSTPEHLRLLAEWLITQQVEEVVMESTAQYWKPVWGALERYWKPICQEREGAGPKSGTLHLAQAQSNRGRRGRKKDFPDAERLVKRLVANELILSFVPDAEQRLWRTVTRRKYQLTRSHIRLQNQLEGLLEECHIKLSSLVSDLLGASARRMLKALAEGETNPAALAAMADRNLRATQAQLCDVLGACTELKPIYRRLLKMFLEELQFIDQQISKLDQELANLLSRHNDAVVHLAEIPGLGVDSAQQIIAEVGAGAATFPSAKQLSSWVGACPGDEESAEVSKSHRSPKGNRHMRRILNQAANAAVKSKGTIFEIIYRRLVSRLGHNQTIGA

SEQ ID NO: 229158 - protein, 368 aa, unidentified
MKNVRFVGLDVHKESIVVAVAESDRSEPQVVAELPNDTARLLKELRKLSRDGAELRCCYEAGPTGFGVHRALREAGIECIVIAPSLIPKQAGARVKTDRRDAVKLARFHRSGDLTPIHVPDTSTEAMRDLERAREDAKNAELVARHHLSKFLLRQGLRYSKGGTWGTLHMAWIRAQQFVEEAHNRVLVDYIHAVERATDRVARLDKDIAELVESWSLKPMVEALQGLRGIRLLSAVVIVAELGSIERFATPKKLMAYLGLVPSEHSSGESTRRGGITRTGNQHVRRILVEAAWSYRFRPATGDRLKAQNRRISPSVIAVAWKAQHRLHDRYRRLLARGKNKQQLITAVARELSAFVWDVARQPQLLAA

SEQ ID NO: 229159 - protein, 454 aa, unidentified
MAKRQRKHTASLHILQPDAAGADIGAEEIFVAAPPDRDDEPVRRFPTFTRDLHGLADWLQQCGIRTIAMESTSVYWIPLHQILEERGLEVYLVNAQYVKNVPGRKTDVSDCQWIQYLHSVGLLRASFRPPAAICAIRSHWRHRENLIQMGAQHVRHMQKALDQMNLQIHHVLSDITGVSGQRILDAILEGDRDPVKLAQLCHGGAKSSQAKIAKALEGDYRPEHLFALKQSLAGYRSYQKMIADVDKEIEANLKGLPTAEQAKAELPERTKKHPYQRRHYEPTSFDLRKELYRIFGVDLTNVPGISAVTAHAILSEIGTDLSQFRNASAFASWLGLCPEKQISGGKVLYVRTRSVKNRVALALRLAAHSLHHADNYLGEFSRRMKRKLGPAQAITATAHKLARIVFHLLKTHEPYDETVFQKQEVEAQKRAESRLRRQATQLGFQVIPVAPKQA

SEQ ID NO: 229160 - protein, 339 aa, unidentified
MNTTTVGLDLAKNVFHIVALDAHGHELLKKRLSRGQVLKYFANLPACVVGMEACASSHHFGRSLGQLGHVVKLIPPQYVKGYLRGQKNDTNDARAIAEATRVPGMRTVTVKSVAQQDVQALVRLREGALQARTALVNRLRGLLGEYGIVAPKGVAALRRALPEVLGDGDNGLSAAFRRWLECERRQWLELDAHVAELTAELATLARQDDRVQRLQTVPGFGPIVASAFASVVGDGQQFRCGRGASAALGLVPRQSSTGGKTVLLGISKRGDRYLRSLLIHGARAVANAAKRKEDRLSRWVNRLRETRGMNKATVALANKLARIGWAILRYGTTYQAAVA

SEQ ID NO: 229161 - protein, 345 aa, unidentified
MRETIRIGMDTSKHIFVLHGVDAAEQPVLRKRLSRKQVLEFFAKLPPTVIGMEACGASQHWARELGKLGHEVKLMAPQLVKPYVARNKNDWRDAEGLCEAMSRPSMRYVPVKTAEQQAALMLTGVRDGLIARRTQLGNTIRGHAAEFGLIAPKGVDKIEPLLARIAQDETLAALARELFAALGRDYARLKAELGEIEARLMAWHRCDALGRRLAQIPSVGPITATMLTMKTPDPRAFRSGRHFAAWLGLTPKDHSTAGKTRLGKITRAGDEDLRRLLVIGATSVIQQARRGRGHHSRWLLALIKRKPPKLAAVALANKVARIAWKLMTTGESYDAAHMSPIPAVA

SEQ ID NO: 229162 - protein, 365 aa, unidentified
MLAESHDEEQIIARVAALDIGKAELVCCVRLPAQRGPKRLQEVSTHSTMTRSLTELASRLVELGVQRVVMEATSDYWKPVFYLLEAHGLDPWLVNARDVKHLPGRPKSDVIDAVWLCKLAERQMLRPSFVPPWPIRRLRDLTRYRVDLVAARTAEKNRVEKLLEDACIKLSVVASDIFGVSGRAMMAALIAGERDPHVLAQMARARMRTKIARLEEAFNGHFDDHHRFLLARMLDRIDSTEADIAALDNQIEAHLVPFAAAAARLDEIPGIGPVAAAVIIAEVGVDMSRFPTAGHLCSWAKLSPGLNTSARATAPPATATATWPASSARPPWWPAEPIPSSVPGIGASPNGEVTNAPSSRSGARS

SEQ ID NO: 229163 - protein, 340 aa, unidentified
MNATTYGLDVAKRVFQMYWVDAETGEIVNRKFGRDDLIQYLSRRPAGRVALEACGSAHWWARKIKALGHDVVLLHAKFIRPFVQTNKTDAADARAIWTAVQQPGMRTVAAKSSEQQTMLGQHRIRSLLVKFRTMQVNQLRGLLYEFGVSFRAGRNAGLAEIRSRMAEIEEAVPGSLMCCLKDQLKRIDELQKEIGQLEQHMSVWQKKESACRAISDVPGIGRLTATALVATIGDAKTFKSGREFASFLGLVPRQNGTGGKVHLGSISKRGDPYLRTLLIHGARSVLYHSKTPTPWLKAIQERRPANVAAVAVASKMARTAWAILARGQAYERDHVSMKPA

SEQ ID NO: 229164 - protein, 397 aa, unidentified
MYIVGIDIAKRKHEAAVIDGEGTVIIKPFSFTNNCSGYNRLLAMLAKAKLPLDEVSFAMEATGHYWLALFTRLQKEGFRVQVINPVQTNSIRSFYIRQAKTDPRDALLIAEVIRFGHFSESTLHPENIYELRELCRGRHAIVSMQADVKRKVVALLDQVFPEYETAFTNMFGDTSMAILQTCPTPKELSEMPLEELCHLIEVSSHKRFRMAKAQELQVLARNSFGFAMAGDVFSTMIRLYAKHLDFLKQQVREIDRKIAEIMDTLDTPITTITGIGPTLGAYILSEIGDISRFSSAAKLAAYAGIDPTMRQSGEYNGVRNRMSKRGSPYLRHAIWLAASSAVLHDPALKLYFQKKRDEGKPYMASVGHACRKMVSIIYAVMRDNKAYTPYIPNEISA

SEQ ID NO: 229165 - protein, 364 aa, unidentified
MPTEALRAVIRSKIAIGTSSGPEWLNELKVRITREGSTKMTKHITICAGIDTGKRKLDVAIEGRCEQLQVENTPEGHKVLVAWLRKYGVKRVGIEASGGYEQPVVAELRRARFVVVVFQPAQVRAYAKFHLQRAKNDKIDAALIASCTAAVRKIHAAPDPRLLPFAERLTMIDQISEDIARLKNRIESCRNAMIKKLWQQDIARLEKREKAELKVLVASIRKHRDLARRLELINSIDGIGLPTAVAILVRLPEIGRVTREQAVALAGLAPYDDDSGEQVGVRHIEGGRKRLRRAVYTASLAASFRWNRQLIQLYQRLIAAGKEHKQALVACARKMLIFANTVVARGTPWRDEPPVANASTSSVS

SEQ ID NO: 229166 - protein, 429 aa, unidentified
MNYTQNEKIEQVTDSTMVVGVDIGSQIHYARAFDNRGRELTKRIFSFHNDLEGFNSFNLWAETLKTENKKTAVLIGCEPTGHYWFAFAKYVNDHQKRLVMVNPFSVKKIKELDDNSPKKTDSKDPKTIAKLVVDGRYSIPYMPEGIYAEIRDLVYSRDRIMKQHNISANRIQRWLGIHFPEYLGLYTRFDAISGLAVLEKAPLPKDVIALGVNGIRKIWHDKKMRGRGVTEDRAKTLVEAAHNSVGLDGGIGTKSELYMLLEEHRLWTSQLEAVNKVLEEMILKVPHVEKLLAIKGVGSITIAGFIAEVGDIRRFDSPKQIQKYAGLELVENSSGKHKGRTRISKRGRRKLRKILYQVMVPLLARNKEFRGIYDYYVTRVKNPLKRRQAMVAVSCKLIRVFYAVLTKGVEYDRFKMMSDIHRKSDIIAA

SEQ ID NO: 229167 - protein, 355 aa, unidentified
MDSTKYVGMDVHKDTISIAVMNFAGKVVMESVLETKALTILQFIQGLRGSLLVTFEEGTWAAWLYDLLKPHVTKVTVCNPRKNALLKSGNKSDRIDAQKLAELLRNGSLSAVYHGENGLRTLKELSRSYLTLSKDLTRVMNRLKALYHSWGIACAGTQVYAPRHRLEWLSKITEVGVRGRAEFTYQQLDGLQALRQVVRRDLLAESRKHLATKLLRQIPGIGPIRAALLVALLQTPDRFRTKRQLWAYSGLAIETHGSGQYCYLEGQLRRVKKPVALRGLNRNHHHDVKWIFKSAAVKASSPTGPLHEFHEALLAKGMKPSLARLTLARKIAAITLTVWKKGVRFDAEHLKLQAA

SEQ ID NO: 229168 - protein, 343 aa, unidentified
MGEISMIGLDLAKNVFQVHGIDASGGVVVRRQLRRGAVEKFFAQLPPCLVGMEACGSAHHWARVIGRYGHEVRLMPPAYVKPYLKRNKNDGRDAEAICEAVGRPTMRFVAVKSVEQQATMAVHTTRALLVRQRTMAANALRAALGELGIVAAQGIRGLRELMARLETANAEIPELMRGTLLVLARHWQALDADERALERQITQAARADREARRLMEVPCVGPIIASTVMAKVADAKVFRSGRDFAAWIGLTGRDHGTGGKHRPGRISKRGDRMLRALLISGASGYLRHQKRRGVSDPWLRELLARRPYKVVMVALAAKTARIIWAMLAKGEKYRARASASAAA

SEQ ID NO: 229169 - protein, 380 aa, unidentified
MTEIQMAPIHVTTKNDRLYIAMELSNTKWKIAFGNGFKIRLKTIEARDLKSLELEIQSSRKRFGMADDVPIYSCYEAGRDGFWIHRYLCNLGVHNLVVDSSSIEVNRRYRRAKTDRLDAGKLLTMLIRYFNGETKLWSVLRVPEKEDEDARRLHREIERLKKERTAHTNRIKSLLVLHGVLMGIGKSFLKDIEKVVLWNGEPLPPKIKDEMIREYRRYELIQQQLQALEQEKKKVLKEESRSSKKVSTLQNLKGIGPVSSWKLVYEFFGWRLFKNGKEVGASAGLAPTPYDSGGSQSEQGISKSGNRRIRALMIEVAWYWLMYQPGSKLSQWFMQRYGHGSKRMRRIGIVALARKLLIALWKYLEQGIVPEGATVKAYYD

SEQ ID NO: 229170 - protein, 408 aa, unidentified
MGRAAEVVAPSSSIRTDGGCPVAQVNDLSRNLTAFDPISTLVVVVEMSKASWLVSGAVPGVERQPLKKLEPDATALLRLIERWRNEAVRAGRPISRIALAYEAGRDGFWLARWLIARGIEAYVIHSASVAVSRERKRAKTDRLDAAMLMRVFLGWLRGERGHCGMVAIPTMEEEDARRPSRERESLVNERSRITNRMKSALARLGVRGFKPHLRKAPERLADLRTAEGTGLPANIIEEFRRDMARLALVREQISSIEKTRAERLERAPDTGPHAMVRLLARVIGIGIETADMLVREILSRRLRDRRAVARYAGLTGSPDESGLKRREKGLAKAGNARVRRGLIQLAWRFLVFQKDSALARLYRMRTEGPSGARKTTMIVALARKLLIALWRLVTTGEVPDGVKLRPAA

SEQ ID NO: 229171 - protein, 337 aa, unidentified
MVYVGVDLHRKSSHVAVLAGDGELLASRRIASRPEEFLRVLGELEPGPVEVAFEATYGWGWFADLLADVGIPAHMAHPLATKAISSARVKNDSVDAKTLAHLLRTNLLPEAWAAPPEVRDARKLARTRISLARISSRLKCQTHALLADQAILPPMTDLFGHGGRAFLEDVGLRPIPQARLEANLRLIDLLSPEVAAADRELRTLFRTDPRIGKLLPIPGIGFTTAAVVVAEVWDVSRFPSPDRLCSWAGLTPTEHSSAEHTRRGHISKQGSRWLRWAMVESASRPSLKDPTLRRFRDSIARRRGSKIAKVALARRLLTLCYYALRDEGGCRAYPVPR

SEQ ID NO: 229172 - protein, 337 aa, unidentified
MQNNFQSPESVILGVDTHLDIHVGAVISQAGKLLGTRIIQTNQIGYQELFDWAKSFGVLERAGIEGTGTYGAALTRFLIKNSIYVVEVNRPDRSKRRLEGKSDPLDAENAARTVLSGSSKAIPKMQSGACEALRIISVARRSAVKARTQAINQLRSLLVSAPQDVRDKLWKSKPHECVAACINCEVSEYSPLRIALYSTLRSLAKRWGALTEELNELDESLDKLTRKYASNLRSQFGVGPQTAATLLAVAGDNPERLKNEAALASLCGVNPLPASSGKTVRHRLNRGGSREANNALWTIALVRMRSDPRTRIYVDRRTGEGLSTKEILRCLKTLHRP

SEQ ID NO: 229173 - protein, 341 aa, unidentified
MKNLFIGVDFSKEKVDVAIIFADGLTETAPRVFNEFKTTVSGYKQLVKWVEKNSYGIDLSLWLFCGENTGDYSKGLCNFLYGKGYDMWLENAKSIKDASGLRRLKSDRADASMIAEYAMRNHDKAVMYKPLSESLAQLRELFLYRQMVVRHRCSFQVRRGEKKIAMEKSPIKTMISQSGRHIVSELNKEVEKIDKRIAELIKSDEELTEVFTIVTSVPGIGTQNAICLMAYTDNFRRFNYDSRKISCYYGLAPFGKDSGTSVHSDPHVHYMANRQIKAMLTQAALAAVKFNPVMARYYMRLVERGKKKQVALNNVKNKLVHLVTAMVRNRQTFTPEYKISV

SEQ ID NO: 229174 - protein, 474 aa, unidentified
MNTNSTQTSKSIYSEKYFCGIDLASKVIQVSVTKPGEGSFDKALSKDEFTKFIKANNPEDYIYGMEACGDSNYWAELINTLCNDKAFIFPAKKCRSYNHGCKDDRGDARGVRDLLLTYFLSPDASTIHPCVIRDRQNRADMALLKSYGDNQSDITRNVRRLIAFLKEQDATLCYSYSMSPESTIKAATEYIKKLNKEEAQNNSFLISDIQTQSAIIAMLLKRRSNILMGFLKYFESHSECQYFMAIPGVGLLLAVGTHIITQGDFTRFKNARSFAAYTGFTPAHSGTGGKNKIAHMSDNGNPVLKTLIYEGANACTILQKHKNKKDKRVKISYGRHIAIDLWKIGINLKNPDIKEIVSHYDAELAFKITEKNTSTKLCKFKSKCNKANKTFERLSSTPAVTSWCQNNLLEQHKQDSALSPYLAEFKNKNQLIDLSDPEGPFRRQSATLVAYLVEHNEVRELEINDLERLDLAEW

SEQ ID NO: 229175 - protein, 445 aa, unidentified
MHYKRLLTLIDSVSSYLSVGLDVGADFTWMSIALPNGSFIGKPFKIVHSDPRSRDLAVAKIKEAQETYSLKSRCFLESTGIYHIPLLCFLRDKGFDCSVINPIITKNSTNINIRKLHNDKFDSKKAALVGLNVSLKTSILPDDSVVDLRNLVRDYYYFKDLQSAVALKLTAELKVSFPAYAKVFSKVTTQSSLKLLTAYPLAADMLAASKDDIVKIIRSTARFGEAYALRKYDAIIAAAQDAAVFGRALPSNAVRIRLYIDTYQEYQKHLDALLKALHETVERLQDTLIYDQICLLQSLRGIGFLSAVVLIAEMGDFKLFSSPKKLYAYFGLDPAVKQSGKLNGDKVHMSKRGSSLARRVLHMAALNNVKVDKRSGTPVNPVVYDYYARKCSGKKKPVAMGAVMHKICNIIFAMLRDNKPFEIITPEEHCRRFATEHPDKIRKAA

SEQ ID NO: 229176 - protein, 401 aa, unidentified
MVSDFMKGRYNLMKIFVGIDIAKLNHFAAAISSDGEILIEPFKFTNDADGFQLLVSKLESFDKNSIIIGLESTAHYGDNLVRYLVAEFYQVCVLNPIKTCQMRKNNVRKTKTDKVDTFVIAKTLMMQDDLRFITFFDLDMMDLKALGRFRQKTIKQRTRLKIQLTTYVDQVFPEIQYFFKSGLHQNAVYALLKEAPSPKEIASMHMTHLANLLKVNSHGHFTKEQAKELRVLAQKSVGANDSAISIQITQTIQQIELLDSQLEKIEAEMTDIMKFNDSVIMTIPGIGYINGGMILGEIGDIHRFSNPNKLLAFAGLDPSVYQSGNFQAKTTRMSKRGSRVLRYALVNAAWNVVRNNATFKAYYDAKRAEGRSHYNALGHCAGKLVRVIWKMLTDEVEFNLE

SEQ ID NO: 229177 - protein, 459 aa, unidentified
MAPRKPKQRRSKPTRPPQLAAANLHAAGIDVGAEAHYVAVPPSDDSQPVRCFAAYTADLRALADWLAQCHVTTVAMESTGVYWIPLFELLEARGFEVLLVDPQQVQKIKGRPKSDVHDCQWIQRLHTFGLLASAFRPADQVCVLRSYLRQRAMLLTYAGQHIQHMQKALTQMNLKLQHVISDITGVTGFAIIRAILAGERDPTTLAHLRDYRCQHDEATIARALEGNWREEHLFALAQAVALYDVYHQQITACDRQIEAYLQTFADHSDGQPLPPPSRPRKQGRNQPAFAVREPLHRMTGVDLTQIEGIDETTSLVILSEIGLAMSRWPTVKHFTSWLGLCPHQQVSGGKVLSRRTKACANRAATALRLAAAALHHSQSAVGAFFRRMKARLGAPKAITATAHKLARLIYTMLKHGTAYVRRGMDDYEQQYRDRVVKQMTRRAKALGYALVKTPEGAAV

SEQ ID NO: 229178 - protein, 316 aa, unidentified
MSAVSLFVGIDVAKDTLDVAVRPTAETWQVSNDDTGRATLVAQLTALAPTLVILEATGGFEGPLLAALAVATVPVVRANPRQVRAFAQAVGILAKTDRIDARVLAHCAEAVRPTPRPLPDAETRELRALLLRRRQVIEMLTAEHSRLGTAPRRIHEAIQQPIAWLEHQLTGLDDDLTRAVQASAVWQVQEAVLRSIPGVGPVLSRTMLAQVPELGTLGHKQVAALVGVAPFNRDSGTLRGRRMIWGGRAEVRAVLYMGTLVATRHNPMIKAFYERLLAAGKVKKVALTACMHKLLTIMNAMIRDLKPWQLQEVPIA

SEQ ID NO: 229179 - protein, 344 aa, unidentified
MDYYAGIDVSLEYSSVCVVDASGKVVREARVVSEPEALVGWFGSLGLELARIGLEAGPLSQWLYAAMKQAGLAVELLETRHVSDAFKAMPVKSDRNDARKIAQLMRLGWFRPVHCKSITAQEIRAMLTARKLVQSKLLDLENSLRGILRGFGLKVGKTTRTNFAGRIEELVKGHPNLQTIGQALLRARAVLLAEFNGFEKRVRAMSRLHDKARLLMSTPAVGPIVSLTFACAIDDPSRFTSSKQAGPHFGLTPKKYQSGETDYTGRISKHGDASVREALYEAAHIMLTKPIKRCSGLKSWAMRIARRAGTNKAKVALARKLAVIMLRMLKDNVPFNPAAKPATA

SEQ ID NO: 229180 - protein, 327 aa, unidentified
MIYLGIDISKARLDCTLLDPATDKRKTKAVSNDPKGFETLSAWLDKQGIAPGDVHGVMEATGVYHEQAALWLTDAGMRVSVVNPAQVRDFARGLAMRTKTDGTDSVALARYGALIQPQPWEAPPPEIRELKALITRLEALETDARRELNRREKALVAQAPALVRESLDNHLAALKQEIARLQQAIDDHVNRHPGLKADRERLLSIPAVGDKTANRMLAVLHSRKFRSADQVAAFLGLVPVEHQSGSSIQKRPRLAKNGDARTRAVLYMAAIVAAQYNPHVKALYTRLCAKGKTKMAALGAAMRKLVHLCFGVVKHQTVYQPNWLPGS

SEQ ID NO: 229181 - protein, 423 aa, unidentified
MEVIHERVAGLDVHKDSVVACVRIMSGGKAKRECRTFGTTTAELEALRDWITSWECTLVAMEATGVYWLPIWKILLGGAFEMNIANARHIKAVPGRKTDMNDAMWIADLAAYGLIRASFVPDEEFHELRTLTRTRKQLVRDQTSHVQRIQKTLTEANIRLDSVISDIMGVNGRRMIEAIIEGVRDPGKLAALGDRRLKATRKELHDALHGRLTDHHRFLLKLHLDQHDALEKTIRVIDAEVERRIARLDKQAKPAETPLSRLIELLVSIPGVSYLSAITIISEIGSNMSRFPTAGHLIAWAGLCPGQNESAGKRKRSRLRKGAPWLKTMLVQCAWAAKRQKNSYYRAQFYRLQARRGPQKAICAVAASILTAIYHILKDGVPHQDLGIDYFDKRKPEAKVKRLVAQIAKLGFEATLQPIAKAA

SEQ ID NO: 229182 - protein, 355 aa, unidentified
MSQEKYIGMDVHQATISVAVMDAAGKLIMECLLQTKASTIVEFIQGLQGTLSLTFEEGTSAAWLHDLLKPHVSRIVVCDPRKNALLKDGNKSDRIDARKLAELLRGNQLHPVYHGEHGVRTLKELGRSYLTITQDVTRVMNRIKALYRSWAIPCAGTTVYAPRHRAEWLAKITEPGVRVRAERLYQQLDLLQPVRLEARRQLLAESHKHSGVKLLRQIPSIGPIRSALLVALLQTPHRFRTKRQLWAYSGFAVETHDSGEYRSVRGKLQRNRERITVRGLNDNHNRDLKNLFKSAAVSASTRPGPLRDFYVARVEKGIRPTMARLTLARKIAAISLTIWKKGAEFNAQKLQRPTA

SEQ ID NO: 229183 - protein, 348 aa, unidentified
MKQVTTIGLDIAKSVFLVHGVDAAGQAVLRQKLSRSRVLEFFAKLPRCLVGIEACASSHYWARELMALGHEVKLMPAQYVKPYVKRGKNDAADAEAICEAVARPTMRFVGVKTPEQQSIMMLHRVRLILTRQRTQLSNALRSHLAEFGIVSPIGREGLDRLLTIVADTDDGRVPAEARASLEMLAVQLEGVKAQILANDRRIIASARATEVGRRLLEVPGIGPVLASAFVASVADPAIFKSGRDLAAWIGLVPRQNSSGGKERLGGITKAGNGYLRQMLMVGAIAVIRYPQRNSARRPWLVQLMGRRPTKVAAIALANKTARTVWALMSSGERYRDPQAIPAAVSATL

SEQ ID NO: 229184 - protein, 357 aa, unidentified
MKKLFIGIDFSKEKLDATIILACGMNEIGSREYGCFPNNNTGYRKLCNWVKNNAWDTIPGEWLFCGEDTGSCSIGLSKWLYGKGYDIWIENAYAIKHSSGIQRVKNDKADSAIIAEYAWRQQDKATPFEPLNESLAQLREVFLYRHKLVGQRVAMELRKEDKSQSNKSKAISFINRKSKHLIDEINKAIAECDKMIDNIIEADEELKENYAIITSIKGVARQNATCMLIYTNNFKKFGYDPRKIACYYGVAPFGKQSGTSVNTPAHTSHFANKLIKSLLGQAAHIAKIYNPEIREYYQRLINKGKKPQVALNNVKNKLIRIIVALVRKKVPYDQNTYKYYEEREVVKEKKNEKLIYC

SEQ ID NO: 229185 - protein, 343 aa, unidentified
MHYVGLDVHAKRSSLCILNGDGKVVKREMVHGPWPAAVERLREVGASAGGPLSVCYEAGCGYGPLHDALSPLAAHVAVAHPGALRLIFKAKKKHDRVDSDKLATLLYLGQVPAVHVPSADVRQWRKLIELRQSLLAGRVREKNRVRAVLRNHAVAVPKRPGLWTKKGAAWLASVRLPQGERLAVDLASEAIASANARLARGEAELAKYAAAHPGVALLMTIPGVGVRTAEAFVAYVDDPSRFARVRQVGSYFGLVPTLDSSAGRDRRGHITREGPGTVRKLLTEAAWQSVWRDPASRALFERVTRGKADRRKIAAVAVAHRLCRVMAAMLRTGEAYRAARASE

SEQ ID NO: 229186 - protein, 421 aa, unidentified
MKKIKPKKTRAVNQNVLIATVDGGKDTHYGYYRCPDGTEGRSLPFWNNGRGFQEFWERISAAARTHGLEEIIIGFESTGPYMEPLAQFLRTKKGIRLVQVNPMHTKRLKELSGNSPLKTDRKDPKVIADIIELGHALTVVIPEGPAAELRRLTQARERTIESRTRLFNQLQCLLVLSFPEFLQVMKDVKTASAQHLLRHYPTAQDIITLGEPALAALLRKVSRGKLREDRARALFEAANESVGVREGRSSMLLEIGLMLDTIATYDRFIEGVETEMLRHLEQIPYSHLILSLKGVGPVTAAGLIGEVGDFTKFNTISEVMKLAGLDLYEVSSGKHRGKLCISKRGRPHMRKLLYLAALSTVRKGGVMHEWYKRALDRGMIKTKALVAVSRKLLGIIFALVRDHSVYQENYTKLNLILQEAA

SEQ ID NO: 229187 - protein, 339 aa, unidentified
MELYAGLDLHSRNTYIGIMDKAFNRVFKKRVPNHLERILQTLDPFRDQIKGFVVESTYNWYWLVDGLMDAGYSSAHLANPAAIKQYEGLKYSDDQHDAFFLAQLLILGILPQGYIYPKKDRPVRDLARKRMFLVQHKTAHILSLQSLIARCCAMKVRANDMRSLTVKELEGWLKEEYLVLSAQANLDSINFLKQKVKQLEKAIIQKVKLNKEFKYLLTVPGIGNILAMTIMLEVGDIKRFPKVGNFTSYCRCVPSRRLSDGKSKGSGNRKNGNRYLSWAFTEAVHLGRRYNERFRRYYNRKVAQANTSLATKALGNKLARICYYIMRDQVPFQEELFGH

SEQ ID NO: 229188 - protein, 343 aa, unidentified
MQTITTIGLDIAKSVFQVHCVDAGGNVVLRRQIKRRYMLAFFQKMPPCLVGIEACASAHHWSRELRALGHTVRLMPPAYVKPYVKRHKNDATDAEAICEAVTRPNMRFVATKTPEQQSCLTLHRTRHLFIRQQTSVINAIRAHLAEFGIVAPVGRNGVEQLLGVVADGSDKRLPEVARACVTALGNQLRVLKSQILEFDRRITAWHRSNEVSKRLDEIPGVGPALATALVASVADPKAFRSGRDFSAWIGLVPKQNSSGGKDRLGSISKRGDRYLRSLFTTGALAVIRYAKIHGTKHRPWLTALLARRPTKVAAIALANKIARMAWAMMAKGERYKEPAALAA

SEQ ID NO: 229189 - protein, 309 aa, unidentified
MAMMTVNTELGIDVAKDWLDISNGKDVVRIKNNQQAIKSYLKQLGTTACISIESTNTYHELFVELAFLAKHTIYIVDAYRLSRYRDAVGIRAKTDTNDAHLLLRYMRSEKQHLTVFEPIPKAVKRLNRLLKARAKLAKSKASIGLSLKGVAELAQTCKALMKRIEQAITLIDKRIQACIKDAGYKEDYMRCLSIPGIGPANAAALVAMFHRGHFRKSDSFIAFIGLDVRVRESGYYKGRRKLTKQGNPEIRRLLFNAARAAARTETWNNYYMSMRARGHSTTATAVSLSRKIARLAFALLRDQSEFRTA

SEQ ID NO: 229190 - protein, 337 aa, unidentified
MLFCGIDLHSNNCFVVISDDDDRVLYSRRLPNNLTEICSALGPYQSKLFGVVVESTCNWYWLVDGLIEAGYSLHLANTTAIKQYDGLKHRGDESDARHLAHILRLGLLPEGHIMPRSMRAVRDLARKRMQLVQQRTVQILSIETCLEQQTGGRITSNDVKQLTDAAIDKMAIGAVEAIGMKANVAVLQALQTQIDGIEKVLAVHCRSNPGYRLLKSVSGIGPILASVILLETGSIERFADVGNYASYCRCVGSIHVSNGKKKGEGNTKNGNRYLAWAYVEAANFAIRYCEPARKFYQRKKAKRNGIVAIKAVAHKLARACFHMLKTGEQFSIERCFT

SEQ ID NO: 229191 - protein, 354 aa, unidentified
MPARSMAQSVIVGVDTHKDSHVAIAKDEMGRHLGELVIPASPSGYRDLLSWAKGYGEVASFGVEGTGSYGAGLFRHLASEGQLVIEVNRPNRQTRQRNGKSDPADAEAAARAVLSGEAAVRPKAADDVVEMIRVLRIAKRTAIKARTQAINAMQAILITAPEDLRQSLKGLSATRLVRTCARFRITGASDPLGATRMALRSLARRHEALEAECSSLQAELEQLTTGAASGLKGLYGVGTDTAGALLVAAGDNPERLRSEAAFSALCGVSPMEASSGKTKRHRLNRGGNREANQALWRIVMVRISRKHQPTMDYMARRTAEGKTKREIIRCLKRYVAREVYAVLVAGESGASAVA

SEQ ID NO: 229192 - protein, 318 aa, unidentified
MTKHIFIGIDVSEDTLDVWIHPLAQYKAFENNTKGIKELITYIEPLSIAKIVVEATGGLEYKAAHALQKAGYLLAVVNPSFTAAFRTMRGKFTKTDTTDAHMLALFAEKMDPAAKTVPNALEKELKELIARRSQLITMIVAERNRLRRAANSKIAESIKKTIAFFITQKQEVEELMLLHIQEVERYRNVYDLLITVPGIGSVTAITIIIELPELGMLNCKQVASLVGVAPHLKESGKTKFKARTKGGRKSVRAALYMSAITSARCNPAIKPFYNRLVKEGKAKKLALVASMRKILIIINSMIKEQRPWQNEYKMKNLA

SEQ ID NO: 229193 - protein, 354 aa, unidentified
MPALWPGVERQPLKKLAVDESALLKLLNRWREEAEKAGHRIERIAIAFEAGRDGFWLARWLRARDIEAHVIHASSVAVSREHRRAKTDRLDTELLKRAFLGWLRGERDHCKMVAIPTLAQEDAKRPNRERESLVGEQSRIVNRMKAALARLGIRGFNLKLKKAVERLDGLRTPEGEPIPPNTLAELKRDMERRRLVRSQIRDIEGTRLERLEQALGEGPHVMVRLLARVIGVGVETADMLVQEVLSRNLRDRRAVARYGGLTGAPDESGKKRREKGLARSGNARVRRGMIQLAWRFLMFQKDSALARWFYARTKNAPQTRKTMIVALARKLLITLWRLVREGVIPEGIVLRPAS

SEQ ID NO: 229194 - protein, 353 aa, unidentified
MDSSAAAGTEGATAVYVGLDYHAAFVQVCVLDGHGRQLVNRRCPNSVEGVAAAVTPGWVVAAAALESCCGAADLCAALREHAGWPAVLAHPGYVARMKRSPDKSDFSDAKMLAELCRVGMVPTVHLPSTDTRDLRTLVRLRADLVKRVRAVKTRLLGLLRLHRVKEDPGVGGRWSKRWLNWLRSGPDGLSPDARFAVEMELGELAQLRERTAMVEGRLQERTAHDPVVQRLLGIKGIGPVTAWTMRAVVGDFSRFASGKHLARFCAVTPRNASSGTRVGDAGLIRAGDPLLKTVIVEAAQRLRRYDPRWRTLSQRLAGRGKPTSVIVAAVANRWVRSIFHQLKRPAQEVPAAA

SEQ ID NO: 229195 - protein, 343 aa, unidentified
MDIIRVGIDLAKNVFQVHGVDRSEKPVWRRKLTRREWLDVLQRTVPLRAVIGMEACSGAHHWARRLQVIGYTVKLIAPQFVKPYVKSNKNDANDAEAICEAMSRPGMRFVAVKTIGQQDVQAVHRVRAGLMEQRNAKANQIRGLTSEYGIVAPREILQLRRAVPVWLEDVNSGLSDRFRRLLTGLWEDLRSLDDRIRELDREIAAIAASDPVARPLQQLRGVGPMVATALIATVGDARQFANGRQMAASLGLTPRQNSSGGKERLLGISKRGDAYVRCLLIHGARAMIQMARRRTDALSLWVMRIAGDRHPNIAAVALANKTARIAWAMITRETDYQPELAAH

SEQ ID NO: 229196 - protein, 385 aa, unidentified
MTNQIQAPRFVPRDYDVFGGLDVDKKSMSVVFTDHAGSQRALRMAHQVTPLVNYVRKHFAGQRVAFAYEAGPTGFGLHDELVRRAYTCVVVAPSKVPRAPGERVKTNRLDSRKLAESLRGGQLHSIHVPSGVYRNLRHLVQMRDTHVRQLTSSKLRIKSLLLYEGIAFPEEHEKWTARAMRELQTLPCSETVRFKLDDLLDTLHFHFQAAARATKQIRQYCLDDPELQQSIDLLLSLPGIGWIVGSHLVARLGNPREIKNGRQIAGFLGIVSSEHSTGDKQNRGEITRSGDSRLRNKLIQSAWTAIKRDPELRAFYRRIYQRHPKKVAARKAIVAVARKLTNRIYVVLKEQRPYVIRPDSSIAPLTAEETVGPRERLDAAQNDQS

SEQ ID NO: 229197 - protein, 486 aa, unidentified
MAKRKESTFERLQKGQPLNRRQRRELASRLSSADPGLEIVNRHAAGIDIGNESHYVAVPAGRDEQPVREFGSWTADLERMAQWLRACGIETVVMQSTGVYWMAVYDVLQSHGLQVNLVDARGTKNLPGRKSDVQECRWLLKLHTYGLLRSCFLPPEPIRRLRTVWRLRDRHVKEAGRSVQHMQRALTEMNVQLHNAISDLSGATGQAIIRAILGGQRDPVQLAALRDPRIQARQEELVQSLRGNWKEDVLFELQQAVEAYDFHRQQMAQCDARLQQYLAALPSREPIPEPSPAEAPAASGKNRPHRARRKARKPKGNQPAFDLESEFQRILGVDATRIDGIDVITVHTVLAEVGPDLSAWKTEARWSSWLNLAPKRDVSGGRVIRHTREHRTNPAGNAFRMAAQSLIRSESYLGARFRYLRAKLGGIKAVKAMARVLACLFYRLVTKGQAWVDRGTAEFESRRQQREFATLQRKARDLGMKLVPTA

SEQ ID NO: 229198 - protein, 418 aa, unidentified
MTHPKMQYTYVGIDSHKDTHTAVFIDCFFEKLGVIQFDNLPANFGDFLQQAQAYLIPGTTFMFGMEDISSYGRTLAVHLINQGQRVKHVNALLVARERKNQNIVQKTDAVDAECAARVLLSKYSELPDADTQDIYWVLRSLVTRRDFLVKNKSATKSQLHSLVMQHYPNYSQFFDNIDGKTSLAFFERYPSPGLLKHTIVEELTAFLQHTGNGYYTLDFARHMLATLQDTAVQHQEFRDSVIQSTIRQIRFNTDEINQLDEAMAVFLKKFDCTLTSMNGIDIVTAARIRAYIGDIKKFSTPAKLARYAGIAPVTYASGKKDMQYANQRGNRLLNSLFYNLAVRVCFSYGKSRKVVNSFFFDYYNRKISEGKTKRQSIKCVERRLVSIIWTMLTNNEDYVNPPMFDLPEVIEAVKVQEV

SEQ ID NO: 229199 - protein, 356 aa, unidentified
MYGLKHQMEKRSMEHFAGLDVSVNETSVCIVDEMGRIIREVVVASEPDALLAVLKSDVYHFKRIGLEAGPLSQWLYSALAEANLPVVCVETRHMRAVLKAQINKTDRNDARGIAQMMRAGLYRPVHVKTLRSQKLRMLLTHRKLLQSKAIAVENDLRGTLRNFGLKVGMVGAVRFEARIRELVKDLPDIAILVEPLLVVRRTLREQLGILHRHLLTIARDDEVCRRLMTIPGVGPVVALTYRATVDVPARFRTSRAVGAVVGLTPCKYQSGESDRTGAISKCGDDMMRVMLYEAAQILLMRSTQWSWLKAWAMQIARRRGMKKAVVALARRLAVVMHRIWVDGTTFRWTREEAAAA

SEQ ID NO: 229200 - protein, 351 aa, unidentified
MIIIGLDYHPSFQQIAFADTETGECGERRLLHGNQEAEGFYRELKNRGVGVRVGMEATGHARWFERLMTELGFELWIGDPAQIKAKRVRKQKTDRQDAQLLLTLLIENRFPKVWIPSPENRDLRQLLWHRHRLVQMRTRVMNQLQAVAMNEGVRRKKGLWSKSGRAQLESFLLPSWATRRRQDLLELLDRLTPKIAELSTAIEQEGKKRPEVVRLMTHPGVGPLTGLAFALIIGPPERFHCGKQVGSYLGLIPCEDSSAGKQRLGHISKQGNSLLRFLLVEAAQIAVRDDPNWRRKFLHLAMRRERKIAKVAMARRLAVRLYWMLRKEWDYQQLLKFGSHAGQPETGHGVQ

SEQ ID NO: 229201 - protein, 432 aa, unidentified
MLDSAYNNIPRHHQFNDRRHGMEILYGCCCGLDVHKDSIKANLIRNGFEGMEDVNEIKSYGTTTGEILKMADWLRESRCSHVAMESTGVYWKPIFNILESEFEVILVNARHIKNVPGRKTDVKDCQWIAQLLRHGLLKPSFIPPTPVRELRDLTRQRKKLIQERASVANRIQKVLEDANIKLSSVASDVLGKSGWSMLESIAEGTSEADKLAELAIGRLRAKKQELRQALEGRVTDHHRFMLKQLMDQMRFMEKMIGSFDQRIEEHMASFFEQAPLMNAIPGIARRAIENIIAEIGPDMNQFPSDRHLSSWAGMCPGNNESAGKNKSGKTPHGNKWLKSILVECAWSASHAKNTYFAAQYRRIASRRGKKRALVAVGHTILVTIYHVLKNNTSFVELGNDYFDKLNSNRLERYYIKRLERLGYSVSLERNIA

SEQ ID NO: 229202 - protein, 339 aa, unidentified
MTELKLIAIDTSKHIFTLHGVNERGDPVLRRELRRAQLEPFFRKLAPTDIVLEACGGSHHWGRMLTALGHRVRLIPAQYVKPFVKRGKNDRIDAAAICEAALRPSMHVVPVKPLEAQAAAMVLTVRETLVKQRTQLINTIRGHAGEYGVIAAKGTAHIAALLERIAADPAIPAAAQAMFVVLGRQLDSVSEEIATLDRRLAAQHRADPVSRQLAEVPGVGPLGALTLSLTVDAAQFRSGRHFAAWLGLTPKQNSTGGKPRLGGISRQGNERLRQLLVLGATAVIRQARPGSRLASAWLMGLLQRRPKKLVAVALANKMARVVWAMMTRGEAYRPTAAAA

SEQ ID NO: 229203 - protein, 316 aa, unidentified
MAMPITEITLGIDVSKAELVIYDWGSEELTRIENQSDAIKTWLEALHGPVRIAIEPTSDYHLEVVAQLHAQDLAVYLVNPRLLAHYRKAVGERNKTDPADASLLARYLAHEATSLRPFKPQCARAQRLWALIKRRGVVAGTRQKIQQSFNNIGLSTKALMREVRALTACIDRHILALIRELGWMAEYHRCLTIPGIGPANAAALTAAFHRGAFAGSDAFISFIGLDIRVRESGNFKGKRKLSKCGESEIRRLLFCATQPARFYHRFDSYYLKQLDKGLSKIAAKVCLARKLARIAFALLDKKQSFEKQEIAYSQSP

SEQ ID NO: 229204 - protein, 375 aa, unidentified
MKEKLRFLGLDVHAETIAVAVAEPEGEVRSLGTIPNRAESIRKMIKKLGPAEKLRACYEAGPTGYVVYWQLAELGIQCEVVAPTLVPVKAGDRVKTDRRDAEKLARCYRSGDLTAVWVPDEGSEALRDLVRAREAAKQDQMRARHRLSKFLLRSGQRPPTGVRPWTRPYLIWVAQLRFTQIAQEATRQDYLHEIEHMRERVARLEQAIMEAVKLASPALQQVINDLQALRGIADISAVTIAAELGQVSRFGSARQLMGYCGAVPSEDSSGKRIRRGGITKTGNAHLRRIVGEAAWSYRRPPGIWYGLRRRQESISEEVKEIAWKAQHRLHKRYMKLGAAGKPQGKIITAVARELLGFIWAIGTRAETTVSQRAAA

SEQ ID NO: 229205 - protein, 324 aa, unidentified
MQHEPLTDLALPIAGVDVSKGRLDLFVDTIDRRLCVPNDDAGVASLVALLREHKARLVVVEATGRYHRRAAAALLEAGLEVAVVNPAHARDFARAAGRLEKTDRIDAEMLARFGRAMGPRAAVKTPENQAVLGDLVSRRRALVQVRVAEANRAHDQLPKLAAAQSRKLLRLLEQQVEDLDREIARLVEADDQWRGKAEVIDSVPGIGPDTANQLVAGLPELGSLNRQEVAKLVGVAPLNCDSGRYRGQRKIRGGRADVRSCLYMAAFNARQKCDRFRRYFEGLMARGKLYQVAMTACMRKLLVVLNHMVKTNTHWGQNLHGASA

SEQ ID NO: 229206 - protein, 411 aa, unidentified
MKIGTTETISCVGLDCHRNFSSVTARDSAMKVIWRRRLDHRNRLKLHQELSSWPRGMPVILEGTFGWGWIGWGWMSDELKRAELDPHLSSSTKVAAWRKARNMPKSNKRDADLLSELWGQQPRWWEVWCAPPEVGDLRELLPQRMSLVQMQTRLKNQIHATLHRHGLICEMSDLFGRAGRAWLSAMLADPATPLRETGRSTLRSYLDLLEQVRMRVAVATRQFRWIVRKDPAARRLMTLPGVSTILGYTILAEIGRIERFADGRHLSSYSLLAPMADDSGDDHPDQAPIGRHVGRMGRTTLKWAWIEASRSAVRKSPRMRVLFDRYTQGGKYNRNRGYIAVAHQLCLIGYVLWKKNQDYQETPPPRPGSRQQVQLENTDGQKPKSRRLKIKEDSRPGTGQPQAAMATQVAQ

SEQ ID NO: 229207 - protein, 337 aa, unidentified
MTIIRIGLDTSKHVFQVHGVEESEQPVLRRQVRRSEMEKFFGGLAPTRIGLEACGSSHHWARVLRGLGHAVVLLPPQYIKPYVKRGKNDAIDAAAICEAMSRPGMRFVPVKSAEQQGALMLLKVRDLLVKQRTMLINAMRGHAAEFGVVTAKGPVKLSELVQRVHAAEAGVPGLAREILKVMSRQLGALEAELRGLEARLMEWHKADPVSQCLATQPGIGPIGAVSFALKVTDPAGFRSARHFAAWLGITPKEGSTGGRHRPGRISRQGDEALRKLLVLGATARIRFAKAGSASPWLLNLLARKPKKLAAVALANKMARILWAMMVSGETYRHPTEA

SEQ ID NO: 229208 - protein, 346 aa, unidentified
MKTLYQKKKLFGAFDLHSNNNYLAIIDEEDNRIYKRKLPNIPDVILAELEPYRDNLVGLVVESTFNWYWLVDLLMDEGYKLHLANPARIQQYKGKKHVDDNHDAFWLSHILRLGILPEGYIYPKNERPIRDLLRKRGHFVKLRTSLINSLQGIISRNCGCKLGGNKIKAVKVDNVSPLLEGQDDLSLSGAVSKETIDHLGRQIRKVENAVLGRVKLKKEFAKLLTLPGIGNILALTIMLETGTIKRFPKVGDFASYCRKVPSNWTSNGKKKGKANDKNGNKYMAWAFSEAAELSRRFDEFARRFFNRKSAKTNRMVAHKALACKLSRAAYIIMRDHVEYDPDKLFA

SEQ ID NO: 229209 - protein, 368 aa, unidentified
MIERVHGIDRHKQFSTISVLNRRGEEVQFIGCCRELGKYVQGLGSSEAVVLEASTGSFSWADQIEARGAKCFVMDPRKFGIIKDSWNKTDKSDARNLAKALWVHVVTGEFGIPTVYKPTEVVRELRKLFAQYCLLNRQIATHKNNAQAIFVENGIELKKELKCRLFAAESGLEVLKEMNVSAASAVCLELTLQVLRKVEEAKERLATEILLAGEPLKSQVELLISIKGVTPLIAHAFLADLADVRRFRTLRKMNAYLGLVPRASNSGGKCRPGHITRESRKLTRTILTQCVHHVAASSESLDRYYHELREKRGTGRARIAVIRKLCGMMMRMLLSGEQYRWMDRGLYEKKLRQYERVLKRAKEERPAA

SEQ ID NO: 229210 - protein, 375 aa, unidentified
MKELIRIGLDTSKSVFQLHGVDAGEQPVLRKKLRRSRLLDFLRKLPRTRIGIEACGAAHHWGREFAALGHDVLLLPPQLVKPYVARNKNDAADAEAICEAMSRPRMRFVPVKSVEQQAALMLVGMRDQLIARRTQLSNMIRGHAAEFGVVAAKGHEKIKPLLTRIAAHEGVPELAKQLFATLGEDYAGVTARLGTIEAKLVTWQRGNEMSRRLAEIPGIGPIGATLLVMKVIDPKAFRCGRDFSAWIGLTPKDHSTAGKKRLGVITCAGDEALRSTLVVGATAVVQQINKGRGHASPWLIALAKRKPAKLAAVALANKSARIAWKLMVSGERYNSALAATAGRRAPLTRGSAARPTVAARRTPRNPSREAATIEA

SEQ ID NO: 229211 - protein, 337 aa, unidentified
MEYFAGLDVSMAETRVCVMDRDGAVVFEAKVPSAPADIAAALAQAPACGRIVFETGRMAPVLYHGLSQLRLPIVCIESRQAYQALKSLATHKTDRNDARGLAHLARTGFFKPVHVKSLPAHAIRSLIIVRKKLVGQRVTLENQIRGLAVVFGVQLPRALSSAFIRRALQASDGIPGLSAAMRGLAAARSAVLAAVVAIDADIRRMVRASDACRRLMSIPGVGQLTALAFTAAIDDPERFRRSRDIGAYLGLVPRRYQSGEVDYTGGISKCGDRRVRTLLYEAANVMLTRYKGSLKLKDWAFAIAQRSTMRKARIALARRLAIIMHAMLRRGTEFQPA

SEQ ID NO: 229212 - protein, 359 aa, unidentified
MRIIGCDLHARQQTLAMLDTVTGEVVNRTLMHEGKEVREFYAELPHPVLVGIEAIGPMQWFLNLLEELGIECQVGDATKIRAAEPRKQKHDRRDAQLILKLLVEKRFPAIWRPSQELLDLRALLLHRHQWVRLRTQVQNALQAIALANGLRRGPSLWSYDGQAKMAFLPLPPHTSYRRSALQTMYRKMDEEIEKLTAQVAEQVEHRSGAQLLMTHPGVGPVTALATDVFLGDPERFADGKALASYVGLIPGERSSGRRRRLGKITKQGNPLLRFLWTEAGVHVVRRDPGLKRFYRRKLVQKGLGKARVAVARKLGIRLWIMLRDQIDYEEFCRRGQKYCGAACAGMLGTRLVNNHRPVD

SEQ ID NO: 229213 - protein, 348 aa, unidentified
MKVLLGVDPHKASVAVAVVDEAKGELVERATFPQNRAGLRSLERWAKRFPERRWAVENAGGLGRHLAVRLAAAGESVVDVPSKLSARVRVLSTGNARKNDGVDALATALAAWRHERLAAVDPEAASEVLRLLSERREDLVAERTRALNRLHGLLRDLVPGGVAGTLSAHRAARILRGIRPQGGASASLRRRLASEILRDVRTLDRKIADLNERIEAEVEASGTTLTEIFGVGSILAAKIIGTVGDVARFPTKAHFASYSGTAPVEASSGEVVRHRLSLAGNRHLNNVLHMVAVCQARSDSRGGAYYRKKIAEGKSRKEALRCLKRRVSDAVFKILQTDSQEAPSRRAA

SEQ ID NO: 229214 - protein, 311 aa, unidentified
MIKDTIGIDISKAHLDAHRLVSGEAKQFTNSPTGFRALRRWIGADMPELVVYEATGAYHKALERAFAGRLPLVKVNPLQARRFVQARGTRAKTDAIDARMLACMGAALDLEADMPADENQHDLKELQVARMALIKDRTRLKNRSKTQTLVLLKRQTKARLDQIERQIEALDDELKSLLRQCPQRARKHDILRSIPGLGEVAAMAILVECPEIGTLDKKQAASLAGLAPMTRQSGQWRGKAFIQGGRKHLRDALYMPALVAARFNLDLKHKYQAMRKAGKPAKVALTCLMRKLIELANILIKQDRKWTQKNA

SEQ ID NO: 229215 - protein, 340 aa, unidentified
MEDVAVVGVDLAKSVFQVHGIDAQGQVVVRRRLSRLKLLAFFERLPRCLVGMETCASANYWARELMGLGHQVRLMPPQYVKPYVKRSKNDASDAEAICEAVTRPTMRFVGVKSSEQQSVLVLHRTRLVLTRQRTQIGNAIRAHLAEFGIVAPVGRLGFDRLVTVIADEDDERVPALARACLAMLVEQHRLVLSHMLETDRAIRSHSRASELGRRLQDIPGVGPLVASALMATVPDPHVFKNGRGLSAWLGLVPRQNSSGGKERLGGITKAGDTYLRKMLFVGAMAVIRHAERYGTRKPWLIKLLSRRHPRIAAIALANKIGRIAWALMTSGERYREPVIA

SEQ ID NO: 229216 - protein, 293 aa, unidentified
MVYIGCDQHKQFCQLAVLNESGTLVEEKKFYHRDPNALREYFASLPPNSQMAIEASGFESWLADFAQELGIRVTLSHPLKTRAIAEAKIKTDKVDARTLAKLLQTDFLPPAYLAPPEIRRRRYFLRFRLCLNRYRSSLKNRVHSLLHHLGIQPPAVTDLFGVCGRQFLDSLELEEGYREALHGYLALLDMTEARVNCLKKRLAAYVKESPEAQLLQTIPGIGVLLAQVILAEIGTLARFSSPGKLSSYAGLVPSLHQSGQTLYHGPCPQQGNKFLRWALVEAAQTAVRKDPLL

SEQ ID NO: 229217 - protein, 339 aa, unidentified
MKIMRIGIDLAKNIFQIHGVDEQEKVVLRKQLRRNQMLAFFAQVPPCLIGMESCGGSHYWARELRKLGHDARLIAPQFVKSYRRNEKNDSNDAEAICEAVGRPNMRFVPIKDEEQQAVLTLHRARALLVSERTALVNQTRGLLMEYGIVVAQGVGRLRAALPGILEDGDNALPPLAREVFADLYERLRVLEAHIGEYDRRIARLAREMAPAQRLMQVPGVGALTATALVATVGDGRLFKNGRQFAAWLGLVPRQYSSGGKARHGRITKRGDVYLRTLLVHGARAVMRHLARHDDARSRWVQALKERRGFNKAAVALAAKHARILWSLLAREAEYQPLAG

SEQ ID NO: 229218 - protein, 444 aa, unidentified
MKALPVLDSKAAAIDVGSERLHVSIAGDMPKVFGTLTGELETLREWFQQQEVRTVAMEATGVYWLYLYEVLEAAGLEVVVVNGRHVQNVPGRKTDMADCQWLATLHAHGLLRGGFVPPSEIRELQDYQRLRADHIIGAASQVQKMQQALERMNIKLHDVISDLTGVSGLKVVRAMVKGERRPGELLSLCDEQIRKKKSEAVRESLRGCWKKEQLFALRQGLELWEAYQQKISDCDREIQMLLQQLADANDSPGSSGLIGPVQLAPLKVTGKNAPLIEQFQELLARICGGRDATRIPGLGTYSVLQLISEVGTDMTAWKTEKHFVSWLGLAGGRKQSGKRKGSIKAYRNRAGRMFCAAARSLAKTVDKALGGFYRRLRGRVGGLVANVALARKLALLFYRLLRHGADYVEKGLKAYQAKVLETERRLLLKLAQKQGFTLVPALNK

SEQ ID NO: 229219 - protein, 346 aa, unidentified
MLHVGLDLSRKRVDVCLISSEGELIDRFRAPTDRDGLHGLARRLEVYGQPVRGVVESMNGARFVHDELVGHGWEVLVADAQKVKGLAPLACKTDKIDARVLAELSFRDLVPAIWLPTPELRAERELVRYRLHLVKHRTTLKNRIHSSLIAFGYHCPVSDLFGVAGRQLLDSLEFPEPWKGNVKASLVLVDDLDRRIDEIARRLRRSGADHRYVPLLMTAPGIGWINGYSIASEIGDIGRFSTPTKLVGYTGLCPRVKQSGDMDARGPLSKHGPRYLRWGLMEAALNAHDHPVFAERYQTTKRRLGRQRGAKIAQIDLARRLTEAIWYMLTRNQPFAPAGALFRLAA

SEQ ID NO: 229220 - protein, 433 aa, unidentified
MKVMYERVAGIDVHKEMIKVAIRSPGEKPWTRKTEILEYRTFYGVLQQMAADLRRRGVTHVVMEASGVYTEPVYYALCEQDFTQVAVINPAHAKALKGHKTDAKDCARLAELFECGLLRGSYIPAPALKEVRDLTRYRMKTVQARTSEIQRLSKSLESAGIKLGSVASDITGVSATAMIEALIDGERRGGVLADLAKGRMRTAGKLADLSMALAGRFTGHHALMCRLHRDRIAGFDSAVAGLDERIAGGAARWQRETGLLTSVPGFGDVVAWAWLGEIGPAPHQWFSSHEKLASWVSLCPGNNISAKKRKHGRTGDAGTYIKPMLIQAAWAAIRVRGRLQARYNRLVRRFGGDKNPGAKKKAITAIAHTLLKIAYQVLKTGTPYQEPGADFYTRRESPAARQAFLERQLQKLHPGCTITITISPPEAALTPGA

SEQ ID NO: 229221 - protein, 270 aa, unidentified
MATITLIGIDIGKHSFHLVAHDVHGNILLKRQFGRHTLIDFLARHPPCRIVMEACCGAHWLARKLAGFGHTVQLIAPQYVRPFVQGNKNDFLDAQAICEAASRPTMRYVAVKSPEQQAQSALHRLREARIRERVQTGNQIHALLLAFGLALPQGVRGLQQAHVLLREHDAALPEGAWRVLEKQLQHHDLLLQEIETLDREIAAQAKQDDVARRLMTVPGIGPITASQLAADAGNAKGYGHARDFAASLGLVPRQHSTGGKAKLLGAVDVW

SEQ ID NO: 229222 - protein, 312 aa, unidentified
MQVTTIGLDIAKNVFQVHAIDTAEKVVVRKQLRRSQVVEFFKALPACLVGMEACATAHYWARELTKLGHQVRLMPAKDVKAYVKRNKNDAADAEAICEAVRRPTMRFVQVKSAEQQGRLMQHRTRDLLMRQRTQLINALRAHLAELGIVAAQGNAGLKELVKIIAGERDARLPVDAHASLVVLAAGLHAVQTMIGSIDKRIVIEHRSNEASKRLRSIPGIGIVGASAIVATVADPMAFRSGRDFAAWIGLVPRQDSTGGKQKLGPISKQGDRYVRRILVVGAHAVLRHAKQNPENIPGSHNCWRDDPSRSWR

SEQ ID NO: 229223 - protein, 363 aa, unidentified
MGEGICFAGLDVHARKTAAAAVQLGSGEVWKAQLGGSSAAAIEWLQSLPGEVRAVYEAGPTGFELARAARAAGVQVMVCAPGAIPRQPGDRIKTDTRDALKLARLHAAGQLRPVVVPAPELEALRDLVRAREDLRGDLMSARHRVSKLLLRKGMLWTGPGETWSQRHLQWLSKVRFEQPLLEVVFGECLAHHEVLLARRDRLDVLIAEQSVQGPWAPTVARLRCLRGIDTLTAVGLVAEIGDITAFAHPKQLASYLGLVPSEFSSGDRRSQGSITKAGSSHARRLLVEAAWHYRRQPSISLTLRRRQHGQPAAAIDAAWRAQIRLHRRWANLDAQRGKKRTTVAVAVARELACFVWEIASQTD

SEQ ID NO: 229224 - protein, 445 aa, unidentified
MYLDYLVDIPEVKGKITFRSKRNARYVYYEYDRIYDSDKKYTTVRRVTIGKVSADDESKMRPNENFKKYFPEVEVPEESDTVRSSCLKAGTYMVMSKTVKDMGHYEPVARFLHEEGIFVSAVNPKLIKDYGNNTLRKVKTDKADARKIARYGLDNWVELRQHTPMDTIRMQLKTLNRQQGLYSKTKTMMKNNLIALLDQTYPGVNSLFDRPVREDGSQKWVDFATAFWHVDCVRDMSLTAFTERYRKWCRRHGYNFSQSRAVEIHTEAQDLIAMLPKDALTKTMIRQAVDALNAVSKSLEQLKAEMRALAAQLPEYPVVMAMRGVGDSLGPQLMAEIGDVTRFTHRNAITAFAGVDPGADQSGTHEANSVRTSKSGPPELRKALFLVMDCLLKTQPQDDPVYRFMDKKRSEGKPYLVYMTAGANKFLRIYYGRVKEYLASLENID

SEQ ID NO: 229225 - protein, 427 aa, unidentified
MSGGDYNRQALKRQKIDERTLVIGVDIGKAFNAVGFMSKSGRVLGSCAKLYNNREGFEQFVGIIEGLKSKHRLRKVLIGMEPTGHYWRKLAYFAQENGYEVRFVRTTALKHHRELDESSSAKSDHRDALTIANITREGKYIDTIIADGPIRQLRTLAKARERLLRYSVSAKNSLHAAIDDYFPELHDLFWSMGSRSLWVVLERCPFPGDVEKIKVSTLQAWIARSSRKQAGSAQKAKALHGAAQNSIGIKQIGSADRYRLHVCLQEVKRTVLTLKEMDLHLKSLLKGIPSASYLLSIPGVGPLSAAVFLGELGNPGHFHNARQIVKYAGYDPQESDSGSWVGRKHISKKGRWLLRKCLFFMSMRVIVLSKFFQQYYLRKLETKNRVGQQPRRKEILCAVAIKLIRVIHSLLRDKRRFEDSAPEAVAA

SEQ ID NO: 229226 - protein, 405 aa, unidentified
MICVGNDWASDHHDVNVMDEHGTTLATRRLPENAAGVTAMHDLLARFAHDPSEVVVGIETDHGMWVAALVAAGYQVYAINPLSVSRYRDRHHVGGTKSDKADAKTLADLVRTDRHNHRLVAADTVEVKAITVMARTHQNLVWARSAQQNVLRAQLGAYYPAAVDAFGGDLAHKDCLAVLRRAPTPRQGAALTVAAIRSALKKVGRQRNTDTRAREIQQALRGGGHLSAPEALTAAYAATVTVTVNMLTTLNTQIDQLETSMAQSFRAHPDAEIYLSMPGVGDITGARMLGEFGDDPERYATAKSRRNYAGTSPRTIASGKGHVVLARHIRNTRLNAAAMAMAQSALTGSPGARVYYDSLRDQKKSHPQALRALANRLIGILHGCLKHRTLYNEHTAWNHRANLAA

SEQ ID NO: 229227 - protein, 341 aa, unidentified
MAPDPVAPVLCVGVDIAAATFTAAWAAVNGTVSAPRTYAQDPHGFAALRTALATTAVAAADTLVVMEATGSYWIALAVTLHHGGYRVSVINPLQAHHFAKAQLRRAKTDALDAQDLARLAAALRPPLWIPPPAVYHEVRQRLLVRDGLVTMRQQARNQLHALSQWPVVVTSVEEQLTAVITDFDARIATLEGEIATVLSTSEWAESLGYLTSAPGIGLLTAAWLMAATVNLTLGDTPEAVVAYAGLAPMPRQWDTSLRGVAQIGHSGNGRLRTAAYLATLSAVRYNPMLRAFYQRLRAAGKPVKVARCATARKLLHLAGALVTKQQRFDPSRCPLRTSEQP

SEQ ID NO: 229228 - protein, 364 aa, unidentified
MTVYIGVDFHPYEQSVAYASDEDGEVGYRRFLHGDKQSIKAFYRKFGSEAVIGVEATGCLWWFEKLLFDNGIALKIGDPRMIRRVALSRHKNDFRDAETILDLLMRDQFPAIVPRNEESREVLDLLHYRQSLVQKRTSIANQIHAFARSKGLAKFRLPGIRSRKQVLAAPGTTETESLLLGSRLLLFDELTRQIEVTEAKLEERANNQRAIELLRTHPGIGPITSLALVHTLGDVRRFRRKEEVVSFVGLDPLEKSSGEKRRMGSISKHGSRLLRHLLGQAAQACRDKKIRQFYSQVSRRRGRPKAKVAAARKLLINCYIMLRDGIGYEEFQRRGEVGLCEGSGERSGNTAVSGSLMARPAIFE

SEQ ID NO: 229229 - protein, 359 aa, unidentified
MLYLGIDQHRKQLTVCVRDEEGDVILRRQVSTEWERVRAFLAEIRKRSGKAGWVVILEVCGFNGWLLRLLGEYGCREVVLIQPDTRSKKKTDRRDANALCELLWVNRERLLSGKRVQGVRRIQPPTEREAEDRQLTELRKRLGQLRTRSINGVKHLLRKHNLQQECPTKGIDTIKAKKWLATLPLEAMDRMHMDLVLAQWKLWDEQIQTLEAEITRRQAESPTAAVIATVPGCRAYSSLALASRIGSIERFPRPGSLANYWGLTPGCRNSGDVTDRLGSITKQGSATARFILGQLVLHVLRRDGAMRAWYTRIKKRRGSKIARVAVMRRLATILWHMLKHQEAYLVGSPPRQKLREKTA

SEQ ID NO: 229230 - protein, 410 aa, unidentified
MGLFCGIDWATEHHDVAVIDDDGHVVARGRVSNDAPGFAALLTLLAQAGDSAADPIPVGIETDRGLWVAALRETGRTIYPINPLAASRYRARHGVSGAKSDATDAVLLANIVRTDPGAHRPLPADTELAQAIRVLARAQQDAVWARQQIGNQIRDLLKDFYPAALTAFADLPEGRLARRDARTVLAAAPTPAQAAKLTPARLRRLLIKAGRKRYLDRDIARLCGVFTDTYLHQPPVVENAIGIHLAALLGQFEAACTAADALAEAAVAHFEQHPDAEIITSFPGLGMLVGARVLAEIGDDRSRFADARGLKAFAGSAPITRASGKKTVVLHRYIKNRRLAAVGPIWALGSLRASPGARRHYDARRAAGDWHQQAQRHLFNKFLGQLHHCLHTGLRYDEHLAFPPPLQLAA

SEQ ID NO: 229231 - protein, 341 aa, unidentified
MKKFIRTAVDLGKNYFQFHGLAGEGGAPVSRKLKRSKVLEFYAQIEPCRVGLEACGSAHHWARELIAMGHEVVLIPPAYIKPYVKRGKNDAVDAAAICEAMARPDMRFVPVKSADDQAVLMLHKSRELLIKQRTMSVNALRGHLAEFGLVVAKGIGRVDELLALAQADARLPQIAKATVTELAQHLEGLDQSIDAIDDDIARAHRKNPKSCLIDQVPGIGTLIASVVAASAPDPGVFKSGRDFAAWLGLTPRQHSSGGKEKLGAITKQGNRYIRKMLVVGATSVLRVVGKRKGALADWINALRARKPERLAAVALANKLARICWAIMTTGESFRTETYVKA

SEQ ID NO: 229232 - protein, 426 aa, unidentified
MKEHIDYLSTLFVGIDIASRIHVISALDFNQDFFIKMKPFENTKEGAGIVEKMIADVLADNHQFKYVVIGMESTGFYGVHLANYLSTSELLAPFSVRVYCLNPKKVKNYKKSFNDIGKNDGIDSFVIADFARVGRIAIKPWRGSQYLALQRLTRHRMHITECITREKTYMLNNIYLKFSEYALLRNGEHPFSNKYGATAEAILTEFTTNEDIVNSSIEELVEFINSKSKGRIADPEETAKIVQAAARNSYRLDKCLYEPLTISIASSFNCISSFEKELKAIDKAILQTVQGLNPEEYTVLNSIHGIGEVYSAGILAEIGSIKAFQNANQLAKYCGIVWNDNDSGDFESEDSRMSKAGNRYLRYYIIEATGSVISHCPEYKAFYQKKYAETRNHQHKRALALTSRKFIRLLFGLLDKGQLYSPEKSR

SEQ ID NO: 229233 - protein, 351 aa, unidentified
MEGYAERQFVGIDLHRRRSVIVRMTTAGERLETVRIDNDPVALALEIAKAGPDPEVVLEATYGWYWAADVLAAQGARVHLAHPLGVKGFTYRRVKNDVRDAADLADLLRMNRLPEAWIAPPPVRELRELVRHRAKLVALRSGLKAQVHAVLAKQGVRVRVSDLFGVAGRALLEDLPLDPVYRGRVNSLLRLIDAYGFEIAAVSTRLTAQLAREPGYQALLTLPGVGPVLAGVFFAEIGDVHRFPTAAHLTSWAGLTPRHRESDTTVHRGSISKQGSKLVRWAAVEAVQKTPADAGWLVARRHQLAARRGTNIATVATARKLLTLVYYALRDGHVRALSPRPRPHSTAAAAA

SEQ ID NO: 229234 - protein, 478 aa, unidentified
MEQKYRRCCGIDVHKKSVTVCVLAPSGKPETETKKRNFRTFTRDLKQLRAWLKSCKVTAIAMESTGQYWRPVWNILEGHFEKLLLVNPQHIKGLNGYKTDPKDAQWIAGLLDSDKLRGSWVPPREIRELRDLTRQRVHVLEDQNRVKNRIEQLCQSGNIKVSSVATDLFGVSGRKMLAAIVEGKHDAGWIADYARSSLRSKKRELELALEGSFSEDQRWLLDKELRHLEWLEMQIEVLERQIERRVAPFEEPMRRLMTIPGIDRKTAWTIVAEVGVDMKVYGDARHLASWAGLCPGNRESGGKRMSGRTRKANRYVRRAMCQAAWAATHTKDTYLSAFYRRMKVRKGAPKAVMALAHHLITVVYNVLARAEEYVELGGDYYDRRDKPKTVSRLVARLTRLGYYVNLKPVEPEASQQQESPEEALPVSSAIPPPAPSPEQRASSPQRKGRPCKCAARGIICKHDRTVYVNPMNLEGLHQ

SEQ ID NO: 229235 - protein, 388 aa, unidentified
MIYVGIDIAKLNHFASAISSDGEILIEPFKFCNDSDGFHLLLSKLESFDKSSLIIGLESTAHYGDNLVRYLVAENYKVCVLNPIKTSAMRKNNVRKTKTDKVDTYIICKTLMMQDSLRFVSYYDLDLMDLKSLGRFRQKTIKQRSRLKVQLTAYVDEVFPELQYFFKSGLHQKSVYALLKEAPTPETIASMHMTHLAHLLKVTSHGHFDKETAQQLRVLAQKSVGASDSALSIQITHAIAQIELLNDQLDKVETEMTEIMKYNDSVIMTIPGIGYINGGMILGEIGDIHRFSSPNKLLAYAGLDPSVYQSGNFQAKKTRMSKRGSKVLRYALVNAAHNVVKNNATFKAYYDAKMAEGRTHYNALGHCAGKLVRVIYKMLTDDVEFNLD

SEQ ID NO: 229236 - protein, 446 aa, unidentified
MEVVFPYCAGLDVHKKRVTACRLVSDSTGQVPEGVAELQTFGTMTHELLALADWLVEAGVTHVAMESTGEYWKPVYNLLEGIVTIFLVNASHVKNVPGRKTDPADARWLAKLMRYRLLQASFIPPIAQRDLRDLTRYRTKLVQERAREVNRVQGVLERANIKLASVASDVLGVSGRAMLEALITGQADPATMAALAKRRMRSKIPALEQALTGTVRDHHRRLLAMQLRHIDFLDEQIAALNSAIAQCVTTLSQEAPVSPAPLAPTTIDVPTPADPPPPLTFTRAVELLDTIPGVNQRGAEMIIAEIGIDMTRFGTAARLAAWSGVAPGNDESAGKQRSGKTRKGNQVLRAGLTQLAHGAVRTKGTYVSALYRRLAARRGKRRAILAVAHSIMGSVFHMLSRNEPYRELGPNYFDERRRHYTVDRLTSRIEHLGYRVHLEPLPTAAA

SEQ ID NO: 229237 - protein, 355 aa, unidentified
MTSTKYIGMDVHKESISIAVRNGAGKIVMECVIETKASMILQLIDGLRGDLQVTFEEGTSAAWLYDLLKPHVKKLVVCDPRKNASMREGNQSDKIDARRLAELLRLNHLSPVYHGEHGLRSLKELVRSYLAITKDHGRVMSRVKAIYRSWAIPCSGKQVYAPRHRAEWLGKITEPGVRRRAEFYYQQLDALRTVRQQVRRELLAEGKKHPAWKRLRQIPSIGPIRAAVLLGILQTPHRFRTKRQLWAYSGLGIETQSSADHRRVDGQFERVKKQSSIRGLNRNCNHDLKNLFKGAAIVASSKPGPFQEFYTALLTKGLRPEMARLTLARKIATIVLIVWKRGVCFDAQHLKPQTA

SEQ ID NO: 229238 - protein, 377 aa, unidentified
MYVGIDAHKRECVATVLNERGEKLSTARFPTNLGALTAWAKTLPEGSVLALEASTVAKRLYWHLKGLGLDVRMAHPLEVRRMAGSKKKTDTIDSFELADLLRMNRLPEAYVPSPELNERRQILRYRIDLGRKMRAIKCQVLSLLDHNGVTTELTDFFGAQGRREMHRAIARLPTSQRYLLEGQLAQLDLLGRQIEEVEGQLAKMGAEDLAVQRLMSLPGVDFYSAQVILEEIGDITRFPSEKHLSSYAGLVPRVMQSGSTLRMGRIHKQGPRALRWILTTCAHAAVKAPGKFQRLFRRWEKRLGRGKAIVAVAHRMIEVIFALLARHESYSEERTERTHAKIVRMKNRARALPARDPEVRWAELAPAAQELLRGSRG

SEQ ID NO: 229239 - protein, 370 aa, unidentified
MEALTTYVGLDVHKETISVGVAESDDRGQARYFGKIANNAQALSRLAAKLSGKGRTLRFCYEAGPCGYAVHRHLTGLGHDCAVVAPSLIPRRPGDRVKTDRRDCLGLSKLDRAGELTAVWVPDAEHEAMRDLVRARGAAVKALRRARQQLSGFLLRHARVRTGKNWTLAHRRWLATLRFETPAQQIVLEDYIQAVEDAQARRDRLTAQIEALVPSWSMAPVVQALQAMRGVALITAVTLVAEVGDLTRFHSPRQLMAHLGLVPREDSSADRIRRGGLTKAGNAEARRVMVEAAWCYRLPARVSRCLLDRLAGLPKDVRDIAWKGQVRLCARYRHLRAEGKDAPVVTAAIAREMLGFIWAIAQVVAPRKPV

SEQ ID NO: 229240 - protein, 426 aa, unidentified
MRFIGLDVHKDFCEVAVVEGDACWSGPRVRSRPEDLKVFAQSLGPKDQVVLEATGGALAIARILEPHVGRVVMANPMAVRAIATAKAKTDRLDARTLAKLLAAGFVPGVWMGDERTRLLRRLVSRHAHLVRQRTRAKNEVHAVLQRTLKGRPPVSDLFGKRGLAWLGAQDLPADERETVEASLRHIDFLDGELRLVDRTMAIQVLSWPEVRRIMTIPGMGAMAAAGVMAAIGDVRRFPTSRHLVGYLGLDARVHQSGSGPARHGRISKQGSAEARHLLVEAAWAAMRTPGPLRAFGERIRARRGANITTVAVARKLAVLCWHVLSREQDYAFGRPSLVREKIRRLELAAGAPNRNGYRNPVRVFATPAQRRLEREVGDQAEKAYRRFVKDFRSSGKKGAGATTGARISAARKGQAARQEQAPDPAL

SEQ ID NO: 229241 - protein, 432 aa, unidentified
MKYKIQQKQNQRIQQITDATIIVGADIAKQTHVARAIDFRGIELGKECVFNNDDEGLTKLVTWMKELQRLHGKTDVVFGVEPTGHYWFPLGAFMQGLSVRFVLVNPHHVNKSKELEDNSPTKNDYKDAKVIANLVKDGKYTEPKLPTGIYADLRILMNLREKVVVNLGQVQMRIQNWLDRFFPEYTQVFKDWEGKTSLITLRKSPFPQDLVSLGASEIVGQWKRGGVKRAVGMKRATRLVSTAKKSIGLKEGLTAARLELMALLEQYEMFTRQRDEIMAQVEQLLNQIPGTEEMLSVPGMGVTTLAGFLAEVGDLRGYDHGQQIIRLAGLNLKENSSGKRKGKTGISKRGRSRLRALLFRAILPMVAKNAEFKALHDYYTTRTCNPLKRKQSLIALCGKLIRVLHTLGTKQVQYNAEDLLGPLRRSQLQVAA

SEQ ID NO: 229242 - protein, 356 aa, unidentified
MEGKRFVGIDLGKRTYEACAISRGGSLERWNGKTDDVGRERLAARLCHDDVVGVEAGSTAFHIARRLQTVSGVRVVVLNPGKLAIIYASMKKTDKEDALKIARLLETMPEEYLPLVPLPTEAEEDMRRLASSQMFLKKERTRLVNRLHALFVAAGRTTVTKKDLARDESRRSTVETLSGVYAELAGRLVAILAEVEQQIAELDQSIRKALIDRREQAALLMSIPGVGPVATMTFLGYIGDGSRFATASQVSYYAGLVPRIDMSCDTCRLGHITKSGNPAIRRAMIQSAWTAIRSPLGNPFKDVFERIAATRGRGIAIVAVGRRILELMYTLITRGEFYKYCSPVERQRKLRYYKVA

SEQ ID NO: 229243 - protein, 406 aa, unidentified
MKSPAPERNITGGVDTHLDFHVAAVLDTNTARLLDTASFPATSDGYVELHAWLASFGTLETVGIESTGSYGAGLCRHLAAEGVPVIEVNRPDRSERRFNGKDDTIDAEAAARAVISGKATTIPKTGDGMIEAIRSLEIVYHSATKDRTRATNQFKALLITAPAGLREHLGAKTFRRQLELARRFNDSHPDPAEREIRYAFKDLARRIGFLDEQTGRLDERINTLTAKASPALVGISGVGPHVAAQLLATAGDNPGRLRSEAAFAKLCGACPIPASSGKTSRHRLNRGGDRRANRALFTIVLVRMRHDPRTRAYVARRTAEGKTRKEIMRCLKRFVAREIFHALTHPDPDIVTGPEIRHLRTQAGITLTALAVGLGRPPIHISRLERGLAHNTTLAKQARQWLNETP

SEQ ID NO: 229244 - protein, 575 aa, unidentified
MSSVDSTATVEIGVGIDTARYGHDASFLFADCQPAAKPLPFTESSDGYAQLRARLEQLRARHPQTVFRVRIDAAGQYATNLLHFLRGLPLPISVSVGEPARNKHYCRAHFPKRKSDPSDSFCQARYAVVERPAATPDVPEPFYQLSEIASRLESQVRQSTRLINQLHNLLARVFPELPTIFNDLSADYVLNLLLKYPTAERIAKARETSLKAIPHLSDEKAKKIQAAAGNSVASLRGTYAEELICEVVRQINQSHAAEKRLEKLLVRAYRALPAGPHRQVETIVGIGEVTAAVLVAKIVSIDRFATPAQLVGFFGTFPEENTSGKDKHGKPVPPGTMEMSPKGNDLVRHYLYMACWSGSQHNPALRALYARQKARGKSGNVALGHCMRKLLHLVFAVWKTNRPFDRDHYRWDQAAPGKKEKAAGRSRETKPEEQAVTAANSKVDVEPAPVKPPIDELLSSPAASVPSSEQVDFKTLRQQVTMEQVLSRLGCLADLRGGSQRRGRCPIHGQTGDGRRSFSVNLEKNVFQCFHPECGMKGNVLDLWAAVHRLPLREAALHLVKTFQRDKGTEEKRNP

SEQ ID NO: 229245 - protein, 335 aa, unidentified
MRYVGLDVHYRSSTYCILDESGHEVACETIRGHWPKLLARLSEIEGPWAICFEANCGYGYLYRELSRLGARVVVAHPGQLRLIFRAKRKNDRIDARKLAKLLYLDEVPAAYVPHQDVQNWRELIEYRRRTVDRQTTCKNAARSLLRSQGIIAPKGLWTKKGRTWLQSLEMPTPAARLKRDMLLDELDQAKRRVRMVTKELDQIGDRHPAVLLLRTIPGVGIRTGETVAAYLDRAQRFTRSSQVGAYFGLIPCQDASAGSNRLGHITRQGPGTARKYLVEAAWQGVHRSPTIRAYFERVLHGRKERRKIALVATAHYLVRCMYAMLISGRPWQEAA

SEQ ID NO: 229246 - protein, 394 aa, unidentified
MIYAGVDIAKMDHVIGAVDERGAEMCRPMPFKNTEAGLERAVAWLEGLAESPSDVVVGMEATGHYWMACYSFLVARGYSVAVINPMQVKAVRKLKGLDKVKNDRVDAGLIAEALRIGQYDETRLATDEVASLRSLSRYLQSLRGMIAELKTQCICLMDAHFPEYAGIFSDMFGAGSRAVLSKSPLPFELARRRADSLARDIAEASRRGGRSAGYAAAIKAAARSSIGVRLGQEAASFQVKSLIRQIEFAESECAKVEARVRALLDEVEPLVLTIPGVSYVTGAQIVSEIGDVSRFRNAPALVSYAGLNSSVSQSGQFDSGGGPITKHGSPYLRRALWLAANRARQCDPGLRAFYEKKRAEGKPHRVAVTAVARKLCHIVFAVMRDQAPYDPERE

SEQ ID NO: 229247 - protein, 354 aa, unidentified
MSQTPNTAIAVIGIDIGKNSFHVVGHDARGAIVLRQKWSRGQVEARLANIPPCLIGMEACVGAHHLSRKLASLGHDARLMPAKYVRPYSKGQKNDFNDAEAIAEAVQRPTMKFVATKTAEQLDLQALHRVRERLVSQRTGIINQIRAFMLERGIAVRQGIGFLRTELPTILATRTDVLSPRMLRVIEELAGDWRRLDQRIDGLSGEIEALARQDQACSRLMTVPGIGPIISSAMVAAIGTGDVFSKGRDFGAWLGLVPKQISTGDRTILGKISRRGNRYLRVLFVQAAWVVLVRIKNWERYGLKSWIEAAKRRLHHNVLAIALANKLARIAWAVLAKGRAFELTRTDDTGVRPA

SEQ ID NO: 229248 - protein, 343 aa, unidentified
MKLVGIDVGKNSHHFCVMDKETGEFNVAPSSFSNNKEGFDLLINSLKPYSKKSILIGMEDTGHYHVALLKFLLSHGYTVALINPKTTDLTRKMEGGITKNDKLDTITICDVLDTPERKKQYRITKVDRFDLYEQRQLTRHHHNLKEELNVYCNRLQKSIDLVFPEFNTLFSSKYSIVYMNLLKTFGSAEAIASTDIRTIRKCFEIKGSGKRISLTPEKLKECAKNSIGISSEVETIQIKHLVSQITLIKEQIAEIDKKIEEFSIKNNSPILTIPGISHFSGTSILAELGDIGNYSKPSQIIKFAGVAPYHYESSQYNAQHTGITKKGSKYLFSSVGILYADCI

SEQ ID NO: 229249 - protein, 358 aa, unidentified
MQTQSNKIDFKGEKIFAGFDVHLKSWKVTIMTDKLTHKTFCQDPKPEVLYNYLVKNFPGGTYYSAYEAGFCGYWIHNQLLELGVKSIVVHAADVPTTGKEKVNKNDKRDSKKIARALRNGELNPIYVPSMVTIEDRGLVRLRTTKVNELAKYKCRIKSNLYFRGIEYPEAFNNEHTHWSNRFNKWLESIQMTEPSGKVMFDDLLESSLHLRTSILKLTREIRILSKTDRYKVRQELLRSIPGIGYITAMIILTELETINRFANFDKFCGYIGLVPSTNSSGEKEIIGNLTPRGHTLRSSIIESAWVAARLDPALCKSYHEYCSRMDSNKAIIRIARKLLSRIMYVLKNDKPYVCSIAK

SEQ ID NO: 229250 - protein, 588 aa, unidentified
MQHIDKIIKFHNLLKHRRTPISGKELDKQLGCSKSTRQRLTKELPDHLNAPLICNRSAGGYYYDRTDLRYPFELPGIWLTADELQALIACQHLLGNLTPGLLRNEIGQLRDHLEKLLDRSPGIKTQKLSRVKILSHAYRCRDGDLFLTLVQALFEQQRLLVHYHARSDDQTSERTISPQNLVLYKDNWYLDAYCHQLDEPRTFALDRIRSATASGEPALLLEPDTLQQHFAPPTASSPAPPKHTAILNFSAKAGRWVADETWHSRQESEWLTDGRYQLRIPFNRHEELLMDILKYGAEVEVVEPGFLRELVKAAAEKMLAMYRSNIRADRASLVNKLIKLPGIKVCLEATGIYHFDLAIALHDAGIPVMVVNPKASHNFAKALMKNSKTDAVDANTLAEYVERMDFVAWTPPSNQVLALRGFARRIDALTGQKAAARNHLHALSATEETPQALLRDAKLAISQLEKRIDTLASEALALIDQYQDLQRIFEMLAGIKGIAQTSAIALMGELLLLPPNLSHREWVKFAGLDPKAFESGKSVHKKMRLSKAGNRHIRSALYMPALSAKQHDPHVRAYFQQETFASRLRRHA

SEQ ID NO: 229251 - protein, 315 aa, unidentified
MEQPPAPPSFVGIDVSKDRLDVHVLPSGDAFAVARNGKGLDELLTALRCRSVGLIVIEATGGYELTVSAAIAAADLPLAVVNPRQIRDFARATGRLAKTDALDAEVIALFAERIRPEARRLPGSDAQALSDLVARRRQLVEMIGMEGNRLRQARTPLIQKSLRATLKMLEAQLAALDHDIDNTVRASPVWRAADDLLLSVPGVGSVTARTLIADLPELGRLDRRSIASLVGVAPVNRDSGTWRGHRAIAGGRPTVRRTLFMAALVGVRWNPVLKDQYQRLLARGRPKKVALVACMRRLLTILNAIIRSATPWQNA

SEQ ID NO: 229252 - protein, 367 aa, unidentified
MFHVGLDIHTKRIAICALDERGQVVHRSQVRGIQDMVRVLASLPDRFEVCYEASCGYGHFHDLLRPLATRVVVAHPGQLRLIFRSKHKNDRNDAERLAKLLYLGEVPAVHVPALEVRTWRELINCRSQVIAKRTRAKNTVRALLRGAGITPPQHPGLWTKKGLAWLRQLELPTASQQLRRDLLQEEIEGLLRQVRRLEQQLNRQAQQTPAVARLRSIPGVGIRTAEAVTAFLDDPQRFGNAKAVGSYFGLVPCQDQSGDKNRLGHITREGAPVVRQLVAEAAWQALRRSPAVRAYFERVRREDPQRTKIALVATAHYLVRVMWTLLKRATVWQENPALAPALASGTGPVAGPGDDSSTKAGGVANEV

SEQ ID NO: 229253 - protein, 344 aa, unidentified
MKNQYDYVIGVDISKDSFHARILSTKSDSFSPVDKILKFDNSINGFINFFKWLSKLNVCFQSSLIVMEATGVYWEKLAFYCVEKENINVSVVNPKQIKHFALTNLRRSKTDPLDADLIAHFGAVMKPDTWNPPHPILEELKQISRERDSFVKMLTEEQNRLHAIKSSANPSSIVLKSHRAVIKYLEKQIKKLEKVMNDKLDNNSGLKEKKELLKTIPGIGDISAAVLLTETNEFSTFTSPKQLAAYAGISPCQHESGSSVNKKPRISKIGNSKIRSTLYLSSLSCIRSNSPFKKFYERLREKGKPAKVALIAVARKLLHIVFAIIKSGKAFDPCYVSKKPAFAT

SEQ ID NO: 229254 - protein, 480 aa, unidentified
MTPRPEEFEPIEPVRKKRKKRRSKKVRLPASLKQVNLDAAGIDIGASEHYVSVPEDRDEQPVRCFTTFTMDLYAIAGWLKSCGIETIAMESTGVYWIPLMEVLEERGFEVLLVDPHKLKNVSGRKTDVLDCQWIQQLHTYGLLSGAFRPSDEVCALRSYVRQRAMLIRRAADHVQHIQKALTQMNVKLKQVLSDVTGKTGMLIIRAILEGERNPATLAAFRDGRCRKDEATIAKALEGNWRREHLFALRQAVELYDIFQEKIVDCDRELEAHLGTFPDAEEGQAPLAKKPKSRASHPLAFDGYSELYRIAGVDLTEIPGLDAPTVLTIVSEIGLDMTRWRHSKAFSSWLGLCPGSKISGGKVLSSRSKACANRAAVAFRLAAYGLQHSNSYLGAFCRRMKARMGPAKAITATAHKLARIVYTMLLTRTPYVEKGVDFYEQEYRDRRVARLKRNARDLGFQLLPIPEETPAATHAAAVAAA

SEQ ID NO: 229255 - protein, 311 aa, unidentified
MTKDTIGIDISKDTLDVHRLSTGETAQFPNAPAGLRALRRWIGVKTPDLVVYEATGAYHALLERTCAGALPLVKVNPLQARRFAQARGTRAKTDAVDARALAMMGSALDLVADVPADKKQPALKELQIARMALIKERTRLLNRSKTQSLTLLKRQAKARLAQIKRQLCELEDALLDLARQCPKRARAFDILCSIPGLGRVSAVAILVECPEIGTLTRKQIASLAGLAPMTRQSGQWRGKAFIQGGRKFLRDALYMPALVAARYNPDLRQKYQAMTSDGKPAKVALTALMRKLIELANALVRQDRTWTPKPA

SEQ ID NO: 229256 - protein, 438 aa, unidentified
MKVMYERVAGIDVHKDMIKVAVRSPGDKPWTRKTEILTFRTFYGVLRAMARELRRRGVTHVVMEASGVYTEPVYYALCEEDFTEVAVASPAHAKALKGHKTDAKDCARLAELFECGLLQGSYIPAAGLKEMRDLSRYRMKTVQARTSEIQRLAKALESAGIKLGSVASEITGKGPVAMIEALISGERRGAVMADLAKGRARTAGKLADLSMALEGRFTDHHALMCRLHLDRITALDAAVADLEARIAATAADWQREIDLLKTIPGFGDIVAWAWIAEIGPAPHQWFASHHKLASWVSLAPGNNVSAGKRKYGRTGDAGTYIKPMLIQAAWAATQVRGRLQARYNRLVRRMGGPKNPAAKKKAIVAIAHTLLKIAYTVLKTGTGYQEPGADFYTRRESPGHRQAWLERQIQKLHPGCTVTITISPSPDPAPEAALPLGA

SEQ ID NO: 229257 - protein, 345 aa, unidentified
MKYYAGLDVSVKETSICIVDQTGKICREVKVTSHPDDLIAVLKDPAWNMERIGLEAGPLSQWLFEGLARAGLPVICIETRHTKAFLKAQPSKSDRNDARGIAQMMRVHLYRAVHVKTLTSQKRRALLTARKLLQDKAIAIENDLRGLLRNFGLKVGVVGSAKFEARIRELVEGTLDLVEIVEPLLDARRNLREHFATLHRKLLMIARDDEVCPLLMTIPGVGPVVAVAYTATIDIPQRFKNSKAVGPILGLTPVLNQSGESHRVGRVSLCGDGMMRTLLYDAAQVLLNRVAKWSWLKAWAMSVAKRRGLQKAMVALARRLAVIMHRMWSDGTEFCWSREKLPAGA

SEQ ID NO: 229258 - protein, 328 aa, unidentified
MKSNDSVSVAAELPVLGLDVAKASVQAELRTNGKRVRFGFANNGKGFAQLARILKEHNVPKVWAGLEATGPYSHALALWLHGQGHRVSLLNPRRVKQYARSAGNRNKTDLLDAGIIADFVCAIEPAPWQPPTLEVAQLQALVRRREELSLMLQAEKNRLEGVAPNVRSSLGRMIAALSAEKTRLEKLILQQIRSHQQLSRDHQLLCTIKGIGSLTAAILLAEMARPGQVERARQAAAHAGLAPRREESGTSVRRNRGLGKEGNRYLRKALYMPALVAIKYNAPLRYFASRLHAAGKPKMSVICAVMRKLIHIAFGVLKHQKPFNPSLA

SEQ ID NO: 229259 - protein, 390 aa, unidentified
MQTEAAHAEPSTAIQTDLAAIFVSLELSRSIWLITSLSPGSGEKMSKHSVRAGDVAGLLARFSESKQKAFARKRGKSFPIVVIQEAGLDGFWLHRALEREGIESHVVDPASIATSRRRRRAKTDRIDGEALLRALLAYKRGEPRVCTMVRAPTPEEEDRRRLCRERKVLIAERVEHVNRIKGLLFSQGISSYEPLRRDRRQRLEDLTTGDGRTLPTHLKIQISRELDRLELLLDQIKLAEAERDGLLAEGQAAAPELPARMLLEFKGIGAECAATLWLEALFRHFDNRRQLASYAGLAPTPWQSGSVDREQGVSKAGNPRLRAILIELAWLWLRHQPQSALALWFKERVKRNGGRMKKTTIVALARKLLVALWKYVTTGVVIEGAVMKPA

SEQ ID NO: 229260 - protein, 307 aa, unidentified
MSEVSIIGVDLAKQVIQVHGAAADGRALFRKKLSRPQFAKFMASQGRCVVAMEACGTAHYWGRELSRLGHDVRLIPPVYVKPFVKRHKNDAADAEAVAEAAQRPSMRTVAVKSAEQQARSMLFRTRSLLVGQRTQLVNALRGHLAEHGIVVGRGVGNVAKLAAMLEDAEVPALVKEMSELYLAQIERIGAEIDALDRRIAATAKASDDMRRLQTAPGIGPVCAMAITTFAPDMREFRSGRDFAAWLGLVPRQLSSGGRQKLGRTSKMGQRDIRRLLIAGAMSIVHWRGREGGRPGSWGVQRAFSSPF

SEQ ID NO: 229261 - protein, 313 aa, unidentified
MGVFVGIDVAKGKVDVAIGAIDEPFEVPNDESGVMKLASQLKTLSPALVVMEATGGYERLMARGLAEAGLPVRVVNPRQVRDFARATGRLAKTDALDARVLAAFAEACHLEARPLPDEQTEALAFLVARRRQLVDMRTAEKNRIDKAPKELREQIKAHIAWLDKAIGRADDEMDALIRRSPIYREFDERIRVIPGVGPQTSRILIACLPELGKLDRKQIAALVGVAPMNRDSGTHRGARRTWGGRAAIRCVLYMAAVAAVRCNNSVLRPFYDRLRAAGKTKKVALTACIHKLLIIINAMARTGQPWTPVPSPA

SEQ ID NO: 229262 - protein, 337 aa, unidentified
MDYFAGLDVSMEETHVCVLDREGAVIHEGKAASTPQAIADGLARAPSCGRIVFETGRMAPMLYHGLSQLGLPIVCVESRQAYQALKSLATHKTDRNDARGLAHLARTGFFKPVHVKSLPAHAIRSLIIARKKLVGQRVTLENQIRGLAVVFGVRLPRGLTPAFIEQALKASEGVAGLSAAMRGLAAARAAVLAAVVAIDADMKRMVRASEACRRLMTIPGVGQLTALAFTAAIDDPGRFRRSRDLGAYLGLVPRRYQSGEVDYTGSISKCGDRRVRTLLYEAANVMLTRYKGKLKLKDWAFAIAKRSTMRKARIALARRLAIIMHAMLRDGTEFEPA

SEQ ID NO: 229263 - protein, 482 aa, unidentified
MKSKPQEKNKRATNHPTQHHWHEMNRKQRREMLRKMQSEDLRLEVIHPDAAGIDIGNESHYAAVPPSRDSQPVREFRCTTAELKAMAAWLQQCRIRTVAMQSTGVYWVAVYDILEEAGLEVYLVNARDTKNLPGRKSDVQESQWLMKLHTYGLLRNSFRPPQEIRTMRTYWRQRNDLVQSAGRHILRIQKALTQMNIQLANVLSDVSGVTGQAIIKAILAGERDPHKLAAFRDCRVKASEEQIAQSLEGNWQEDLLFVLKQEHEGYEFCHKQMAECDRQLAQYLQRREDRSHGTPLPEEKRKGRLNKKRANKPQFDLREGLFRMTGTDLTRIDSVDVMTATTVISEAGYDMSKWETENHFVSWLRLCPDNRISGNKVIGKGRLPTNNPLSIALKMAASTLRQSKTYLGAQFRRLRTRLGAPIAIKAMAAKLGRLIYRMLRYGMKYVDQGAAFYELQHRQVQIKQLKWKAAKLGFQIVGAPAT

SEQ ID NO: 229264 - protein, 378 aa, unidentified
MNANTPSTECFVALELSRNKWLVGALLPGATNVTTIAVAGGDTDGLLTALCRISAKAAKAGYSNVVLRVCFEAGYDGFWLARFLIDRGIDTTVLDASSFLVSRRGRRVKTDRVDVEAMAFVLKAYLLGDKSVCRPVRIPSPEEEDAKRITRERTQLVKERTRNVNRIRALLNLQGIRNVRGLWGGDWQRWLSQIRTGDGRPLGRCLLRELGRQFERLELVTVQLRTLEKERAAIAAREQNIPCGEKVAMLTQLCGVGEGGAATLVTEVFHREFRNRRHLASYLGLAPSHYASGETSRDQGINKAGNKPARVMMVELAWCWLRYQPQSRLAQWYRSRFTEKTGRSRKVGVVALARKLAIALWRFVEEGLVPEGAKLKSA

SEQ ID NO: 229265 - protein, 345 aa, unidentified
MKNTIVGVDLAKRVIQACVVKNNKVVSNEEIAADDFSAWLANMKPTIVVFEACGTSNYWKQIALELGHDARLISAKLVSKIRQNQKTDKNDALAIAQSSQLADINFIQGKTFQQQELQSIMRMRELAVKHKIAIRNQLEALLLEFNIKVSPRVGGISGVIESVLEDAENGFCPSFREALDSTWKIYLYTVQDIKEKEKLLERVIRAHPECKKLLDLEGVSTINAVNLYLSIGCGDIGVFQSGRDAAACIGLTPLQHSSGGKTKIGTIGKGVKNVSVRSYLVNGAMAVVQHVDKREPKTKKEQWIKQLLERKSKKCVAVALANKTVRTAFAMLTQGTNYHAEPLAA

SEQ ID NO: 229266 - protein, 387 aa, unidentified
MQKPHDNSKASPAAFMQDNTLIAVIELSLSNWLVAGLIPGVSREPLKKLEPNPEDLLKLLHGWRDEAIKAGRPITRIAVAYETGRDSFWLARWLRERGIDAHVIHATSVAVSREHRRAKTDRLDTAMLKRGFLGWLRGERGHCTVAIVPTMEEEDAKRPHREREGLVHEQTRVVNRMKSALIQFGVRNFNPKLRKARVKLETVRTPEGKSLPPNTIAALRRDMERLKIIKEQIKAIEQARLQQFEQKPEALANRMVYLLVRIYGLGWETADLLVHELLSRTLRDRKAVARYAGLTGSPDESGSKRREKGLSRSGNARVRKIMIQLAWRMVKFQPDSALVQWFKQRTENAKGSRKPLIVALARKLIIALWRYANDGVIPEGFRLHSAA

SEQ ID NO: 229267 - protein, 337 aa, unidentified
MNYCGIDLSSKSSDISIIDETGNQLRRQAVATEAGDITEALAGYGQLLVIIEAHPLAETAARVVEEAGHRAVIIDARAAKNLMSAMKKTDRRDAQTLAEIGRCGWYIEVHRKSAAARQMRSILQARQALLKSSKALASSIRGLLRAHGIRLGKVSKGQFAAQVKKAAEQEVPGLLPALSGMLDAWVVAEERAEQIKQALAKACRQDEISTRLESVPGVGPLISTAYRATIDDPHRFKCGDEVSDYLGLVPRIYQSGEVEYRGSITKEGDGLLRSLLVEGAHVLLTRGQDCALKRWGLSLEKRKGSAKAKVAVARKLAVLLWRLWKEEKMFEAFPQAV

SEQ ID NO: 229268 - protein, 403 aa, unidentified
MFCLGIDVSKKTARYLILDESGNKLKSFTLENDKEMLETLPDRFESLSISKDNLLIGIEATGGFWENIYSFLKDKGFHIVLLNPYNTNKFREALAKKAKTDDIDALVIAQLLRTGEYVQSQVAEENIQALRELTTLRYEFIKDRKNLQRQVYSLLTIVFPEYGKTVIAKPFSQASIAILMKFPTAKHLSEAKTKHIEKIVRKIQGNNFSIHEIQQLIETAKNSIYSGRAKDARAITLRMLLSHIQNLCSSIEELEKQIKEILSPFDKDGNFPGENILSMKGVGEKTLAAILSYLGSDGSNFSSSKAAVGYVGFYPKIYESGQTKRDNTISKRGPKVLRWALYMAAVASIKHNREMRTLYNKKLSQGKTEKQALICVGKKILQIALSLLKSGESYNPARVFVSN

SEQ ID NO: 229269 - protein, 296 aa, unidentified
MQIRSVGIDLGKTTFHLVALGDNGKVLLKKKFTQKQLIAFTANMQTCLIGMEACSGSHFLGRALRAQGHDVKLIPAQFVKPFVKSNKNDFIDAEAIAEAVDRENMRFVPIKTDDQLDLQALHRVRDRLMARRTSLINQIRAFLLERGIVFAKSPIRLREALPEVLENVNENLTPRMRNLVAMLWSEWKDLELQIVQRNDEVERIASSDAACRRLRQIPGIGPLVATAIVASIGNGAAFRKGREFAAWMGLLPKQHSTGGKARLYGISKRGNSYLWWWVPDWKRPFLVAATLVQPLP

SEQ ID NO: 229270 - protein, 415 aa, unidentified
MNPVVGLDVLKGESQVQAFLGKGKPFRKSFKVSHTLEGLGLLVEFLEEVKRATGQKPPIILESTGHYHSSVVQYLEDRGYLLIIVNPLISYKAKSSSLRKVKTDAADAYHLCELFYKEDLEPYKKRGVQLLNLRNLTRQHENITGVLIQTKLQFQAILDQVFPEYRGVFGDLYSVVSLLTLSEFPSSEDILEASVETLADKIAQLCKSRSYRWANEKAIQLKAAADRNPFEKTLYQSHILSLGMYINIILQYKEHLSKLESEIDALAKEVEEYNIIKSIPGIGEKIAATIFSEIGEIDRFTDPKKLVAFAGVDPSVFESGKFTATKNRITKRGSSRLRHALYMAVRCAIRDCRKSKTSDEIIPRNKKLREFYDKKREEGKPFKVAVIACVNKLLHWIFALLKSKTTFQDIDYNLN

SEQ ID NO: 229271 - protein, 359 aa, unidentified
MFAGIDVASETHTLARLDDAGAPIGRPIPIAEDRAGYDALLAALGPPPVLVVIEATGHCWKNLFAVLTAAGHDVALVNPLVARRFQEAGLEPTRTDAIEATGLARLAFEKRPAPTRLHDEVAESLRELVRHRDRLRQDFDDRVRQLHRLVDLGFPGFTRYVRTLDSRLATCLLAEYPTAHAFARATPRRLARLRHDGRHPVGAELATQLIEAAERSIGQHHGPAYVLQARHICQDLDLWRRRLADIEHDIEDLLDTHEVGKLLTTIGGIGPQTAARIIAEVGNPARFHSPGALAAHLGVVPALRQSGKRSPARAATTHFGKPSRPHSVHPRHTANDLQHRAGQPFRCWSARCSPPWGAA

SEQ ID NO: 229272 - protein, 403 aa, unidentified
MIFVGIDWAEHHHDVCLLDADGGELDHARITDGAAGARRLHELIARHTDDPDQVVVGIETDHGLLVTALLATGYRMHAINPMAAARYRERYATSRAKSDRADARVLADVVRLDRHRHRPIATDSDHAEAIKALARAHQQLIWARQRQVNVLRSHLREFYPAALQAFDDLTARDALAVLAKAPTPQAGRALTRAQTTAALRRGGRQRYLPTRVERIQTALRSEHLEAAPMLTTAFGHAVQALVGVIAELTARIDALEEQVNRLLDAHPDAQVVRSLPGLGGVVAARLLGEFGDAPGRFTDAKARKAYAGTAPVTRASGTRQVVLARVARNRRLFDACYQWAFAAIRCSPGARALYDRRRAAGAGHHEALRVLANRLVGIYHGCLRHHTRYDEQRAWGVRIRAAA

SEQ ID NO: 229273 - protein, 345 aa, unidentified
MERYLGLDMHRDSCTAVVLSAGGKKTGQQVVPTEAAALVQYVKSLSGELHVCVEEGEWSEWVVEILSPWVDRVVSCTAPGRRGPRSDAMDAHELAERLRTRQTGPPVYKASREWSRLREAVRLEGKLMQDEVRAKQRLKSLYRRRGVACVNEEVYSPQLRRAWNAKLPTSVRPSAELLGLELEQLLELQKTAEEQMFAAAKQFPMWKTLQTMPGIGRKRAAQLLAIVVTPHRFRTKRQFWSYCGLAVVTRSTSDWVRQKNGQMVRSPVYQTRGLNPACNRQLKGIFVSAAQTALGCRRPNPLLDAYERIVESGTKPNLARLTIARKIAAVVLAMWKTESEYRIMS

SEQ ID NO: 229274 - protein, 418 aa, unidentified
MNVKTRRTKKQVNVENQAINLLSKEELNKKIEVVEKELRSYTWRELETNGKFAKNDKLSFITDDMLIVGCDIGSENHYIRAIDVRGRELSRGAFEFSNTSEGFENAKAWVLALAAKHDKKQIVLGLEPTGHYWFALAVWMISNGVSVVQVNPYAIKQSKEIEDNSQLKDDRKDPKLIANLVKDGNYGMPYLPEKVYADMRRLSMFRDQLTEDRIRNINRLHKELKIYFPEYMDAFGKIDGAFTLEVLKVSAIPTDITVLGAEGMKNIWHNAKLRGRSYSRANEIVSYAEKSVGLTDGIDAGREAVKWYAEQILKLVACSSGKHKGQTKISHRGRKRLRYWLFQAAKSAVSHADEFKQLHEYYTTRTNNPLKKMQSLVVIACKILRVIYTILKTGTTYDPQKLLEDIKRPTASQTPMAA

SEQ ID NO: 229275 - protein, 388 aa, unidentified
MHVVADRSETLTAIRTDLGAIFVSLELSRSTWLITSLSPGGGEKLSKHSVPSGDLSALFRRFDSVREKARARMGRDFPVVTIQEAGLDGFWIHRVLSKAGIESYVVDPASIAVSRRSRRAKTDKIDGETLVRSLLAFKRGEPRICAMVKEPTPEQEDRRRICRERKVLTTERVCHVNRIKGLLFAQGITDYEPLNRDRRDRLEELVTGDGRSLPPHLKAQISRELDRLELLLAQVKEIEIERDKLLHAEEKVIHSPAKLLIDIKGIGPEFAAVLCHEGLFRHFDNRRQVAAYAGLAPTPWQSGQVDREQGVSKAGNPRLRSTMVQLAWLWIRHQPRSNLTLWFQSRLRRNGGRLKKTTIVALARKLLIALWKYATSGVIIEGALMKAA

SEQ ID NO: 229276 - protein, 379 aa, unidentified
MYRILKIGMDVHTTNFTLCALESKFGEEDQILANITAGPDHKNVLDFIRRIKEKMDPKGQDEIDVECGYEAGCLGYSLFHTLTACKLKCRILAPTTMLSEQGPRIKTDRRDAKLIAQCLSNGGYHAVHIPTAEDNAVKEYVRMRDDHKLALKKVKQQTNALCLRFGFFYDGTHWTGMHLKWLRALKLPELIRETLDEYLATYDELTAKIDRYDKRIQEIAAQSEYQEKVRKLECFLGIKTHTALSLIVETGDFIRFRKGNVYAAYLGLAPGEHSSAESGGRLGITKAGNSHLRRLLIEAAGGICKGQIGKKSKDLIARQKGNPADVIAYADKANVRLRSKYYRLTRHGKKRNVAVAAIARELACFVWGMMTDNIHGNAA

SEQ ID NO: 229277 - protein, 400 aa, unidentified
MKTKQHTSAHGWNPTIKLQNQADFSGRNLFVGIDVHKQRWQVAVFYDGLILSNCSIDGSSDALVTHLHKRYSEAQFHCVYESGPFGFTLCRSLWAAGMECMVVNPADIPDTDRERRSKTDKVDARKLAMHLAAGLLHAVHIPTEKLQKQRSLIRFRKKLWGDLCRAKNRLKSELKFQGILIPISYDKAHWSHNFLNWIEEQAMKDEDLKQTLLLMLEEVKMLRMVLLKTERKVRELMWSNEFKEKSKRLRSIDGIGPLTSMLLLTEVGDVRRFKSFDALNKFVGFCPDSHSSGESVRHTGLSLRKHNQLRSMLVEAAWQVVRRDPVMLDRYRELTKRMRGQDAIVRIARKLLRRIRAVMISEKMYLRGIDGNITASQINAPIIPPAKNKGRPRKQLTLPK

SEQ ID NO: 229278 - protein, 394 aa, unidentified
MATIGIDVGKRQHIAAIQYDGEREARRAVLHFGADRAGLATLSAWIARQGGISRAVLESSGHYHLNLAAALQRQGLPVAVVNPLESKYFGKRRLQRTKSDPADARTLATLAMVDEPQVRDVLAGAELREAARFAMGLVDQLGRVDQKICRLVEIGFPELEQAYDDPTCVSALAVLRTAPTAQAAARKHTATLAQVARPGGGRRIGPKKAEHISALAHDTIAAPELAAQIGFQMRLLIAQHDMLESQIAEAEAHLASLLDGELVRRLRTIPGAGPAIVATLIAEIGDIQRFSEFDKLVAYIGVHPAERSSGEKGKNPETSWRMSKAGNAYLRTALYRMAIVGITHNPLIRAHYARKRAQGKSKMNAVGHCMKKALAIVWGVWRSGTDFAAPPSHP

SEQ ID NO: 229279 - protein, 398 aa, unidentified
MTESSDYESVQVFIGVDVGKDTHHAVAINRSGKRLFDKALPNDENKLRSLISDLKQHGQILLVVDQPATIGALPVAVARSEGVLVGYLPGLAMRRIADLHAGEAKTDARDAAIIAEAARTLPHALRTLKLADEQIAELSMLCGFDDDLAAQTTQASNLIRGLLTQIHPALERVLGPRLEHPAVLDLLQRYPSPEKLASLGEKKLAAQLCKLAPRLGKRLAADIAQALAEQTVVVPGTNAAAVVLPRLALQLITLRKQRDEVALEVEQRVLAHPLYPVLTSMPGVGVRTAARLLTEVACRAFASAAHLAAYAGLAPVTRRSGSSIRGEHPSRRGNKALKRALFLSAFAALRDPLSRAYYTRKMSQGKRHNQALIALARRRCDVLFAMMRDGTFYTPQGS

SEQ ID NO: 229280 - protein, 320 aa, unidentified
MFNTYTTLENANHSQPRVAALLACQDNMMPASWHMPISKSPFRYAVAVREENYTHQLIQYLGANGYTFHVVPGLEIKRSLGISRGKEDRADAKRIALYGYRVREEVEPYRVRGEALESLKGLMSMRRKLVSQRAGHKSTLGEQQRILDKKSGKVLFEVQQALIDALDVQVSHIENELERIIGQNPSLRNLYRLLVGIRGIGPVTARFLIVYTVGFTAFKNWRKFSSYCGTAPFPHSSGTSIRGRTKVSHLANKEGKTLLNMCAVSAIQFNPEMKAYYERRVEAGKNKMSTLNIIRNKLLARAFAVVARGTPYVNTMKYAS

SEQ ID NO: 229281 - protein, 412 aa, unidentified
MQVVYTHCAGLDVHKKTVTACVITPNQKGGTKREIRTFETHTNSLLNMLDWLLSFACTHVAMESTGEYWRPVFNILESSLEVMLVNARHVKNVPGRKTDVKDSQWLAELLQHGLLRPSFIPPLPQRNLRDLVRHRSNFVRERSNLVNRIQKVLEAANIKLASVATDIMGVSGRAMLKAIIAGDKNPEEMANLAVAQMRSKQEQLKQALVGRTQPHQRFILAQLLSQIESVEQVIKQFDSQIEEYCHPFNQAVQLLDTIPGVARQAALVIVCEIGIDMSRFKSAAHLAAWAGLAPGNFESAGKRLSSGTRKGNRSLRTILVQAAHAAARTNTYLAAQFRRLSARRGAKRAAIAVAHSILVIAYHLIQRNTPYSELGASYFERHEKTHLKKKRLIKQLEQLGYQVNLEPVSVAS

SEQ ID NO: 229282 - protein, 277 aa, unidentified
MEVYEDRRFGAAYGCHHGSGGGTGSPTSEFCGDVPSTPEAVRKLVGRLDDGKMDLRFCYEAGPCGYGLYRQLTMMGYDCSVVAPSLSPRRPGERIKTDRRDALTLARQHRSGDLVAVWVPDEEQEAIRDLVRCREDFKHAERRVRQRLNSFLLRHRRVYSGGGRWTQAHFRWLETQCFGHPAQQIVLQEHVDDVRHAGRLVEALEADMVQALETWSLAPVVRSLRALRGGNLIVAMTVMSELGDVTRFDSPTQLMAYVGQVPSEHSTGRSRRPSRLL

SEQ ID NO: 229283 - protein, 414 aa, unidentified
MLKIVYPICCGMDVHKSFIVACIASTNEQGVTTYKSKRFSTFTGDLRQCADWLSENNCKDVCMESTGKYWIPVYNILESTCNIVLAHPKYVKAIRGKKTDKRDAKWIADIFKHDLVAGSFIPPADIRQLRDLVRYRWKLTNFTTGEKNRAQNCLTVSNFKLDDVFSNVFGKAASAITARILENPTEKITDVSGFRTKSMKATNEQVLAAVDGEMCAEQAEKFRIIRSHMDSLELCKLNLESLILSVAEKYLPQLNLVMTAPGIQSFAAIGIISEIGVDMSVFPTSKHLCSWAGLTPQNNESAGKKKTTRISRAGAYIKPLLVQCALCAIRAKQFPEVRNRYLTLKKRRGHKKAIIAIARMLLTAIYNMLKKNEPYNPELYRKGDRPPAHREVSVEEAIFILQRQGYLVTAPPAS

SEQ ID NO: 229284 - protein, 341 aa, unidentified
MEHCGIDLHGKSSEVAVVDEAGELVETARIPTTEAGLRRWFGGRAGMRICLEAGGMSAWAERILARLGHEVVVCNPARVRLIAESTLKNDRVDAETLARLVRMDVRLLRPIQHRGETTQRLRGMLRVRGILVANRTACMNGARGLLRSFGYRVPGTTIQRLARALATREIPEELLALVAPLVATALELAEKIEALDYEVRAVGQGFAEVERLQTIPGVGPLVALAYVLCIEDPGRFRRSRDVAGFVGLRPRMRESGERSRFGSITRTGDPEIRRLLVQAAHGCLRSRQDSDLKRWAEQLAARVGKKKAVVALGRKLAVIMHRVWVSGAVFEPSHEVAAQAA

SEQ ID NO: 229285 - protein, 355 aa, unidentified
MNSEKYIGLDVHQATISVAVLDSTGKLVMESILETKAATILEFFAGLRGTLSVTFEEGTWAAWLYDLLKPHVAKLVVCNPRKNALLKDGNKSDRIDAHKLAELLYLNKLSSVYHGETGVRMLRELARSYLTIVKDLTRVMCRLKAVYRSWAIPCAGRDVYYTRHRIEWLGKIKEAGVRRRAERLYQQLDMLQYLRQQARRELLAESRKHAITVKLRQIPSLGPIRSALAVALIQTPHRFRTKRQLWAYSGLALETRTSGEYCYVKGGLRRSKKQISIRGLNKDHNHDLKGLFKGAATRASVLPGPFQDFYQRSLAKGIKPTMARLTLARKIAAITLTLWKKGENFDADKLKSQAA

SEQ ID NO: 229286 - protein, 432 aa, unidentified
MKFNQSNKQNQRISRISETTLVIGTDIAKHNHVARAFNYRGIELGKRCLFQNDENGLLNLLAWAESIKQEQGLTDVLLGVEPTGHYWFPLFHFLKQRGIEVVLVNPHHVKKSKELDDNSPTKNDIKDAKVVAKLVIDGRYTQPQLPEGVYADLRVLMNQRDRLCGDLNRVKGRIHNWLDRFFPEYTQVFKDWEGKASLITLQNFPLPQDVIAAAETTIAAIWKKNGVPRAVGPKRAELLYRKARKSIGLTEGATAARHELAMYMEQYVMLCRQIEQLMELVAGLVEQIPGAAHMMSMPCIGLITVAGFLAEVGDLSGYDHSQQIVRHAGLSLRENSSGLRKGETTISKRGRCRLRALLFRAALTMVAKNPEFRALHLYFTTRRENPLKKKQSMIAICNKLIRVLFELGRKQKEYDASKVPGPHREAQLQAAA

SEQ ID NO: 229287 - protein, 342 aa, unidentified
MSIASVGIDIGKLTFHLVALDDHGKVVVKKKFSRKQLLAYTAKLSTALIGTEACSGAHFLGAALRDQGHDVRLIPAQFVKPFLKSNKNDFLDAEAIAEAVTRENMRFVAIKTDDQLDLQALHRVRDRLVQRRTAVINQIRGFLLERGITFAQGPANLRRGMPSLLEDAEQNLTPRMRHLLAHLWEEWKQLEADVARISDEIDTIAEHDPACQRLRQIPGVGPLVSTATVAAIGNGAAFRKGREFAAWLGLIPRQHSTGGKARLLGISKRGSVYLRRMFIHGARAVLLIVKYDTGRLGQWARQLALRAPRNKVIVAVANKLARIAWAVLSSGNEYRAAAVAAA

SEQ ID NO: 229288 - protein, 449 aa, unidentified
MSKPILAVGIDPAKRVHRAIGVLFPDEVVFDCELPNALDAIQSLDLHLAELAATHAAELVYGLEDHRRYGRLLCEVLTERGRDVRVVNPLWTNRQRAFYGQDKDDAIDGRSIAAVVLRRRDQLPLANDFGPVAQAIREAERAIEDLGKKRTELVNRLHLQLNDVYTSAYETYFGKLKSPIALRFFRRFPIPQDLGGQDAVQLSKVILGLANGRVGPHKGRDREKFLQAKAEGILKTSASLRQTPRTPALELKAELIRQLCDELLVNHDRVTRLERMLRKQLLPATGQTITTMPGIGTILAAAIIGETASVARFRSRAAYAVYNGTAPARHSTGGRERHKARRDCNHRLKRAFWLAARAAALHDPLAKAYFNQCKSRGLNYNECIKRIARRMSDIVYSLLKSGRDYDRTIVEQAIQKRQEQVANADDSCVKEALPIPDQKRLSRRSHGGN

SEQ ID NO: 229289 - protein, 367 aa, unidentified
MKQQASAASETLIKDKMIIDFSGKLIYVGIDVHQRDYQVAKVHNGICLGNHRMAANSDLLIKHLHSHYRGAEFKCVYESCAWGFNLQRRLTEAGMQCLVVHAADVSTSDKERKRKTDKVDALKLARTLAAGELKGIYVPDETIQKERNLIRYRSRLIRDINRSKNRIKSLLKYQGIEVPEQYAKNNWSRNFLIWIEQQAAKDELLADTLLLMLDQMKLLRQLLLRTEKKLLELRKGKYASKVKLATSVPGIGPTTAMQFLLEAGDITRFKGFDALNDFIGFCPDTDSSGETDRDRGITTRRHKQLRSALIESAWQAIRVDPALMNSYQELTKRMKGVHAIIRIARKLLRRLRAVLLTGIAYQKGVVA

SEQ ID NO: 229290 - protein, 312 aa, unidentified
MSKKVPNDLDTVLNTLKPFKRKIKGIVVESTYNWYWLVDGLMDKKYKVHLANPSQMQQYSGMKYTDDKWDSFWLAHMLRLGILPEGYIYPKEIRPIRDLLRKRTMLVQHRTAYILSLQSMVNRSTGRKLRSRETKKLGKEGLGMIFSDKHLVMSAQSNCDVMAFLDGQINAIEKAVIKEVKLRYPFERLLTVPGIGDILGITIMLESGDMNRFESVSNYSSYCRCVSSKKVSNGKKKGENNKKNGNKYLAWAYVEAANFMRRYCPQARSWHQRKVSKTNQIVATKALSNKIARACYFIVKDQTAFDTEMLFR

SEQ ID NO: 229291 - protein, 408 aa, unidentified
MRLLVGDDWAEDHHDVEVMDEAGKVLAKRRLPEGAAGIAQLHGLVGGLLGEGAEDAEVLVGIETDRGPWVAALVAAGYLVFAVNPLQAARFRERHGVSGAKSDGGDAHALADMVRTDSHQLRPAAGDSAEAEGIKILARTHKTMIWERVREVQRLRHQLREYFPAALEAFEDLSAPDTLELLGKAPEPARAARLTRAQVSAVLKRAGRRNITERATAVLAALRGEQLVQPEILTAAYAATVRSLIAVIAVLNEQVKALQGQVEEHFGRHPDAEIILSQPGLGMILGARVLAEFGDDPRRYRDGKARRNYAATSPLTRASGKKKTVIARFVHNDRLVDALHAQAFAALTASPGARAFYDQQRASGHGHNDALRRLANRLVGILHGCLKTRTLYDEDTAWGHRRQTQHAA

SEQ ID NO: 229292 - protein, 369 aa, unidentified
MGKYIEVFVAFDVAKKKHAVAIAEGGRTGEVRFLGDVENSPLPIERTIKRLAGRYDRLHICFEAGPTGYGLYRQIQALGHECMVVAPALIPKRSGERIKTNRRDAVTLARLHRAGELTGVWTPDGAHEAVRDLVRAREAATDDLRRKRQQLLSFLLRHSRIYSGGGHWTMAHRRWLANQKFEHAAQQIVFQEGIDAIEDAVQRLRRLEKQLALIVPEWSMAPVVEAYQAMRGASFLVAVTFAAEIGDVRRFDTPRQLMSFLGLVPAERSTGDTIRRNGLTLAGNRRARRALIEAAWTYRYPARVSETLRARLEALPKPVRDMAWKAQIRLCARYRRLSATGKKLPVVVAAIAREMAAFLWAIGREVAPV

SEQ ID NO: 229293 - protein, 326 aa, unidentified
MGMGWTPPRRPWCARVVAFLTTEQEASVSEASTIGLDLAKRVFQAHGADASGKVVFRKRLRREQVLAFFAGRAACVVAMEACSSAHYWAREIGELGHTVRLIPPAYVKPFVKRQKNDATDAETICEAAQRPTMRFVSVKSEVAQANAVVFRTRDLLVRQRTQAINALRGHLGEHGVVVAKGPSHVAKLIAHLEDPATGLPEAARTVLRVLTASLQFLSERIDLLDREIARRAREDKEVRRLTTIPGVGPVIATALAALAPPADAFRRGRDFAAWVGLTPSQHSSGGKQKLGATSKMGERTLRRLLIIGASSVVQKAIKHGTPSGPG

SEQ ID NO: 229294 - protein, 420 aa, unidentified
MPNIEIGVDSMVKENFIYVGIDLHKETHTAVMIDCYNQKLGEITFPNRPAAFPKLVTKVKKCNTDGKEVVYGLENAYGYGRALAVWLIDKGYLVKDVNTAISHRQAKHRGAMYRKSDSDDAEAIALATLNMLDKLPDACPNDAYWSLGQLVHRRDNIMKQRTRLVNQLHEQLCIAYSSYKSFFNDISRPTALYFWEHYPSRKYLRGKFVEDLRKELVPVSHNKCSTKTCQAILDAVAGDKVKNIDYQDARDMVTLSIVSDLQHYDSQLMEVDKMLEQMYKMLGCTLTTIPGVNVITAVKILAETGDIKRFSNANKLAQFAGIAPLHLSSSGKGKDFATKQGNRRRQATIYFLAVQMIQVSSKGTPRHPAFRAYYEKRKAEGKTSQQALICISRRLISIIYGMLKNGTEYRMPVVESAGEK

SEQ ID NO: 229295 - protein, 375 aa, unidentified
MKEKLRFLGLDVHAETIAVAIAEPDGEVRSLGTIPNRAESIRKLIRKLGTAEKLRVCYEAGPTGYVVYWQLAELGVQCEVVAPTLVPVKAGDRVKTDRRDAEKLARCYRSGDLTAVWVPDEGSEALRDLVRAREAAKQDQMRARHRLSKFLLRSGQRPPTGVRPWTRPYLIWVAQLRFTQIAQEATRQDYLHEVEHMRERVARLEQAITEAVKLASPALQQVINDLQALRGIADISAVTIAAELGQVSRFGSARQLMGYCGAVPSEDSSGKRTRRGGITKTGNAHLRRIVVEAAWSYRRPPGIWYGLRRRQESISEEAKEIAWKAQHRLHKRYMKLGAAGKDQRKIVTAVARELLGFIWAIGIRAETISRQQVAA

SEQ ID NO: 229296 - protein, 326 aa, unidentified
MTQYDQLLPKPARRLAPSEFVPWVRQLLRAGHVVHVVYEACGFGFNLYRELKALGVHCYVIAPRKLDEGYTRVKTDPRDATTLCQRLSRYVEGNTRELAVIRVPTEAEEQARHVSRQREQLVRHRQKLEAQGRSLLVSHSLPAPAHWWKNQTWSRLSKLLPSWICLRLEVHRPALLTLEQQISALSTELEAAAPGDVPAGVGKLTTVVMTREICSWERFRNRRAISSYTGLCPGEHSSGTKRIPGSVTKRGNLRLRAALVECAWRMVRFQPNYAPVKKRLSVLAKGARATGAQRKKAIVAVARHLAVDLWRVHTGRNTAAQLGLTI

SEQ ID NO: 229297 - protein, 408 aa, unidentified
MRLFVGDDWAQDHHDVELMDTTGRVLAKARLPEGVSGIARLHELIGRHLREDGEDAEVMIGIETDRGPWVVALAAAGYVVFPVNPLQASRYRERHGVSGAKSDGGDAHMLADMVRTDSHQLRPAAGDSPQAEAIKVVARMHKTLIWERTRQLQRLRHQLREYFPAALEAFEDLAAPDALELLGKAPDPARAARLTRAQVSAALKRARRHHIADKTDAILAALRGEYLSQPPALTAAYAAAVRSLIAVITTLDEQVRTLQGQVEDHFGRHPDAEIYLSQPGMGAIVGARVLAESGDDPHRYANAKARKNYASTSPITRASGKKRLVAARYIRNDRLIDALMAQAFSALKASPGARAFYDDLRARGIEHNDALRRLANRLVGILHGCLKTRTLYDEATAWSHREKIKPAA

SEQ ID NO: 229298 - protein, 340 aa, unidentified
MQAIRFGIDLAKNVFQVHGVDAAGRVVVQRQLRRAQVEKFFAAQPPALIGMEACGSAHHWARTLSALGHDVKLMPPAYVKPYVPRNKNDARDAHGCCEAVSRPDMRFVPIKSVEQQWARALHRTRDLLVRQRTQLANAMRGLLYEMGQTSAKGAAGIETLLRRVEAADEAIPAALLICLVPLAGQWRALDGEIGKLDKQILAQVRQQRAALRLTTIPSVGPIIAHATVAAIGDGRQFASARDFAAWLGLTRKTHDTGGKHRPTGHISRAGDKDLRRLLILGASSWLRQVRAKPDRGSPWIRGLLARRPVKVAVVAQAAKTARIIWAMLQSGQQYRAPAVA

SEQ ID NO: 229299 - protein, 372 aa, unidentified
MLIHYIDIAKRNFVIAVSSLSKTKTETNNPKGIAHTIEYLKKHKVALVVTESTGGLEIPAAKAIRRAGIAVIIANPRQTHQFAQSQPLTKTDAKDAKMPAFFAQMTAQKEDSQTMPYQPPTEAEEVLEALVNRRNQPADMRTAEKNRLHQVHETQVGSVKQLIAHFDRLIDELDKQIDDHTHTHFDGKAQVAEQIKGIGSITTATLMAMLPELGRLSHKRIASLVGIAPHPRESGETKFKSRCFGGRSAVRKALYMATVAATRFEPLIRDFYQRLLSEGKPYKVAVTACMRKLLETFAKFLSLPTAETPTQVFVYFRPKYRLILPKYPLNPPRIPDNQASGLPFRRQRAHLACWPLSTGSNTSLSGGFAHSL

SEQ ID NO: 229300 - protein, 410 aa, unidentified
MEVLYPHCAGLDVHKDTVVACVRHIVNGTVRREVRTFKTTTTELLALSDWLAAEKCTHIAMEATGVYWKPVWHILSDGNFSLVLANAAHVKNVPGRKTDVNDATWLADLLAHGLIRGSFVPDPQTQEMRNLLRTRKQLTRERSRHVQRLQKTLEDANIKLDSEISDIMGLSGRKMMEALIAGESDPEQLARLAHRRIKAPPEALREALRGRITPHHRFLLRLHLQQIDAIDKVIADIDREVDAVVEPFRTTVLLLTTIPGVDELSACVILAEIGRNMSRFPTAGHLISWAGLCPRNDESAGKRRSTRMRKGAAWLKTTLVQCAAAATRKKASYLQAQFHRLRSRRGAKKAIGALAASILTIVYHMLLGGELYRDLGPDHFDRRAKATQTKRLVTRLQNLGYAVHITPLPA

SEQ ID NO: 229301 - protein, 424 aa, unidentified
MHLSAVSSNSTPATIACDVSSDKLNLFCRELSSPGAVAEWEIANRTEAITVTLNGIREQAATRGIAALRVIVEPTGIYHKLLLRIAVSLGFQTGLVDASHVKKMRSVIFGDTGKTDQRDPVAIEAVAAQGRLIEDRRHAEVYQLLRQWGKLHHDAEVAMIDAKSRVHRALTLLFPDFDFTTDFLYGPSGQAIVSCFGLDPHAIAAQNVSRMYERLRRHSRIQRSSVVRLLAQARETIAAVSKSRVSDLLARELAYAWEDVEFATRRRETARTELEALYDEARIADPRLPNTTGSAISKVALARFLGESGPLSGYASWRQLLRVGGVNLRERKSGKYVGKTMIARTGRALFRAIINQMALPLVKRDRLYGAYYHHKTGVQKMPGKKAMTAVSRKIVKMIWGWYRSGAAFDATRVFTCAGEHLRAA

SEQ ID NO: 229302 - protein, 471 aa, unidentified
MAHKPCKRKSTGAKARPGLPVSAPNLPRSLSKVNLNAAGIDIGATAHYVAVSEGRDENTVRCFQTFTADLQALADWLKQCGVETVAMESTGVYWIPVFEVLESRGFEVKLVEPGKLKSVPGRKTDVLDCQWIQQLHNYGLLQGSFVPPEKICILRSYMRQRGMLVEYAGRHVLHMQKALMQMNIQLHHVINDITGATGQRIIDAILDGRRDPHELAKLRDSRCKKDEQTIAMALEGHWRDDHLFALRQAVELYRFYHRQLAGLDERLKSCLATFEDQSDGKVLPKSPKPKTGSNTPDFDIRNHLYKITGVDLTKIDGISGYAALQLLSEIGTDMSRWPTEKHFASWLCLCPGSKKTGGRLISGKSRASANRAATVLRLSAQSLARANCALGAFYRRMRARLGAPKAITATAHKLAKIVYNMLRYGKEYVDVGIEYYEKQYRQRVVKNLERRAAQLQLCLIPIAKTRTELAG

SEQ ID NO: 229303 - protein, 438 aa, unidentified
MSHSYARLLDPALENDSTPFAGYDARWEPLEDRLYLPCGVDPHGDICGAVFVHPYPQHTQVLSQRIVRNNNLQDMLWMIETGDRLAAPFRAMPIFVFESTNVFWRAQRNFLHRAGYATATVCGRQTKHARSTVTRKTHNDLKDAYNIAKVFKQGDSHATRILPEPLASLREYCRLHQFLVSYSVAIQNRMFCIRYQTHPEFDDHFSKHVCPTTLALMEAELVHPLHLLDCDLDHLTHVIRTASRGKLGRKRAEELSLSAQSTFPPPYAVEGLSFGLKILAQAYRHLHTHLLPPLVQRIQAILDADDFPFTHHLDEIKYFGPIIIGNYLGELGLPSWFSTVDSVVAWFGLDPSVAESANKPTGQTHLTKRGTKYGRRIMWLVGRNWSRFMPQGRRLYLKERNQHKRSYDAAVCVVAAKLVRIAFAMVRDGSHFDIDKAF

SEQ ID NO: 229304 - protein, 415 aa, unidentified
MSLKIMYKICCGIDVHKTFVVACIASTNDQGVTTYNSHRFSTYTKGLKELLQWLLESNCKDVCMESTGKYWIPLYNVLEKDCSIVLAHPKYVKAIRGKKTDKKDAKWIADLFKHDLVAGSFMPPADIRQLRDLMRYRFKLTCVMSSEKNRLQNCLTVSNIQLGNVVSDTFGKSSKKILDKILENPMDTSFDIEPLIHGSMKGKLPELELAIDGYITPSQAGKLKIIRKHLEDLESRKAELEELILALASPYQQELDIILTAPSFKSIFSSITVISEIGVNMESFPSAKHLCSWAGLTPTNNESAGKKKSVRVSKAGCYIKPLLVQCANSVVKSEKHPEIRNRYLRLRKRRGHKKAIIAIARMLLTALYNMLKNNEPYNAELYRKSDILPVDREITVEQAILMATFQGYRIKSATE

SEQ ID NO: 229305 - protein, 421 aa, unidentified
MTQPSHDTFAAFIGIDWADAKHDLCLQAAGTAKRERFQLEHTPEAIDAWVTTLRTRFNGHPVAVCLELDKGPLVSALRKYDFLVLFPINPLTLARYREAFTPSRAKDDPTDAELQLELLLTHRDKLQPLQPQSPPMRARAQLVEHRRRVVGDKVRITNRLTSTLKNYFPQVLHWFQEKDTRIFCDFLSRWPTLKAAQLARRSTLETFFRDHHVRTADVLATRLHAIKTATPLTTDEGVIAPNTLLVQTLVSQLRVTLDAIEAFDQAIAQRAQHHPDFPLFQALPGAGPVFASRLLVAFGEQRERYASAAARQKYAGIAPVTERSGKKAWVHWRLQCPKFLRQTFVEWTAESMRHSFWAQVSYQQQRDKGNTHQAAVRALAFKWIRILYRCWQERTPYDESTYLQALHRRGSLLIQHRAKAS

SEQ ID NO: 229306 - protein, 356 aa, unidentified
MSHDVKYIGMDVHKEAVVIAVLNESGKQVIESVIETKASSILQFLHGLRGELHVTWEEGTWAAWLYDLLQPQVQHMVVCNPRRNALLKEGSKSDKVDARKLADLLRTGMLRPVYHGENGLRTLRELGRSYQTISKDLTRVMNRLKALYRGWGIPCAGTQVYAARTREEWLSKLPQAGVRRRAELLYQQLDGLQALRREVRPEFLAESRKHKAAKLLRQIPCIGPIRAARLIALMQTPHRFRSKRQLWTYSGLGIETHDSAQYRFVRGQLQLSKKPQQIRGLNRNHNHEMKEIFKSAATRASCGRGPFYDFYAALLAKGMKPEMARLTLARKIAAITLTLWKKEERFDAEQLKTQAA

SEQ ID NO: 229307 - protein, 334 aa, unidentified
MQNVTLIGIDLGKHSFHVHAQDKNGNALLRKKFSRNQLTAFLSTCAASTVVMESCAGAHYMARHISQLGHQVKLISPQFVRPFVKSNKNDFIDAEAICEAASRPSMRFVTPRTEDQQAMSALHRVRDALVRERVKTTNQMHAFLLEFGISMPRGIAVIRRLAAVLEEHELPPYLARLLMRLHQHYAYLSEQIEELEQELKTHMADDDTAQRLLTIPGVGLITASLLATKLGDGKSYASSRDFAASTGLVPRQYSTGGKSTLMGISKRGDKNLRRLLVQCARAFMQRLEHNQGRLADWAKAQLLRHHSNVVACGLANKLARIAWSVTTHRTAFIQ

SEQ ID NO: 229308 - protein, 320 aa, unidentified
MKQAIFVGVDVSKKQLDVAIRPLGQVFGVSNDRRGIAQLVKRLKKLQPVCIAIDATGGLEKELAYALATENLPVAVVNPRQVSNFAKSTGQRAKTDAIDAAVLAHFAEVMKPEARPLPDVASRELSALVTRHRQLVEMMTAESNRRDLASKTVRKLINSLLRSLKDQLAVVDREIRQAISASETWRRKAELLRSVPGVGKVTTATLLAGLPELGKLDRRQIAALVGVAPFNRESGTWKGKRMIAGGRGWIRSVLYMSTVVAIRRNPILKEFYERLRARGKPAKQALTACMRKLLVILNAMLRRQTHWSAPNPLLSLRVAG

SEQ ID NO: 229309 - protein, 307 aa, unidentified
MFVGIDVAKDRLDVHVRPAGESFVISRDDEGIEELAKRLSAMVATLVVLEATGGFETVVAAGLAAADLPVAVVNPRQIRDFARATARLAKTDALDAAVIAHFAEAVNPPVRRLADPQQRLLGELMARRRQLIEMMVAEGNRRRLLTARRTLKTVDRVLATLKAQLEEIDHDIDIAVRGTPAWREAEDLLISVPGIGHKIARTLLAEMPELGRLDRRQIAALTGVAPFNRDSGTRRGRRAISGGRIVVRSALYMSVLVAIRRKLPLAQTYHRLRASGKPAKVAIVACMRKLVTILNAILRDKKPWATA

SEQ ID NO: 229310 - protein, 419 aa, unidentified
MAFKILRKNCCGLDVHKTWIYACIGITDADGRTEYKQARFSSFSNGLRELADWLAKYSCADVCMESTGKYWIPVFNILEKTCWVTLAHPKYTKPQKGNKTDRKDAKWICDLYMCGMVKPSFIPPADIRQLRDLMRYRTKLTNMLTSEKNRAQNCLTVSNLKLDDVFSDVFGKSSRSIIQYILEHPGEQFDVAPFLDRRCKHSVEEVQAAVDGAVSREQAAKLRECLQHIDQLNEHRKNIEAEILRLAEPYPYQLELLRTVPGFSSAPLTAVALVSEIGVDMSVFPSSKHLVSWAGCCPRNDQSSKTVKSTRISRAGCYLKPLLVQIANAVIKSDKYPECRERYRRIKARRGHKKAIIAVCRMLLTAIWNVLSKLVPYSAEGYLTDKLTEHSVVISKAQGLELLRKRGYIFKDDLPADSA

SEQ ID NO: 229311 - protein, 310 aa, unidentified
MNQTTSVFVGIDVSKAVLDVAVRPSGTTLRFSNDEGGIKALVAEMNALAPALIVLEATGGFETPSVAALAAANLPAAVVNPRQVRDFAKSTGKLAKTDTLDAAILAHFGEAIGPAVRPIKDADLQALEALVTRHRQLLEMLTIEQNRLSMASSQTRKDILQHIAWLKKRLKDIDEQTTRCIKASPLWLAIDQLLQSVPGVGPVTSSILLVALPELGKLNRRKIAALVGVAPFNCDSGTLQGKRRVWGGRAQVRSTLYMATLVAVRFNAVIRAFYTRLCKAGKPPKVALTACMRKLIKTNTPWAQSAPENA

SEQ ID NO: 229312 - protein, 336 aa, unidentified
MGNIPIYVGLDYHQSGVQVCVLDRQGAPKMNKMCENNWQEVVRAVAPHGRVVRAAIESCSGAADFAEELINNAEWNVDLAHPGYVSRMRQNPDKTDYSDARMLADLERVGYLPKVWLAPRAVRELRLLVRYRQQQVAERRNIKLRIGAVLREQRLKCTKHGRWSIPWLWWVKNEAALSEQGRWVVNQHLEELEYRNARIANAAKQLSQVCHDDPLVKRLLGVPGIGRVTAWVFRAEVGRFDRFRNGKQLARFCGLSPRNASSGMKQADAGLIKAANKDLRIISLQAAHRLCRTEPRWKEMAMRMREAGKAPSVTVAAVANRWLRWLFNEIRGAYAN

SEQ ID NO: 229313 - protein, 344 aa, unidentified
MWTIGLDVHWKGSTFCVLDENGREQKTRTVRGNWEALLSELAMIRKPFAIAFEASTGYGFLHDRLDRIAERVEVAHPGYLRLIFRSKRKNDRVDAQKLAKLLYLNEVPTVYVPTAEMRAWRRLIEHRQGLLQERNRVKNRIRALLRSHGLQAPKGLWTRKGREWLKAQALPSVMDAAQRDLLAQQLESVQALITTVEKALQTEAQKHPGVELLMSIPGVGIRTAEAVVAYIADPSRFHSAKAVGRYFGLVPCQDASADRNRLGHITREGPATVRRLVAEAAWQGIRRSATVRAYFQRIQKGDPDRKKIALVATAHYLLRVMHALLRTGEEWRETSTESTEKTNA

SEQ ID NO: 229314 - protein, 312 aa, unidentified
MTSEAFVGIDVSKRWLDVRIHGEAESRKLGNDPDGFRSLIEWMMPTQPVLIVFEATGGYERRAVKALGEAGYAVAVVNPTRVRRFAEALGILAKTDKIDAKVIAHFAQVAQPTVNGRQTPVEEQLAACVERRRQLLVELVAEKNRLSTCPACVREGIAEHITWLDEHIERLEIEIQACICQNPAWQARAEIIDSVPGVGLVTASTMVAELPELGQLNRQKIAALVGVAPFNKDSGPKRGKRRIFGGRSGVRRTLYMAALSATKFNPVIRPFYESLLRRGKEKKVAITACMRKLLVIINAMVRKGEAWRLSPV

SEQ ID NO: 229315 - protein, 412 aa, unidentified
MEVVYACCCGLDVHAKTVVACLVTKGRKEIRTFATMTDELLQLGDWLSSAGCTHVAIESTGVYWKPVFNILESLLKVILVNARHIKAVPGRKTDVRDCEWLADLLRHGLLKASFIPPREIRELRELLRYRQTVVTEHTAVANRITKLIESANIKLGQVASEVLGLSGRLMLRALAAGETNAETLAELAQGKLKSKKAELRRALEGCLTPVQRWVLTELLTRVEELEAALTRVETRIGEEVAACPDPFVPEAVELLESIPGVGKRTAQTIGAEIGVEMSRFPSAKHLASWAGVCPGNHESAGKRKSGHPTKGNKSVRTILVEAAWAATHAKGTFLQAKYHRLVKRMPKQKALGAIAHRLLVISYHLLSRRVPYAELGTAPVDEQQVTRQRRRLVEQLVGLGVKVTLDEGGAVA

SEQ ID NO: 229316 - protein, 319 aa, unidentified
MKTKKYNRKAAGIDTGKDKLDIAVHGSPDLLEVANDTAGHEQLIEWLVERKIKRIGIEASGGYEKAVVAALRLAGFQVIVFQPNQIRCFAGFKLQRAKNDRIDAALIARCAAFCEEIREAPDPRLQDLAEPLTLIDQLSEDIARWKTRLEHVQQAEQRGWIKDEIMRLTQIITTKRACLLRAVKSHKDLARRYSLIESVQGIGLPTALTLLIRMPELGSLTREQIAALAGLAPFDHDTGRFKGQRRIAGGRGRVRKALYAAAFAAAYRWNPHLIALYKRLTECNKTHKQALIACARKLLVMVNAVVARGTPWIKTETVL

SEQ ID NO: 229317 - protein, 312 aa, unidentified
METKFVGIDVSKLTLDFDCLPVSAAQQFANDAAGIAALVALLQGSGVERIVIEATGGYETAVASALAVASLPVVVVNPKQVRDFAKAIGHFAKTDRLDAKVLALFGERIKPPLRTIPDETQRALADVLGRRSQLVVMRAQEKARLATVAAVARRNVEQHIAWLDKCIGKLDTDLGDRLRNSPLWCHKATLLDSVPGVGTVTTFSLLAKLPELGTLNRQKISALVGLAPFSDDSGKRQGARYIRGGRAEVRCVLYMATLSAIKHNPPIKAMYERLKKAGKPFKLAMTACMRKLLTILNAMLKTNQTWKIQPSS

SEQ ID NO: 229318 - protein, 416 aa, unidentified
MDTLNTTSFTAFIGIDWADTKHDVCIQPCCGGSREFNVIPHQVERIDEWVQGLCERFGSPIAIAVELSKGPIVYALQKYDCFVIFPVNPSTLAKYREAFQPSRAKDDPTDAELAVDLILRHPERFKALEPQSMEMRKLALLVEQRRQLVDDKTRTTNRLRCALKQYYPQVLEWFDHIDTPQFCDFIMRWPTLIQAKRARNSTMMSFFHQHNMRREEVLERRLTAIKSSTPLTFDEAVIVPHRMQAEVFVTQLRVALDAIKQFDTEIEHVAKQHVDYALFSELPGAGASLAPRLLVAFGEQRERYKSAEDLQKFSGVAPVTERSGKKHWVHWRWQCPTFLRQTFVEWAAQTINKSYWAGEYYQQQRAKGCTHQAAVRSLAFKWIRILYRCWQAKKPYNETLYLKVLARRGSPLLDTK

SEQ ID NO: 229319 - protein, 311 aa, unidentified
MEHFAGIDISKRHFDLHLNPEDQNYHFHNNTSGITRCVKLLGERQPQLIVMEATGGYETALAVTLHKAGRPVVVVNPRQIRHFAKALGQIAKTDKIDAEIIARFAAQVRPPLRNFLDDKARRLKAFVARKNQLVAMHVAERNRLEHAVDKTIIRSIRQSLKSLERQIDRLEQHLLDAIAQDDELQHKADLLDSAPGIGPATAAMLVAHMPELGHLNRRQVAALGGVAPMNRDSGTFKGKRMTGGGRTHVRTGLYMPIVSALRWNPVIRTFYQRLLTKGKTKMTALVAAMRKLLTILNLMIAKNETWNPKNA

SEQ ID NO: 229320 - protein, 344 aa, unidentified
MTNIQFKDIDHESKPVFFAGIDVGAEELILVIRKNGKPFDPQKFANTPADRTRLVKKLVKLPGIIVCLEATGVYHFDLSLALHDACVLLMVVNPKAAHNFAKVLMKNSKTDAVDANTLAEYAARMDFVAWTRPSDEQIALRSFARRINALTGQKAAAKNHLHALTATSETPKAVLKDAKLAITQLEKRIDRLTAETLILIDKQPELKRILTLLIGIKGIGNTSAIALMGELLLLPPDLSHREWVKFAGLDPRAFDSGKSVHKKTRISKAGNRHIRAALYFPALSAKQHDKHVKAYFQHLMDNGKTPLQGVCAVMRKLLHAIHGMLKHNEPFDNTRFYAIPISAE

SEQ ID NO: 229321 - protein, 414 aa, unidentified
MALVRWVGRAIGLDVHRDFCVVSICEDGKVRSAGRVPSTPEGLGLLAESLLATDRVALEVTAGCWEVARILAPFVDRVVVVSPEDTGIASARAKTDKLDARTLAVLLWKGELEAVWMPDERCRILRRRLARREQLVHARSRSKNEISAVLQRRLIERPGFADLFGVTGRRWLAAVELPVEERESVDAGLRQIAFLDAEIKAVEQLIAQQALAWPEIRRLMTVPGVNLICAATFMGAIGEPSRFFSSRKLVAYLGLDPKVRQSGETPARSGRISKRGSASARWALVEAAWSVVKQPGPLRAFYERVRARRGHGKAIVATARKLAVLFWCMLRRHEDYAHQRPALTKKKLRELELTAGAKPRTKAAAGIWSTNRAIRDAERALTEQAEISYKRMVADQKAGRPTRKVGASATPERA

SEQ ID NO: 229322 - protein, 400 aa, unidentified
MVAPSELTRLASLCLQLPDVSRGYRVDGPTASRATVGLSWNQPRTVRMKYKRIAIDTAKHVFTLHGVDAQERPVLRRNLKRAEMEVFFGKLAPTEAVMEACGGAHHWGRVLSRLGHHVRLLPAQYVKPFVKRAKNDRADAAAISEAAARPSMPSVAVKSAEQQANSMILRHRAMLIAQRTAAINALRGHAAEFGVIAAKGTAQVEALLHKLANEAAVPAVAKAMFAQMGTHIASLTQQIEALERELLALHKADPVSQRLAAVPGIGPITAITLSLRVAPEHVVSGRHFAAWLGLTPKEHSTGGKPRLGKIGPRSGPMQRQAVSALSKAGNERLRMLLVVGATAVIRHARPGRKTASAWLLGLLTRKPRKLAAVALANKMARIVWAMMARGEAYRPQPVSA

SEQ ID NO: 229323 - protein, 364 aa, unidentified
MSVYVGTEVHRKRSQVAVAGEDGRVQLNRNVVNGPQPMLGLLGGLPPGTPVASGAAFGWGWLAGLLEDYGFEAHLVHPLRCKAIASARLKNDKVDAAILAQLLRAGLLPEAWIAPPEVRALRALLRHRIQLVRLRTLLGNRIHAIAADHGYDRPAGYWSGPGRAWLASLDLPPASRQVIDDDLALIDALASPIAALDEQVRRRAKGDPAVKVLTQLPGVGEFTALVILAETGDITRFGSARKLAAWAGLTPTVRSSDRTVRHGHITKQGSAWLRWALGQAAQTAKRSPDFAATYQAIAARRGKQIATTAIARKLLTRAWHLLTDAGITGPQACPPPRLSPPTGRQAPGELAKVHEPALPPRTSC

SEQ ID NO: 229324 - protein, 319 aa, unidentified
MYKIVIGVDIAKLKFDVASLNNGKYKHKVFTNNDQGYNQFINWIQLLFADDKPLICMEATGVYSLPLAEFMVNQSYAVSVVNPAQIKAFAGSELSRTKTDKTDAKLIARYAITMQPPLWTPPPQNIRILQALTRRVEHLLEMSQMERNRLETAPPTIIESITAVLATLEAELKATRQAISDHIDNDPDLKQRHDLLITIPSIADASIPHLLTALSDHHGFTSAKQVVAFAGLAPSIRQSGQWLGKTHIAKKGDPALRKALYMPALVGWRHNPPIRTFCERLKANGKNGKAIVCAAMRKLIHLAFAILKSGQPFDPNYAV

SEQ ID NO: 229325 - protein, 347 aa, unidentified
MNFYNNIHPYYCGIDLHARSLYVCIIDQAGNTCLHKEISADPDKLQQLLEPYIGNIVVGVECMHCWYWVADFCDDAGVDFILGHALYMKAIHGGKAKNDRIDSFKIANLIRGGNFPLAYVYPKAMRATRDLLRRRMKIVRHGADLKAHVVNTTSQYNLPPNKVNLKNKVAREQLRSTFPDLSVQKSIDLDMVILDCYAEQLSKVEWYIQQQAKQHKPNHFHLLKSVWGIGPILALTIIYEIGDIERFESVQKFASYARLVKCKAESAGKSYGTQGNKIGNAHLKWAFSEAAVLYLRGNKKAQKYLLKLQKRMSKAKALSALAHKLGRCVYFMLKNESVFNEEKFLKS

SEQ ID NO: 229326 - protein, 325 aa, unidentified
MKEILLAGVDVSKLTLDIFVKPCGLSLQISNDRKGFMQWWKEMKKLITPDTRVMVVMEHTGLYSRKFEEFLRTSGVDYCKIPALEIKRSLGMTRGKNDRIDAERIAGYGWLRREILHADPQLDKSIEQLKHLLGLRLKMVRDRAGYINRMKEMKAAGYHQELKLEVEIVAYLAKQIKKAEASIRELIAANPLLQTTCELLRSIKGIGPIIAAYMIGNTNNFTRFSNARKFNCYAGIAPFNYQSGTSIKGKSRVSHLANKDTKTLLNLAATCAIRCDEELKTYYLRKVGEGKNKMSCINAIRAKLVARMFAVVKRQSPYQPLAAAA

SEQ ID NO: 229327 - protein, 418 aa, unidentified
MNEDGNTRGTRRYVALDIHKHYCVVAGVDREGRVMLQPVRVEHADLEGWLKKNLRGTDHVVIESTTNAWHVYDLLSPLVERVVVANPIKVKQIANARVKTDIRDTLILARLLAANLVPDVWVPPAHVREMRQLLSQRRQLVETHTQIVNRMHSVAHRHHLKHERGKRFNEKTTGWQKDKKLSSLEQFQLELEMENRAYMEKQIQRMSREVTKMCHQKPWAQSMTYLMQLPGFGVITAMTVLAAIGDIQRFDSARHLASYSGLTPGLEQSGTKNRGKGMTKEGRKELRWALVEVAQRAVKSDPLWKHRFQEMQKRMHRNQAIVAIARRLLELVWYVLTRRQPYRHFSHERIAYKYLTWAWQMDDEARDGLTRQQFTRYYLMRLGIGQDLTRIALDPKHPRKISSEAELLALRPELQHLE

SEQ ID NO: 229328 - protein, 426 aa, unidentified
MSQSSTLFMGMDVHKETIAVAYIAQDHGAEGTYLGTMGTRQCDIDHLVRKMQSKATHLIFVYEAGPCGYWLYRYLTKKGYDCWVVAPSLIPKKSGDRVKTNRRDAMQLARLARSGDLTLVCVPKVEDEAIRDLTRAREDTLSDLKDAKFRLKAFLLRHDIRDTGRANWSPAHLRWLSEVVCPTPTQPIVFQEYVRAVQEHTERLQRLEQELHEHVKAWRLSPVVEALQALRGVQFTVAVTLVAEMGDLTRFDTPRELMKFLGLVPSEYSSGEQRRQGSITTAGNTHARRVLVEGAWAYRYPATVSRHLQLRLETQPKIIQDISWKAQVRLCKRYRRLVSRGKHANVVTVAIARELAGFMWAMAREGPITPSYQQRERIQPRTQKVYQGASAETQPRCGVTLDGVKRLRQDTRAETEAGTRRTQVRW

SEQ ID NO: 229329 - protein, 461 aa, unidentified
MAKKAKKVKTAKGAELRIVNPDAAGIDIADGIMQVCVPADRSKDNNRAFGAYTSDLHAISAWLRECGIKTVAMESTGVYWIPLFCRLQEDGLDVVLTNARDVKNITERKTDESDAEWLMLLHQYGLLKASFQPHNDAKRMRTLTRHRDTLSREASSMVLRMQKAMQQMNIKLTLVLSDITGKSGIRIIEAILAGERDPKRLADLADIQCKTPKEEIAKALEGNWEEDLMFVLRQNYDTFKHYCTQLGECDAELEKLMENYRAEVAKVEDTSYSPAKKRRDYKKTRHTVGFDVERKAYEMWGVNVFEIPGISHLTALELMSELGHDFTRKFPSSKQFCCWCNISPNTKISGGKRISSHVPHRRNNVGLIFRSIASSLANAKNQLGNFYRRIRSRAGGKAAVIATAHKVAEIFFAMVANQTTYNPERVGIDEKVLLEKRITRYKRELERITGTHIEIGNACVP

SEQ ID NO: 229330 - protein, 431 aa, unidentified
MNRSVWFLSVGIDVGADFSLMAFALPSQELLGKPYKIIHSSQHSLNGAVEKIKTLSQKYQLPARVFMESTGIYHYPLYHKMKDAGFDVFVLNPLVTHAGRDLNVRNIHNDKYDSQKIALLGLRPGLKTSLIPSDQVISMKVILREYYAVKKEISMYICRLKNQLRQAFPQFLPLFSKVNGVTAMAILCEYPNPESLLNAGEHAVADFMKSVSHNGPLKVQKKAAALIQAAQDARSFGHWNHGISILIRHYIEMIRLLDIRAKTLLAQAKALLAEQDSKTLAHQTELLQTIPGIGFLSALTLICELGDFSAFKRPKQLFSYFGLDPIVRQSGNYNGTNLKLSKRGSPFARRCIFVIALQSISLNIHKEPKNPVLRTFYEEKCMCKAKMTAIGAVMHKICNLIFAVLRNDAPFVLQTPEQHNAAYLSKTHSVA

SEQ ID NO: 229331 - protein, 465 aa, unidentified
MKLPPNHQSRAPEKVSTAVTSQWQQINEKAAGIDLGSGEHWACVSPDRTSRNVRRFGCFTPDLVAMADWLIECEVTTVAMEATGVYWIPVFQILEAKGLEVKLVNAHHVKTVPGRKTDINDCQWLQQLHTYGLLSGSFRPDDQVCILRSYIRQRDSLIKSASTHVQRMQKALIQMNLHLHKVVSDITGLTGMAIIRAIVAGEQDPPTLAALKHPRIKSSTTEIAKALTGDYRCEHVFVLKQELTLYETYQQEISQLDVEIEKCLASFATRVDDQPTSPTRKRRKKPTANHPNFDLHQYLYKIAGVDFTLIDGLDALTVQTILSEVGLDPKRFKSVKHFCSWLGLSPGQKITGGKVKSSQTRTVVNRAANAFRIAAFSLTQSRSALGAFYRRLRSRLGAPKAITATAHKIARLFYRMWTIGGQYADPGMDYYEQRYQQQVLNHLRNKAHSLGFDLVAQPTASECVS

SEQ ID NO: 229332 - protein, 376 aa, unidentified
MTRIVYIGMDVHKDTYSLCSFDAHENLLFSETTVKADTTTVLSYIKSIEKRFIDDDVMIVCGYEAGPTGFSLCRELQKANVSCVVMAPTSLPKSPDEKKRKTDKYDARNLALHLAHKTYKAVNVLSPEIEAIKELTRTRATALKAQKRAKQNMLSFLLRKGMVYPYGGRARYWTQKFYAWLKTLEFTNDIERYAFEEYLSEVNHQTSRVSRLDEKIGEIAEDPLIKEGVKKLCCFSGISTLTAVSLISEIGDFNRFEKASYFASYLGLCPGIHSSGLSSQTLGITKAGNKNLRCLLIEAAQSMSHSQICGKKSLRLLARQKDMNPLVVAYADKATERIKRRRSSMILRGMNCNKATAAAAREMACFIWGMMTNNIA

SEQ ID NO: 229333 - protein, 341 aa, unidentified
MDTVSLIGVDLGKHCFHLHGQDASGRMVFRKKLTRSQMFTLLGNFPSCTVVMEACAGAHRIARRLQALGHEAKLISPQFVKPFRQGNKNDFADAQAICEAASRPSMRFVSPHNEAQQIVSALHRVRGGLVRERTGTINQIHAFLLEFGISLPRGMAVIRRLPAVLEAESLPPRLVSVIERLHAHCKYLDEQIHQLERELLTQLHEDERSERLLEIPGIGPMTASVLMSELGDARQYGSARQFAASVGLVPRQYSTGGKPTLLGISKRGDKELRRLLVQCARTIMQRIEHRTDALGVWIRGLLARRHSNVVACALANKLARIAWAILAKGTHYRSTEAVPAV

SEQ ID NO: 229334 - protein, 377 aa, unidentified
MSNVRFIGLDVHAETIAVAVAEPHGDVRSLGTIPNRPESIRKLMKKLGPAAHLRVCYEAGPTGYVVYWQLTTLGVKCEVVAPTLVPVKAGDRVKTDRRDALKLARSYRAGDLTPVWVPDAAHEALRDLVRAREAAKKDQLRARHRLGKFLLRHGRRPPTAMHAWTQAYLAWVKSAVHFDHATQEATLLDYIHEVEHVADRITRLEGAITAAVETAPIHMLAVIEALQALRGIALVSAVTIASEVGELSRFTKPRQLMGYSGAVASEHSSGERTRRGGITKAGNAHLRRVVVEAAWAYRHRPAVGPTLRKRQAPVSPEVKEIAWKAQHRLHARYRALTARGKCKQQAVTAIGRELLGFIWAIGVHVESTIDRTKRVAA

SEQ ID NO: 229335 - protein, 347 aa, unidentified
MRIIGCDYHPSWQQVCWMETTTGETGELQLAHASGETERFYRHLPGQALIGMESTGNCQWFVELATRLGHDLWIGDAAKIRACDSRQQKHDRRDAALILKLLLEGRFPRIWIPSGEEKDLRQLLMHRYKLVCLRARVKNELQHLAMNQGITKKRKLWSKAGEKVLRELPLRPWSSRRREDLFRIREMLDAQIAPLDQAVAEAAEKNERARLLMTQPGVGPITSMAFVLTMGDVNRFQRGKQVASYLGLIPREYSSGGHQRFGSISKQGNRFLRMLLVEAAQNAVRCDPRMRNEYLHRCHRKAKGVAKVAAARKLAIRLYWMLRTNQGYPEVVRVESSSRVPLVSTPA

SEQ ID NO: 229336 - protein, 348 aa, unidentified
MSQTLNAISVVGIDIGKNSFHIVGLDERGAIVLRQKWSRGQVEARFANMPPCLIGMEACVGAHHLSRKLKALGHNARLMPAKYVRPYSKGQKNDFRDAEAIAEAVQRPTMKFVATKTADQLDLQALHRVRERLVSQRTGIINQIRAFLLERGIAVRQGQRFLRAQLPTILATPPDVLSPRMVRAVQDLAADWRRLDERIEGLSNEITMLAKQDGGCERLMSVPGIGPIISSAMVAAIGSGDGFSKGRDFAAWLGLVPKQISTGDRTILGKISKRGNRYLRVLFVQAAWVVLIKPKSWERHGLRPWIEAAKKRLHHNVLAIALANKLARIAWSVLARGRAFEASKLQAA

SEQ ID NO: 229337 - protein, 370 aa, unidentified
MIVIGADTHKRSHTVAAVDAATGRLLDDQTIAARRRSFDALLIWARGHDGERVWAIEDCRHVSGALERFLLARGEAVVRVAPKLTANARSSARELGKSDVIDAVAIARAALREGLDSLPVARLAGPELEVRLLVDHRERLIGQRTALINDLRWQLHDLWPETEIPPRALIRAHWQDRVAGRLARAEQSARVRIARDELRRIRELTRAINDLERELATLTSALAPQLLAERGCGALTAAKLIGEIAGADRFATDAKLARTAGSAPIPASSGQTHRHRLDRGGNRQLNSALHRLAITKGRLDPETIAYLTRKQAEGKTRREAIRCLKRHLARRVWHLLQPDPTTTIPTSTPRRRPRSVTIHCNTPTGSLDLT

SEQ ID NO: 229338 - protein, 346 aa, unidentified
MKNTTIAIDLAKSVFEVGISNQPGRLSKRHRLSRKELARFIAEQPSSTVLMEACSSSHYWARKFIGFGHEVKLLPPAAVRPYVVRSKTDATDVKGILEASRNGDIYAVPIKSETQQQITSLHRIRSRWVATRTMRINSVRGLLREFGMVFPTGAARVGRHVGALIADAESPLPILLRGLLEEMLLEIAELEGRIRTVERHLEALASESAVVGQLRTIPGIGLLTATALVAFIGDITRFPSSRHFASYLGLTPKEHSSGSRRWLGRITKQGDVYLRTLLIHGARAVLRSAKLKSHPIPFFRWALELQARCGHNKAAVAVANKIARMVWAVWRFNKPFASSTSVMSAD

SEQ ID NO: 229339 - protein, 331 aa, unidentified
MQAILHNCCGMDVHKDSVVACILKTREPIVMERKREVVDKEIRVFGTFPDDLAGMRQWLEAEGCHHVAMESTGVYWQPIYEALEDAADGEMEILVVNARHMKNVPGKKTDMKDAEWIASLLRSGLLAGSFIPPQDVRELRQLTRYRKNVVQDVNTQKNRIEKTLQQAGFKLSTFLSDVFGVSGRNLIRVLIKNGRLSSSDVNEGTKRISKEKKAEIKRAITGRLTDKQRNFLQLQITLLDGLLAHLESIEASIKELSAKWNDDIERLSTIPGIGITSATAIIGEIGADVNKFPTAEHFCSWAGLAPGDNSSAGKKKYKNHFWQPIYQRNNL

SEQ ID NO: 229340 - protein, 395 aa, unidentified
MFIVGIDIAKCSHMVRIIDAEGKTVCRPFSIRNNYSGYNTLLERVGKVTNQKHEFIFAMETTSHYWLALYTRLRKDGWNTVVLNPIQTSAMRDILMRDAKTDSIDTLVIAETIRFGRYKPSSVPQEKLLALRELCRNRFYLIDMASDLKRKIISLLDQIFPEFETQFDSVFCKSALAVLKQYPVPERLAKAQIGKLTELLRSASNGRFGEWKAQQLKEISKNSFGIPDYTGVYSTLILLYLEQLESFLTKVSVLEKTIAELFSQFDSTLTTITGIGPVLGAVILSEIRDISCFASADKLAAYAGLNPSVKQSGKTVSCSIHMSKRGSPYLRRAIWMASTIAVQHDPMFKAYYEKKALEGLRYMTIIGHVTKKMTAVIFAIMRDSKIYQPILSVAV

SEQ ID NO: 229341 - protein, 345 aa, unidentified
MDHFAGLDVSVKETSVCIVDDTGRIVREVKVASEPEALLPVLTNLAYRFKRIGLEAGPLSQWLFSALAEAGLPVICVETRHMRAVLQAQINKTDRNDARGMAQMMRAGLYRPVHVKTLRSQKLRMLLTHRKLLQSKAIAIDNDLRGTLRNFGLKVGVVGASKFEARIRELVENQPDLAELVEPLLIVRRTLREQIGILHGRLLAIVRTDDVCRRLMTVPGVGPVVALTYRATVDVPARFRNSKAVGAVFGLTPARYQSGEIDRSGAISRCGDEMMRAMLYEAAHIMLVRSTKWSWLKAWAMKIARHRGMKKAIVALARRLAVILHRIWVDGTEFQWTREQTAATA

SEQ ID NO: 229342 - protein, 361 aa, unidentified
MAVEQSISTTIGMDLGDRYSQLCVVDADGAIVEEGRVRTEENKLRASFGSRARARVVMEAGTHSPWVSRLLEGLGHEVVVANPRQLGLISRSDRKSDRHDAQALARLGRLDPALLRPIRHRSAETLADREMLRARDALVRARTQLVNHVRSAVKVTGGRLPASGTSAFVKKVSPAIPARLRPALEPVLAMITALNEALRHYERELEALAETRHPETACLRQVAGVGVVTSLAYVLTLEDPHRFAKSRSVGAYLGLRPRQHQSGELDLQMRISKAGDRDLRRLLVQSAHYILGPFGPDTDLKRYGQRLAARGGKATKKRAVVAVARKLAVLLHRLWVTGEVYEPLRAVARKPESARAEGAAA

SEQ ID NO: 229343 - protein, 420 aa, unidentified
MKVVYQTCCGVDVHKSFLVATIIKTISGVEPSYQKKRFSTFNNSILQFKNWLIENQCRDVCMESTGKYWVPVFNLLEDDINVTIANPKWVKAVKGNKDDTKDSKWIGDLFRLGLVPGSYIPCKPIRILREFTRYRYKLTSCRTSEKNRYQNALTVCNVALDSVVSDIFGKLATSVIDYLIEQSDNSINHEEIASRLLRSLKKKSDSVIESIEGYQMTDSQKYRMRLVRAHLDYITSTINDIDTMLDSLIAPYENAVQLLCTIPGVDRNSAITVISEIGTDMTPFSNSKRLCCWAGLTPGNNESAGKKKSVRITRAGVYLKPALVQVAHAAVKSDKSPYYKQKYERIMKRRGKKRAIIAIARMILTAIYQMLSTGEAWNPTDLYKIDIPEPLKEKQKEKAIKQAKKLLIREGILSESQLAS

SEQ ID NO: 229344 - protein, 362 aa, unidentified
MNSFAGLDVSIDETAICVVDEHGEVLCRAAVPTDPAAIAKVLEPWSATMKRVGHEAGALSPWLHPELKAIGVPVVCLETRHVRASMGAQRNKTDASDALGIAHLMRTGWFRQAHIKTEASYRMRLLLTQRRNLKRKFLDIENTIRHSLKAFGIRLGKVGRGGMENAVREAVADDPMTAGLMDCMLRARHALWVEYLALHKLATQLAMRDELCRRFMAIPGVGPITALHFSSAIEDPTRFRRSRNVAAYFGLTSKRWQSGTSIDVKGRISKAGDPDVRRALYEAASAMLTRFKGADLVKSWGLKLAKTKCHAKARVAVARKLAVIMHAMWRDGTTYVGDPSADQHDIDAWNAAKVQRLSRARS

SEQ ID NO: 229345 - protein, 412 aa, unidentified
MNVRVEKACGIDVHKSFLVATILNWEGIKETKEFNTGLEDLINLREWIMARHCQRVAMESTGIYWTPLYTCLEGKVETIVANPFQIKNIPGRKNDDIDSEWIAEVCLNGQIKPSYVPPKEIREIRELTRTHVKLTQARTSFKNRVHKVLSRAGVHISGVLTDIFGKSGMIIINGLMNGKTIDQTFAEIKDKRIKIKKTEIKESLKGELSQNDIFVIKECLDSIKFLDEKIKKFDSKINQNLKGMQKEIEILMSIPGVGFTTAAAIMAEIGNIDVFSKPKKLVGWSGLAPAINESAGKSSNGHITKKGNKFLRTILVLAANSIAIGGPNKLRFFYQRIKAKKGHKKAIVALARKLASIIHHLLKFKEMYSEEEGKQKKVKLPKFIPVPEFSIDDMIGILCEAGYSVNKSAAKS

SEQ ID NO: 229346 - protein, 384 aa, unidentified
MTSNIKYVGMDVHKESISLAVMNGVGKIVMESVIETKASMILEFFDGLRGDLQVTFEEGTSAAWLYDLLKPHVTNLVVCDPRKNASMREGNQNDKIDARRLAELLRLNHLSPVYHGEHGLRSLKELVRSYLTITKDVGRIMSRVKAIYRSWAIPCTGKQVYALRHRAEWLGKITEPGVRRRAEFYYQQLDALRTVRQEVRRDLLAESKKHQAWKLLCQIPSIGPIRSAVLLGILQTPNRFRTKRQLWTYSGFGIETQSSADHRSVNGQLQRAKKQTSIRGLNRNCNHDLKSLFKGAAIVASSKPGPFQEFYTALLAKGIRPDMARLTLARKIATIVLIVWKRGACLCAGINRHEVENARVLRERTSDSPGPEFCATHREVRSEA

SEQ ID NO: 229347 - protein, 362 aa, unidentified
MSNDRTIVGLDVHAKATQAAVLEMTTGELSFRRVSGPPSEIVGYLQGLGGSVLATYEAGPMGYGLARAAAERGLDVRVCAPGSILRRPHERIKTDRRDAERLARLLIAGELSFVRVPSVQEESFRDLARCREAARGDLMRARHRLGKLLLRRDIRFPGPGSNWTQAHWKWLNGLEFDDVPSRAVLADYLTGVRALEQRRGALNDIIEGTSPESPWAQTIARLRCMRGINTVTAFGLCAEIGDFHRFAHPRTLTAYLGIVPSEHSSGEQTRRGPITKAGSPHARRLLVEAAHHYRHQPAIGMALARRQDGQDPRACEIAWRAQRRLHHQYQRLRLQRGKPANIVTVALARELAAFAWEVGQLN

SEQ ID NO: 229348 - protein, 387 aa, unidentified
MIVIGADTHKGSHALAAVDEGTGRVRGSREIKADDAGHLAALRWARGLDEARVWAIEDCRHVSRRLEQALVAAGERVVRVAPHRMGASRKGEREPGKSDQIDALAIARAVVKDGIEKFPVAYLDEAAMEIRLLLDHRNDLVADRTRTVNRLRWHLLQLAPELERSLKPGSLNQPRVLDRIDRRLRKLPAGAQVRVAREQVAQIRSLSRQANALKSELLELVKAHRPQLLAETGCGPLTAAILIGRTAGAERFCSDASFALQSGTAPIPCSSGQRQQHRLNRGGDRQLNHALHIIAITRASHDPATKAYLQRKEAEGKTTKGALRCLKRYLARRFWQVLAERPLEQSTSSEHGAAPAEPEPIAIPQRSAPRREVDRTITGPIPMVCIT

SEQ ID NO: 229349 - protein, 330 aa, unidentified
MKEYKYFYGVDVSKKTVDIVYTDKQTAVHQKFSNDPIGMDQLMDWLNQLKASTDNTLFCMEATGLYCLTLTHFLASHSIDVWVEHSSTIKKSTAFARGKNDKVDAQRIAVYATKNLDRLRLWKPMDTTLEKIKHLATLRERLVDTVKRLTVPVQEFEERGDLAMAKLLTRSMKKTLTALDKDLATVESQIIDIVGQDDNLKQLYKIITSVVGIGFVTAINLIIHTQGFSIMNDARKLACYCGVAPFEYSSGSSIRGKTKVHNMANKKIKCNLHMASITAVKHDPELKKYYERKVAEGKNKMSVLNAVKSKLLARVVSCVNNQKMYVKMAA

SEQ ID NO: 229350 - protein, 346 aa, unidentified
MDHIAIDLGSRESQVCIRTAEGQIIEERRVSTRSLGKYLTKRPKSRVVLESCAEAFSVADAAMGAGHETVVVPATLAPSLGVGERGVKTDCRDARNLSEASCRMSKLPSIHVPGQASRNRKSICNFRESLVQTRTKLINSVRGWMRSEGLGVVRSGAPTSFPVRVRTHATERSTTLPAYVEPVLVVIDKLTVEISAMDDQLEEAAESDATCRLLMTAPGIGPTVSMRYTAAIDQVTRFPNAHRLQSYLGLTPGERSSSQRKRRTGLTKAGPSKLRRVLIQAAWAARRYYKDDPVVMWSFEVEKRRGKQVAAAGLARRLAGILYAMWRDEKPYDKAHQVTRATQATA

SEQ ID NO: 229351 - protein, 396 aa, unidentified
MASNVSKRSSEGKTIEFFDDEMVDVGIDTHKKFFDVTLWSERRGAVVKRWTQPADVSITLKSLEAFAGRIRRVVYEAGPCGYALARALRQTGYTAEVIAPSRTPRSPGQQAKSDRLDSRQLAMWSAKNLLQPVQVPSEEEEADRQVFRLREQMVRKQRRTKQQIKSFLLMHGLAQPEGLAHWTNNSIEALRQLSLRAQLRLALDCLLDDLAHFQAQVARASQALYALARAKRHSRNVHAMKTVPGVGPITAMAVRTELLAPERFDNGQQVAAMVGLAPWSSQSGQTRKRRSADQRRQRTAAHVADRSRLALGRPRRLGRTTVCRTGAHYGAEEKSHWGHGTTSGDHPVAHQRHRRDLSAQTLHRSATRRAKRRQPGQTDRAKKKEAAQRSAAPLSV

SEQ ID NO: 229352 - protein, 331 aa, unidentified
MKQVSQVGVDVDSKLLVCAMQRRAGQRSPVASFSNSADGHRKFIHWVTKGGRSARVCMEATGIYSLEFALALHHAKNVEVMVVNPRAIKDFSRACLQRAKTDAVDAGMILDFLERMPFTPWQPPAPEILELRAINRRIVQLNTELTREKSRFHASEFAGASADVIAHDIEVNIRHLERRIERLNGNGMAVIRGAPTLAAKHAHLVSAKGIGEASAMRLLAELLVLPDDLAAPQWVAQAGLDPRPYESGSSIHRPRRITKVGNRHLRAALYMPALVAIQHDPNVRAFYNKLIAAGKKPLQAIVAVMRKLLHAIWGMLKHDQDFDGNKFFKIA

SEQ ID NO: 229353 - protein, 360 aa, unidentified
MEHTTIAVDLAKSVFQVAVSHKAGRVDVERRLSRERFLEYLAKQPPATVLLEACGSAHYWARRLQPFGHTVRLLPAHDVHRYVRRNKTDRTDTKGLLEAGRNDEIHAVPVKTVDQQAIASLHRLRSTWLATRTARLNTVRGLLREFGLVIPVGASHVVPQVRALLAESSDVPDLMRPSLASACDEIESIEQHMRAVERQLTTLARDRDDIKLLQTVPGVGLLTATALVALVGDARRFPTSREFASFLGLTPREDSSALRRRLGAISKQGDGYLRMLLIHGARSVLLRAKGAGVPTPFQAWARATQQRRGHNVAAVAVANKLARIVWAVWTHQRPYDAGYRPTVAAKTANNSSPQEDCTEI

SEQ ID NO: 229354 - protein, 332 aa, unidentified
MHYVGIDLHKRDLVMAVEDDRGPVGKPRRITCRDEAAIVKAFRKLRPFRAVIEASSSYRWLYDLLEPLGAVVLAHPLKLRAIVTARAKTDKLDAALLARLLRAGLVPASYVPPQRYQVLREVTRARARLVRCATLAKNQVHYLLASRNLHPPYRNVFSKAGCRWLAKQDLGMGGNLIRDELVRRLDYFDRERLALDDWLATWSETFPEVAAVKCLYGFGLYSALLVVAEIAESNRFGDARQVGAWAGLTARVHQSGGHAYHGRISKQGSRWLRWILVQAAMKVVRKDRALGNFYRRVRRRSGRNAARVAVARKLAGICWVRLKRWHAEHAAV

SEQ ID NO: 229355 - protein, 373 aa, unidentified
MPRKEAGSAPVSIKENISFISISGLPACLNPDPNSRLKDRNVENFYFIGVDISKKKLDFCVMFEGKVVHEEETANHQNAIMSLIRHLEKDYGIDGSRMLICAEHTGQYTFPLACACKAAECKLWLENPAEIKYSSGIQRGKNDKVDAKRIAVYASRFQDKVQYYERPSEDIERLKQLESERSLYVTDLAKYKGQLKDQREYMPTALYERKVKRLTALMENLEQAIQAITNEMDEVITSCPVLFRQMELLMSIDGVGRVVATNMIITTEAFTRFDDPRKFNCYAGVAPFSYSSGTSQQSKARVSHRADKVMKRLLHMAAIAVTHRNGGELKRYYDRKVAEGKNKMSVINALRAKIVARMFAVIKRNELYKPILS

SEQ ID NO: 229356 - protein, 402 aa, unidentified
MPMLSIGIDVSKGKSTVCGMKPGGEIVYAPFEVQHTREGMSELVSLLRSSGEEVRAVLESTGSYHCPVVAALLENGIFVSVVNSLRMKRFCSQSIRKVKTDRIDAMQIALYGLAYWQELQPTRLPEDTYRELQLLARQYYQMTSLLIKAKVDFNAICDQVLPGMQELMSDHAGRHKLSDFVLRYHHTTHILEMGETRFRKDYCKWAEKKGYRNCERMAALIFATAQNGIPVLPNAPSTQIVITEAIRVLHTVEASRDAILTQMQALAKTLPEYSLVREMPCIGDTLAPRLIAEIGDVRRFHSKRALIAYAGIDAPPYQSGKFCANNRHISKRGNRYLRKTGYEVMQSYVMHKPANDPIFMFIEKKRGEGKSGKLAMVAGLNKFLRVYYGKVTELYRSLPAIE

SEQ ID NO: 229357 - protein, 357 aa, unidentified
MKSQDSNYVGIDCGKKSLEVIRINSEGSYERQQFSTTEIGISKLINWLNPNDVVGLEAGSQSFRIAKSILNKGIQVIVLNPGDLATIYQSLKKTDKEDSLKIARLIQRFPIEELPTVPVPTDEEEDNRRLCSEQENWTRQLTQGKNRLHSLFTQAGLTHITKKHLRTKANRETSVALLPSRYQKEAERILKVLDLVEQNLKLIEEEIKEALRKNQTYTQTIMSMPGIGMITSLAILSYMGDCKRFSSAKQAAYYVGLVPRVDISGDSAFYGRIVNRGCHSIRRVIVQAAWSLVRCQHGGKLKEFYERLYSKKGAKKSIIAVSRKMIEVLYSMIRTGTLFDSMPEEVLYRKLAQYGLM

SEQ ID NO: 229358 - protein, 368 aa, unidentified
MKEITTHVGIDAHKKDLFVAMLVGTQATAVSWTVPNEPQAVRRLVRKLERETPGPVHVFYEAGPCGYALQRQMTTPRVRCDVIAPALIPRKPGDRVKTNRRDARKLVELGRAGVLTAVQPPTAEDEAVRDLARARDDAREDLQRCRHRLGKLLLRRGLHYAGRNWTRAHRQWIDGLAWTHAAERAVVDDYLLAIDHTESRLLELDARLAEIAETEPYREAVGWLRCFRGIDTLTAMLILAELHDFRRFASAPALMAYLGLVPGEDSSGEKHRRGRITRTGNALVRRLLVETAWHYQHRPSVGIALTRRRKGQPGRVIAIADKAQQRLCRRFRKLAAEHKPAPKIAVAIARELAGFLWAALQPARAAVT

SEQ ID NO: 229359 - protein, 315 aa, unidentified
MKKNIRNSKSPTRSTTTKLRKSDRVTIGVDLGDKTSRYCALNGAGEVLAEGAFPTTKKGVAQMFAAMAHCRIAIEVGTHSPWVSRELKRFGHEAIVANARQVKLISQSSRKNDKLDAQMLARLARMDPGLLRPIRHRSEEAQKDLLTIRIRSALLEARTGLVNAARGLTKATGERLASCDADQMNVEKLEGLPAELRESLKPLLEEVESLTEKIKECDGKIEQIARDRYPETKLLRQVSGVGPLIALTFILTIEDKERFEKSRDVGCYVGLRPKQSESGERQPELRITKEGDVYLRSFWCRERTASWRSGRRTRI

SEQ ID NO: 229360 - protein, 400 aa, unidentified
MLSIGIDVSKGKSTVCGMKPGGEIVYAPFEVQHTIEGMLELVSLLRSSCEEVRAVLESTGSYHCPVVAALLENGIFVSVVNSLRMKRFCSQSIRKVKTDRIDAMQIALYGLAYWQELQPTKLPEDTYRELQLLARQYYQMTSLLIKAKVDFNAICDQVLPGMQELMNDHAGRHKLSDFVLRYRHTTHILEMGETRFRKDYCKWAEKKGYRNCERMAALIFATAQNGIPVLPNAPSTQIVITEAIRVLHTVEASRDAILTQMQALAKTLPEYSLVREMPCIGDTLAPRLIAEIGDVRRFHSKRALIAYAGIDAPPYQSGKFCANNRHISKRGNRYLRKTGYEVMQSYVMHKPANDPIFTFIEKKRSEGKCGKLAMVAGLNKFLRVYYGKVTELYRSLPAIE

SEQ ID NO: 229361 - protein, 350 aa, unidentified
MSMLAELVEVVIGVDTHSQTHTAAVVDARTGGVLARATVTADPDGYAELVALAEQHSGLRAWAMEGAGGYGAGLARHLAAGEEMVVELDRPKRPARRAGAKSDPIDAERAARDALARTRLAEPKTGAERAALQMRLTARRAAVEAASTGQRQLLAMVITAPEPVRARFRGQTTRAMISTAARLRPGACSGDIETVTALTVLHELAGRIRFLEAEALNHEKAIRAIVRTWRPDLLELTGVGPIVAATVLTAWSHPGRCRDDAAFAMLAGAAPIPASSGKTVRYRLNRSGDRQLNRALHTVVLSRLQRDERTRAYADRRRAEGKTDREIKRCLKRYIARELYRRLESPPATA

SEQ ID NO: 229362 - protein, 346 aa, unidentified
MVIIGADLHKRTHTLVSADAVGRKAASCTVKATAAGHAEALRWARQWPERTWALEDCRQVSRRFEADLLRAGERVVRVAPKLTAGARRSARTRGKSDPIDALAAARAALREPTLPVAQLDGPARDIRLLLDHRDDLVAERTRIQNRLRWHLHELEPGREPGLRTLARMRVLDALEAQLAGSATLVARIARELVARCRELTVRINELERELAALTTVAAPVLLQLSGCGVLSAAKIIGETAGIARFRSRSAFAMHTGTAPIPVWSGNSDRHRLNRSGNRQLNSALHRIAITQLRVGGRGREYYERRLAANDTKTAAIRALRRRLSDEVFRRLRIDEFGSAVRAQQAA
